United States Patent Application Publication US 2019/0348154 A1 - sequence listing, part 109

SEQ ID NO: 408834 - DNA, 507 bp, Staphylococcus aureus
ttgactgaatttaatccaattacaacattaaaaattaatgacggagaaaaagattacgaagtagaagcaaaagtaacatttgcatttgaccgaaaagctgaaaaattctcagaagatagcgaagatgggagaaaaggagcaatgccaggattcaatgttatctttaacggtttgctagaatctagaaacaaagcgattttacaattttgggaatgtgctactgcttatttaaaaaacccaccaactcgagaacaattagaaaaagcgattgatgatttcatcactgaaaacgaggatactttgccgttattacaaggggctttggacaaacttaacaatagtggttttttcaagagggagagtcgctcgtactggatgacattgaacaaagcaccgaatatggccaaaagcgaggacaaagaaatgacgaaagcaggcatagaaatgatgaaagagaattacaaggaaatcatgggcgcagaaccttacacgattactcaaaaataa

SEQ ID NO: 408835 - DNA, 558 bp, Staphylococcus aureus
atggcgcaaaaaaactatttagcagttgtacgtccagctgaaactgacttagatccagtagaatctttattattagctgacttacaagaaggtggacatacgattgaaaatgatttagctgaaatagtacgaggcggtaaaacggactattctcccaatgcaatgtcagaatcatttaaattaacaattggtaatgtgcctggagataaaggaattgaagcagtgaaacacgctgtacaaacaggtggacagttgcgtatatggctttatgagcgtaataaacgtgcagacggtaaacatcacggaatgtttggttatgttgttccagaatcatttgaaatgtcatttgatgatgaaagtgacaaaatcgaactatcattaaaagttaaatggaatacagcagaaggtgctgaagataacttgccgaaagagtggtttgaagctgcaggtgcgcctacagttgaatacgaaaaattcggcgaaaaagtcggaacattcgagaatcaaaagaaagctagtgttgtatctgattcacacacggaagaccattctatgtaa

SEQ ID NO: 408836 - DNA, 426 bp, Staphylococcus aureus
atgtgggtatcagttgaacctgaacttacaaatcaaatatataaaagattaatctcagaccctaacattaacaaaatagttggtgatagggtctttgacgttgttcaagatgacactgtttacccatatattgttgtgggtgaatcaaacgtcactaacaacgaatctagtgcaacaatgagagaaacagttggtattgtcatacatgtgtattcacagttcgctacacaatacgaggctaagctcattttaagcgcaataggctatgtgctaaacaggactatagagatagaaaattacgaattccaatatagccgtatcgatagtcaagcagtattccctgatatagacaggtttactaagcatggcacgatacggcttttatttaagtacagacataaaaagaaaaacgaaggagtgtattaa

SEQ ID NO: 408837 - DNA, 408 bp, Staphylococcus aureus
atggcaaaagttaagtacggtgctgatagcatggttgttgaattggataagttcgataagaaaatagaagagtgggttaaaaaaggtatcgctaaaacaacgatgaagatatataacactgctgtagcattagctcctgctgacttaggatttttgaaagaaagtatagactttcgatttgagaacaacggtctaacaggagttatcaatgtaggtgcagaatatagtgtttatgttgagtacggcacaggtatttatgccactaaaggtagtcgcgctaaaaagataccgtggagttataaaggcgctaacggtaaatggcatactactaaaggacaagcgccacagccgttttggaaccctgcaattgacgcaggacgcaagacattcgagcagtatttttcatag

SEQ ID NO: 408838 - DNA, 336 bp, Staphylococcus aureus
gtgtttaacccatacgacgaattccctcacactatttctattggaagtatcaaaaaagtaggagagtatccaattatacaagagcgctttgtaagcgataaaacaattaaaggatttatggatacgcctactacatctgaacaactaaaatttcatcaaatgtcacaagaatatgacagaaacctatatgtaccttatgacttgccaatatctaaaaacaatttatttgagtatgagggtagaatctttagtattgaaggtgattctgtagatcagggcggacaacatgaaattaagttactacgacttaagcaggtgccatatggcaaaagttaa

SEQ ID NO: 408839 - DNA, 351 bp, Staphylococcus aureus
atgactctttatgaagatgttaaacttttactcaagaaaaatggagtggaagttaaaagtgatgaagaagaaatatttaagatggaagttgacggaatactagaagatgttagggatataacaaacaatgattttatgaaagatggtcaagtcatttatccttactcaatcaaaaagtatgtcgcagacgtcctagagtatcatcaacgacctgaagttaaaaagaatttaaagtcaagaagtatggggacagtgtcgtacacttataacgatggtgtccctgattacattagtggagtattaaacaggtataaacgagcaaagtttcatccgtttaaaccaataaggtag

SEQ ID NO: 408840 - DNA, 144 bp, Staphylococcus aureus
atggctaatcctgcagaagagattaaggtaaaaaaagacaatatgactattactgttacaaagaaggcatttcactcttattacagtcttgtcggttacaaagaggttaaatcacgccgtactacgtctgataagagcgagtga

SEQ ID NO: 408841 - DNA, 915 bp, Staphylococcus aureus
atggcaactccaacatacacgccaggcaatgttattttatcggattttaaaaacggcgttattccagcagaacaaggtactttaatcatgaaagacattatggctaattcagcaattatgaaattagctaaaaatgagccaatgacagcacaaaagaaaaaatttacttacttagctaaaggtgtaggtgcttactgggtatcagaaacggaacgtattcaaacttctaagcctgaatatgcacaagcagaaatggaagctaagaaaattggtgtaattattccgttatcaaaagagtttcttaaatggactgcaaaagatttctttaatgaggttaaacctctaattgcagaggcattttacaaagcgtttgaccaagctgttatctttggtactaaatcaccttacaacacttcaactagtggtaaaccgcttgttgaaggcgcagaagagaaaggtaacgttgttacagatactaataatttatacgtagacctttcggcattaatggctactattgaagatgaagagttagatccaaacggagtattaactacacgttcattcagaagtaaaatgcgtaatgctttagatgctaatgacagaccattatttgatgctaacgggaacgagattatgggattaccactatcttatactggagcggatgtatacgacaaaaagaaatcgttagcactaatgggtgattgggattacgcacgttacggtatcttacaaggtattgagtatgcaatttctgaagatgccacgttaacgacgttacaagcatcagatgcttctggccaaccagtatcattatttgaacgtgatatgttcgctttacgtgcgacgatgcatattgcatacatgaacgttaaaccagaagcgttcgcaacgcttaaaccaactgaatag

SEQ ID NO: 408842 - DNA, 585 bp, Staphylococcus aureus
atgaatatcgaagaagttaagtctttttttgaagaacacaaagacgataaagaagtaaaagattatctaaacggacttaagacggtgtctgttgatgacgttaaaggctttttagatacagaagaaggtaaacgattcattcaacctgaattagatcgttatcattcgaaaggattagaatcatggaaagagaaaaatcttgagaatttaatcgaacaagaagtacagaagcgtaatcctgagcaatcagaagaacaaaaacgtattagcgctcttgaaaaagagttagaaaaacgcgacgcagaggcaaaacgtgagaagttaagaagtaacgcgctaggtaaagcgcagcaactaaatttaccaacatccttagttgatagatttttaggcgattctgatgaagatactgagcaaaacttaaaagctttaaaagaaacatttgacaagtatgttcaagaaggtgttgagtctaaatttaaatcgagtggaagagatgttaaagaatcacaaaatcaagatttagacccttcaaatgtaaagtccattgaagaaatggcgaaagaaatcaatattagaaaataa

SEQ ID NO: 408843 - DNA, 951 bp, Staphylococcus aureus
atgacaaatcccaaaataaccaatcagaatgatattgatgagtatatcgagggtttaatctctaaagcagaaaaaccaatagaacaactatttgctaagcgacttaaagagatcaaacaaatcatcgcagatatgtttgaaaagtatcaaagtgatgatgtgtatgttacatggactgaattcaataaatacaacaggctcaataaggagttaactcgtataggtacaatgttgactgatgactataggcaagtagctaagatgattcagaagtcacaagaagatgcttatatagaaaaattccttatgagcctttatttatatgaaatggcgagtcaaacatctatgcagtttgatgttccgagtaaagaggtaatcaaatcagctattgaacaacctattgagttcattcgtttaatgccaacactacaaaaacatcgtgatgaagtattgaaaaagatacgtatgcacattacacaaggtattatgagtggagagggttactctaagatagcaaaagcaatacgcgatgatatcggcatgtctaaagctcaatcattgcgtgtggctcgtacagaagcaggtagagcaatgtcacaagctggacttgatagtgcaatggttgctaaagataatgggttgaagatgaagaaacgttggcatactaccaaagatacacgtacacgcgatactcatcgccatttagatggtgaatctgtagaaatagaccaaaactttcaatcaagtgggtgcgttggacaagcgccaaagctatttatcggtgttaacagtgcgaaagaaaatatcaactgtcgttgtaaattactttattacattgatgaggatgaattacccactgtgatgagagtgcgtaatgataatagtgaaaatgaagttataccattcatgaattatcgtgagtgggaaaaacacaagaggaaaaagaaataa

SEQ ID NO: 408844 - DNA, 1425 bp, Staphylococcus aureus
atgacattgtataagttaatagatgatattgaagcacaaggaatattgcctaagcatattgaggctctaatagagtcacataaagacgatagagagagaatggttaatctctataatagatacaagacacatattgactatgtaccaatattcaaacgtcgaccaattgaagaaaaagaagattttgaaactggtggaaatgtaaggcgattagacgtgtctgttaataacaaacttaaaaactcttttgacagcgaaattgttgatacacgtgttggttatttacatggtgttcctgttacttatgatttagatgaaaacgcagaaaaaaacgaaaagttgaaaaagtttataaccaactttgccattagaaacagtgttgatgatgaggattctgaaataggtaaaatggcagcaatttgcggatatggtgctaggttagcatatattgatacgaatggtgatattaggattaagaatataaatccctataatgttatttttgttggcgacaatattttagaacctacgtactcgttgcgctacttttatgaaaaagatgatgataatggcactgattatgtgtacgcagagttttacgatgatacttattattatgtatttcgaggagaaggtattggcgctttgcaagaagttggacgatatgaacatttatttgattacaatccattgtttggtgtacctaacaacaaagagatgataggagatgctgaaaaagttattcacttaattgacgcatatgatttaacaatgagcgatgcatcaagtgagattagtcagacacgtttagcataccttgtgttacgcggtatgggtatgagcgaagaaatgattcaagaaacacaaaagagtggcgcatttgagttgttcgacaaagatatggacgttaaatacttaacaaaagatgtaaatgacacaatgattgagaaccatttagatcgaatcgaaaagaatatcatgcgttttgcaaagtcagtaaactttaattctgacgagtttaatggaaatgtacctatcattggaatgaaacttaagcttatggctttagagaacaagtgtatgacgtttgagcgtaagatgacagctatgttgaggtatcaattcaaagttattttatctgcattaaagcgtaaagggtacaacttaaatgatgatagttatttaaatctgatatttaagttcactcgaaacattccagttaataagttagaagaatcacaagtgctaattaaccttaaagggcaagtttcagaacgaacaaggttgggacaatcacaactagttgatgatgttgattacgaattagacgaaatggaaaaagaaagtcttgaatttaatgacaaattacctgacatatatgaaggtgacgcaaatgacaaatcccaaaataaccaatcagaatga

SEQ ID NO: 408845 - DNA, 1224 bp, Staphylococcus aureus
atgaataaacttaaatctttatatacggacaaacaaattgaaatattgaagcaaacgcaaaaacaagattggtttatgttaattaatcacggagcaaagcgtacaggtaaaacaatattaaacaatgacttatttttacgtgagttaatgcgtgtgcgaaagatagcagacgaagaaggaattgagacacctcaatatatacttgctggtgcaacattaggtacgattcaaaaaaacgtactaatagagttaactaacaaatatggcattgagtttaattttgataaatataattcattcatgttatttggcgttcaagtggttcagacaggtcacagtaaagtaagtggtataggagctatacgtggtatgacatcgtttggtgcatatatcaatgaagcgtcgttagcgcatgaagaggtgtttgacgagattaagtcacgttgtagtggaactggtgcaagaatattggtagataccaaccctgaccatcccgagcattggttgttgaaagattatattgaaaatacagatcctaaagcaggtatactgagtcaccaatttaagctcgatgacaataactttcttaatgatagatataaagagtctattaaggcttcaacaccatcaggtatgttctatgaacgtaatatcaacggtatgtgggtgtctggtgacggtgtagtatatgccgactttgatttgaatgagaatacgattaaagcagatgaactggacgacatacctatcaaagaatactttgctggtgtcgactggggttacgagcactatggatctatagtgttaataggacgaggtatagatggtaacttttattttattgaggagcacgcacaccaatttaagtttattgatgattgggtggttattgcaaaagatattgtaagtagatatggcaatattaatttttactgcgatactgcacgacctgaatacatcactgaatttagaagacatagattacgtgcaattaacgctgataaaagtaaactatcgggtgtagaggaagttgctaagttgttcaaacaaaacaagttacttgttctttatgataatatggataggtttaagcaagaggtatttaaatatgtttggcaccctacaaacggagagcctataaaagaatttgatgacgtgttggactcgttaagatatgccatatacacacatactaaacctgaacgattaaggagggggaaatga

SEQ ID NO: 408846 - DNA, 495 bp, Staphylococcus aureus
ttgattaaattaacaccgaagcaagaaaagtttgtgctaggactcatagagggcaagagccaacgaaaagcatacattgacgcagggtattcgactaaaaataaaggtgaagcatatattgatatgcaagcaagtagaatagcgaaaaacgataaggttatgtcaaggtacgaagaattgcgtcaagaagtagctgaagaatctaaatggacacgccaaaaggcttttgaagaatatgagtggctaaagaatgtagctaagaatgacattgaaatagagggagtgaagaaagcgacagctgatgcattcctcgctagtttggacggcatgaatagaatgacgttaggcaatgaagttttagctaacaagaaaatagaaactgaaattaagatgcttgagaagaagattgaacaaatagataaaggtgacagtggaacagaagataaaatcaaacaacttcacgatgcaataacggaagtgatcgtcaatgaataa

SEQ ID NO: 408847 - DNA, 402 bp, Staphylococcus aureus
atgtatagcaaagagtcaatagttaatatgataggcacacataaaatgaagtgtaatgtgttagctgatgtaataccggaatatgatagcaattcaatcgcacaatatggcatacaagcaacgttaccaaaaccacaaggggaaaactcaagtaaggttgaagacgttgttgtgaggcttgagagagcaaataaaaggtatgcgcagatgttaaaagaggttgagtttataaatcaatcacaacagagattagggcacgttgacttttgtttcttagagttattgaagaaaggttataacagggacacaattatcaagaagatgcctaactctaaattgaatagaaacaacttcttagcacgccgtgatgagttggcagaaaagatttatctactacagtga

SEQ ID NO: 408848 - DNA, 174 bp, Staphylococcus aureus
atgactaaacaaatactaagattattattcttactagcgatgtatgagctaggcaagtatgtaactgagcaagtatatattatgatgacggctaatgatgatgcagaggcgccgagtgacttcgcaaagttgagcgatcagtctgatttgatgagggcggaggtgtcagagtag

SEQ ID NO: 408849 - DNA, 207 bp, Staphylococcus aureus
atgacacaatacctagtcacaacatttaaagattcaacaggacgtaagcatacacacataactaaagctaagagcaatcaaaggtttacagttgttgatgcggagagtaaagaagaagcgaaagagaagtacgaggcacaagttaaaagaaatgcagttattaaattagggcagttgtttgaaaatataagggagtgtgggaaatga

SEQ ID NO: 408850 - DNA, 246 bp, Staphylococcus aureus
gtgagtgacatgttagaaatatttttcatagggtttggtgtttatctattttgtcgcataggtattatttttctcaagagtaaaaagactatacacacaaacctatatgaaatgttgttgattgctactatctttgtgacatctacatttgctgataaacatcaaaagacgcatatcttaatagcatttttagtaatgttttttatgagtaagctcaaacaagttcaagggagctatgaggaatga

SEQ ID NO: 408851 - DNA, 249 bp, Staphylococcus aureus
atgaataaccgtgaacaaatagaacaatccgttataagtgctagtgcgtataacggcaatgacacagagggattgctaaaagagattgaggacgtgtataagaaagcacaagcgtttgatgaaatacttgagggtttacctaatgctatgcaagatgcactcaaagaagatatttatcttgatgaagcagtagggattatgacgagtcaagttgtctataaatatgaggaggaacaggaaaatgactaa

SEQ ID NO: 408852 - DNA, 276 bp, Staphylococcus aureus
atggaacacggttcaaaagaatattacgaaaagcaaagtgaatactggtttgatgaagcaagcaagtttttgaagcaacgtgatgagcttattggagatatagctaagttaagagagcgcaacaaagagctggagaagaaagcaagtgcatgggataggtattgcaagagcgttgaaaaagatttaataaacgaatttggcaaagatggtgaaagagttaaatttggaatggaattaaacaataaaacttttatggaggaagacactaatgaataa

SEQ ID NO: 408853 - DNA, 405 bp, Staphylococcus aureus
atgaaaatcaaagttaaaaaagaaatgagattagatgaattaattaaatgggctcgaagtaatccggagttatcaaagggcaaaaatttttttacaacaggtaacggcgatggcatcgttcgttttcaaaaggacacaaatgagtgtacgacatcagtctgtgtgccacttgatgctcctttcgaagtcgaagtggaagaggaaatcacagaagagactaagtttgataggttgtttgaagtattcgaggtctcagaaggagaatatagtcctacatcaaataggaatactagtataaacgaaagtttaaatgacgacagatgtttccctatcaaagcgttctatatcttaaacgacgacctaactatgacgttaatctggaaagatggggagttgattaaataa

SEQ ID NO: 408854 - DNA, 165 bp, Staphylococcus aureus
gtggcacatatccatgtagtaaacggcacttattactttcacgggcatatcgtaccaggttggcaaggcgttaaaaagacatttgatacacctgaagagcttgaaacatatataaaacaacatggtttggaatatgaggaacagaagcaactaactttattttag

SEQ ID NO: 408855 - DNA, 663 bp, Staphylococcus aureus
ttgaatacaatagaatcacagtttgataaggttgcagaagattacgatttcgtgaatgagcttttgaatgattattcattctttgtgtctaatatgtctccaaagaaaggcagagcattagatatcggatgtggctcgggtttgttagtggagaaattagcaagttattatgatgaagtggtagggattgatatttctaatcaaatgctcgatcttgccaaatctaaacgtcaactaacaaatacggtctatctgaatatgaatgcagaacaacttaattttaatgagaagtttgattttattgtaagccgaacaacctttcatcatttggatgatatagccagcgtaatacagcaaatgaaggaactgttgaatgaggaaggaagaatagttattcttgataatgtatctgaagtcgagacaccgcctacctatgtttataaattaggggcaatccaagagtttttaccgcattgtttcaaatttggaataaaaaatgcgattagaatttataatcacaacacatctaaatcatggcttgagcatttagcttcagataagtacctatctgaacaaaattattacgatttatatgaaaagttgttgcctggatgccaattccataaaatgggttgggcaatgggggttgtctggacaaaataa

SEQ ID NO: 408856 - DNA, 732 bp, Staphylococcus aureus
atgaaccagaaaaaccctaaagacacgcaaaattttattacttctaaaaagcatgtaaaagaaatattgaatcacacgaatatcagtaaacaagacaacgtaatagaaatcggatcaggaaaaggacattttaccaaagagctagtcaaaatgagtcgatcagttactgctatagaaattgatggaggcttatgtcaagtgactaaagaagcggtaaacccctctgagaatataaaagtgattcaaacggatattctaaaattttccttcccaaaacatataaactataagatatatggtaatattccttataacatcagtacggatattgtcaaaagaattacctttgaaagtcaggctaaatatagctatcttatcgttgagaagggatttgcgaaaagattgcaaaatctgcaacgagctttgggtttactattaatggtggagatggatataaaaatgctcaaaaaagtaccaccactatattttcatcctaagccaagtgtagactctgtattgattgttcttgagcgacatcaaccattgatttcaaagaaggactacaaaaagtatcgatcttttgtttataagtgggtaaaccgtgaatatcgtgttcttttcactaaaaaccaattccgacaggctttgaagcatgcaaatgtcactaatattaataaactatcgaaggaacaatttctttctattttcaatagttacaaattgtttcactaa

SEQ ID NO: 408857 - DNA, 783 bp, Staphylococcus aureus
atgagcaatttgattaacggaaaaataccaaatcaagcgattcaaacattaaaaatcgtaaaagatttatttggaagttcaatagttggagtatatctatttggttcagcagtaaatggtggtttacgcattaacagcgatgtagatgttctagtcgtcgtgaatcatagtttacctcaattaactcgaaaaaaactaacagaaagactaatgactatatcaggaaagattggaaatacggattctgttagaccacttgaagttacggttataaataggagtgaagttgtcccttggcaatatcctccaaaaagagaatttatatacggtgagtggctcaggggtgaatttgagaatggacaaattcaggaaccaagctatgatcctgatttggctattgttttagcacaagcaagaaagaatagtatttctctatttggtcctgattcttcaagtatacttgtctccgtacctttgacagatattcgaagagcaattaaggattctttgccagaactaattgaggggataaaaggtgatgagcgtaatgtaattttaaccctagctcgaatgtggcaaacagtgactactggtgaaattacctcgaaagatgtcgctgcagaatgggctatacctcttttacctaaagagcatgtaactttactggatatagctagaaaaggctatcggggagagtgtgatgataagtgggaaggactatattcaaaggtgaaagcactcgttaagtatatgaaaaattctatagaaacttctctcaattag

SEQ ID NO: 408858 - DNA, 378 bp, Staphylococcus aureus
atggataaacaagttagaaatacaacagaaattgtacgtttggcgaagcagaaatcaaaaaagacaagggaaaaagtagacaaagcgatttctaaattttcgattgaaggtaaagttattaattttaattcaatagcaaaggaagctaatgtttctaaatcatggctttataaggaacacgatattaggcaaagaatcgaatcccttcgtgagcgtcaaataacagcaaatgtagtctcaaaacccaagaaaagttctcgttcggaggaaatccttattaaaaccttaaaaagaagagtaatggaattagaaaaagaaaataaaaaattacagaaccaaattcaaaaattatatggagatctgtataataaagaataa

SEQ ID NO: 408859 - DNA, 1893 bp, Staphylococcus aureus
atgaatgcttctagtaaaaggaaaattattagtcagagtgagattagcaaaaaaatagctgtaatgaatgaagaaatgcaggggttttgggctaataatagttgggatataagaaaatgtccacatccttctgccatagaattaagtaagaatcctgctttaaggaatcgttgggttcgttttgaacgtgttaaaaatctgtggttaagaacagaattgaaatatttttatttttaccatttaaacaatggaatatggaatgcaaaaactgtctggattagaaaaggaacagtaattaataaaatgttagatttcttagatttaaagtatcctagcattacttcaattactgaagttcctattgaaaaagcaatgacggagtatagaacttatttgacaaaacggggtgttagaattaccactactaattataagattactgctaatcaagaaaaaacacctgtaaaagctaattcctactatgttactaatctaaaacaatttatggagttttatgagaacttttattttgatggagaggagtgggataaagacgtttgggatagacgtaacttacctttgccagatgataaggttaacccaacacaatatgaatatacaattaactttaaagggtttcggaatacatattttaaacaacttgtaaaaagatattgtaagttgagattgaacgtggatagcttttcctatgtaagtgatattgcccaaagacttaaagagttctttaattttctggacatgaaatttaaacaagttcagagagtacaccaattaacgagagtggaaattgaagcatatttaagtgaactaaacatgatgggaataaaacctagtacaataactgggaggatctctatattggaaggactatttagtacccttcttaggctagaatgggatgatgttccttccaaaatattaatttattctgaggactatccgaaaataccaagagcaaaaccacgctttatagatgaattcgtcctagagcaattgaacagtcatcttgataaattacccgaatatatagctacgatgactatgattgttcaagaatgtggaatgaggataagtgaattgtgcaccttgaaaaaaggctgtctattagaggacaaagatggagatttctttttaaagtattatcaatggaaaatgaaaaaggagcatatagttccaatatctaaagaggtagctttacttattaaagttcgggaagataaagtttcagaggaatttccagatagtgaatacctctttccaagaaaagatggatcgccattaaaacaagaaacatttagaggtgagttaaataaattagcttatgagcaaaatatagtggataaatcaggtgagatttatagattccatgcccatgcctttcgccatacagtaggaacaagaatgattaacaacgggatgccccagcatattgtgcagaaatttttggggcatgaaagcccagaaatgacaagcagatacgctcatatctttgatgaaactctaaaaaatgaatttactaaatttcaggaaaaactggttaccaataatggagatgtgcttgatctagatgaagataatgaagtcgatgatgtagagcttcaatggttcaagaaaaatataaatgcacaagtgcttccaaatggttattgtagattgccagtagtagcaggtggttgtccacatgcgaatgcatgcttagattgcactcacttctgtaccagtaagcaattcttaccacagcacgaagaacagttagagcgtacagaagagttattagccatagctaaggataaacaatggcaaagacaagtagagactaatagccgtgttaaagagcgtttagaacaaatcattggaagtttgacggggtaa

SEQ ID NO: 408860 - DNA, 1086 bp, Staphylococcus aureus
gtgaaggttcaaaggatagaagtggagaataagccgtatccattgtatttattactagataaagaataccagctaatagaaccagtaatgaaatttattaaatacttagataatactggtaagtctcctaataccattaaggcatactgctatcatttaaagttgctgtacgagttcatggaacagagaggtgttattcttaatgatattaactttgagttgttagcagacttcgtaggttggttgagatatccttcagcatcaaatgtaattgatcttcagtcaaaaaaagccataagagaagaaacgacagtgaatacaattttaaatgtagttatgagttttcttgattatttaagtagattaggagaatttaaatcaattgatgtatttaaacaagcaaagggaagaaatttcaaaggatttttacatcatgttaataagggtagataccaaaagaatgtcttaaagttaagggttaaaaagaaacagataagaacattgagatcaaaggaagttaagcaaattattgatgcttgtcatacgaaaagagataaattaattttaatgcttatgtatgagggtggtttaagaatcggtgaagtgttatcgcttaggcttgaagatattgtcacttgggacaatcaaatccatttaacacctagagatgttaatgttaatgaagcttatattaaattaaggaaggaaagaacaatacatgtgagtaaagaacttatgtcactttatacagattacttgatatatgagtatagtgaggaattggagcatgattatgtttttatttccttaaaagaaggctattttgggaaaccactaaagtaccaaagtgttcttgatctagttagaagaatagttaaaaggactggaatagaatttacatcacatatgcttcgccacactcacgcaacgcagctaattagggaaggatgggatgttgcgttcgttcaaaagagattaggtcacgcacatgttcagacaacgttaaatacctatgttcatctttcagatcaggatatgaaaaatgagtttaataaatacctcgagagaaaggagcataagaaatga

SEQ ID NO: 408861 - DNA, 726 bp, Staphylococcus aureus
atgaaaaagaacatcatgaataaattagttttatcaacagcattgttacttttaggaactacatcaacacaacttcctaaaacaccaatcagtttttcatctgaagcaaaagcctataatattagtgaaaacgagactaatatcaatgagttaataaagtattatacacagcctcatttatcactatccggaaaatggttgtggcaaaaacctaatggtaccattcatgcaacattacaaacgtgggtttggtatacgcatattcaagtattcggccctgaaagttggggaaacattaatcaattaagagataaatatgtagatatatttggaactaaagacgaggatacagtggaaggttattggacttatgatgaaacatttactggtggtgttacaccagccgccacttcatctgataagcattataaattatctttaaaatatagagataaactacaaactatgattggtggacttgagttttaccaaggtaacaaaccagtaataactttaaaagaactggatttccgcgttcgtcaaactttaattaagaacaaaaaactatataacggagaatttaataaaggtcaaattaaaattacaggtggtggtaataattatacgatcgatttaagtaagaaattaaaattaactgacacaaatcgttatgttaaaaatcctcgaaatacagaaattgaagtcattcttgaaaaatctcgttag

SEQ ID NO: 408862 - DNA, 492 bp, Staphylococcus aureus
ttgttgacataccaacataaggttctagatgatcaggtaccagatatactatttatagagcgatgctatcaattcttaaaaaacaaagggaaaatggcaattgtattgccggatagtgtgttaacaggtccgaaattacagtacgttagaaactatatcctgaaacgttttaaagtagtaggagtagtttctttaccatatgaaacgtttattccacatggtgccaatgttaaagcatcaatacttttacttcaaaaactagattctaaaacaatggaagaattaaatacagatggctacgaatctttcatggtagatatagagaaaattggttatcagggaaataagaatggtacattaatttataaaattgatgaaaaaggtcagtacatattggatgaaaatggaaataaaatattagatgaagaaataagtgaagcattagaaggatggactgagtacgaagcagtaaatgaggtgtggagttcatga

SEQ ID NO: 408863 - DNA, 1308 bp, Staphylococcus aureus; identical to SEQ ID NO: 407690

SEQ ID NO: 408864 - DNA, 174 bp, Staphylococcus aureus
atgaagatgatttatccaacttttaaagacattaaaactttttatgtttggggttactataaaaacgagcaaattaagtggtacgtagacaagggtttaatcgataaagaagaatacgctttaatcactggagaaaaatatccagaggcaaaagatgaaaagtcacaggtgtaa

SEQ ID NO: 408865 - DNA, 597 bp, Staphylococcus aureus
atgactgattcaggcggacgtgttaaaccgttaccaatacagaacccagcatatctaagtgatattacggaagttggtcattactatatctatacgcaagacacacaaaatgcgttagatttcccgttaccgaaagcgtttagagatgcaggttggttctttgatgtactgcctggacactataatggtgctctaagacaagtacttaccagaaacagcacaggtagaaatatgcttaaattcgaacgtgtcattgacattttcaataagaaaaacaacggagcatggaatttctgtccgcaaaacgccggttattgggaacatatccctaagaatattacaaaattatcagatttaaaaatcgttggtttagatttctatatcactactgaagaatcaaaacgtttttctgacttccctaaagattacaaaggtattgcaggctgggtgttagaagtaaaatcaaatacaccgggtaacacaacacaagtgctaagacgtaataactttgcttctgctcaccagtttttcgttagaaactttggtactggtggtaatagtggttggagcataatagaaggtaaggaggttgaataa

SEQ ID NO: 408866 - DNA, 1824 bp, Staphylococcus aureus
atggtagtagataatttttcgaaagacgataacttaatcgagttacaaacaacatcacaatataatccaattattgacacaaacatcagtttctatgaatcagatagaggaactggtgttttaaattttgcagtaactaagaataacaagccgttatcaatcagtaaacataatgcgatgactagtattgtgcttaagacggataactttgacgatgaacacggtgcttatattagtgatgaacttacaattgttgatgcaattaacggacgaatgcaatacgttatcccaaacgagttcttaaaatacactggacgcatacatgcacaagcttattttactcaaaacggtagcaataacgtaattgtagagcgtcaatttagcttcaatatcgagaatgatttaattagtaattttgacggtaaaacaaagctagtttatatcaagtcaattcaggacttaacagaaagtgttaaagaagaagttgaggacttaaagaaaagtttaagtgatacaaaatcgttggttactgaaattgatagtcgtattaatcaaggtattcaaagattagaaatcaaacaaaatgaagcggtacagatgattacaacaacacaagataaagccgttcaatatataaatagcgagttccagaaaattgttgataaagagcaagcgatttttgaacgtgttaacgaagttgaacaacaaatcaatggcgctgaccttgttaaaggtaattcaacaacaaattggcaaaagtctaaacttactgatgattacggtaaagcaattgaatcgtctgagcagtccatagatagcgttttaagcacagttaacacatctaggattattcatattactaacgcaacagatgcgccagaaaaggcggatataggcaccttagagaagcccggacaagatggtgttgatgacggttcttcgttcgatgaatcaacttatacatcaagcaaatctggtgtgttagttgtttatgttgttgataataatactgctcgtgcaacatggtacccagacgattcaaacgatgagtacacaaaatacaaaatctacggcacatggtacccgttttataaaaagaatgatggaaacttaactaagcaatttgttgaagaaacgtctaacaacgctttaaatcaagctaagcagtatgtagatgataaattcggaacaacgagctggcaacaacataagatgacagaggcgaatggtcaatcaattcaagttaacttaaataatgcgcaaggcgatttgggatatttaactgctggtaattactatgcaacaagagtgccggatttaccaggtagcgttgaaagttatgagggttatttatcggtattcgttaaagatgatacaaacaagctatttaacttcacaccttataactctaaaaagatttacacacgatcaatcacaaacggaagacttgagcaacagtggacagttcctaatgaacataagtcaacggtattgttcgacggtggagcaaatggtgtaggtacaacaatcaatctaactgaaccgtacacaaactattctattttgttggtaagtggaacttatccaggtggcgttattgagggattcggactaaccgcattacctaacgcgattcaattgagtaaagcgaatgtagttgactcagacggcaacggtggcggtatttatgagtgcttactatccaaaacaagtagcactactttaagaatagataacgatgtgtactttgatttaggtaaaacatcaggttctggagcgaatgcaaacagagttacgataaataaaattgtggggtggaaataa

SEQ ID NO: 408867 - DNA, 378 bp, Staphylococcus aureus
atgaaaatcacagtaaacgataaaaacgaagttatcggatacgttaatactggcggattacgcaatagtttagatgtagatgataacaatgtgcctattaaatttaaagaagagttcgaacctagaaagtttgttttcactaacggcgaaattaaatacaatagcaatttcgaaaaagaagacgtaccgaatgcatcaaaacaacaaagtgaatcagatttgagtgatgaagaacttcgcggaatggttgcaagtatgcaaatgcagatgacgcaagtgaacatgttgacaatgcaattgacgcaacaaaacgctatgttaacacaacagttgaccgaactgaaaactaacaaaacaaatactgagggggacgtttaa

SEQ ID NO: 408868 - DNA, 177 bp, Staphylococcus aureus
atgatgaagatgatttatccaacttttaaagacattaaaactttttatgtgtggggttgctataaaaatgagcaaattaagtggtacgtagacatgggtgtaatcgacaaagaagaatatgcattgatcactggagaaaaatatccagaaacaaaagatgaaaagtcacaggtgtaa

SEQ ID NO: 408869 - DNA, 537 bp, Staphylococcus aureus
ttgtgcgtttctaatcattattcctttaggtttttcgagtcgtcgattaccttctactataaagtgataaatatattctggataattaacctcttggctagaaatagtgtactttatagttgttacatctttccaaattggaacttttttattatttttttcgttatcatcactatcatcttctggtttaggtgccggcgtagatttctccggatgatatggtggtctaacaaaatatttaactcctccacctggtccatcatgataagagtgtttgattttatacggcggacttcctgttgcattatttgtataccagttttgatccacaccataccaatagtcttttgtgcatggccctactacaatgttcacatgacctgcccaaccaccagtccaaacaccccagtcgcctggttgtggtacaaagtcttttgtatttctaattatcttgaaatctctacctctataattagatttctgagccatagcatcagcatttccccatgttctaaatccccaatatttatcgagtaa

SEQ ID NO: 408870 - DNA, 231 bp, Staphylococcus aureus
atgtttgaaaaattcgacagaatagaagatagtcttagagcgcaagaaaagatttatgacaaattagatagaaattttgaagaattaaagcgcgacaaggtagaagatgaaaagaataaagaaaagaatgccaagaatattagagacataaaaatgtggattctcggtttggtagggactatcttcagtacgattgtcatagctttactaagaactatttttggtatttaa

SEQ ID NO: 408871 - DNA, 306 bp, Staphylococcus aureus
atggaattaatagaaagtcacggtataaccgctggaatggtttctaagagagtaaaagacggttgggaactacatgaagcaatggacgcaccagaaggtacgcgtttaagcgagtacagagaaaagaaaacaatagaaagactggaacaagctagactcgaacgcaaattggaaagaaagcgaaagagagaggctgagctaagaagaaagaagccacacttgtttaatgtacctcagaaacatccaagaggacgttatgcgtgctacctgatggaaaacgacatattcgtgaaagttaagaagtag

SEQ ID NO: 408872 - DNA, 264 bp, Staphylococcus aureus; identical to SEQ ID NO: 407195

SEQ ID NO: 408873 - DNA, 144 bp, Staphylococcus aureus
atggcttatcaaagtgaatatgcattagaaaatgaagtacttcaacaacttgaggaattgaactatgaaagagtaaatatacataatattaaattagaaattaatgaatatctcaaagaactaggagtgttgaaaaatgaataa

SEQ ID NO: 408874 - DNA, 1203 bp, Staphylococcus aureus
atgaataagcagacaaatactccagaactaagatttccagagtttgatgaggaatggaaaaaaaggaaattaggtgaagtagtaaattataaaaatggtggttcatttgaaagtttagtgaaaaaccatggtgtatataaactcataactcttaaatctgttaatacagaaggaaagttgtgtaattctggaaaatatatcgatgataaatgtgttgaaacattgtgtaatgatactttagtaatgatactgagcgagcaagcaccaggactagttggaatgactgcaattatacctaataataatgagtatgtactaaatcaacgagtagcagcactagtgcctaaacaatttatagatagtcaatttctatctaagttaattaatagaaaccagaaatatttcagtgtgagatctgctggaacaaaagtgaaaaatatttctaaaggacatgtagaaaactttaattttttatctcctaattacactgaacaacaaaaaataggtaatttcttcagcaaactcgaccgccagattgagttagaagaagagaaacttgaactcttagagcaacaaaagcgtggatatattcagaagattttttctcaagatttaagatttaaagatgaaaatggaaacagttatcctgattggtctattaaaaagattgaagatatttctaaagttaataaagggtttactccaaatacaaaaaatgataaatactgggatgaattaaatgaaaattggttatctatagcaggtatgacacagaaatatttgtataaaggaaataaaggaattactgaaaaaggtgcatcaaagcatgtaaaagtagataaagatactctaataatgagttttaaattgactttaggtaagttagctatagtaaaagagcctatctatacaaatgaagctatatgccatttcgtatggaaagaaagtaatgttaatactgagtatatgtactactatttaaattctataaatataagtacttttggtgcacaggcagttaaaggagtaacattaaataacgatgcaattaatagtattatagtaaagttaccagtgatacaagaacaaaataaaatagcatactttttcaataaattagataaattaattgaaaaacaatcttctaaagtagaattattaaaacaacgcaaacaaggatttttacagaaaatgtttgtttaa

SEQ ID NO: 408875 - DNA, 498 bp, Staphylococcus aureus
atgaaactaagagcattagagtatagtgatttactttttgttcatgaattaaataatgaatattctattatgtcttattggtttgaagaaccatatgaatccttaacggaacttcaatatttatttgataagcatttattagatgaatcagagagacgttttattgttgaagatgaaaatcaagtcgtaggtattgttgaattagtagaaattaattacatccatcgtaattgtgaaatacaaataattattaaacctgagttcagtggtaaaggttatgcaaaattcgcattcgaaaaagcgataaattatgcattcgatatattaaacatgcacaaaatttatctatatgttgatacagataacaaaaaagctgtgcatatatacgagtcacaaggatttaaaacagaaggattactcaaagagcaattctacactaaaggtaaatataaagatgcctattttatgtcattattgaaatctgaatatattttgtag

SEQ ID NO: 408876 - DNA, 411 bp, Staphylococcus aureus
atgaaaagattaatgtatagttcagcgctctatacactattagggttattaagtggtctattttatagagaaatgacaaaagcggaagattttagcggtttttctcaattaaatgttacacatacacatttattagtactaggtacaattatgttcttaattttcatgattatcgagggccaattcaaattaacaactcatacaaagctgtttaacagtttcttttatatataccatttaggtgtgcttgttactgtggcaatgcaattcgtgaacggtatttctaccattaaagatctaagtgtaagtcctgctattgctggtattgctggtttaggacacatatttttaacaattgcgtttattcttttctttattttgttaggaaaaagaataaacaaaaataaataa

SEQ ID NO: 408877 - DNA, 504 bp, Staphylococcus aureus
atgaatacaatcaaaagtacgatacacacagaagctatatttagcgacgatgaacaacaccgctacttactcaagaaaatatgggatgaaaagaaaccctcttgtacagtgataacgatgtatccacatttagatggcgtattatcactcgatcttaccactgttctcattctcaaccaattagctaattctgaacaatacggtgctgtatatctagtaaatctattctctaatattaaaacacctgaaaaccttaaacatattaaagagccttatgacaaacacacagacattcacttaatgaaagcgattagtgaaagtgacacagtgattctagcctatggagcttatgcgaagcggcctgttgtcgtcgaacgtgttgagcaagtgatggaaatgttaaaacctcataaaaagaaagtcaaaaaactcattaatccagtaacgaacgaagttatgcatccacttaaccctaaagcacgtcaaaaatggacattaaaataa

SEQ ID NO: 408878 - DNA, 312 bp, Staphylococcus aureus
atgaaaatcaatcgatacatcacaagaggcataagtgaacaactatctctagaccttcaaatcctactttggaatatggtaaaagaaagagataatcaatctcatacagattatctacacatttttagactacaagaagatgagaatatactctcaatcacacatgaacaagaacaacctgcatacaaattggaatatcactatacaaactatgtaaaaaatcaaaatgcattacctaagaaagtctacgtcattcgtgaagatgacgtagacgctttttattatgtgatgcttttgccagaagaatattaa

SEQ ID NO: 408879 - DNA, 351 bp, Staphylococcus aureus
atgaaaacaaccactcaagaactcaaacaatatataactcgtctcttccaactatctaacaacgaaacatgggaatgtgaagcacttgaggaagcagcagaaaatattctaccggaacgttttattaataattctctacttgcgcatctcacactcaacacttatacctactacaatgatgagctacatgagctaagtatctatccatttcttatgtacgccaatgaccaactcatcagcattggttatttggatcattttgatatggactttctatacctcacagatactaaaaatacgattatcgatgaacgtcatttactaaaacaaggagagaataaccatgaataa

SEQ ID NO: 408880 - DNA, 1629 bp, Staphylococcus aureus
atgaaacaactcaaaaagaaacgtattggattatatgcacgtgtatcgactgaaatgcaaacggatggttacagtattcaaggtcaattgaatcaacttacagagtattgtcaatttcaaggctatgaagtcgtcaatgaatacaccgatcgtggtatatcaggtaaaacaatgcaacgtccagaattacaacgtatgttaaaagatgccaacgaaggtaaattagattgtattatggtctacaaaacaaatcgtttagctagaaatacctcagatttgttaaatattgtcgaggaattgtataagattaatgtcgaattttttagtctaactgaaaaaatagaaattgccagttcaacaggtaaattgatgctccaaattttagccagcttcgcagaatttgaacgtaatacgattgtagagaatgtctacaatggccaaagacaacgtgctattgaaggttattatcaaggtaatttacctctaggctacgataaagtacctgacagtaaaaaagagctcatgatcaatcaacatgaagcgaatattgttaaatatatttttgattcatacgctaaaggtcatggttatcgtaagattgcgaacgcattgaatcataaaggttatgtgactaagaaagggaaaccttttagtatttcgtccattacctacatcatctcaaaccctttttacattggaaagatacagtttgcgaagtatagacactggagcgataaaagacgaaaaggactcaatgaggaaccgattatcgctgatggtaaacatgcgcctattattgatagaaacctatgggataaagtacagtttaaacgtcaagagagtcgcaagaaaccacaagttcacggcaaaggaacaaacctactgactgggattgtaaaatgtccgaaatgtggtgcagcaatggcggcaagtaatacaactaatacattaaaagatggcactaagaaaagaatcagatattactcatgtagcaattttagaaataaaggttcaaaagtttgttctgccaatagcgttagagcagatgtactagaaaaatatgttatggatcagatattggaaattatcaaaagcaaaaaggtattgaagcaattggttgaaaaggtaaatgaaaaaagtcaaatagacgtctcttctttgaaccatgatattgcctataaacagtcacaatgtgaagaaataaaagcaaaaatgcatacattaacgaaaactattgaagactcacctgacttagatagcgtattaaaaccaacaatacttagctaccaagatgaattgaatcaaataaataatcaaatctatcaactagaacaagataaacaagcagaagctccacattatgatgctgatatgattgcgaatgtactacaagcaatattcaaagatatagacaaattagagaaatctcagttgaaatcactatatctaacaatcatcgatcgcattgacataagaaaagatgagcatcataagaagcaattttatgttacgctcaagttaaataatgatataatcaaacaactatttaataaccatccactcgacgaagtgctccctagcacttcgtctttatttttgccacaaactttatatataactattgaataa

SEQ ID NO: 408881 - DNA, 1362 bp, Staphylococcus aureus
atggaagaagcgattgcttatgtacgtcaaagtacactcaaacaacaaagcttagctactcaaaaatcgctcattatggataccgctaagcaatatggatggtctaatgtggcgttttatgatgataagaaaacaggtcgacatacaaaacgttcaggttatcaaaaaatggtagaaataattacgtctggaaaatgtaaagtattgtgttgctatcgcttgaaccgactacatcgtaatttgaaaaatgccatacaattctttgaaatttgtaaaaagcatcacatcacaatcatcagtgttaacgatggatattttgatttgtctaaagagtttgattgctttcgtttgaacatacttatgagtctagcggaaatggaatcaaacaatatcagcgaacaaacaaaaaatgggattagagaaaaagccaaacaaggtaagctaatcacaactcatgctccgtttggctatcgttatagaaaaggttgttttgttgtacaagaagaagaagcgtatacagttaaatcggtttatcgctggtacttacaaggtctaggctacaaaaagatttcccaacatttggatagtaatcctaaccttattcctcgtaagccctatcaagttagaaatattctcttgaaccctaactattgcggtcgtgtcatcaataaatatggcacgtttaatgatatcgttccacctattattgatattgatacatttgaagaagcacaagagcgtcgtattcataaacaactcaatcgatccaattctagaaataagctaaagcgacgaatcaaatgtccttactgtcaatcaacattaacaaacttaacgataaaaaaagagaactattctctacgttactatgtttgtcctaaaaatatgaatgacgcttatcgtacatgcccatttaaaagtatcaatgcaccagaacttgaaagtgaagtgctcgacacttgtaaaaagtattttgaagaacaatcgtttcataaacgattgaataacacaatactcaaagtcctaaaacagcaacaaatgaagcataaagaaacccatctaacacaagaacaacttatcgaaaagctagctcaaaatcgtattgatgtaaaaacgttcaaacgtttatctgctagttgtaaaagtgaagagaattactctacttattcaacctaccaaatcgatgacaaattaaaatatgtcataaaaaataaaataactttacaggatatagcaccttttatcgattgcatcaaaataactcaaactaaacaattacaaggaatctactttaaaaacagtccactcaatatcgttgaacaatcacatttaataactcctgaaaggaatgaagtaatatga

SEQ ID NO: 408882 - DNA, 615 bp, Staphylococcus aureus
ttgaaggatgaaacaaataatactggtattcgtatgtttaagcgctatgcggctatcactacttcggccaagattcttagtcatgttttatctacagatattgatatcgctaaaataagagactactttattgattatcatgctcatacagtctctgaacgatcactggctgataaagcgattgaagtcattacgcaatttgtagcacaaaaccgtggtaagttttctgatgatacagcattaaagaatatgattgagaactatggactaattgccttaaaagatgattatatcgaagttaaaatcattgcatctgtatttaagaatatgttgatagagcatcatttccaagatgtcaacaatgttgtgaatgcactaagggataaaggatttatcgaatctgaccgtgatcgaataactacgaaaagagcagttaaagatgactatggcaagaaacagtcacttgtcttttaccatttaaagctagattcaaaatatgcgtctatttttggtctaactaaagatgctgaacctattaaagctgaaattaacttggataacaaaaagatacttgaatcatggaaaaaacagaacgatgatttaattgatttttaa

SEQ ID NO: 408883 - DNA, 144 bp, Staphylococcus aureus
atgaaagaaatgaaaagaaaatctgtaggatgttatgttagagtttcaacaatttctcaagacattgataaatttagtattaatggtcaaattacacaaataaaggaatattgccaacagggaaattatgaattgctatactga

SEQ ID NO: 408884 - DNA, 360 bp, Staphylococcus aureus
atggatgatcgggcgttagcttccgcacttggaattggtgttggcggtggactcgcttggataatggaaggttttcaaagtggtcatggctttatttattcattatgtgcaggccttataattggcttattattttttgaaatgattccggaaagtattgaattaggcgggtgggtaattttactcggtggaatagcaataggcttagtattattccaatccattcatctattaatggataaaattacaattatcactaatagtcatcaaaaagatattttcgttcgatcgggggtacttttaattatcagtatagcaattcataatttccctgttggcaatattcctttatttgtgtaa

SEQ ID NO: 408885 - DNA, 327 bp, Staphylococcus aureus
atggaagaaaaaaaggaattagaggaagtaaataataaggacttagatgatgaaacattatttgtcgtatcgcaaacatttaaagcgttaggtgatcctacgagaatccggattctccatttgctcttttataaggagtattcggtaaacggtattgctgaaacgctacatcttagacaatcaacagtttcccatcaattgcggttcttgaaaaatttacggttagtaaaattccgaagggaaggcacaacattgttttattcccatgatgatgaacatactatgaatatgctaaaacaggcgatcgatcacgcctgtcatcactag

SEQ ID NO: 408886 - DNA, 1926 bp, Staphylococcus aureus
atgaaaaatattcaagagcaacaagcacacgaaagtcatagccacgatcatagtcatgatcatgatcacggaaaaatgccaattatttcatattttattggcttagtgttggctataattgggctttttttaagtgatgcaaatttattaatacaaaacatcttattttcaattgccacaatcacagccggctaccatgtaattattctcgaaggaattggagagacagttgaaaatactaaattaaagggaaaattcactcctaattctcatattctaatgggattagctgcaatcggggcttctctgatagggagtttttgggaaggaacccttttgatacttattttttccggcgctcattttcttgaagattacgctgaaggaaaaagtaaaagagaaattactaagctactcgaaatgaacccaacgacagctaaattaatcctacctgatggaaacacaaaaattgttgatgtcagtgaattaaaagttggagatcaactccaagtgctgaacggtgatcaagttccaattgatgggattattttatccggtactacctcaattgatgaatcttctattaatggagaaagtataccgaaagagaagtctaagggtgacgaagtttttggaagtacgattaatggaacaggtacttttactatggaagtcactaaggaaaacaaggatactgtattctctaaaattttacaattagttagtcaaaaccaagataatcaaacaaaagctgccagtatcattcaaaaattcgagcctaaatatgttaatatagttttaatcgcaataccattagtaatgttacttgctccttttctatttgattggacatggtcgcaaagtgtatacaggggattagtgcttttagtcgcagcttcaccgtgtgctttggcagcagctactgtatctgtaacattgtctacaacatctaacctagctaaaaaaggcgtgctttcaaaaggaagtacttacctatcacaattagcggatatagatgcaattgccttcgataaaacaggaacccttacgaacggagaacctaaagtaacaaattactatttcactcattctgtgaacgaagaaaatattattgatattatagtcgcccttgaaaaggaatccaatcacccactcgctaatgctattttagaaaaatttgaagttaaaaataaaatagacatcgaagttactaatcaaattggaaaaggtctgacaggagattataatggaaaaaattatcgtattggtaagcctacttcttttgaaagtgcttctgaagagtatacccagttcaatcatgattgggcatcagaaggaaagacggttgtatacgtagcagaaaatgaagaagttattgggattatagctctaatggatattccgaatgagcatgctaaagaaacaattaattactttaagaaacttggtatccacacgactttaattactggtgattcggaaatgacgggaaaagctgtaggcgaacaattgggaatagacgaagttatcgctaatgtaatgcctgaagataaatccagaattatagaagaacaaaaagaaaaatttggagttactgccatggttggagatggtgtgaacgatgcaccggcccttgttaatgctgatgttggtatagctatggggggcggtactgatgtggcagtagaagtatctgatttggttttaatgcagaacaatttatctaaattagtacagtctcataaaatttcctcaaatatgggtcgtgttattaggcaaaatattattttttcaatggcagttgttgcctttttagttgtcgttagtttgttaggattaactgatattacaatcagtgtaattgttcatgaaggaagtactttagttgttatactaaatggacttcgattattaagatctaaataa

SEQ ID NO: 408887 - DNA, 1194 bp, Staphylococcus aureus; identical to SEQ ID NO: 405533

SEQ ID NO: 408888 - DNA, 1167 bp, Staphylococcus aureus
atgttactaaatttaaatattgcaaatatgattaaaggtaagcagcactttaaaacaattcgttttattaatacagtttgtaaaagtattctcttagtactaatagctaatgtaatgatagaaaatactagtgttattaaagatttgaataaaataaaagaaactgagaaatattggaatgtattagatgattattacacgattgaatttgcaccttatcacgaaacaaaacaaagtttgattgataatatggtgcgatcagaacaattagtaaaggctagtgaagcagaaaataatgcgattttattcaaaccaaagggtgactccgttgacaatgacaacttttcgcctgatgaggggaatgtaatattagtaaataatcagttctggtcgatttattacaagcagtttcaacctgatattccgataaaaaatcaaaaaaataatgtcgaagtaattattccacaaaagtttcatgcaatgcgtaatgaaatcaatcaagcatatcattcatggtttgaatttgtacaaaataaaaataataaagagaataagttatctatacagtttatcaacaaaaatgattgtcgaattttttcatttgatgcacgagatagtcgccatttgtcatttatagaggcgccaatcattgtgaatgttcaggcatcagatttatcgaatgatttttattatgccatgatcagtcaaggcgggtatttattcaaaaattatgacgcgctagtaaaaaatattgaaaagtatcatcttgatggggaaatcagtggaataaccaattataaagatagcgtgatggaaatgtatcatgaaaacaatttgaaattaacagtactcaacttttcacaaatcattatcgcaatcattttaataattattattttatttgatgtgaaatattattttgaacagcatcgaaaattactcgtaatcaaaaagctatatggttattcaacattaagagccaattaccaatacttattaataaataatatagttgttatttttattggaatattgacgaatgtaattttacattctcactatataatgatgttatttgcaacgattcttgtcgttcaaatattattgcagatttgcagcctatactatcatggccgacgttttaatgaagttatcaaggagttttaa

SEQ ID NO: 408889 - DNA, 570 bp, Staphylococcus aureus
atgagtgagttaacggcaaaacaagcgcgttttgtgaatgagtatataagaacacttaatgtaacacaaagtgccataaaagcaggctatagcgcaaatagcgcacatgtgacagggtgtaggttattgaagaagccacacatcaagcaatatatacaagaacaaaaagataagattatagatgagaatgtattaaccgcaaaagagttactacatgtgcttacgaatgcggcagtcggtgatgaaacagaaatgaaagaagttgtagtaaagcgtggagaatataaagagaatccacaaagtggcaaagtacaattagtctataatgaacatgttgaactgatagaggtaccaataaaacctagtgatcgtttaaaagctcgtgatatgttgggtaaataccataagttatttacagataagcatgatattaacgggaatgtgcctatattcattaacattggtgaatgggacggagacgatgaggaattagataaaactgtaaaagatgtatctaacgctaatcctaaccatactgtgattgtggatgatataccgttagaggattga

SEQ ID NO: 408890 - DNA, 177 bp, Staphylococcus aureus; identical to SEQ ID NO: 405358

SEQ ID NO: 408891 - DNA, 3441 bp, Staphylococcus aureus; identical to SEQ ID NO: 406434

SEQ ID NO: 408892 - DNA, 501 bp, Staphylococcus aureus; identical to SEQ ID NO: 405187

SEQ ID NO: 408893 - DNA, 210 bp, Staphylococcus aureus; identical to SEQ ID NO: 407424

SEQ ID NO: 408894 - DNA, 300 bp, Staphylococcus aureus
atgaattgggaaattaaagatttgatgtgtgatattgaagtgataaaagaaaaaatcaatgatgtagctatcaaacatggttggtttgttgaagataaatttgtcaaaaatgaattagaaacaaaacaggaacatattaatttttctgctagctatttagaacatcgtatacaaaatgaacatacagttgagttattacaggtgtacttaaaagaattcggtgaacttatacaaaagtttcatgaaatagaaaaagcatcatctgatgtaagtttggcgacagaatcagatgacgcatag

SEQ ID NO: 408895 - DNA, 519 bp, Staphylococcus aureus; identical to SEQ ID NO: 405857

SEQ ID NO: 408896 - DNA, 1140 bp, Staphylococcus aureus; identical to SEQ ID NO: 405853

SEQ ID NO: 408897 - DNA, 930 bp, Staphylococcus aureus; identical to SEQ ID NO: 406124

SEQ ID NO: 408898 - DNA, 225 bp, Staphylococcus aureus; identical to SEQ ID NO: 406123

SEQ ID NO: 408899 - DNA, 1119 bp, Staphylococcus aureus; identical to SEQ ID NO: 406436

SEQ ID NO: 408900 - DNA, 177 bp, Staphylococcus aureus
atgaacacactatacaaaacaaccctcctcatcacaatggcagttgtgacgtggaaggttgtaaagattgagaaaaacacaagatttaaacttagaaattttgattatccaaaaattaataatgctcagagcaaatcattgttggatattgctagtcacgatctaaaagatatttaa

SEQ ID NO: 408901 - DNA, 186 bp, Staphylococcus aureus
atgctgaacttaaaagaattgagagaagaaaaggggataacacgctatcaactagcgaagctaacggaattacaaaactcgacaattcgatctatcgaaacagaggttaaaaaccccggtttcctcacagtaaaaaaaatatgcgatgcactacaagttgatatcgctaatgtaaaggagaaataa

SEQ ID NO: 408902 - DNA, 237 bp, Staphylococcus aureus
ttgaaaactaactataactttagtatcaatgttagaaatgccggtaagtttgaagaaacaccatgtgaatttgtagatggtagcaaaggtgttcgattagcttacgaaaatggtttggtcgtaacaatccacgttaacggcaataatattgatatacgttcaagtcacctattaattttggttgatgaaaaccctttaacttttgacgttgatatgaatacaaaaaatcctaaataa

SEQ ID NO: 408903 - DNA, 162 bp, Staphylococcus aureus
atgcaagacttaaaaaagattcatgaaatagcagtaaaaatcatcgaactagcagaaaaagaaaaatggagcgaagaggaattactaacgacaatagacctcttacatctccaaaataaaaatacattgtctttaactgttgatggtaaaaaaattatttag

SEQ ID NO: 408904 - DNA, 255 bp, Staphylococcus aureus
atgaactacatcaaacatagtttgaaattagatgaatggcgaaaacgaaaaggttacacccagtcatctttcgcagaaaaacttggcatttcaccgtctacttataacatttgggaaaacaacccagaaatgattaaacctagagatgcttttagaattgctaagacattagatatctctattgatgagattatttttttaaaagatgaatcgtattttaaatacgttttagtcgaagaaaaacaaacatcttaa

SEQ ID NO: 408905 - DNA, 639 bp, Staphylococcus aureus
atggctttcaaaaattccataaaagaaatcagattgaacaatagattgtctaaagttgagatggctaaaaaattagatgtttccgaaggtactataagaatgtgggaaagcggaagaactgaacctagaatgggtatggtcgaaaaaatttcaagtttgttcaatgtttctaaaggttatctcttaggagaaattgaagaaattgttttaccagaatttgatagcgaaatcgaggttccatatttcggtaaagtttctgctggaaatttcgaggaagttgcaattgataatgaaaaattaaaagttccaccatttgcttttaacggtcgtaaacctagcgaatgtatagcactaaaaataaacggagatagcatgaataaaatactcgctaacggttcttatataattgtccatgattatagaaagtcttgtgatcataaacttaacagcaatgacatccttgtattacgtctaggtggtgaatatacagttaagcgtgtgagacgtactgaaacaaaactacatttagacccagcaagctattcagatgaatttaaaactaattcttacgatttagattctattgatgaaatcgaagtgataggcaaagttatttataactatcgtatttttgattaa

SEQ ID NO: 408906 - DNA, 1173 bp, Staphylococcus aureus
atgtacaaaataaaagaggttgaaacgagaataaaaaatgatggtgttgacttaggtgacattggctgtcgattttacactgaagatgaaaatacagcatctataagaataggtatcaatgacaaacaaggtcgtatcgatctaaaagcacatggcttaacacctagattacatttatttatggaagatggctctatattcaaaaatgagccccttattatcgacgatgttgtaaaagggttccttacctacaagatacctaaaaaggttatcaaacacgctggttatgttcgttgtaagctgtttttagagaaagaagaagaaaaaatacatgtcgcgaacttttctttcaatatcgttgatagtggcattgaatctgctgtagcaaaagaaatcgatgttaaattggtagatgatgctattacgagaatcttaaaagataacgcgacagatttattgagcaaagactttaaagagaaaatagataaagatgtcatttcttacatcgaaaagaatgaaagtagatttaaaggtgcgaaaggtgataaaggcgaaccgggacaacctggtgcaaaaggtgaagcaggtaaaaaaggagaacaaggtgcacccggtaagaacggtactgtagtatcaatcaatcctgacactaaaatgtggcaaattgatggtaaagatacagatatcaaagcagaacctgagttattggacaaaatcaatatcgcaaatgttgaagggttagaaaataaattgcaagaagttgaaaaaatcaaagatacaactctcaacgactctaaaacgtatacggattcaaaaattgctgaactagttgatagcgcgcctgaatctatgaatacattaagagaattagcagaagcaatacaaaacaactctatttcagaaagtgtattgcaacagattggctcaaaagttagtacagaagattttgagaaattcaaacaaacactaaatgatttatatgctccaaaaaatcataatcatgacgagcggtatgttttgtcatctcaagcttttactaaacaacaagcggataatttatatcaactaaaaagcgcatctcaaccgacggttaaaatttggacaggaacagaaaatgaatataactatatatatcaaaaagaccctaatacactttacttaattaaggggtga

SEQ ID NO: 408907 - DNA, 1899 bp, Staphylococcus aureus
atgggattacctaatccaaaaaacagaaaacctacagctagtgaagtagtagagtgggcgttgtatatcgctaaaaataaaatagctattgatgtacctggttctggaatgggagcacaatgctgggatttacctaattatttactcgataaatattgggggtttagaacatggggaaatgctgatgctatggctcaaaaatccaattatagaggtagagatttcaagataattagaaatacaaaagattttgtaccacaaccaggcgactggggtgtttggactggtggttgggcaggacatgtaaacattgtagtgggaccatgcacaaaagactattggtatggcgtagatcaaaactggtatacaaataacgcaacaggaagtccaccttataaaattaaacactcttatcatgatggaccaggtggaggggttaaatattttgttagaccaccatatcatccagacaaaactacaccggcacctaaaccagaagatgatagtgatgataacgaaaaaaataataaaaaagttccaatttggaaagatgtaacaactataaagtacactatttctagccaagaggttaattatccagaatatatttatcactttatagtagaaggtaatcgacgactcgaaaaacctaaaggaataatgattagaaacgcacaaacgatgagctcggtagaaagtttatataacagtaggaagaaatacaaacaggatgtagaatatccccacttttatgttgatagacataatatttgggcacctagaagagctgtatttgaagttcctaatgaacctgattatatagttatagacgtatgtgaagattatagtgcgagtaaaaatgaatttatttttaatgagattcacgcaatggttgtagctgtagatatgatggccaaatatgagatacctctaagtattgaaaatttaaaagtagacgacagcatttggcgttcaatgttggaacatgttaattggaatatgattgacaacggtgttcctcctaaagataaatacgaagcattagaaaaggcattatttaatatatttaaaaacagagaaaaattattaaattctataactaaaccaacagtaacaaaatctagaataaaagttatggtagataataaaaacgctgatatagcgaatgtaagagactcatcaccaacagctaacaatggctcggcatctaaacaaccgcagattataactgaaacgagcccttatacattcaaacaagcactggataaacaaatggcaagaggtaacccgaaaaaatctaatgcttggggctgggctaacgctacacgagctcaaacgagcttggcaatgaatgttaaacgaatatgggaaagtaacacgcagtgctaccaaatgcttaatttaggcaagtatcaaggcgtttcagttagttcgcttaataagatacttaaaggtaaggggacattgaataatcaaggtaaagcgttcgcagaagcttgtaaaaagcacaacattaatgaaatttatttaatcgcgcatgctttcttagaaagtggatatggaacaagtaacttcgctaacggaaaagatggagtatacaactacttcggcattggcgcttacgacaacaatcctaactacgcaatgacgtttgcaaggaataaaggttggacatctccagcaaaagcaatcatgggcggtgctagcttcgtaagaaaagattacatcaacaaagggcagaatacactgtacagaatcagatggaatcctaagaatccagctacgcaccaatacgctactgctatagagtggtgccaacatcaagctagtacaatagctaagctatataaacaaatcggcttaaaaggtatctattttataagagataaatataaataa

SEQ ID NO: 408908 - DNA, 300 bp, Staphylococcus aureus
atgtttggttttaccaaacgacatgaacaagattggcgtttaacgcgattagaagaaaatgataagactatgtttgaaaaattcgacagaatagaagacagtctgagaacgcaagaaaagatttacgacaaattagatagaaattttgaagaattaaagcgcgacaaggtagaagatgaaaagaataaagaaaagaatgccaagaatattagagacataaaaatgtggattctcggtttgatagggactatcttcagtacgattgccatagctttactaagaactatttttggtatttaa

SEQ ID NO: 408909 - DNA, 183 bp, Staphylococcus aureus; identical to SEQ ID NO: 407358

SEQ ID NO: 408910 - DNA, 378 bp, Staphylococcus aureus; identical to SEQ ID NO: 407357

SEQ ID NO: 408911 - DNA, 1824 bp, Staphylococcus aureus; identical to SEQ ID NO: 407356

SEQ ID NO: 408912 - DNA, 948 bp, Staphylococcus aureus
atggacatagaattaacaaaaaaagatggtactgtaatcaaattaagtgaatacgggtttatcgttaacgatatagtaattgatagcatgcaaatcaacacaaagtatcaagacaaagaaaatatgaacggtcgtatattaatggggagcaattatatcagtagagatatagttgttccttgtttttgtaaagttaaaaatcgttcagacattgcttatatgcgagatatgttgtataggttaacgacagacatagaacctatgtatttacgagaaataagaagaaaagaagagttgaattacaggtttactcaaccaacttctgatgattacgtgaaattagataaaaacaacttcccggattatgaatattcaagacacgatcaacaaatttatgtaaatggtaaacagtataaagttatttttaacggagttataaaccctaaacaaaaaggtaataaagtttcttttgaactaaaattcgaaactacagaattaccatacggcgaaagtattggaacaagcctagagttagaagaaaacaaaaaggttggattgtgttcgtttgattttaatattgattggcatgcaggcggagacaaaagaaagtatacatttgaaaatttgagcaaaggtacagtttactatcatggtagtgctcctaacgaccaattcaacatgtataaaaagataacaattattttaggcgaagatacagaatcgtttgtatggaatttaacgcatgctgaaataatgaaaattgaggggattaaactaaaagctggagacaaaattgtttatgatagctttcgagtttataaaaacggtgtcgaaataagcactgaaacgaacatagcccaaccaaaatttaaatacggagctaataaatttgagtttaatcaaacagttcaaaaagttcagtttgatttgaaattttattataagtag

SEQ ID NO: 408913 - DNA, 3465 bp, Staphylococcus aureus
gtgacggaatataaaattaaagcgactattgaagctagtgtagccaaattcaaaaggcaaattgatagtgcggttaagtctgtgcaaagatttaaacgagtagcagatcaaactaaagatgttgaattaaacgctaacgataaaaaattacaaaaaactatcaaagttgctaaaaagtctttagatgcctttagtaacaaaaatgtaaaagctaaattagatgctagtatacaagatttacaacaaaaggtactagaatcgaattttgaactagacaaactaaactctaaagaagttacaccagaagttaagttgcaaaaacaaaagttgattaaagatatcgctgaaacagaagctaaattatcagaattagaaaagaaacgtgtcaatattgacgtcaatgcagataacagtaaattcaatcgagtgttaaaagtatctaaagctagtctcgaagcattaaataggtctaaagccaaagctattatagacgtggacaatggtgttgctaactctaaaatcaaacgtactaaagaagaacttaaaagtattccgaacaaaactagatctcgacttgatgtagatacagggctttctataccaacaatttatgcgtttaaaaaatcgttagatgcattgccaaacaaaaaaacaacaaaggtagatgtcgatactaatggtttaaagaaagcttatgcctacataataaaagcaaacgacaatttccaaagacagatggggaatttagctaatatgttccgtgtgttcggtactgtaggttctaatatggttggtggattactaacttcatcttttagtatcttaatacctgtaatagcgagcgtagtacctgtagtatttgcgctattaaacgctatcaaagtgttaactggcggtgtacttgctttaggtggtgcggtagcaatagccggcgctggctttgtagcatttggcgcaatggctatcagcgctataaagatgcttaatgatggcactttacaagctagctcagcaacaaacgaatacaaaaaagcgttagatggcgtaaagtcagcatggactgatattataaagcaaaatcaatccgctatcttcacaactcttgcaaatggtttaaatactgttaaaactgcaatgcagagcttacaaccattttttagtggtatttcaagaggaatggaagaagcgtctcaaagcgtgcttaaatgggctgaaaatagcagtgtagcttcaagattctttaatatgatgaatacaacgggtgtttcggtatttaacaagctattaagtgctgcaggcggttttggtgacggattagtcaatgtattcacgcaattagcaccactgtttcaatggtcggctgattggttagacagattaggtcaatcgttctctaattgggctaatagtgcagctggagaaaattcgataactcgttttattgaatacacaaaaacaaatttacctatcattggcaatatttttaaaaatgtttttgctggaattaacaatttgatgaatgcatttagtgggtcatcaactggaatcttccagtctctcgaacagatgacggctaagtttagagaatggtctgaacaagtcgggcaatctcaaggttttaaagattttgtcagctatatacaaactaatggaccactaataatgcaattaattgggaacattgcaagaggattagttgcattcgcaacagcgatggctcctatagctagtgcagtattacgcgttgcagttgcaataactggttggatagctaacttgtttgaggcgcatccagctacagcacaattagttggtgtcattataactttagttggtgcatttagatttttaattgctccaatattagcggtaatggactttttaggaccattagcagcaagattggttgcattagtaactaagtttggttgggctaaaacaggaactttagtattaagtaaggcaatgacatcgttaaaaggtccaataaaattagttacagctatattccaattgttattcggtaagattggattaattagaaatgctatcacaggactagtaactgtgtttggtattttaggtggtccaataacaatagttattggtgtaatcgctgcattaatagctatattcgttttattgtggaataaaaatgaaggattcagaaactttattataaatgcttggaatgcgataaaaacgtttatggttacagtttggaatgtgttgaaaactgtagcttcggttgtatggaatgctattttaaaagctatcactacagcagtaactaatgtatacaattttataatgattgtttggaatcaaatagtcgcttatttacaagggttatggaatggaattatcgctattgcaacaacggtgtggaaccttttagttacaatcatcacaactgttttcacgacgataatgacaatagttatgacgatatggacagctatttggacattcttaagtacaatctggaacacgataattacaatcgctactacgatttggaatttgttagtcactgtaataactacagtgtttaccacaattatgactatcgcaataacaatttggaacgctatttggacgttcttacaaacgttgtggaacactatagttactgtggcaactaaggtttggaacgctatcactacagctatatctactgcgttacaagcggcatggagttttatttctaatatatggaatacgatttggagtttcttatctggtatattaacgacaatttggaataaagttgtaagcatattcacacaagttgtttcaactatatcagacaaaatgtctcaagcttggaacttcattgtcactaaaggtatgcaatgggtatctactataacaagtacgctaattaactttgttaatagagttgttcaaggattcgttaatgttgtaaacaaagttagtcaaggtatgacaaatgcagtaaataaagttaaaagctttgtggatgactttgtatcagcaggtgctgatatgatccgtggtttgatgagaggtattggtaatatggctagagacttagctgaaaaagcagctagtgtagcaaaaggtgctttaaatgcagccaaaagagcgctaggtattcactcaccttcacgtgaattcatggatgttggtatgtattcaatgttaggtttcgttaaaggtatagataatcattcaagtaaagttatccgtaatgtttctaatgttgcagataaagtagttgatgcatttcaacctacattaaacgcacctgacatttctagtattacaggaaacttaagtaatttaggtggaaatataaatgcgcaagtacaacacacacattctattgaaacatcaccgaacatgaaaactgttaaagttgaattcgatgtcaataacgatgcgcttactagtattgttaacggcagaaatgctaaacgcaattctgagtattacttataa

SEQ ID NO: 408914 - DNA, 213 bp, Staphylococcus aureus
atgacagacgataatgtcaatgatcatattataaagaatcacatagaaatgattgttgacagattagcgaccgataaagagttttatatttttgactcccttatacaaggacttagttatcaagatattagtagtgccttagattgttcagaacaatctgtaatattatggtatgaaaccatattagataaaattgtgggggtgataaaatga

SEQ ID NO: 408915 - DNA, 627 bp, Staphylococcus aureus; identical to SEQ ID NO: 406153

SEQ ID NO: 408916 - DNA, 618 bp, Staphylococcus aureus; identical to SEQ ID NO: 406151

SEQ ID NO: 408917 - DNA, 1518 bp, Staphylococcus aureus
atgacgcagcaacaaaatgataaaagaacattaaaaaataaacacacttatcaaaatgaaccactaccaaaccgtaaagattttgttgttagttttataactggcgcgcttgttggttcagctttaggtttgtattttaaaaataaagtttatcaaaaagcagatgatttaaaagtcaaagaacaagaactgtcgcaaaagtttgaagaaagaaaaacgcaacttgaagaaacggttgcctatacaaaagaacgtgttgaaggatttttaaacaaatctaaaaatgagcaagcggcattaaaggcacaacaagcagcgataaaagaagaagcaagtgcaaataatttaagtgatacatcacaagaagcacaagagattcaagaagctaaaagagaagcacaagcagaagcggataaaagtgtggctgtatcaaataaagaatcaaaagcagtggcattgaaagcacaacaagcagcgataaaagaagaagcaagtgcaaataatttgagtgatacatcacaagaggcacaagagattcaagaagctaaaaaagaagcacaagcagaaacagataaaagtgcagctgtatcaaatgaagaaccaaaagcagtggcattgaaagcacaacaagcagcgataaaagaagaagcaagtgcaaataatttgagtgatacatcacaagaggcacaagagattcaagaagctaaaaaagaagcacaagcagaaacagataaaagtgcagctgtatcaaatgaagaaccaaaagcagtggcattgaaagcacaacaagcagcgataaaagaagaagcaagtgcaaataatttaagtgatatatcacaagaggcacaagaggttcaagaagctaaaaaagaagcacaagcagagaaagacagtgacacattaactaaagatgcaagtgcagcaaaggtagaagtatcaaaaccagagtcacaagctgaaagattagcaaacgctgcaaaacagaagcaagctaaattaacaccaggttcaaaagagagtcaattaactgaagcgttatttgcagaaaaaccagttgctaaaaatgacttgaaagaaattcctcaattagttactaaaaagaatgatgtatcagagacagagacggttaatatagataataaagacactgttaaacaaaaagaagctaaatttgaaaatggtgttattacacgtaaagctgatgaaaaaacaactaataatacagctgttgacaagaaatcaggtaaacaatctaaaaaaacaacaccttcaaataaacgaaatgcatcaaaagcatctacaaataaaacttcaggtcagaaaaagcaacataataagaaatcatcacaaggtgcaaagaaacaaagtagttcaagtaagtcaactcaaaagaataatcaaactagtaataagaattcaaaaacaacaaatgctaaatcatccaatgcatcaaaaacgccaaatgctaaagttgagaaagctaaaagtaaaatagagaaacgtacattcaatgactaa

SEQ ID NO: 408918 - DNA, 492 bp, Staphylococcus aureus; identical to SEQ ID NO: 406595

SEQ ID NO: 408919 - DNA, 1314 bp, Staphylococcus aureus; identical to SEQ ID NO: 406594

SEQ ID NO: 408920 - DNA, 366 bp, Staphylococcus aureus
atggataaaaacaaacttgaaatttatttgagaatatgcgaaaacatcaaggaatataaaaatttagaatttgaatgttataacgaagatgaagaagtttttgattcaaacttacaatgtcctttggcatatactacaaaaggagataatgaggaatttgaaattcaggttacattagatttaaataataaccaaattattaaagaaatatcgcatgtgtatataaattataaagaatatgagtgttttaaagattgggaagaaatagcatctaaaactttaaactttgacgatttaattatgactgatatggacgtagatgatttactagaagaaattcctaataaaaaaggaataaaatattaa

SEQ ID NO: 408921 - DNA, 555 bp, Staphylococcus aureus
atggctaaaattggttatgcacgtgtatcaacgaaagatcaaagtcttgacggccaaattgatacacttaaagaatttgggtgtgaacgtatctttagtgaaaaaataagtggccggaaagtcaaacgtacagagcttgataagtgtttagattatttacgagagggagacacattagttatctataagcttgaccggttaggtagaacgacaaagcaattgattgaattatcacaatggctcgatgataacgggattgatttacaaattattgatatgaacgtttcaacgaaagacgcaatgggtaaaatgtttttcacgatgatgagtgcctttgctgaacttgaagctaacttattaagtgagcgtacaaaaaaagggttagctgctgcgagggcaagaggtagattaggaggtagaccgtctttaccagaccataagaaacgagaaattaagttcttatacgatgaacaaatgatgactggagaagagattgctaaaaaaacaggagtaagtcgctctactgtttatcgtatagttaaggaaagaaagtga

SEQ ID NO: 408922 - DNA, 807 bp, Staphylococcus aureus
atgaaaaacactaaaaattggtatgagtctctattttcaggggtttatgatggcttgaaaataagtttccccctagtattgatttaccttatagcatacattcatgattctctttctttcaatccaagcataaatgttattagatggtcatttggagttatcgtatcaactttgatattctttttaatttttaaattcaaatttttcgctaaagattggaaactaacatttactaacaaatcatttctcatagttataggctcatcaatacttattaatttaataggttactttcaaaatgtatttgatttatataaagaatcgaaaaatcaaaagattatagaagaaaaacttcaaaacaatcaagatcatcttcatttctattttgttgatatggttattgtagcaccaatatatgaagaaattatatttcgaggaattatatatttttactttataaaagcaatcgagaagttattttctcagaaatcgtgggaaataaatgctagatatagtgtcattatgtgcaatggtatgtttataattatatctagtttgttatttgcatatttgcatgcatgggatacatatatagaagcaataccttattttagtatggggattatattaagtattgtaattgttaagacgaagaatataatcaatactatactgattcatatgttaaataattttcttgccatcttacacatagaaacattagaagctttaaatttgctgtgtgttttatttttagtggttattattatgtgtttattggaattgaaaataaaaagaattagctga

SEQ ID NO: 408923 - DNA, 417 bp, Staphylococcus aureus
atgtatgtgattaatccagaacttcccgtgcagtataaatacgaaactgattatagaaaaatccccaaagaattgcttaatagcaatattcctaagggaagagataaagtcaaatggtctccatttaaaacagtctctgaccagtacaagttattagatgagtatatagaagaacaaaacaaagttgatatgcctttgttgtctgacgatcaattacagatacttaacgaaacagtttactacaacagtatgaacaatattcttacagaaataagttattgggataacggctatataaattcaatggaatgctatataaacaaagttgacttgttagaacgtgtaatggtagttactagtaaacatagaggaactaaaataaaaatatccttaaactatattgttagtgtggaataa

SEQ ID NO: 408924 - DNA, 231 bp, Staphylococcus aureus
atgtgcgatagttataaaaagttaccggaaaacgtcataaaattcgacgctataataaagtcgaaaaatgacaaggtggaatgtcagtgcggaggcaaggctaaatatcgaataaatgaaagatataagctagtaacatgcgaaatctgtggaaagaatgtagacccatttacagcattattagtgattgtgaaaagactaaagaatttttatcataatagcagaaactga

SEQ ID NO: 408925 - DNA, 450 bp, Staphylococcus aureus
atgaaaaaaatatatatagaaaatattgatgattatatacttgtcgatgatgaagattttgaacgtgtaaacttttacaaatggcacaaatcatatgctcacgacacacaacgttttttagcccaaatacttggtaaaaaaacggcactaccagtattcatacttaacaatcaatatgcttatcaaaaggttaagaataacgattttacaagaggcaatttaggtgctgataaacattctttcagatatcgagcacctcaaaagaatagtagttcaaaatacaaaggtgtttcttatgatagcaaacataacaaatgggttgctagtatctatgcagagggagagaaaaaatatctaggtagatttgtagatgaaaaagaatgtgctaaagcttataacaaggctgtgcagaaatattggggcggagacggttatttaaacgacgtataa

SEQ ID NO: 408926 - DNA, 150 bp, Staphylococcus aureus
atgaataaagaaacattgattgaccttatagatatgatgataggattaactgaaattgaaagaaaaagattgtcagaaatggaaatgcgaaaagtagaaatacgttacaaaatggcattaacagaaaaaacagatgaaatgataggataa

SEQ ID NO: 408927 - DNA, 951 bp, Staphylococcus aureus
atgaacaagaaattaatagcaagcggaacaattgcgtctattttattgttaaacactggtggtgtagcatttgcagatagtaacaagcttaatgaagatatcttcattaaaggtgcagacttgaacagtcaacaattggaagaaactaaaaagaagcttgatgttgatgatggctataaagaaatttctataacaactaatgatgttgctaaatatactggaaataacaatttaagctttattcattctagtgcaactatcacaccaaaaaagtttaaaaaaggcgtaacagttgatatagaaacgccagaaaacattactagaattacaaaagaacagtatacaaatgcggctatcacagcaggtatacaagattctgaaatcaaagttgcttcgatcgataaggtatcaggcgagggtgctttaacagggatttacaaagcatatgaagaaaatggcaatagtttaaacaaagacgatgttcaaaatgctaataatgaaatgaatgacctagcttcaattagtgaacagaataaagggcagaaaggttattcagatgaggcgttaaataacgctattgctgaaatgaagaaagaaatagcgagtgaaaaacaagatggaaagaatttaactcgtgaagatattagtaagattgttaatgatattcttaaagagaatggcttgaataagattttaagtgataatcaaattaatgtgattaataatatcatggttaacgtttctaattcagaaatactaaacaaagaccctaaggcgtatgaaaaacaagctaaggatttagcaagcaatattaaagacaaagcaggtaatttgctagataaggctaaagaactaaatacagaagaaaaccgtaatttcttacagaaaatttgggactctattgttgagttctttaaaaaaatcattaattggcttttatcatggttttag

SEQ ID NO: 408928 - DNA, 183 bp, Staphylococcus aureus
atgaatgacaataaaaagaaatatgaaagccaaactaatagacgtaatgttaaggtatataaaaaaaccgacgaaattgcaagcgaattaaaatttgaattacgtgttaaaaccaaacaggaagtttatgatatcgcaatcgaaaaactgtatgaacaaataacaggtaaaaaatatgaataa

SEQ ID NO: 408929 - DNA, 288 bp, Staphylococcus aureus
atgtatgtagcaaaagaagaaaacggacaaattttatcggaaagcccatttattagttgtgtaattcaagatgttattgagcagagaatagaaaactttgaaagatattacaatcactataaagagaatttggaacttaactactatatttatatcggaaatttaaataaactttataacagtattgaagattatactaacgaattgtctttaatagatgatttttataaagcttataatgatgaaagttttgttcataaatctcaaatagtgaggatagaaacataa

SEQ ID NO: 408930 - DNA, 213 bp, Staphylococcus aureus
atggaaaacaaaacacattattttgaagcacatggaaaagattacaaattagaagttgcgaaagatatgttcggctgcgaggctgttacagtagttgaaaatggtttgtatatgggaatgatagactgtacagacgagagagactataagcgaattgaaagtatgattagagcagataagcattttgtttatactgatgaagtttattgttaa

SEQ ID NO: 408931 - DNA, 240 bp, Staphylococcus aureus
atgaaatatttaaaagttatatattatttactagcaataatctttttaggatcactattaatatttggatttgtagatattttcggaagtgctatcagtgagggtttttctggatttataaatgacatgactgctctttctttaaaatatccggtagcttggcatataggatggtttatatttagtcttattttattaataataggattacaattgttgttttcatcgactcgaccatag

SEQ ID NO: 408932 - DNA, 183 bp, Staphylococcus aureus
atgatagaaaattacgttgaatggttttgtgtatttatcaatgtaccgtatgaaagaaatgaaacactagaatcatggataattaatagaaagcaaaataaagaatttgaaataggaaatgtatctgtgttacaaaacaacacaaaacaattatcattatgcgattttgatattgacatgtaa

SEQ ID NO: 408933 - DNA, 222 bp, Staphylococcus aureus
atgagtagtaatttagataaatatagtgcaaagaaaagagaaaccaatgaaattaaagaaacaccgtttgataagaatataaagaagaaagaagattttaaattagttaagattgatccaaaaattcatgtagatttaaagtttgcagctctaaaagaagatacaacaatgaaagcggtggttgataaggcaattaaagaatacttggaaaaatatcactaa

SEQ ID NO: 408934 - DNA, 867 bp, Staphylococcus aureus
atggattttccatcaaagttttggagtaacaataaaactgaaaatgaattgttaaataaaattaaaaacaaagatgaggctattgttttgacaataaatatgtttaagggtggcgttggaaaatcgactttaactaatatgtttggttatattgccaatagatatgatttaagtgttttatttatagatactgatccacagagaactttaacaaaaaaattgagtaaaaattttagtaccaaaaaagaagcaaatttaagttttatggacggtataaaaacaggtacacttgaagattctatttcaactttaagcaataatatagatcttattaaaggtgattggaatttagcttggtttgatagatattcaagaagatcattaaatgttaaagatgaattttacgtttatagtagtctaataggaaaactaaagaaaaattacgattttatatttttcgattctgttccaaccacaacaacattaactcataattgtattgttgcaagtgattatgtgattgtacctgttgaatcagaagaagattgttataataattcaattgattatatgttctacctttcacaaatgaaacaatataatagtaaattagatgtattaggtatacttatctatttaacagaagaagataataagacaaataatgaatatgtaaaaaagtatcgtaatgaatataatgatatagtgttaaaaaatgttattactagatcaaggagagttatgacatggggatcacaaggtatttcagaacacaaaccttatgataaaaaaacattgaaaaaatatttaaatgtcttttgggaatttatgtatagactagatgaaagaggtgcttttaatgagtag

SEQ ID NO: 408935 - DNA, 984 bp, Staphylococcus aureus
atgcctacaaaattttacaatgtaaacgaagaatatagagaaaaatttattcaaataccgaaagtattttttactaatccaaaatatactgtgttatccaatgatgcaaaaatcgcatggggaattcttagagatcgtttagaattgtcaattaaaaatggctggattgacactaaaactggaaacatatttttttactataaaaacgaagatttacaaactatattaaattgtaaaaaagataaggtcattaaaataaaaaaggaacttattgaagtagaattattaatgcaagtaagacaaggattaaataaaactaacaagctttacttagtaaaaccagaagtaacagaagttgatatttataaaatacaaaagcaagaaaacacacccgataccagtgatagcaaggaagtcggaaaaaccgacttccagaagtcggaaaaatcgacctcaagaagtcggaaaaatcgacctcaagaagtcggaaaaacagaatctaatgatactgaacttagtaacactgaacttagtgatattgaacttagtgatatgaatgatatgaatgataataatataaaaagtgatgaaaaaaatacacattcaaatcattcacatcatgattcactaaattatgatgaagaagctttgaaattcacagaacttcaagaattccctgaacaatcaaaacactatcttaataatttttcttatagagaactcaaaatagtaaaagaaattattttaaaagcaaagaaatcgtttaatacagaacacaacacaacttatatgctagaagatatcgattatgaccttgtaaatgttttaaaacgctttaaatcaaaagtttatacgaaaaatgaaagtgttgagactatgcaaggatatttgatgaagtgtataaaaatggaacttgaagaattacattcattaaacatgcgaaaaaagaattttaaaaatagttcttggaatatttttagctaa

SEQ ID NO: 408936 - DNA, 297 bp, Staphylococcus aureus
atgcgaaataaaaactatataggcggcctaacaaaagaaaatttaaaaggttttgtcattttagtgctcatttttttatacgttttatctgccttgcttaatttaacaggctttttttgggggtatgtttttattcctgtgtttgctatatggagtatatacatgatgttttttagaggttattttattccggttgtaaaaatattctttatcattactttaaccacaatcaaatttgtgtttatggttttctttattatggcaatagcctcttctttgtctgacaaaaaatattaa

SEQ ID NO: 408937 - DNA, 321 bp, Staphylococcus aureus
gtgcaaaaatatccacgtgtttttagaatcaaatctactacaaaacagttaataaaaataacaagtgcaataaacgatttgaataattcagattttgtagaaaaaatcattcaagaaactgaattaagcaatattgattttagcagttacaataattacggtaaaaaaagctataatactgtacaagcaacttatacaattagttattcaagtaatgaaaaaattgaagcagtagcacagaaacacggattaacaagatctcaagtgcttaatttgtttttatcaaaatatttgaatattccaatagaccataaagactaa

SEQ ID NO: 408938 - DNA, 291 bp, Staphylococcus aureus
atgctttgttataagaaaaataaacgttttgattttatagccttttacttttttgctgatgaaatacgtacgtttgatggtaaaacttatcgaatcaaaggtatgcgttgtcagagaattgatcataaacgtttggatataaacgagagaaaaacactacgccatttgtcagaagttatttataaaacgaaaacggtatttaatgacaattatggactaattgcttatcgtaagaaagtaagtcaagaactaaaaagcgtcaaaaacatcagtataagcaaaagtgtttaa

SEQ ID NO: 408939 - DNA, 195 bp, Staphylococcus aureus
atgtctaaaattacacaaaatgatttaaatcaattaaaaaagcaagtgacagaaataatgaaagtaactggagaaacacataacgaatggctgtataaccaatatcaaaattatttatcagaaaatacagatgttgttatggaagccttgcgtttttattctgaaaataaaaataatacagcttgggaggaataa

SEQ ID NO: 408940 - DNA, 297 bp, Staphylococcus aureus
atgtttaacggacttaatgaaaaaattgtagcccttattaacgatgctcaaccacttatcattacattattggcactttcgatatttgtttccggtgctgtaatgatgtttggggatactggtgtacgctgggcaaagagaacgttgataggcgcaataattggtgcggtattatctggtggagcccttgtttatgcacgttcatttaaaaaaatagttaatgtcagtgcagtatttccgtcagcgacagaaactaagtttgcagttatagatacattacaaataatttttatgtaa

SEQ ID NO: 408941 - DNA, 1143 bp, Staphylococcus aureus
ttgttgagaataaaaacgaaatcgtttcacatcaaaaatcaaagtgatttttcattagaagaaatgatgtcctatacagaagatatggaagcagggaaatttccagaatcactagataaatttgattacgtaatgtatgacgaacaaacatatgaggatattttagagtcaacgtacaaagtgaatagtggttatattaatatacaacaacaaatttatacattgcttaaagcaactgcgcctgacacagaagaattgaaaagactgaaacgacagtacttaattgccctacaggaagtggataagtcatatcgtgacaaaaaagttgctatgaataaaaagaaaaataatccagacaatacaaaatttcaataccaaagacaaaacaatgcaaataaaactaagcaaaaagaaatacttgaaaaattaaaggggaagcgcggattaatgtttttggggctgattgtttttgtaatgttgttagtatatatacttgttgttacagatccaaacaaaaaaggagcatctgacgttgcgacaaaagaagaaatataccaacaagctcttttaggagaagaagaaaaagccattgataattttgctaaattagaccaagagacattaaccaaaaaagacaaacaaatatatgcgcaattattagctcaaaaagaagagtatgataaggcggttaagttgtctgatgcaaaatttgtagaagcgtatttaattagcagagactattatagcgctttagaagaatttaataagaaatatccaactaataatgggaagtttgatttagctatacaccagaataagttttctgatgccattaattacagtcaaggtatcgataaaacaaacaatagaaaaaaacaactggtaaaagcgtatatagagacagacaatttaaataaggcgaaagaattagcagcgacaacggaagacaaagaagttacaaaaatgattgcagatgaacaaaacaagcgcttgaaagggctagaagaagccgttaagagtaaagaagatgatttaaagaaagcgaaagataaaaaagaaaagaaatctgatattgaaaataaagaaaaagcgcttaaagaagcaaacgagaatttggaaaaattcaaaaaagaacttaaataa

SEQ ID NO: 408942 - DNA, 444 bp, Staphylococcus aureus
atgctaaatgagtttaaatttataggacgtattgctagagacttagaactaacaactaaagagaacatgcaagcgagatgtaacttcacactagcagtaaataatgcatatggcactgactttttaaacataacggcttttgataaaacagcagaaaatttagtgaaatataatcaaaaaggcgacatggtttatgttgaaggttatgtaagcacgaacaaaaaaagtgttaatggcgttgataaatattatatgaaccttgttgctggtcgtattgtgtatcttagtaataaaaaagtagaagaatcagaaaatgaattagagcatagcactgataatttagataacttaacatttgatgataaacaacatacagaagtgaatgaaaataacacaactttccagaaagcaaaaggtttcgttactgaagacttgccattttaa

SEQ ID NO: 408943 - DNA, 2772 bp, Staphylococcus aureus
atgaggtttggttcaaaagacaaacatggctatagaaggaaaaagttatcgttttctcaaaataaacatttgcttgcacatccatgtatattggtaagcatattattattaattatgttattggccactgcaattgcaaattttttgattaacatcttaatgacagtgttttttggaaatcatgacattttcacaaatatgaaacaactgaacacgaaatatacagattatatatttaactttcgtttagatgctgtgttgttatatataccaatttgggtactcgtctttatattttttggaaaaaaagtatatcaatttagacagcgtttcaaatcactaaacaacaacgaaaaagcgtcagggcgatttgccacacgaaaggaaattacgcaacagtataaagcaataccacaaagggagcatgcatttgaaggagaaggtggtttgcctgtcgcaatgtttggtgtatatgactttgtgactaaaacgaagcaatatttagaacaaagaaaaactgctattagagaaattaacggaattactgatttaacagctgatgaaaaattagaattacgcaaagataaattaggaaaaatgaataaagaattcgctactacatttttctcaaaacgcgaatttacatttattgatgagtcaccaaccaataatttaattgtgggtacatctcgttctggtaagggagaaattgttgttttatcaatgatagaaaactattcaagatcttcagaacaaccatcattaattgtaaatgacatgaagggagaacttttttctgcatcgtataaaacgttggaaaatagaggataccaagttgagatctttaatttggatcaacctatggagtcaacgatgagcttcaacccattgcaacaagttattgatgaatatatgaaaggcgatttgggagaagcacaagagatgacaaagcaaattacatatacgttaaccaataacgaaggtgtagaagacaacgaatggaacttgatggctggtgcattgattaacgctatgatacttgcactatgtgaagaaaccctaccgaagaacccagaaaaagtcacactttatagtgtgtctaatatgttacaaacattaagcacaaaaaggttttataaagaaattgcaattggaaacaaagttcaattaattgaggtttcggcattagatgagtatatggaaaggttccctagtcatagtccagctaaaacgcaatatgcgacagttcaagctgcaccagacaaaatgcgttcgtctatcatcggaacggctttaaaggcattacaaccatttacaactgacaccatagccaaattaacaagtcacacctcttttgacattaataaattaggatttccaagtattattgatggttacgcaaccaaagatagtacatttgaattgggcgtacaagtgttacgagatggtgaaaacggcattgaatacgaagaagtagaaggcattcaaataggtgtaaatgaatatgggtattggcaatatccgttcaaaacagtacttaaagtcggagatagaatagaaacaatagagaaagacggaaataatcaagttatcacaagttatttttatgttgatcatatagatgataaaggacaggtcacatttaatcaaaaaggcgaattagataactcagatattacgataagaaagttcaatagttttccaaaaccaatagcagtatttatggttgtaccagattataacaatgctaaccatggtatagcgtctatactcgttaaccaaattgtttttgaaatttcgaaaaattctcagctatatacggaaaatcaatcaacgtatcgacgcgttattttccaccttgatgaagcaggtaatatgcctccgataccgaatttatctcaaaaagtgaacgtatctctttcaagaggattacgttttaatttctttgttcaagcattttctcaatttaaagataaatacggtgatgcatatgatgcgattatggacgcttgccaaaacaaggtgtatatcatggctacgcaagaacagacattaaaagattttagcgcaatgattggaagtcaacaaatcacagttcatagtcgttcgggtgaggcaggagcaattaagtcaagcattactgagaatcaagaagaaagaccgttactacgaccagatgaattagcgcgcttacaagaaggtgagacagtcgttgttagaaacttgaaacgacaagataaaaaacgaaacaaagtaatgtcttatccaattttcaacgacggcaagtatgcaatgaaatatcgttaccagtacttatcagacttaatggatacaagccaaagtattattcattttagacctatgttaaaagcgcgatgtgagcacaggcatttacaacttgaagcgacattagttgactgggataaacgtattgaagaaatgcaagaagggatagacggtcaaaaagaagaaaataaaaacattaatgacattaatcaatataaaaaaagcaatgaagaaggcaatgttgccgtgcgagttaaacgtttagaaaccttgaaagaaaaagtaggagacgctatttttgacaaaattacaagacgtttcgaaagatacttaagaacatatgcagaacaagataaaaatgttaatactataacgcaaaaaaaattagaagaactggttttagcagatagcgaggtaaaagaagaagaaaagactaagcgtattgaaatgattaaaaaattgatcaaggaggcaaagacgacatga

SEQ ID NO: 408944 - DNA, 453 bp, Staphylococcus aureus
atgaaaaatatatttggattcgtgttttttctaagcgtagtattgcttttgtcgggttgttcaaaatctgggatagaagagatatcacctaaggaggcacatgataaattaaaaaatcctaagaatgaatatgttatcgcaattagtgatttgagtagggctggagaagaacatatttataattctaaaaagattctagaaaaagtggcagaagaaaaagggattaaaatttattatgcaatatatgactcaaacaatgaaaagcacgaaaaagattttgatgaatatggcaagtttaaggggcatacatcaaacttttattatgcagagaaagggaaaaaagtagaggacatggactacaagtctttaggtgtagccgaatcttcgaaagttaatatatccgctgaagtgttagggcgatttattgaccaaaaagaagaggagggcttttag

SEQ ID NO: 408945 - DNA, 1842 bp, Staphylococcus aureus
atgtctaaggaagcaatccaaaaaatattagaaaaatatcaagatgttttacaaatgtctgaaattgtacctaacatgttacgttcgataggttggtacttcttacattttcttgtttggattactgatttagtttcaaatcttactattcaagttttaacactttttggattacttacacaagatagtattagtaaattaattcttgaagcaaagccggtattaatttcagtattagcgctggccatcatttatataggtatcaaattaatgttaggaagaccgattaataaagccgatatttttgctacattagttgttgcagttttgtttttaggtagtgtgaatataggtttacaaaagggttctgaattaacaaaagaagcaagtaaagctatagaaaattttgatccagatagtaaaaaacaaacagacggcactaaagtgggttcttcgatgcttgctaaaagtattgtagatgtccagttgatggcggaaaaagggtttccagatgttaaaacgacaagaaacaatcaaaaatataacaaccttaatgcaagtgcaattaagcatatcaacattaatcaagaattagaagaaaaagaaattaaaaagaaagattccaaagaggtacttaagaaaaagttagtcgtcgatgaagcaggtcgacaaaaagttgaagatttggaaaaaaactggtttggcctaggtgacgaaaaatattatcgttttcatgtgaagtggttcactgcagctgtggggcttatttgtttagctttgggtcactttttagccgcgttacgtgtcgcaagtatcgcattagagataattgtaaacaaaattttagctattttcttttcgcatgcactacaaggagaacgtcttaaatcaacaattatcgatattttaaacggctttgtaagtattattatgattttcttctgtttgttcttatacaaagaagttgttagtttcttaaatgataaaccaacaggtatatggttggtaggacttattgctgcgacatggtttatgatagatggtccaaagtccattgagcgtaaatttggttatgatgccggtcttagatcaccgttttacacaatggccggtatgtatggaatgggtaaggcggcaactgcgctagcgacaaatacggctagtggaacaagtagcatgattaaagcagtgagagatgatttttctaaatcaaaaagaaatgacgttaataataacagcaatgaacaacaatctaagtcggaacaactcaacaaggcctcgaataatcaaaatacagacaagcaacaaaatgttaaagataatcagaatatagatagtaatagtcaagttaacgataggcaaaataacacagaatcaaacagtagtcataacggtcaatctaacagcaacagacagtctcttgacgaagagatgaaaaattctaattacggaaataatacattcaaaggtgttggcgaaagtcattcgcaactatgggcaaatagagcgccagacggaggacgaaagaaagaaacgcttaacgacgttatcaaacggacacaaggagaaaaatctaacacaccaaagactaatcaatttaatactaatacacctaaagctaaccctatgaatgcgcctaaagcgcaaagaaaaataactgataatgggttttcaaaacaacaaaacacaagtcaaaataacccatctccaaaaagttataaagatgtacaaaatgtaaagccggtacaaacgaacaaacctgtaaacaaatcaattccaaaatcacatgtgaataaacctattaataaaaatagatctaaaaatataaaaccaaaacgttag

SEQ ID NO: 408946 - DNA, 366 bp, Staphylococcus aureus
atgtccaatagaataccagaaaatacaaacgtagaagctaaaattacgcgttggctttatatgaaagatgttatgacgtttttaatagtatttgttgggagttatattcttcaggcaattcgaattgtacctgaaagtgccactttgtatgtgaacatcttacaacttattgttatattaactttaataatacgtccgtttgcaacaaatcctaaacggagaagcctaagggttttttggattactgtaagaaaagatagaaatgtttatgcagaaattccatatgaaatgattgaaaaagacaaggaggtcacaaatcatggcaatgttcaaaacgccacaagaaactacaaagacttcctctaa

SEQ ID NO: 408947 - DNA, 789 bp, Staphylococcus aureus
atggcaatgttcaaaacgccacaagaaactacaaagacttcctctaataaaactttatttaaggaggcatcatcagaaaaagatgatgcttcttctttatttggtaaggtttttgaggaagaaactatgaaaatatcttctaaaaaagatgaatcaacttcaactatttttggagatattaacgaaaccaaaatcaaaaggaagaaactacgtaaaaaaagatttgaatacaaaaataagcctataaagctttttaagccttatagagcatcaaaaacctttttggatatatctaacatcatcagaaggacggaagagcatacaggtggcttatatgtacttagagatggtacctatatgaaattctttcaagtgaatccaaaagatattatgagtagaaattcacatgagcaattatatgatatgggcgtgcttcttaacatgcttaaaacttacaacaaagacaataagattatcgcgttaaatatgccgatagatacagaaacgcaaagaagccatttaatcagaaaatatgagaaagaagaagtaggtatatacaggtacttcttagaacagaggataaaaaaactggaatatttagaacagtcatcaagaatggaacgctcttttttagcaatgttatttggcaaaacagcacaagaacttaatgtaaacattcaaacatataaaaagtcaatggctagaggttttccaattaaagaattaacgaaagaacaagaaataaaaatactttataagttaaataatcaatgcgaagaaattaagtaa

SEQ ID NO: 408948 - DNA, 1998 bp, Staphylococcus aureus
atgagcagtgtgtatagcagatggagagaacgaagaaaagttaagaaggcgattgatagtggcacactatcacaatctgactttgatattgaattactctctcagatacaaccaagaggcggcgttaattttaaaaatgacttctatgtaagaaaaggcacggggtatgagacttgtataactatctatgagacgccaactgatgtagaagatttttggttaggacaaattatgactatggataataccattattacaatggatttgaggacaaaaacaaaagaagaaatcaagaacaatttaaaaacaggtatgacagaatatttggatcgtatgcataatgatagagatgttgtttcaagaactgaagctgaagaatcgtatcaagaactcaatacattattaagaaacgttcgaaatggtggagagtcgataaaagaagtggtgataagactgtatgtgagtgggaggacaaaagatgaagtcgacgaaaaattaaatgaaatctttgttttccttaatgcaatggactttaaaggcactgtttatcttaatgagcaaaaatttgaaagtcaggcacttacgatgagcttaacacaacaagaatctgtactaccaagaataaaaaaagatataccgtcacaaacaatagcaataggcgtgccgtttcattcagtatcgttaaatgatgaacacggggtgtatttcggagaatcggatacgggaggtaatatcctgcttgatttgttctataaagacagtagacgtacctcatatgatggcgtttttgtaggcgctaaaggtgcggggaaatctcacgcacttaagaagatattattagaagaggcaatacaaggtcacagaatgagaaccattgattctacaggagaatttgtaaaattggtagatgttctaggagggaagactatatctttagatgggacagatggcatgataaacccgctagaagtaaatgcagtagctgtaagagaaaaagttgatgatttaggcaaaaacgtgcaagaaatcgatgaagtcacatcttttaaccagcataagcataaattaagtacgttttatggattgatgaatccagacgccaaagctaaagataagcagcttttcagaattgttattgaccaattttacaaagatattggcttatggagtgctaatcctgataagcaaaccaatatcactaacttaaatcctgaagactatcctactttttcagagttgttacagtacttacgcgaattagtatatgaagatcaagaatttaaaaatgtgagaccaaatatatcagaggataggttgaaacaatatcaatcaatagagttaacgcttcaagatattatttcatctaatggcgcaatgtttgatggccatacaacgattgaaaactttaagcagtactctattattaacttctctattagacaattaaatgcaatgggtgacgaagtaaaaaaggcgcaattatttaacgtaatgaacttgttgtttgatgaaatggtttactttggctctcctcaatttcaagcttataacagacgcgaattaaaattagaggatgcggtaaggtatagattgatttttgatgaagcgcataatttaatttctgcaagtgaaacagatgcacctgtagttgaaaaatgcgaaaaatttattcgagaagatagaaagtattttgctggatttatatttgcttctcaagatattaaagactttattccagaggattcacaagaacagaatgttgcgaaagtgaagacattgttttctcaaacaacgtataggttcattatgcgacaggacacttcaaatgttgaaaaattaggaaatgtattttcgcaagagttgagtgattctgagttaagtgtaatccctcagttgggaacaggtgaagttattttaaatattgctggagtaaacaatgtaaagtttaaaattgatattagcgaagaagagaatgacttgtttggtgggggtgcgtaa

SEQ ID NO: 408949 - DNA, 1107 bp, Staphylococcus aureus
ttgaaaaatcgcactatagcaaaaagagcagccaaacaagctgtaaaatttattgctcataaagcgaatattgctttatggaaattatggctattattgggtgctgtgttattttctattttattaacggttgttattgttgggacaattataactgcggttagagtagaaaaggacaaacaggagcaagctacatcatcgtcaaaaggttgtgaagttgtaggaggtaacctaaaagaaggaggactacaaacttttgaaaaaaacgctaaaggtggcgcgttagaaggtaagtcagaaaaaatagttgaaattgctaaaaagaacaaaataccaccttcactttttatggcgattatagcttctgaatctggatggggaaaaggcgcaaatgcgacaagacaaaacaacccactatcggtaatgggtaacaaatcaattcaagattcaacctacaaaaccatagaagacggattagaagatggcgcaagaaatttatatgacttatacatctctaaaggattaacaacacctgaaaaaataggatctaaatatgcacctgtaggtgctgctaatgatccaagtaatatgaatgcgcgttgggttccaactgtaaaaagtaatatgaaatcattaggagaagtagaaaaaggcggcacaacggttagttgcgacaacgacataccagcgggagaatctatcgaaaaattgaaaaaagttattgaaaaacatggtgggaagttgccgaaatatggaaagaaaacatttgaaccaaacacatatgcttatcatcaatgtacttggtatgtctataaccgtagaaaagaattaggtttgcctgtggagctatcttttggtaatggcggtgattgggcagacaaagcaaaagcacaaggatataaaacaggaaaaacccctaaagtgggtgctatgatatcttggccatacaattcaaaagcatttggttcaacgccatatggtcacatcgcttttgttgaagaggttaagaaaaacggagaaataagagtaagtgaatataacattattccttttacttatggagaaagaaccttcaaattagacggtgatgaaacatttatatattaa

SEQ ID NO: 408950 - DNA, 612 bp, Staphylococcus aureus
gtgtctaaaaataaaaagcatgcgaataaaagtggtaaactgcttggctccgtaattatactattatctttaataggacttataatttattttgtttttcaagaccacaatgaattgaataaaactgtagaaatacaaagtaaaaagataaagagtttacaaaagaacaatgaagaaaaacaaaagttaatagagagattagataataaaaatgttgttaaggaagaagaagtacttaggaggaaggcagaagactttgtaaaagtattatatgtgacaagcactaagacagatgataaaaaaaggtacgaaaaggctaaagaattaatggataaatcacttgctgatcagtattttggagagacaagacgttcacctataaaatatgaaacagatatacaagatgttaaaatttataatgaaagatattctcctgaaaagaaagaatatcatatgtatttgacattaactcaagctataaaaggtagttcagatggtatagataaaagaaaaatagcttcagaattaacacttaaacaagaaggcaataacatttggaaagtgaataaatttaaacaatttgatgaagaaaaaatagaagaaagcaaataa

SEQ ID NO: 408951 - DNA, 846 bp, Staphylococcus aureus
ttgaaagaattatttaaagcttttataccaggtaaaacttctataagaaataagggcagttggctattttatgtgctaactgtctttattttaggttcgtttatattgattttagctagtcgatttttcacagaggatccagttactaatgttcatacacctataaaaaaatggcaaaatacatctacttctggcagtgtaagaattaaccaatggacatggaacaaagagaaacaaacaatggattttgttattgaatataagcaagaattagacaaagatgttattcaaaatgttcaatataaaataatacctaatgcgacccctgatgttgaaagtaaatataaaattataaatcaaatggataataaacaagcgattagagtttatgatgtcaaacctaattttgaagttttagtagttaaaatcttaagtaaagataaagaatcagataatgaagaggagatattaaaagtgtttggtaatgaaaaaaatgtatcaatagagcagaaaaaaacattgccaacgaaagaagattaccagttatcttttatcaaagatgatattgaaattaataaacaaaatttaaaaaacaaggaaaaagaaaaagtagaattaaagaaaaatatagaagatttaaatacagaaattaatttgttagatgccaaaaaaacatatcaaatttcagatgaaaaagaagaaacaaacaatcaaatagaagccaaaaaatctgaaataaaagagaaagaaaacgaaataaataatgtagaagaagctgagaaaaaactacaagaaaaaatcgatttgttgaataaaaaatatcaagcaacaaacaaaataagctaa

SEQ ID NO: 408952 - DNA, 255 bp, Staphylococcus aureus
atgccaacaaaagatatttttattaggaacgttaatgtagatacattggagagaattgatcgattagcaaaacaaaaaaacatatcaagaaacgattttttattaggtataatagaacaggttgatccgttagaatgttaccgaagtttgtatgccgaacaatcacaccaacaagcacaaaacacaaaagctttaaaagaattagcggataaaatagaccgagtttataacactattaatgatttagaatattaa

SEQ ID NO: 408953 - DNA, 1149 bp, Staphylococcus aureus
atgccaaagattgtaacagtatctcaatttgaacaaccaaatgaattttatgaatacagtaattatgttaattatatgaaacgtggagaagcacaaaataataaagatgattttaaatatgatgtttacgcacactacatgtttgacgaagaaaaaagtcagaatatgtttaatgaacatgataactttatgtcgaaaaaggcgataaataaaatcaaaagtgattttagtcatgcacaaaaaaataaaggtatgatgtggaaagatgttatcagctttgataattcagctttagaaagtgtaggtatatatgattcaaaaacacatacattagatgaacaaaaaattaaagaagctacaagaaaaatgatgaaaaggtttgagaaaaaagaagggcttgaagaaaatttagtttggtctggcgcaattcattataatacagataacatacatgttcatgttgcagcagtagaaaaagtaattaaacgcactagaggaaaaaggaagccagcaacactaaaacatatgaaatctacttttgccaatgagctttttgatataaagggagaacgtcaaaaaataaatgattttatacgcgaaaggatagttaaaggtattcgtgatgaatctgaactatgtaaagacaaagccatgaaaaagcaaataaaaaaagttcataagttattggaagatatcccaaggaatcagtggaattataacaataatattttgaaatatatcagaccagaaatagataaaataacagatatctatataaaaaattatcacagtaaagattttgaagtttttaaaaatgacttaaaaagacaaaccaatttgtacaaagaaacttacggcgaaaattctaattatggctcatatgaaaaaacaaaaatgaaagatttatatgcccgttcgggtaatacaatattaaagaacatcaaagaattagaccaagatttaatgaaagtaaagcaacaatctacacattcaaaatcgaatgcaactataacaaagttaaaaataggaaagtgtcttaatcaagcactatatagaacaaaatacgcattgcgcagtgactatgataaagaaaaaaatatacagcaatactatcaagaatttgataagcaatcatatagagaaaggtag

SEQ ID NO: 408954 - DNA, 387 bp, Staphylococcus aureus
atgtctaaaattcaacaacgtataagaattgaaggaaagtatttggatttattaacaaaaatccaaagagaaaatgactttaaaaatagcggtgaagctattgaatatattattaatgaatatctaatgttgaaagaaagagttgatgaaacatcagagttaataagtaatatgaagaaaataacattaatcatgaatcaaaattcaaaggatattaaaacactagttgaatttgcgaatacgactgcctatttagaaggttttgacgaaaatagaagcgcacatagcgaacctacaagttggttagaaagtgcgaaaaaagatgttgaaacgcaaatagaagaaaaaagaattagaaagatgactaataaaaataggaggggttaa

SEQ ID NO: 408955 - DNA, 564 bp, Staphylococcus aureus
gtggaaaataattttttaattagtgatgctgaaccagctacatttgtcaaattggctgggaatattataacggtagaaacagaagaatttgaatatgacttcagacttacagatgcacaattagaacaatgttatcaaaagctaagcaaggataatgaacttaattttattatcaatccagataaagggatcattgtgattgataatgattatgacgttacgcaacaaagtgaaatagacaatatcgaagattattttttcgccattgaagatatgcctataacgtcaaaaacttgtgaaattgtaaaattatttagcgttaaaggaaaacattacgcagaaatagaaacagaagataatgaacatctaactttatttattaaagaagatgtttatcaagttattaaagatacgttacaaagtttcgaaaaaacagatgatatagacaaagtatatttttcatatagtcctgaatttcacaaaataattttgaatgatatgtctgattttgatgaaggtgatttacagttggggaatatgatgtttggagatgatgaacaatga

SEQ ID NO: 408956 - DNA, 1326 bp, Staphylococcus aureus
atgaaaaaggctgagttaaaccattttattgaagaaacttcagaacaagctttaaaaaaattagaagaatttttttattctccagacagcgtagaagaatatataagctttctttctcaattctataattactcccctagaaaccaattattgattgctaatcaatacaaaggcgcacaagcaatagcaccttataaaaagtggcaatcattaggcgcacaagtacaaaagggagaaaaagctattaagatacttgtaccatctgaaagaaaaacctttgtaagagacatagataataaaaaatctgttttgccaataaaggaagcaacaaaagaagagaaagcacttatgaagaaaggcgaaattaaaataaataagcaactggtttttgtaaaaggcagtgtatttgatattcgacaaacagacatgcctgaggataaataccctcaaatgattcaacaattacgtggagaagtaactgattatgcaaagaaaatacagtgcctaaacgctattgctgaagcttacaatatagatgtgaaggaaagcgaggacagcattcaaggcgcgagaggatactatacagaaacgtcaaccggagataaaaaaatcatcttaaataaagataatgaacaagcagaaaacacaagaacgatgatacatgaattaagtcatgcgcttttacatggaaaggataaaacaattgaaacaccaacgactttgggaatgaaagaagaagagtttcaagcagaaatgacagcgttaattgtaggtagctatatgggattagataataatgatgattcaatacagtatatatatggatacgcaaaaaatatgtctgtcgaagataaaatgatgttgatgaaaaatgttcaaaaagtatctagtgaaatgataaaagccattaacgataaagacgctaatgacatttatttagaaattaacaaatatccaaatgaagttatgattaaaccaaacaaaactaaaaacaatacttttcttagaaacgatcagctatataccatacaagacgctaattatttttctaaagaaatgtatagtcaatttacacctacgttagcgcatcaagaaaacaataaaacaaacattatacaaggcataccatttagctatgcacctcagcaaacgatgttagaacagccaacattttacgagtacgtcaagacatatatcgtctcccaagacccaagttctaaatctaaagttgatagagctattgagaaagactcgcagtctattaaacatgcacaaaacaaaaaagttattgatatttatacttctgacaatcagatagagcgctaa

SEQ ID NO: 408957 - DNA, 672 bp, Staphylococcus aureus
atgaatcaaaatgaacagggtaaaatttatcaaacatacttattgaaagaatttttttcggataaaccgcttttcaatgttgaagctctgacagaaagagaacaaaatgacttacaatatttaaaagaaaacctaaatcctaacatcaaagcagtgattgaagagagtgtagcaaacgttatttcgcctttttatgagttagacaaggctactaaaggtttaagagaagtagaaaatcaaatgaaaaatgtagaaaatatcgaaataaaagattatgcattttcaaaatatgaagacattatttatcaaaaatcaaatcaaaataaagaaaacttcaattatattaatcaacgttttcaaatagctaaaatcgaacatacagagccaatggaaacacaattaaacaaatgtgaaattacaagctttaaagatgggaaaatagagcttgaagttgcaaatcagctttatcaagtcactataccccatgaatcatatttaaaagtagtggaggcgccaaatagatacgatttcatgctagataaatcaacaggaaacatcatatacaaagaaaagacagaaactatagaaatgagcaatgacggcttagaacagacgccaagacatcttaagaaacaagttgtagatgagcaagataatgaattagaaagataa

SEQ ID NO: 408958 - DNA, 2118 bp, Staphylococcus aureus
atgaaaacagttatttttgctgaaaaaccctcacaagcaagagattatgccaatgctttaggaatatcacacaaaaaagatggttatatcgaaggtgtaaatcctatgtttgacgggggagtcataatcacatggggctttggccatctagtggaattaaaattgccaaaagattactcaaaccctataaataattgggatttaaaaaacctaccttatcgtccaaatccatttgaatacaaagtatcagaaggtaaaagcaagcaatttaacattgttaaatctttatttaaagacgctgacattttgatcaatgcaacagatattgatagggaaggaagtaatatcttttattcaacattaaaactgaccggagtcaaaaacaaaaccataaaaagactatggataaactctcttgtagaaaaggaaataaaaaaagggtttcaacaattacaaaataaccatcaagattatcaaaattatcaagaagcttacgcaagacaaacaagcgattatttaattggtatgaatttgagccctgtatattcaaaaatatttcaattgcaaggtgttcaagatgttttctcaatcgggcgtgttcaaacgccaacgttatatatgatttacgaacgttacttagcaatcgaaaactttaaacctgaaacattttatgaaatatttggggagttcgaatctaaaaatggttgctataaaggaaaagccaaaataaaaacaactgataaacaagaaattattaatttgggagaaaagcacaatttgaaagatgctaaagaaggcataattactaaactagagactcaagaaaaacgcacatcatcacctaaactacactctttatcaacattacaatctaaaatcaataaacagtataaatatagtcctgaaaaaactaagaatattgttcaaagtttgtatgagaaaaaaatactttcttatccaagaacggattgtaactacatcacgagtgaagaatatctttatttgaaggaaaacttgcaatcactaatgaatgtatataacaaacatttttcaattgtgtatgataagccaagagctcgatatgtaaataacgaaaaagtaaaagaacactatgcaattatacctacctctcaaatacctacaccacaaaacattgagaaattaagccaagatgaaaaatatgtgcttgatgaagtagtaagtactacactaagtatgtttgcgaatgactatgtatatgacgaaacaaaaattgaaaccaatgtaaaccaacttattttttacacaactggtcacaccgaaatacaaaaaggctggaaaatcctatttaaacacaaaggcaatgaaaaatctccagaacaacaattaccaaaactcataaaaaatgaatgtgtaaaggctagtatttattcaaaaaaggggattactcaatctccaaagctttatacagaaggtcagcttataacactgatgaaaagttgcgggaagtatttagacgatgaagaagctgaaatattaaaagaaatacaaggtattggcacagaagcaaccagagatggaattatacagagtctaaaaaataaaaattatatcaaaatcgaaaaaaataaagtgcacattacagcaaaagggattttgctttgtaaagcagtaaaagggagtctacttgctagtgctacaatgacagcagcgtgggaaaaacgcttaaagctcatcggacaaggacaagcaaatactgataactttattgatataacaatgaaattcatagataaagaaattaaagcataccaagagaaatgtgaagacaagtcgataatcaaccaaagtaatattgttgcaaaagataataaatttggagaatgccctaactgtacagatggccaactcatagataaaaacaaaattattagttgcacaaattgtgaacaagtattcttcaaaaatttttatcagaaaaaattaacagacaaacaaattcaagaattgatttttaatggtaaaaccgcaaaaaaattgaaattaaaaaacaaagctggaaaaacgtatgaagcatatttaattttgacagaagataagaaaacaggaacgaagagatataacattagttttgattaa

SEQ ID NO: 408959 - DNA, 1350 bp, Staphylococcus aureus
atggaaacacctatcaaagacattttgaaggaaaaatataaaatagatatagacaaagaagctttgcacgagctaattgcaaaacaagttgataaagaacttttaaaacgtatgagttcaaaatcgcgtgaaaacttaggactaagtggttatttcactgaattacaacaatctattacaggcattaaagcgcgcttacatgaaaaattcacaggagaaaccatcaataaaaatatacatggaatcaaggcttttctctccgattatgccataaatcctaaaattatcagcgaaaatattaaagagttgttaggcaaaagtaaagataacgtggtagatgcattttcaaaaataaaaacactttttaaagaggaacaacaaaatttaaggcatacagagctgaataacgaaatattgttaagtgaaaagtttagtgacttacaagatatgatgaaggatagttataacataataaaccatgcggaaaatattaaagagttaaggaattataaacaaataactcgattagaaattatagaacaaacactagcgctcaaagaaaatcctgaaacagaaaacaaatataacttcaataatttcagtaaacacatagattggagtaatcaagataaccaaacgcaaatgttggaactatataattatcttaaagatgctaatgaggcaattcatttcagtgatccttactctatagataacgattataataaattacaattagagcaattcactctacaaggcatacaaaaaatagaagcaagtataaacgcaaaagacttaaatgaaagcagacttaatcatttagaaaataacaggaatacatctttaaattttacagagaataacttgaaaaattttaacaaggagttaaaaggcgttcatcgctcacttactaaagaatccgaacaagctataaaagaaaataaagttatagaattagagcgggaaaaagagatatacgaagcaggaaaaatacaggaatcagagttatttcaaacattaaacaatcaaaatacttttgctgtaactccagaaaaagacccatctgagttagaaaaggcaaattttgttggaatagagcaaggagaaataattgtagaagttgatgaaaatttatacgcgttaactttaaacgataaagacaaggagaaaatacaaaagaatgcagatatttttgaatttacgtataatacccaaacaggagaatttaaatattctgaaaacaaagaaaactctgttgtgaaatccaaccaaaacgttatatcaaataatcaaaatcctcttccaaaagaatatatagaacttgccgaacaagaaaattatgaaagataa

SEQ ID NO: 408960 - DNA, 1017 bp, Staphylococcus aureus
atgagtaaacaatcctatacaaacgaagaaaaagaacatgcaagaaaaactgacattagagaaataggagaagcttatggacttacatttaaaaaagaaggcaaatatgatagatgcatagagcacgattcattgattctaaaaggacaaagttattattggaactctaaaggcgtaaaaggacatggcggtttatctttttgtatagatgtattagacatggattttaaagaagcaatgtctattttaacgcaagatggtttttctcaatataaaaatgacaatttttctataaaagaaaaaaagactttaaattacaatacacaaactgaaatgaaagatagtacaagagcttataattacttagtaaatgaaaggtgtttagacccaaaacttgttagatgggggttcaatacaggagttatagctcaagacaaacagaacaatgtttgttttaaatggttagataatgaaaataacattgtcggggtagataaacgtggtacagggagaaaggcttttaaacaaattgtagaaggatcaaagcaacatagcggatttcacattgatatcattcaagataaaaatataggtattcgtaatgttgttataacggaaagtcctatagatgccctcagttattatgactcgcatagggacttaaaacaaactcgaatagcctcactgtcaggccttaaattagaaacttttaaacagcacattttagatgttggcaaatataatttgaaactaggagaagaaccaaaagaatacccactagaaagtatagttttagccgttgataacgatgaggcagggaaaaatttcgtaagcagcatcgttaatacttacgaaaatgactttacaatagatttacctttaaactctaaagattggaacgaacaattaaaaaaggataaagcgataactgacggaaaaacgttatatcaaaaaaatgaaataaaagagcaattgaaagaacaaactcataacgaaaaagatgatagggagatataa

SEQ ID NO: 408961 - DNA, 1203 bp, Staphylococcus aureus; identical to SEQ ID NO: 407398

SEQ ID NO: 408962 - DNA, 195 bp, Staphylococcus aureus
atgatgttttacaataaatataaaaacgtatcaacatatttgttaagtgcgaacattagtgctcactcggaacaagtgtacgaaatgactgaccatcaaattaagaacaatacgataaataaagcatacgaacataaagaccctacaaacaatagcgaacaaagagatgggaaagtgttcgctttaataaattga

SEQ ID NO: 408963 - DNA, 405 bp, Staphylococcus aureus; identical to SEQ ID NO: 405159

SEQ ID NO: 408964 - DNA, 1266 bp, Staphylococcus aureus; identical to SEQ ID NO: 407297

SEQ ID NO: 408965 - DNA, 1389 bp, Staphylococcus aureus
atgaaaaagatattttattgcttcctattgatattttctattttaatgctatttggaggaataaatgaagttactcaaaataaattgacttttatagatatttttatgtttgctatttttatatctcttattgtatttagtatagttaaattgtttaagcataatcatttagattataaaagcaataaatccaatactaatcacaaaaatatatctaattctaagacgactcagtttaacactgttcaatcaattgaccatattagaaaaaataatatcacacatgatattgaaactaataatactaaaaaagtaaaacaggtaaagtcaattacaaacaataaaactaatacattaaataaagaccaagtaaaattgaatgaaaatgtccaagaaaataatcaagatttagttatagatgttaaagatgataacaacaataattatcattatgatttaaatgctaacgatattttaatattgcacctaaataaaaatagagaagttggaaaagaagttaaaaatcatttttatttgctagaaaaccaaattaatgtagatgaaattctaaacaaattaatcaacttagattatctagatataaaatcgaattttgatgtttctttattttatcttaaagtcccagaattaaaagaaatattaagagaatataaactcaaattaagtggaaataagccagaattgatagaaagaatcaaaactaatatagatgaaaatgcgattaaactaccacaagtatatgttccaacttcaaaggggaataaaataattggtgaaacggaatatattttacacttttataacagtccaattatttcattaggttcagcacataaaatggcaaaagaagtattaaatatagatgataaaatagagtatatttatttttatttattacaacaaaatcaaaaatcaaataattcagatcatagaacagcaaatatcataaatagtttagtgctttactataaaaagactaataaagataaagacgttataagaaaatatactaattatgctacttatttatcagtaacacaaggtatccactcagcagctttcctatactctagtgaagaaaacattatagatagactatttatatattttaattatcatcttgaatattatgaaaacatgttatttatagacaacgttagtagacgtttatttaaaaacttattctatgaagatattaaatctttcgaagatacagataaaaacttttgtgatgaaatctgcgaattactatttgctcaaatttataataatagaaatattacattaaataaccttccaactataaactatgttttagaaaaaattaaaaaagaaaatgaaataagaatgacaaaatatgacttttag

SEQ ID NO: 408966 - DNA, 573 bp, Staphylococcus aureus
atgcaacaaaatagtcttgaagatttttcaaacattcttaaaaattttagaaaagaagaagatttaactttagatactctttcaaagtacttaggtgtatcagatgtgtatgttagtaaattagaaaatggtaagcgctttccatctaaaaatattttattttggtatgtattgtttatggatcaatctcaaatgcatgatgatattgaaaaattactaactatatttagtgaaaacaaaaaaataagctatgaacaattgagaacagaatatgacgagtttgttaaaaaattccgagaaaaacaaaaaaagcattcaagtaaaatccaaagaaaagaaattaaacttactatgaacgaatttaatcaataccaaattgaggaaatagacgagccttactttgatttaaaatggctattaaaccagtctgaatataagctgttttatagtggcatagataacaaaaattctcttggttttaatgaagttttatcagaaagcgataaaaaaatgttaagcgagattgttaattcagtaattcaaagaatatataatgatgaaaatcaaaaataa

SEQ ID NO: 408967 - DNA, 222 bp, Staphylococcus aureus
atgattgctaaagtgaattatttgaaacgtttgattgcatttgaaggattgagtttaaaagattttgcaagcgaaatagaagtgaattctaactttttgaattccattgttaatggtaaaagaacgacatccccaaaaacagctaataaaatagcgaaaagactcaatgttgatataaaagatattttcatctttatagaagaaaaagaggaggtcaaataa

SEQ ID NO: 408968 - DNA, 273 bp, Staphylococcus aureus
atggctagaacaaagttgaaagatataccgactaaggaaaatacaatcagtgaaccaaaacaagttgtagtaaaaccactgtttgctaaaccaaacgcgcttgcaagtatttttggtatttcgtatagttcgacaaatcgtattttaaaagagtgggagaaagatcctaaaggtgttgacgatttgtattattcattgtcatcaactatgacggttatcagtattcctagatttgaggagtacatgaagaaacgtcataaaaaatggatgtag

SEQ ID NO: 408969 - DNA, 156 bp, Staphylococcus aureus
atgaaaatgtacttaacttatatttgcttagtttcattgttaacaatactattactagcaatatctaacatgtatgtcgcttttagtgtgtacggcatgatggtaacttatggatttaatttaacaggagagattacaacgtgcgaaaacaagtga

SEQ ID NO: 408970 - DNA, 204 bp, Staphylococcus aureus
gtgcgaaaacaagtgattattacaaaaacagtagttggctggtacaacattaaagatactcaacataatttaatgttaaatataccgccaaaagtatttgaacagtgctttcctgatgttagtaaagatgttcaagttgcgtgtttagaaatggatttatcaaaaattacagaaattaaaaataagaaaaaggtaggtagttaa

SEQ ID NO: 408971 - DNA, 384 bp, Staphylococcus aureus
atgaaaatcaaacaaaaatatcaattatcaaaagtggttaaagtattagaagtagtattatacgagaaaagtaaaacttatgatgatattagttatctcaatgaggatacagcattttatgaatatgctttaaagttagttcataatggattgttcaatattcttgctgaattagattttgaagatgaagcatttttaattcttgatgaagtaacgatgacgctaagtgatgtcatgaaagaaacacaacacgtttatcgttatagtgtcatagatgaaaaaggtgaacataaacatacaacagatcgcaaaggacacgtgattgggatattagagtgggcattagattacattgtgggaaatattgaagtggaggaattataa

SEQ ID NO: 408972 - DNA, 804 bp, Staphylococcus aureus; identical to SEQ ID NO: 406805

SEQ ID NO: 408973 - DNA, 471 bp, Staphylococcus aureus; identical to SEQ ID NO: 406804

SEQ ID NO: 408974 - DNA, 900 bp, Staphylococcus aureus; identical to SEQ ID NO: 406993

SEQ ID NO: 408975 - DNA, 492 bp, Staphylococcus aureus; identical to SEQ ID NO: 405184

SEQ ID NO: 408976 - DNA, 300 bp, Staphylococcus aureus; identical to SEQ ID NO: 405183

SEQ ID NO: 408977 - DNA, 153 bp, Staphylococcus aureus; identical to SEQ ID NO: 405182

SEQ ID NO: 408978 - DNA, 219 bp, Staphylococcus aureus; identical to SEQ ID NO: 408091

SEQ ID NO: 408979 - DNA, 612 bp, Staphylococcus aureus
atggagttcttattattaattgtcgtagccggactgtattatattatatatttaactgctgtgatgtattctgaaaaaatagtagtattgcctataatcatctatgccattgtgtttgtaataattggtatcacttatatctttataggcgacagctatgatcaattaacaaatttcaatgtgattttgtatatggggagtttgttttatgcatggatggctattagaaatctttggaacagaccactattactaaaatataagaacattacagatagttcaagtggaatagttaataaatctgaatacaattcagttgaaagcttacgtataaatattgaaatagctaagtataaagggattatttctttgatagtagctatagtactaacggtattaatgacattaaagtcaacacctcaaatcactgcagaaacacgtgacttaagtatctcatttttcatactcagcttatttatcattattatatttgcagtttgggatttgtttattagagttagaaaaggaacgtttgcttttgttgtaataaatctattattattcagttgttggttatttattttgaatatgattttatcaagattattataa

SEQ ID NO: 408980 - DNA, 1101 bp, Staphylococcus aureus
atggaaaatggaaaaaaagttaatgatttggaatatcctctattctttatggtgactaaaaatctatcaaaaaaacaagaattaatatcaattaatagtagaaaaattgatagagcacttaattctttaccatatgcagctagagaacaatattttaatgatttattaatcgatgaattacaaagtactaatgaaattgaaaatgtatttagtactaaacaagagattgcacatgcgttaaataaccaagcatcagaatttcttaagttcagaggcctcgtggatcaatataaagagatagaacttaataaaaaaattaaagttgataatgtaagagacattagagcgatttatgataaattagtttcaaatgaaattaacgaacaagataagttagatggagagctatttcgtaaaaattttgtcggtgtgcatgatgggtcaacgaataaatatatacatgttgggttacaacctgaaaccaaaattgttgaatttataggtgaaatgctaacatttttaaaatattttgatgcgcctcagccgttcaaaatcatggctagtcattatctgtttgaatatatacatcctttttatgatggcaatggtagagttggaagatttataattgccaagctcttgagtgattattatgataattatactgctttgacattttcatatgttataaatagaaataaatcgaaatattacaaggcgtttatgactgcttcaaatcatttgaattgtggtgatttgacggaatttattgacacaatgcttgagctattgatagcaggacaagaaagaatacttgatgagttaataccaaaaatggatgcgactgaaaaattaacgctttatttaactagtcattataaacagatagattatgaatttttgtatctcctttcaatggataaattgtttggaaataaaagaaatagattaacattaattgatttagaaaacatattgggagtaggaagagtaaaaattaataatacaattaaaaaatatgataactacttagttaaaattaaaagtagaccaacaatttatgagataagtgatgaatttctaaattcgattataaaataa

SEQ ID NO: 408981 - DNA, 912 bp, Staphylococcus aureus; identical to SEQ ID NO: 406760

SEQ ID NO: 408982 - DNA, 846 bp, Staphylococcus aureus; identical to SEQ ID NO: 406759

SEQ ID NO: 408983 - DNA, 324 bp, Staphylococcus aureus
atgattgcctatccaattcgggtaggctctgtttataggggtgaacaaatgaaactgcttaaaacgaagaattgtttatattatcgtaatggcgacaataaactatctgagtatcaactattaacgcaatttaacccaacttttattaataaaaaaattaggatgtgtgaattccaaattgaaagtatgtaccatatgagtgcgtcgaccacaacatgtgatgaaataatgggagtcgtgtctgtctcatatccaattgaaaaactagttatcaaaattattgaaacaaaggcaagattacaaaactataaaaacgatctataa

SEQ ID NO: 408984 - DNA, 255 bp, Staphylococcus aureus; identical to SEQ ID NO: 407415

SEQ ID NO: 408985 - DNA, 411 bp, Staphylococcus aureus
atgacacgacctactagagaggaattgttaagttactttaaaaaatatggagtagagagagtaaactctattactggcgaagaaagtgcaatacattattttagaacaaaggcgttttactatagagaagaaaacaaaaaactttctgaaaatatcgataaactagaaaaacgcaacaaagagttggagaacatgtggcgcacgcttaaaaatgaattgtttggaagatacgaattttaccgttttagacttagcgaactacagattgagagcagagcgaacaggataggagctctctatataggaggtaaaagcactgcagatattatactgtcgcgaatggaagaactagacggaacaaatgagttctacgaatttttaggggaaatggaggaagacacaaatgaataa

SEQ ID NO: 408986 - DNA, 141 bp, Staphylococcus aureus; identical to SEQ ID NO: 407391

SEQ ID NO: 408987 - DNA, 1557 bp, Staphylococcus aureus; identical to SEQ ID NO: 407394

SEQ ID NO: 408988 - DNA, 165 bp, Staphylococcus aureus
gtggcacatatccatgtagtgaacggcacttattactttcatgggcatatcgtgccaggttggcaaggcgtgaaaaagacatttgatacagcggaagagcttgaaacatatataaagcaaagtgatttggaatatgaggaacagaagcaactaactttattttaa

SEQ ID NO: 408989 - DNA, 207 bp, Staphylococcus aureus; identical to SEQ ID NO: 407405

SEQ ID NO: 408990 - DNA, 543 bp, Staphylococcus aureus
atgactaacacattacaagtaaaactattatcaaaaaatgctagaatgcccgaacgaaatcataagacggatgcaggttatgacatattctcagctgaaactgtcgtactcgaaccacaagaaaaagcagtgatcaaaacagatgtagctgtgagtataccagagggctatgtcggactattaactagtcgtagtggtgtaagtagtaaaacgtatttagtgattgaaacaggcaagatagacgcgggatatcatggcaatttagggattaatatcaagaatgatgaagaacgtgatggaataccctttttatatgatgatatagacgctgaattagaagatggattaataagcattttagatataaaaggtaactatgtacaagatggaagaggcataagaagagtttaccaaatcaacaaaggcgataaactagctcaattggttatcgtgcctatatggacaccggaactaaagcaagtggaggaattcgaaagtgtttcagaacgtggagcaaaaggcttcggaagtagcggagtgtaa

SEQ ID NO: 408991 - DNA, 237 bp, Staphylococcus aureus
atgaataatcgcgaaaaaatcgaacagtccgttattagtgctagtgcgtataacggtaatgacacagaggggttgctaaaagagattgaggacgtgtataagaaagcgcaagcgtttgatgaaatacttgagggaatgacaaatgctattcaacattcagttaaagaaggtattgaacttgatgaagcagtagggattatggcaggtcaagttgtctataaatatgaggaggaatag

SEQ ID NO: 408992 - DNA, 552 bp, Staphylococcus aureus
atgtggacgatatatacagatttcgccaaaagtaataaaccgggtgaattggatgatgaaggtatggttttaaatctggataggaatactagaaccgctaaaggccattattttgttactacattttaccggaatggtaaactaccagatgaaaagaattataaaattgaaatgaaaaataataagattattttattagatgaagtaaaagatgataagctcaagcagaaaatagaaaactttaaatttttcggtcaatatgcaaatcttaaagaattgagaaaatataataatggtgatgtttcaattaatgaaaatgttcctagttatgatgttgaatacaaaatgagcaataaagatgaaatagttaaggaattaagaagtcgttataatatttcgactgaaaaatcacctatattaaaaatgcatattgatggggacctgaaaggcagttctgtaggttatagaaagttagaaattgacttttcaaaacgtgaaaacagcaaattatcagtcattgaatttttaagttataaaccagcgaaaaaatag

SEQ ID NO: 408993 - DNA, 357 bp, Staphylococcus aureus
gtggaatacgggtttgctaaaagattattaaatacaaaacgctcattggcattatttttaatggcagaagttgatatttctatattaagtatggttccaagagaatattttcatcctaaacctaaagtgaatagctcacttatcagattaaatagaaaaaaatcaagaatatcacacaaagataaacagaagtataattatttcgttatgaaatgggttaacaaagaatacaagaaaatatttacaaaaaatcaatttaacaattccttaaaacatgcaggaattgacgatttaaacaatattagctttgaacaattcttatctcttttcaatagctataaattatttaataagtaa

SEQ ID NO: 408994 - DNA, 180 bp, Staphylococcus aureus
atgttaagttatggtagattgcttaaacaaaagcataaaattttaaatttagataatgttgaagatggtaatttaattaatacaagtgacgaagataaaacaacagacgaagaggaaaaagcacattcaattacagcaatttggaatttcgaaaagcaaaattattatttaagacattag

SEQ ID NO: 408995 - DNA, 486 bp, Staphylococcus aureus
atgtcatctgacacaaacagtttagcacatacaaaatggaattgtaagtatcatattgtctttgcacctaaatacagaagacaagtgatatatggaaaaataaaaaaagatatagggattatattgcgtcaattatgtgaaagaaaaggtgtagagataattgaagcagaggcatgtaaagatcatatccatatgttagttagtataccacccaaacttggggtatcatcatttgttggctatttaaaaggaaaaagtagtttaatgatatttgatagacatgctaacttaaagtatagatatggaaatagaaagttttggtgtaaaggattttatgtggatacagtaggtagaaataaaaaagtgattgaaaattatattcgtaatcaattacaagaggatatcgttgcagaccaaatctcaatggaagaatatttagatcctttcactggagagaaaaataaaaaaagaaagaaaaaagagtaa

SEQ ID NO: 408996 - DNA, 189 bp, Staphylococcus aureus; identical to SEQ ID NO: 407433

SEQ ID NO: 408997 - DNA, 570 bp, Staphylococcus aureus
gtgccacatattcacggattcaataagcacactgaaattattgaagaagatacaaataaagataaaccaagttatcaattcggtggacacaatagtgttgactttgaagaagatacacttccaaaagtaagcggccaaaatgaaggtcaacaaacgattgaagaagatacaacacctccaatcgtgccaccaacgccaccgacaccagaagtaccaagcgagccggaaacaccaacaccaccgacaccagaagtaccaagcgagccggaaacaccaacaccgccaacgccagaggtaccaactgaacctggtaaaccaataccacctgctaaagaagaacctaaaaaaccttctaaaccagtggaacaaggtaaagtagtaacacctgttattgaaatcaatgaaaaggttaaagcagtggcaccaactaaaaaaccacaatctaagaaatctgaactacctgaaacaggtggagaagaatcaacaaacaaaggtatgttgttcggcggattattcagcattctaggtttagcattattacgcagaaataaaaagaatcacaaagcataa

SEQ ID NO: 408998 - DNA, 807 bp, Staphylococcus aureus; identical to SEQ ID NO: 404882

SEQ ID NO: 408999 - DNA, 783 bp, Staphylococcus aureus
atgacgttctttgattttccaaatattacaaaagggcaggcaggaacaaattccattacaagaccgtcttttagagtgcctaacgatgacgcattaacatattatgaacagcgctttgatgagtttggtgttaaacacgaaggtattcaagaattatttggtaaaaaagtgttgccatttgaagaagtcgatggccaagtgtatcaattaatttcagatgagttaaatgaaggggtagcacctggtgtaccttggaagaatggaccggttccagtagataaagcgatttatggattaggccccattgaaattaaagtaagttattttgacgactttaaaaatattttagagactgtttacggtatgacaactattgcgcatgaagataatgtcgcattacttgaagttggcgaaggaggcaatggtggccaggtaatcttaataaaagatgataaagggccagcagcacgtcaaggttatggtgaggtacatcatgtgtcatttcgtgtgaaagatcatgatgcaatagaagcgtgggcaacgaaatataaagaggtaggtattaataactcaggcatcgttaatcgtttctattttgaagcattatatgcacgtgtggggcatattttaatagaaatttcaacagatggaccaggatttatggaagatgaaccttatgaaacattaggcgaagggttatccttaccaccatttttagaaaataaaagagaatatattgaatcggaagttagaccttttaatacgaagcgtcaacatggttaa

SEQ ID NO: 409000 - DNA, 720 bp, Staphylococcus aureus
ttgataggagctttacaattaaaaaataaaatagattttagtaaggatttcaattttaaagttagagtggcaaataaccatcaatcaaataccacaggtgctgatggttgggggttcttatttagtaaaggaaatgcagaagaatatttaactaatggtggaatccttggggataaaggtctggtaaattcaggcggatttaaaattgatactggatacatttatacaagttccatggacaaaactgaaaagcaagctggacaaggttatagaggatacggagcttttgtgaaaaatgacagttctggtaattcacaaatggttggagaaaatattgataaatcaaaaactaattttttaaactatgcggacaattcaactaatacatcagatggaaagtttcatgggcaacgtttaaatgatgtcatcttaacttatgttgcttcaactggtaaaatgagagcagaatatgctggtaaaacttgggagacttcaataacagatttaggtttatctaaaaatcaggcatataatttcttaattacatctagtcaaagatggggccttaatcaagggataaatgcaaatggctggatgagaactgacttgaaaggttcagagtttacttttacaccagaagcgccaaaaacaataacagaattagaaaaaaagttgaagagattccattcaagaaagaacgtaaatttaatccggatttag

SEQ ID NO: 409001 - DNA, 447 bp, Staphylococcus aureus; identical to SEQ ID NO: 408745

SEQ ID NO: 409002 - DNA, 936 bp, Staphylococcus aureus; identical to SEQ ID NO: 404957

SEQ ID NO: 409003 - DNA, 357 bp, Staphylococcus aureus
atgaggcgatggtttgtattaattttaggattagttatattattatctgcatgtggtcagaaatatgataaagaaattgatgaagttacaaagttagaaaaagaaagtattcaagatgtgaaaaatacaaagaagtataaaaatgttgagcggtcaaaaagttattataagatttataatgatggtgaggttattataatgacttatatgccttttaaagatagtaatacaaaagtttcaagagtatataaaataaatcagactagcgataaatatgaagaagattctaatattgatgctgaaaagtttgagaaagataataaaccagtttatgaagaaaataatatgaaaaaataa

SEQ ID NO: 409004 - DNA, 2496 bp, Staphylococcus aureus
atgaatttaaaagcaccgtatgcaggtttaagagataatttgttattaacgaaaactggcgaagtttgggcgtattatcgtgttcgttctgagtctatatcaacagcaaattatgatgcaaaagaagaatcaaaaaagcgtatgcgttattttttagagtcgattaaaggttatcaagattttcattttgaaatgtatgaccacgatttagatttgcgaaataaatttaaagaaattagtaaagattttgatgatgaagcttttaatgtagctgaatattattcaaaagaaactattgacgtattagaacaagaattacaaatgattacgcataattcttttgttatgggtgttaaaatacgtgaattagctgacgatgcagttacacttaaagagattttaaaaagtacattatcagatacggctgagcgtattgtttcgaattttggttttgatgtgaatttagacgataaaattttagataagtataaaacatttgaacgagatttggctgatagttttctaggtattggaggcgagcgtttaactgagaatgaattggcttatattattagaaagccttttatttcaaatgcaacacatgacgtacaggaagaatcttcaagaagagctattacagatatttataatgcagtaattgaccctactcgcttgagtgttttagaagttgaaaatgataacgagaaattttatacaacaacagttgttgttgatgattttccgttagatatggaatatacacatttatttgagaaagctcaaaatatgccttttccggttgaatgccatgtaaaagcaaaaatcattaataatgagaaagttaagaaaaaatttgaccgtgcgaaaataaatcataaacaacaagcaaaagaaaagcaagatactggcgacagtgcttcggaagatgttcaagataatttgtttgtattgaatcaaatggaacgagaagtgactggctcaggtgtatttattgagtgggtatttatgtttgtaattaaaagtgatgattatagagattgtaaacgtaaagcaaagcgtttgatgaaacgattaaaggaaactcaaatatatgcagttaatccattagctgaccagttacaattgttttatcaatgtttacatggtaatgatttatttattaataagtattggttacaaagaacaacggcaacaggtatagcagagaatttatttggtgtgtctcaaagtttgggaacaaaaacgggtttttatatagggcgtattgataaatttatacgttctgtttcacgtgaggaagctgttgcaagttcaagggatataattttgtttagtttattgttggccgcaaaaggtattaagggggctgtcagtgatagtccgcatgttttaattactggtcaaactggtaaaggtaaatcatttttagcaaaattattatggatttatacatcattttttaaaggtcaaatgttgtactgggatccaaaatctgagtttgcagaatggtttgacagagtaacagaaagtaaggaaatgcaagaaaagtatcccctatttattaatcatttaaaaacatttaaatatgtaacattgaattatgaagattcaaccaattatggttgtctagaccctattgtatttttagatggtattgaagctaatgagatgttgaaatcagtgtttgatgaaattaaatcttttgaaaattatcatcatattgaaacagcgatttatcaagctatttctgatacggttgaagaacgtgaaaatggtaaaaaagttggttcattaaatgtaattgaaaaattacagaataatgaagatgagcatgtaaaaaatgcaggcgatttattatttgaaaaaacgcaaaacaatattttaaaacttgtttttagtgatggtacgaatccagctttaaatattcaagaaaaagcaactattttacaggttaaaggtttagatatgcctaaagcagatgatgatacatcaagttattcaacaagtgagaaaaatgggattacattaatgttattaattggtaagtttttagagaaattcggttctcgtagagatgttcaaacgactatatttattgatgagggttgggcttttagtgcttcaagacaaggtaaaaaagttggtaagcgtataaaaagaacgggacgttctgagaataattcacttgtatttattacacaatcggtaaaagataaagcagatgatgatggtggtaactttggttgtcattttgcatttgatgaaaaagatgaacgtgaggatattttaaaatctttaggcttagaatattcaaaagaatctcctgaaaatatggagatgttgaaagatttgaagaaaggtcaatgtatattcagtgatttttatggacgtgttggaaaaatggttgtacattgtccatttgaggaaatgactgaagcatttagaacacaagaagattctgcaagctctaaagctgaagaaaaatttgcgatgtaa

SEQ ID NO: 409005 - DNA, 549 bp, Staphylococcus aureus
atgagtaaaatttttgtaactggtgcaacgggccttattggcattaaattagttcaaagactaaaagaagaggggcatgaggttgctggttttactacatctgagaatggtcaacaaaagctagctgctgttaatgtaaaagcatatattggtgatatattaaaagctgatactattgatcaagcgttagcagattttaaaccagaaatcattatcaatcaaattacggatttaaaaaatgttgatatggcagcaaatacgaaagtacgtattgaaggttctaaaaacctaattgatgcggcgaaaaagcatgacgttaagaaagtaattgcccaaagtattgcctttatgtatgaacctggcgaaggattagcaaatgaggaaacttcacttgattttaactcaactggcgatagaaaagtaacggttgatggtgtggttggtttagaagaagaaacggctcgtatggatgaatacgttgttttacgttttggctggttatatggcccaggtacttggtacggaaaagatggcatgatttataattaa

SEQ ID NO: 409006 - DNA, 288 bp, Staphylococcus aureus
gtgacactttcagatggcgtaacatcatttgtgcatcttgatgatgcagttgaaacatctattcaagctattcattttgaaaatggtatctataatgtagcagatgatgcacctgttaaaggttctgaatttgcagaatggtataaagaacaacttggtgttgaaccaaatattgatattcaacctgcgcaaccatttgaacgtggcgtaagcaatgagaagtttaaagcgcaaggtggtactctgatttatcaaacttggaaagatggcatgaatccaattaaataa

SEQ ID NO: 409007 - DNA, 1710 bp, Staphylococcus aureus
gtggcttacggtcccgaacaaatactgattacactatcagtagtgggtgcagttgcaacttggtatactttaccgattgcaggtgctgttctgatcttattagctgctttaattatgtcttataggcaaattatttatgcatatcctaaaggtggcggcgcgtatatggtgtccaagaccaatttaggagaaaaatggggattgcttgcaggaggctcattattagtcgattacatactgactgtcgctgttagtatatcatctggtgctgatgcatttgttgctgcattcccaagtttatatgggcataaagtactgattgcatgtttacttgtactttttattttaatattaaatttacgtggtttaactgaatctgccaccgtattatcctatccagtatatcttttcattatagggttagtgatattaatatttataggtactttccgtgtggcgacaggagatattcaaccacatatgcatgcatcagtaggaactgcggttcctggagtaacattattcttgctattaaaagcattttcatcaggggcttcatcgttaacgggtgttgaagctatttcaaatgcggtaaccaattttagagagccaagtgctaaaaatgctgtgaaaacgttaattgctatgggttcaattttagcgtttttattagttggtatcgttggtttagcatatgtttatggaattttgccacaaacggaaacgacagttttatcacaattagctatgcaaatatttggtgataatgctgccttctattttgtacaggcaacgaccgtgatgattttggtattagcagccaacactggatttacagcttttccgatgttagcggcttcaatgtctaaagataaatatatgcctagaatgtttactgttagaggtgatcgcttaggctactctaactcgattattattttaggtgtattagccattattttaattattgtatttgatggtatgactgaagatttaattccattgtatgcggttggtgtatttattccatttacactagcacaattcggtatggttattaaatggattcatgaacgtcctaagaattggttaagtaagttgtctgtgaacttacttggtggtatcgtgacatttattgtttttatgattttactcataactaaatttagccaagtatggccgatacttattttcttgccgttcgtggtgattttcttcttgaaaattaacaaacattatcgagatatcgcagaacaattacgttctgacattgatgttcttaatgtggacgtggtagatcgtaatttagcaattgtgccgataacaagtattacaacagcagttgataagtctatttattacgcacaaatgcttgcgaataatgatgtcatagcagtacatgtatcatttggagatgaagatgaaaaagcattccaagagaaatggaaacgtcatttcccagatgtaagattagttattttacattcggaatatcgcagtattatacgaccaatttcacgttttatcgataagattaatcgtaaagccaacgatcaaaactatatgattacagtagtgataccagaatttattactaagaaacgttggcataatttattacacaatcaaactagtttgcgtatgaaattgtatttaatttatcaaaagaatgttaacgtatgtacaattccatttaaacttaaaaaatag

SEQ ID NO: 409008 - DNA, 918 bp, Staphylococcus aureus; identical to SEQ ID NO: 406389

SEQ ID NO: 409009 - DNA, 585 bp, Staphylococcus aureus
atgcttttttcattattcgttgaaaaagaagagtcacaaaagttaacatatttaaaagaacttggtgaagatggcgaatataaatatgttgccaaaatagatagtaaaacatctaaattatgtcattcactcaacggaaaaatatttaaagttaaagatatgataccaggtgtgaatgcgccacctatgcatccttggtgtagaagtaccacagtgccacatgtcggcaattggcgagacaagttctttaaagagcgtgaaggtaaatatcaagtagaaggttgttttattgaatcaggtgcacttaataataaaagtgatgaatacggtatcaaaaggaacagacatgctcaaatttattataattcagttagaaatcgagataaacagatagagatttctaaaattgctaaaaatactaatataaataaaaatttaattcaaagagtttatgaacatatatttgaaaataagtatttattagaaagtggatttaaacaatttgatcctgacttttatatggctcaaagttggcaacgtttaagagaagggaaaaatattaaaaaaatggatataataatgtag

SEQ ID NO: 409010 - DNA, 249 bp, Staphylococcus aureus
ttgctaatattaaaaataaaagaaattaatgataaaagtgttacatataaatattttcctaataatgatgaaaatattaagcctggtattattcaaatggatatagatagtcttgaagttatcaatgctgaaaaatctagtttagaaaaaaatacaagagataattattttattcatgccatagacagaatatacataaatactagtaaagggctatttcctgaatctgaactcgtagcatggggataa

SEQ ID NO: 409011 - DNA, 267 bp, Staphylococcus aureus
atgttacataaccatcctggacagtcaggattttcagaatatgatttatttacattttttaagcatccatcaataaaatcaatgacaatcgttactaataagggacaagtaaaatttattaccaagtcaaataggtttcatggtaaaatagtgagtaaattttgtgctaaatattttacgcatattaatatcattaatgatagccatattgaaaaattattgaaaaaactttatagtataaatatgattaaatataaagtgagatga

SEQ ID NO: 409012 - DNA, 639 bp, Staphylococcus aureus
ttgattcaaatatctaatatcaacaagtcatttaataaaagatgtgttctaaaaaatatttcgttcgatattgaacaaggtaaatgtatcgctttaattggaaaaaatggtgctggaaagtcaacgttaattgatatattaattggtaatgttaatgctaattctggtgagatatttgataaagacaagttattacaaagtgaaaatcgcagtataatgttccaaaaaacgatgtttccagatcaattaaaagttattgagattatcaacttatatcaatcattttacgaaaatccattaccattggaagaaataatagaactgacgaaatttgattctagtcaactgaaccaatttgtaaataaactttctggtggtcaacaacgattactcgattttgtattatctttaatcggacaaccacaattgatcttattagatgaaccaacatcgactatggatatagaaattagagaatatttttggtcaattattgaaaatttaaaagaagataatcgaacgatactctatacatcgcactatattgaagaagtcgaacgatactctatacatcgcactatattgaagaagtcgaacgtatgtcagacaaaattattctcattgaaaatggagaaataa

SEQ ID NO: 409013 - DNA, 1776 bp, Staphylococcus aureus
atgtattacagttatggaaattatgaagcatttgcgcgccctaaaaaacctgaaaatgtagaaaacaaatccgcttacttaatcggatctggtctagcttcacttgctgcagcttgttttttaataagggatggtcaaatggaaggttcgaagattcatattttagaagagttacctaaagcaggtggtagtcttgatggtgaaaatatgcctttaaaaggctatgttgtccgcggtggtcgtgaaatggagaaccactttgaatgtttgtgggacttattcagatctatcccttcattagaaatcgataacgcgtctgtattagatgagttctattggctaaacaaagaagaccctaactattctcgctgtcgtgttattgagaaacagggtcaacgtttagtcacagacggagacttcactttgactaaaacggcgattaaagaaattttagatttatgcttaacgaatgaagaagatttagatgatgtcaaaataacagatgtattttccgatgacttctttaattcaaacttttggatttactggaaaacgatgtttgcatttgaaccgtggcattctgcaatggaaatgcgtcgctatctaatgcgattcgttcatcatattagtggtctcgcagacttttcagctttaaaattcactaaatataatcaatatgaatctttagtattacctatggttgaatatttaaaatcgcatggggttcaatttgaatacgatgtaaaagtcgaagatattaaaatagatgttacgacaagtcaaaaaattgcccgagaaatattaattgaccgtaatggtaatgcagaatctattaaactgactataaacgatcttgtctttgtgacaaacggtagtattacagaaagctctacttatggtgataatgatacaccagcgccaccaactgacgaattaggtggtagttggacactatggaaaaatttagcgcgacaaagtcctgaatttggtaatcctgataagttttgccaaaatattcctaaaaaaagttggtttgtttcagcaacttctacaacaaacaataaagagattatcgatacaatagaaagcatttgtaaacgtgacccacttgcaggcaaaacagttacaggcggtattattacaatcaatgattctgcatggcaaatgagttttacaatcaatcgtcagcaacagtttaaagaccaacctgaaaatgaaatatctacatggatttatgccttatattcagatgtaaacggcgattatattaaaaagccaattacagaatgtagtggtaatgaaatatgccaagaatggctgtatcacttaggtgtatcaactgacaaaattgaagacttagcaaaacatgcatctaatacgattcctgtttatatgccatatatcacatcttatttcatgacgcgtgctatcggcgacagacctttagtcgtcccgcatcaatctcagaacttagcatttattggtaactttgcagaaacagagcgagacactgtatttacaacagaatattcggttcgtactgccatggaagctgtttatcaattactaaatatagatcgtggtattccagaagtcatcaatagtccatttgatcttcgcgtcttaatggatgccatatacgaactgaatgaccaccaagatttgcgtgagattactaaagattcgaaaatgcaaaaactcgcattagcaggattccttaaaaagataaaaggtacgtacattgagtcattattaaaagaacacaaattgttataa

SEQ ID NO: 409014 - DNA, 216 bp, Staphylococcus aureus
ttgaactttaatgatttggaaatttttataactgtatgtgaagaagcatctatcaataaagctgcaattaaacttagatatgcacaatctaatatatctcaaagaattagcaagcttgaaaatgaattaggtgtagttttgctttttagaaatcaaaaaggtgctaaggcaactaaagcaggcgaagaattcttagcgtatagcaaaaagtattaa

SEQ ID NO: 409015 - DNA, 1017 bp, Staphylococcus aureus
ttgactgtttttaaaaatgagcgcttaagctggttaccatacatagctattgtcattttgttacacgttattgggtttagttttttatggattgctggaaaagaccatcatatcttatttggtatggggattcttgcatatacattaggtttgcgtcatgcatttgatgcagatcacattgctgcaatagataatacggttcgcaaattattacagcaacgcaaagatccatctggtgtgggtttctatttttcaattggacattcatctgtcgtatttttaatggctgtttttttaggggtatctgtaaaatgggctaaagatgaattaccgcatttccaagatattggtggaacgattggtacactagtttcaggtttctttttagtgcttatcggtgtgttgaatctaattattttaatctctttaattaacttgttcgctaaattacgtcgtgaacacattgaagaagctgaagtcgatgcattacttgaatctagaggattggtttctcgatttgtaggaccttatttcaaattaatcacgcgtagttggcacgtattgccacttggctttttatttggacttggttttgatacagctagtgaaattgcgttactcgctctttcttcaggcgcatcacaacaagccatttcatttatcggaatcttatctttaccaattttattcgcatcaggtatgagtttattggatacattagatggtgttgtaatgaagtatgcctataattgggcattcttcaatcctattcgcaaaatctattacaatataacgattactgcgatatcagtcatggcagcattagtgattgggatgattgaattgctacaaattcttgctgataagttagatttacatggtgcgttttgggcattcattggttcgatcgaatttgattatttaggctatattttagttgcattatttttaattacttggcttatttcaagtttaatttggaagtttggtcgcatagaacacaaatggtctagataa

SEQ ID NO: 409016 - DNA, 669 bp, Staphylococcus aureus
ttgcaattttttaactttttgcttttttatcctgtatttatgtctatttactggattgtcggttcaatttatttctattttaccagagaaattagatattcattgaacaagaagcctgacataaatgtggatgaattagaaggcattacatttttacttgcctgttataacgaaagtgaaacgattgaagatacgttgtctaatgttcttgcactcaaatacgagaagaaagaaattattatcattaatgatggaagttcagataatacagcagaactcatctataaaatcaaagaaaataatgactttattttcgtcgatttacaagaaaacagaggtaaagccaacgcactcaatcaaggcattaaacaggcttcatatgattatgtaatgtgcttggatgcagatactatcgttgatcaagatgcaccatattatatgattgagaatttcaaacatgatccaaaacttggtgcagttacaggtaatcctagaattcgaaataagagttctattttaggtaaaattcaaacgatagaatatgcaagtttaattggctgtattaagcgaagtcagacacttgctggcgcagtcaatactatttcgggtgtcttcactctatttaaaaaagtgcagttgtcgacgttggctactgggatactgatatga

SEQ ID NO: 409017 - DNA, 684 bp, Staphylococcus aureus
atgactactaaagaaaatattgatactcttcgaaagccaggcgcacaagccttaagtttaatatcattgtttttgatacttttttcatgtttgactttcttttttggtttagattatgaaaggtttccaaattatttaaagataacgacaattatagaattaataattatcataattagtttacttcaatggattagatttatagatttcgaaaaggaaagcgcacagaaatataagaaaatatatgcccgatttttagttattataaatgtgctaactactatcaccgcagtatttgcaacatgtaacctttattattttgttgctgtacaaaatcattatgacctattcaattattggttgatgggtacgatttcaatcataattagttatttattattagtaattggcggaatgttcacgttattaaaattacctaaagtaacaaaacgttggggtggtaaaactaaaacacatttcggtttattattaaccgcgttgagcgcatttatatatattgaaagaattatcgaatatatattggtgcccaatgtcgtagaatccaagtttgtcataatggtaagtatcattattattgcttgtacacaatttgtggcatttcaatttattatgcaatacagtagattctatatttttgaattaaacactgaagatgatgactaa

SEQ ID NO: 409018 - DNA, 501 bp, Staphylococcus aureus
atgacatttgaagagaagcttagcaaaatatacaatgaaattgcgaatgagattagcagtatgataccggtagagtgggaaaaagtatatacaatggcttatatagatgatggaggaggtgaagtattctttaattatactaaaccaggtagtgatgacttgaattattacaccaatatacctaaggagtataacatttctgtgcaagtatttgatgatttatggatggatttatatgatttatttgaggagttaagagatttatttaaagaagaagatttagaaccatggacatcatgcgaatttgattttacaagagaaggtaaattaaaagtttcatttgattatattgattggataaattcagaatttggtcaaataggtcgacaaaattactataagtatagaaaatttggaattttaccagaaacggaatatgaaattaataaagttaaagaaatcgagcaatatattaaagagcaagaagaagctgaactatag

SEQ ID NO: 409019 - DNA, 777 bp, Staphylococcus aureus
atggcacatttatctgtgaaattgcggcttttaatactagcattaatcgattcactgatagtgacattttcagtattcgtaagttattacattttagaaccgtatttcaaaacatattctgtcaaattattaatattggcagctatatcactattcatatcgcatcatatttcagcatttatttttaatatgtatcatcgagcgtgggaatatgccagtgtgagtgaattgattttaattgttaaagctgtgacgacatctatcgttattacgatggtggtcgtgacaattgttacaggcaatagaccgttttttagattgtatttaattacttggatgatgcacttgattttaataggtggctcaaggttattttggcgtatttatcggaaataccttggaggtaagtcatttaataagaagccaactttagttgttggtgctggtcaagcaggttcaatgctgattagacaaatgttgaaaagtgacgaaatgaaacttgaaccggtattagcagtcgatgatgacgaacataaacgcaatatcacaattactgagggtgtaaaagtccaaggtaaaattgcggatattccagaactagtgaggaaatataagattaaaaaaatcatcattgcaattccaactattggtcaagagcgtttgaaagaaattaataatatttgccatatggatggcgttgagttattgaaaatgccaaatatagaagacgtcatgtctggtgagttagaagtgaaccaacttaaaaagttgaagtag

SEQ ID NO: 409020 - DNA, 222 bp, Staphylococcus aureus
atgatatttgatagacatgctaacttaaagtatagatatggaaatagaaagttttggtgtaaaggattttatgtggatacagtaggtagaaataaaaaagtgattgaaaattatattcgtaatcaattacaagaggatatcgttgcagatgaaatttcaatggaagaatatttagatcctttcactggagagaaaaataaaaaaagaaagaaaaaagagtaa

SEQ ID NO: 409021 - DNA, 396 bp, Staphylococcus aureus
gtgttgattattattccttacttactatttaaatcgaatacactaaatattattcatacgggtgataatattgcacgaggtctaggtgtaaggttaagcagagaacgtttaatattattctttatcgcagtgatgttatcatctgctgctgtagcagtagcaggttcaatttcgtttatcggattaatgggtccgcatattgccaaacgtatcgttggaccacgtcaccagttgtttttaccaattgccattttagtaggggcatgtttacttgttatagctgatacaattggcaaaattgtattacaaccaggtggggttccagcaggtattgtcgtagcaattattggtgcaccgtatttcttatatttaatgtacaaaacgaaaaatgtatag

SEQ ID NO: 409022 - DNA, 834 bp, Staphylococcus aureus; identical to SEQ ID NO: 406098

SEQ ID NO: 409023 - DNA, 2304 bp, Staphylococcus aureus
atgaatttgttaaagaaaaataaatatagtattaggaagtataaagtaggcatattctctactttaatcggaacagttttattactttcaaacccaaatggtgcacaagccttaactacggataataatgtacaaagcgatactaatcaagcaacacctgtaaattcacaagataaagatgttgctaataatagaggtttagcaaatagtgcgcagaatacacctaatcaatctgcaacaaccaatcaagcaacgaatcaagcattggttaatcataataatggtagtatagtaaatcaagctacgccaacatcagtgcaatcaagtacgccttcagcacaaaacaataatcatacagatggcaatacaacagcaactgagacagtgtcaaacgctaataataatgatgtagtgtcgaataataccgcattaaatgtaccaactaaaacaaatgaaaatggttcaggaggacatctaactttaaaggaaattcaagaagatgttcgtcattcttcaaataaaccagagctagttgcaattgctgaaccagcatctaatagaccgaaaaagagaagtagacgtgcggcaccggcagatcctaatgcaactccagcagatccagcggctgcagcggtaggaaacggtggtgcaccagttgcaattacagcgccatatacgccaacaactgatcctaatgccaataatgcaggacaaaatgcacctaacgaagtgctgtcatttgatgacaatggtattagaccaagtaccaaccgttctgtgccaacagtaaacgttgttaataacttgccgggcttcacactaatcaatggtggcaaagtaggggtgtttagtcatgcaatggtaagaacgagcatgtttgattcaggagataataagaactatcaagcacaaggaaatgtaattgcattaggtcgtatacatggaactgatacgaatgaccatggcgattttaatggtatcgagaaagcattaacagtaaatccgaattctgaattaatctttgaatttaatacaatgactactaaaaacggtcaaggcgcaacaaatgttattatcaaaaatgctgatactaatgatacgattgctgaaaagactgttgaaggcggtccaactttgcgtttatttaaagtacctgataatgtgagaaatctcaaaattcaatttgtacctaaaaatgacgcaataacagatgcgcgtggcatttatcaactaaaagatggttacaaatactatagctttgttgactctatcggacttcattctgggtcacatgtttttgttgaaagacgaacaatggatccaacagcaacaaataataaagagtttactgtaacaacatcattaaagaataatggtaattctggtgcttctctagatacaaatgactttgtatatcaagttcaattacctgaaggtgttgaatatgtgaacaattcattgactaaagattttccaagtaacaattcaggcgttgatgttaatgatatgaatgttacatatgatgcagcaaatcgtgtgataacaattaaaagtactggaggaggtacagcaaactctccggcacgacttatgcctgataaaatactcgatttaagatataaattacgtgtaaataatgtgccgacaccaagaacagtaacatttaacgagacattaacgtataaaacatatacacaagatttcattaattcagctgcagaaagtcatactgtaagtacaaatccatatactatcgatatcatcatgaataaagatgcattacaagccgaagttgacagacgtattcaacaagctgattatacatttgcgtcattagatatctttaatggtctgaaacgacgcgcacaaacgattttagatgaaaatcgtaacaatgtaccattaaataaaagagtttctcaagcatatattgattcattaactaatcaaatgcaacatacgttaattcgaagtgttgatgctgaaaatgcagttaataaaaaagttgaccaaatggaagatttagttaatcaaaatgatgaattgacagatgaagaaaaacaagcagcaatacaagttatcgaggaacataaaaatgaaataattggtaatattggtgaccaaacgactgatgatggcgttactagaatcaaagatcaaggtatacagaccttaagtggggatactgcaacaccggttgttaaaccaaatgctaaaaagcaatacgtgataaagcaacgaaacaaagggaaattatcaatgcaacaccagatgttactgaagacgagattcaagatgcactaa

SEQ ID NO: 409024 - DNA, 384 bp, Staphylococcus aureus
atggaaatcaaacaaaaatatcaattatcaaaagtggttaaaatattagaagtagtattatacgaggaagataagtttaaatccgataaggactatcattatcaggataaagcattttatgaatatgctttaaaattagttcataatggattgttcaatattcttgctgaattagattttgaagatgaagcatttttaattcttgatgaagtaacaatgacgctaagtgatgtcatgaaagaaacacaacacgtttatcgttatagtgtcatagacgaaaaaggtgaacataaacatacaacagatcgcaaaggacacgtgattggaatgttagagtgggcattagattacattgtgggaaatattgaagtggaggaattataa

SEQ ID NO: 409025 - DNA, 324 bp, Staphylococcus aureus
atgaattgggagattagaaatttaatgtgcaatatagagatagtaaaagaaaagttggaagatgtagcgactacacatacatggtttgtagatggacgatttacgaagagatcgttaaaaactaaagaagaagtggttaattacggtctagcgtataacgaacatagaattcacaacgaacaagttacagaattaatgcttacttatttggaagaattagacggtttaatgaataagtttcatgaaatagaaaaagcgtcactctccaccgaccaaagcgaaagtaacgcaaatgtacaaagtatttatttaaataaatactag

SEQ ID NO: 409026 - DNA, 642 bp, Staphylococcus aureus
atgaacatagaaactattgtaaaccaatttgaaacacgagcaggcacgttactaaggtactacacaggattattagaacatagtaaagtgcaaccgtgttgctttaagttatacaatgatccatttgatatggtatacgtgatgatgaacagcaagctattcggtcatgtatatattaaagattgtaaagtaaggcaatcatttgaattagcgtcacctaagcacactgaggggcttataagaagcatagaggggcattatgtaggttatgaattacatgacggtaaacatctttctattagtgatatgatggctagtcatttgtttgaagatgagtattttatgtatggattacaaacatatgcagaatcaaataatagtgatgtgtttgagtacctagaaaatggatttgatacagatacacttgagggcattcaatcaagtaatactgatgtgatagcgaatattgaaatgttgtatcagttagctacgggaatcaatgaaccagaaccagagttagttgagggattgaagttggtaactgagtttatacaagatgagaatgcgacgcaagaggattacaaggctttagaacgtaaattgaatgatctaaaagcgtcttactatagcttgagtaaataa

SEQ ID NO: 409027 - DNA, 801 bp, Staphylococcus aureus
atgtataatagattatttgtttcacgtgtaattttgatattcgcactgatactagttatttatacacccaacgttttagcagaaagccaaccagatcctaaaccagatgagttgcacaaagcgagtaaattcactggtttgatggaaaatatgaaagttttatacgatgataatcatgtatcagcaataaacgttaaatctatagatcaatttctatactttgacttaatatattctattaaggacactaagttagggaattatgataatgttcgagtcgaatttaaaaacaaagatttagctgataaatacaaagataaatacgtagatgtgtttggagctaattattattatcaatgttatttttctaaaaaaacgaatgatattaattcacatcaaactgataaacgaaaaacttgtatgtatggtggtgtaactgagcataatggaaaccatttagataaatatagaagtattactgttagggtatttgaagatggtaaaaatttattgtcttttgacgtacaaactaataagaaaaaagtgactgctcaagaattagattacctaactcgtcactatttggtgaaaaataaaaaactctatgaatttaacaactcaccttatgaaacgggatatattaaatttatagaaagtgagaatagcttttggtatgacatgatgcctgcaccaggagataaatttgaccaatctaaatatttaatgatgtacaatgataataaattggttgattctaaagatgtgaagattgaagtttatcttacgacaaagaaaaagtga

SEQ ID NO: 409028 - DNA, 558 bp, Staphylococcus aureus
atgaataaaaaactattaacaaaaacattgatagcaagtgctttagttttaacaacagtaggttcaggttttcattcttcttcaaattataatggtattaataacgttgcaaaagctgagcaaacgacagatagagacttatggaaaaatgtcagagatgctttgaaagaagcaaatattatcgataatacagcaaatgagacagttggtgttacgtacaatttaaataatggtgctgagcatagcattactggcactgccgatttggacgagcttagtacttctaataatagtactgttaacactgatagtgttaacagtgtcgatattacaagagttaatccaaacggaaagacaatagatgctaatgaagcttggaaaaaattaacagataaattaaaagaaaagaatatcgttaaagacggcgatacagtaactattcatagtaatgataaaggtgatccccaaatttcagctaaagttggaagtgactataatggcaacaaccggttcatgctaaatcagagagatataacaaaaataactataactaaataa

SEQ ID NO: 409029 - DNA, 615 bp, Staphylococcus aureus
atgactcaatttctaggggcgcttcttcttacaggagttttaggttacataccatataaatatctaacaatgataggtttagttagtgaaaaaaacaagattatcaatactcctgtattattgattttttctattgaaacatgtttgatatggttttatacttttataatttttaataatgttgatttaaaaaatttgagtttacttcagttgcttacaggtctaaaagcaaatatttggtttctaattatttttgttttaacagtgcttgtatttaatcctttaattgttaaattcattatctggttaattaatgaaacaagaaagtttatgaatttggattgtataagcttattagacaaaagagacaagttgtttaataacaacggtaaaccagtatttatagttattaaagactttgaaaacagaatcattgaagagggtgaacttaaaacctataattcagctggtagcgatttcgatttactagaggttgagcgacaagatttcaaagtatctgatttaccgtcaaacgatgaattgtatattaaacatacacttgtagaccttaaacaacaaattaaattggatttatatttaatgaatgaatattaa

SEQ ID NO: 409030 - DNA, 126 bp, Staphylococcus aureus
atggcggataaaaacaaaaaacaagaagctactcgtagtaacccaataaacaaaagttttgaaaagccgggtgccagcgaaaacttaaaaagcactttatcagaaaaagctaagaaaaaagattaa

SEQ ID NO: 409031 - DNA, 183 bp, Staphylococcus aureus; identical to SEQ ID NO: 406752

SEQ ID NO: 409032 - DNA, 771 bp, Staphylococcus aureus
atgagagaaaaagtttcaaatagacttaaacacattatgaaaataagaaacttaaaacaagtagatatcattaataaatcgaaaccttatcaaaagaaactaggtatatctttaagtaaaagcactttatctcaatatattaacgacgtacaatcacccgaccaagatagaatttacctactttctaaaactctgaacgttggtgaagcgtggcttatggggtatgatgtagattcttatcgagttcctgatgaagaacgtcaagatgaaacgataatgtcaaaaatcaataacatattttctcaactcacacctccccgccaagaaaacgtacttaactatgcaaatgagcaattagatgaacagaataaagtcacttctatagatggatataaagagtctaaactagtatcgtatattgcatgtggtgcaactggtgctggcataggagaagaattatatgatgacatattgcatgaagaagtattttttaaagaagacgaaacgccatcaaatgctgatttttgtattttagttaatggtgattcaatggaacctatgttaaaacaaggaacatacgcttttattaagaaagaagattctattaaagatggtacaattgcactcgttgtattagatggagtaagtcttatcaagcgtgtagatatatgcgaagactatattaatttggtatctctaaatccgaagtatgatgatatcaaagtcgcttcgtttagtgatattaaagtaatgggcaaagttgtattgtga

SEQ ID NO: 409033 - DNA, 225 bp, Staphylococcus aureus
atgtgttacgactactcacgtttgagcgggaaaatagtagaaaagtatggcactcagtacaattttgcaattgctatgaaattgtcagagagaagtttatccttaaaactcaacggtaaagttggttggaaagacagtgaaatatggaaagctatacaactactagatataccggtagagaaaatacacttatatttttttaaagaaaaagttcatgttatatga

SEQ ID NO: 409034 - DNA, 141 bp, Staphylococcus aureus; identical to SEQ ID NO: 408683

SEQ ID NO: 409035 - DNA, 261 bp, Staphylococcus aureus
atgtactacaaaattggcgatgtatgtcaaaaagtaattaatgtagacggattcgattttaaattagcagttaagaaacaagattacagcattctagtgaatgtcttagatttagaagatagatttatcgacagtataaatataacagatgagaatgatctatacacagcattagacatattaaatcaatctatttatgaatggattgaagagaacacagacgaaagagacaggctaattaacttagtcatgagatggtag

SEQ ID NO: 409036 - DNA, 450 bp, Staphylococcus aureus; identical to SEQ ID NO: 407421

SEQ ID NO: 409037 - DNA, 489 bp, Staphylococcus aureus
atgaataaccgcgaacaaattgaacagtccgttataagtgctagtgcgtataacgggaatgatacagagggattgctaaaagagattgaggacgtttataagcataaagatatatgggaaaaacttaaaaaagactatttagaaacttatatccaatatagaaatgacgaaaacagaaatattataggagaacagcatatattaagtttcatatatgcaatggatttatttgatggtaataaagatgcagagaatatgttcaagaaattggagcgtgctaaatatgtagtttatgcaaaaggctcatttgtgcaagacgttcatttaagtggaggtactaaacaaggaactttttgggctagttataccccaaaagaagatgcaactattttaaacacatggattactgacgatattaacaaagctagagctgtagcacttttagttggtggcaacacaatgcaatgggaggacaacgataatgaataa

SEQ ID NO: 409038 - DNA, 774 bp, Staphylococcus aureus
atgaaaaaaacagcatttacattacttttattcattgccctaacgttgacaacaagtccacttgtaaatggtagcgagaaaagcgaagaaataaatgaaaaagatttgcgaaaaaagtctgaattgcagggaacagctttaggcaatcttaaacaaatctattattacaatgaaaaagctaaaactgaaaataaagagagtcacgatcaatttttacagcatactatattgtttaaaggcttttttacagatcattcgtggtataacgatttattagtagattttgattcaaaggatattgttgataaatataaagggaaaaaagtagacttgtatggtgcttattatggttatcaatgtgcgggtggtacaccaaacaaaacagcttgtatgtatggtggtgtaacgttacatgataataatcgattgaccgaagagaaaaaagtgccgatcaatttatggctagacggtaaacaaaatacagtacctttggaaacggttaaaacgaataagaaaaatgtaactgttcaggagttggatcttcaagcaagacgttatttacaggaaaaatataatttatataactctgatgtttttgatgggaaggttcagaggggattaatcgtgtttcatacttctacagaaccttcggttaattacgatttatttggtgctcaaggacagtattcaaatacactattaagaatatatagagataataaaacgattaactctgaaaacatgcatattgatatatatttatatacaagttaa

SEQ ID NO: 409039 - DNA, 123 bp, Staphylococcus aureus
atggaatatctaaaaaggcttgcattgttaataagtgttattattttgaccatttttataatgggttgtgatagtcaaagcgatactgcagaaaatccaaaagaaggttcaaaagaagcataa

SEQ ID NO: 409040 - DNA, 486 bp, Staphylococcus aureus; identical to SEQ ID NO: 406831

SEQ ID NO: 409041 - DNA, 4080 bp, Staphylococcus aureus
atgccagtcattcaacaagtgtttattgatattagggacattgaagatgttgaaaagcgtttgtttttagcgagaaaacaattagagttctattcgactcagtgcgatttagaattgtattttacgagcttatcacgcaaaacaattgtatataaaggttggttacgatcagaccaaattaaaaaactatatacagatttatcggatgatttatatcaatcaaagctagggttagtgcattcgagatttagtacgaatacattcccgagttggaaaagggcacatcctaaccgtatgttaatgcataatggtgagattaacacgattaaaggtaatgtaaactggatgcgagcacgccaacataaattaatcgaaacattatttggcgaggatcaacataaagtgtttcaaattgtcgatgaggatggtagtgactctgccattgtagataatgcgctagagttcttatcgttagccatggagccagaaaaggcagcgatgttactcatacctgaaccttggttatataatgaagcgaatgatgcaaatgtacgtgcgttttatgaattttatagttatttaatggaaccgtgggatggtcctacaatgatttcgttctgtaacggtgacaaacttggcgcgcttacagatagaaatggattacgtccaggtcgttatacgattactaaagataactttattgtcttttcatctgaagtgggtgttgtggacgtacctgaaagtaatgttgcttttaaaggtcaattgaatcctggaaagttattgcttgttgattttaaacagaataaagtcattgaaaataatgatttaaaaggtgcgattgctggagaattaccatataaagcgtggattgataaccataaagttgactttgattttgaaaatatacaatatcaagattcgcaatggaaagatgagacgttatttaaattacaacgtcagtttgcatacacgaaagaagagattcataagtatattcaggaacttgtagaaggtaagaaggatcctatcggtgcaatgggatatgatgcgccaattgcagtgttgaacgagcgaccagaatcactatttaattactttaaacagctgtttgcacaagttacgaatccaccaattgatgcgtatcgtgaaaaaatcgtaacgagtgaactttcttatttaggtggcgaaggtaacttactagcacctgacgaaacggttttagatcgtattcaattgaaaaggccggtattgaatgaatcacacttagcagcgattgatcaggaacattttaaattaacttatttatcaacggtatatgaaggggatttggaagatgcgttagaagcattaggccgagaagcagtgaatgctgtaaagcaaggcgctcaaattctagtgttagatgatagtggattagttgatagcaatggctttgcaatgccgatgttactcgcaataagtcatgtgcatcaattacttattaaagcagatttacgtatgtctacaagtttagtcgctaaatctggtgagacacgagaagtgcatcatgttgcttgtttactcgcatatggcgcgaatgcaattgtgccatacctagcgcaacgtacagttgaacaactgacattgacagaagggttacaaggcaccgttgtcgataatgttaagacatatacggatgtattgtcagaaggtgtcattaaagtaatggctaagatgggaatttcgacagtgcaaagttatcaaggggcacaaatatttgaagcgattggcttgtctcatgatgtgattgatcgttattttactgggacacagtctaagttatctggtatttcgattgatcaaattgatgctgaaaataaagcacgtcaacaaagtgatgataattatcttgcatcaggtagtacattccaatggagacaacaaggtcaacatcatgcttttaatccggaatctattttcttattgcagcacgcatgtaaagaaaatgactatgcgcaatttaaagcatactctgaagcggtgaacaaaaatagaacagatcacattagacatttacttgaatttaaagcatgtacaccgattgacatcgaccaagttgaaccggtaagtgacattgtcaaacgctttaatacaggggcgatgagttatggatcgatttcagcggaagcacatgaaacgttagcacaagccatgaaccaattaggtggaaagagtaatagtggtgaaggtggcgaagatgcaaaacgttatgaagtacaagttgatggaagcaacaaagtaagtgcgattaaacaagttgcttctgggcgttttggtgtaactagtgattatttacaacatgccaaagaaattcaaattaaagttgcgcaaggtgcaaagcctggtgaaggtggtcaattacctggtactaaggtatatccgtggattgcgaagacaagagggtcaacgccaggtatcggtctgatttcaccaccgccacatcatgatatttattcaatagaagatttagcgcaactgatacatgatttgaaaaatgcgaataaagatgcagatatcgcggtaaaattagtttcgaaaacaggtgttggtaccattgcatctggggtggcaaaagcatttgcagataaaattgtcatcagtggttacgatggtggtacaggggcttcacccaaaacgagtattcagcatgccggtgttccttgggagattggtttagcagaaacacatcaaacattaaaactaaatgacttaagaagtcgtgttaagttagaaacagacggtaagttattaactggtaaagatgtagcgtacgcatgtgcgcttggagcggaagaatttggatttgcaactgcaccattagtggtgttgggctgtattatgatgcgtgtatgccataaagatacatgtccagtaggagttgcaactcaaaacaaagatttacgtgctttatatagaggtaaagcacatcatgttgttaattttatgcattttattgcacaagaattaagagaaattttagcatctttaggtttgaaacgtgtagaagacttagttggaagaactgatttattacaacgatcatcaacattaaaagcgaatagcaaagcggctagtattgatgttgaaaaactgttatgtcctttcgatgggccaaacacaaaagaaattcaacaaaatcataatcttgagcatggatttgatttaacaaatttatatgaagtaacgaagccatatattgctgaagggcgtcgctatacaggtagctttacagtaaataatgaacaacgtgatgtaggggttattacaggtagtgagatttcgaaacaatatggagaagcaggacttcctgaaaatacaattaatgtttatacgaatggtcatgctggtcaaagtcttgcagcatatgcaccgaaaggcttaatgattcatcatactggagatgcgaatgactatgttggtaaaggattatctggtggtacggtcattgtcaaagcaccttttgaagaacgacaaaatgaaattattgctggtaacgtctcattctatggtgcgacaagtggtaaggcatttattaacggtagtgcaggagaaagattctgtattagaaatagtggtgtagatgttgtcgttgaaggtatcggcgaccatggattagagtatatgactggtggacatgtcattaatttaggtgatgtaggtaagaacttcggtcaaggtatgagtggtggtattgcttacgttatcccgtctgatgtagaagcttttgttgaaaataatcaactagatacgctttcgtttacaaagattaaacaccaagaagaaaaagcattcattaagcaaatgctggaagaacatgtgtcacacacgaatagtacgagagcgattcatgtgttaaaacattttgatcgcattgaagatgtcgtcgttaaagttattcctaaagattatcaattaatgatgcaaaaaattcatttgcacaaatcattacatgacaatgaagatgaagcgatgttagctgcattttacgatgacagtaaaacaatcgatgctaaacataaaccagccgttgtgtattaa

SEQ ID NO: 409042 - DNA, 1428 bp, Staphylococcus aureus; identical to SEQ ID NO: 406837

SEQ ID NO: 409043 - DNA, 663 bp, Staphylococcus aureus
atgaatcaagaaggaacattagggaatgcaataaagagcgctagaaaaaagtatccgttaacactagaagaattaggcggaaaagttggagttagccacgctttcttatcacgcgttgaaaataataaaattacaccaaatgataaattacttgtcaaaatcgctaatgtattagattttaatgaaagtcaagattttttaaatgaatttagaatattagcaggatattacgataatatagatgaaaatactgctatttttaacaacttaaaatcaagtggtagattagaaataaatagatttaaaagagaaaagaagattgttgataaaccatactataaactaaattatttattcgaatgcgaaaacaaagttttctatgatataaaaacatctgaacttggcgaaaagcttgtaactattgaattaccatctgatattcttcacgatatttataaaatgataaacttagaaattataaaaaccattaaaataaattctaaacttctttatagcattgaaaaccctcaagtaattgaggagtatcaaaaagaagtggaaaaaactagaaaagaattcactgaacgtcttgaaaaatcgctctcaacttatgatattgatagtgtaatacgtgaaatatatgacgatgaatatctaatataa

SEQ ID NO: 409044 - DNA, 213 bp, Staphylococcus aureus
atggaaacaaaagttcttgaattacgtggtttaatagcaaaaaatgggcatactttgcgtagttttgccaaagatagcaatatttcgctttcttatttaagtttgatagtgaataaaaaggctgaacctagtccgaaaatggcaaagaaaatagcggataatttaaatgttgatatggaagagcttttcgtatacagaacaaaggaggcataa

SEQ ID NO: 409045 - DNA, 642 bp, Staphylococcus aureus
atgatcaaacaactgttcaataacaaagaaatacgtttcattgagaaaaataatgaatattgggcaattgctaccgacgttgcaaaagtattaggttttagagatgcatttaatgctactaaatatttaccagaacatgtgagaggtactctcaaaggtagtaccacatcagataaaaagaaagctagaaaatatcaagactacacagttatcaatgaaaaaggtatctatcgacttgtaatgcggtctaataaagctgaggcattagattttcaagactggatttgtgatgtgttagtagaattacgtacatctacaaaactaaaagaatatgaagtattccacatgttggataaagaaaaacaaaaagaagcaatgggaaatttaaaaaatggtattgaagctatttctaaaaaagattattgcaaagctcaaacaattagtaacaaagcagtatcaaatatatttggcttccctaagatggttaaaaaggaagatatgacaaatgaaatgctggaattaagacaacaggtattaaatgacacagtagaatttatggtatttgttgatgaatacaaacttcctttatctgtgagcaagcatatttacgacaagtacagcagtaaacatcaaatagcgtaa

SEQ ID NO: 409046 - DNA, 150 bp, Staphylococcus aureus
atgaaattggatttactttatataaccttaacatcgttgttaacaatcttattactagcaatatctaatatgtacattgcttttagtgtatacggcatgttaataacactaggcttttacttaacaggaggattagaaaatgaaaaatga

SEQ ID NO: 409047 - DNA, 225 bp, Staphylococcus aureus
atgaaaaatgaacaaaaagaagttattcaagacatctataatactttagaagcagtagcttataacacatcaatggaatacatccataattgcgtagatggtaagaaagaatggatggaaaacgtaaatcgtgaggaacacttacaagccataatcgagtgggcattacaacaaatagaaaataactttgattttgagaatgatactgaaatggaggaattataa

SEQ ID NO: 409048 - DNA, 300 bp, Staphylococcus aureus
atgaattgggaaattaaaaatttaatgtgtgatttaaagatattgaaagaaaagtttgaggatttaaaggataatcatggctcgcattttgaagatttatatctacatgagccaaatcataccttaaataaagacgatgttattaaagaaggattttcatatcatgagagacgtattcacaatgatcaaatgtttgatttgctacttctatacactgaaaaattcgatgaattaataactaggtttgatgcattagaaaaagcgtcatctttcgccgaccaaagccaagataacgcataa

SEQ ID NO: 409049 - DNA, 2373 bp, Staphylococcus aureus
gtggcaattaagaaaaaagatagaattattggagttaaagaattagaaataccgcaagaattaaagttagtgcctaattgggtattatggcgagctgaatggaacgagaagcaacaaaattatggaaaagtaccatatagtattaatggttacagagctagtacaaccaataaaaaaacatggtgtgactttgaaagtgtaagtattgaatatgaagttgatgagcaatatagcggtataggttttgtattaagtgatggtaataattttgtttgcctagatattgataatgcaattgataaaaaaggacaaatcaattctgaattagcactaaaaatgatgcaactcacatattgtgaaaagtctccaagtggtacaggattacattgtttctttaaaggtaaactaccagataaccgtaaaaagaaaagaacagatttagacatagagttatatgattcagcaaggtttatgactgttacaggatgcacaattggtcaaagtgatatttgtgataatcaagaagtattaaatactctagttgatgaatattttaaagagaatttgccagcaaatgaggttgtgagagaggaatctaataccaatatacaattatctgatgaagatattataaacattatgatgaaatctaaacaaaaagataaaattaaagatctattacaaggcaattatgaatcatattttgagagttcaagcgaagcagtacaaagcttattacactacttagcgttttacacaggtaaaaacaaacagcaaatggagcgtatatttttaaactacaataatcttacggataaatgggaaagtaaacgaggtaatacgacttggggacagcttgagttagataaagctataaagaatcaaaagacaatttatactaaatcgatagatgaatttaatgttatacaacaggggagtaaagatattaaacagttattgaatcaattggggcatgaagaaagaacaaaaatggaagaaaattggattgaagaaggaaaacgagggcgtaagcctacaacaattagtcctataaaatgtgcatatattttgaatgagcatttaacatttatactttttgatgatgaagaaaatactaagttagctatgtatcaatttgatgaagggatatatacacagaacactacaattataaaacgagtgatttcctatttagagcccaaacataatagcaacaaagctgatgaagttatttatcatttaaccaatatggtagatataaaagagaaaactaactcaccatacttaataccagttaaaaatggtgtatttaaccgtaaaacgaagcaactagaatcatttacacctgattatatatttaccagtaaaatagatacatcgtatgtaaggcaagatatagtacctgaaataaatggctggaatatagatcggtggatagaagagattgcttgtaatgataatcaggttgttaaattattgtggcaagtaattaatgattcaatgaatggaaactacacacgtaaaaaagcattatttttggttggtaatggtaacaatggtaaaggtacatttcaagaattattgtctaatgtaataggttatagcaatattgctagcttaaaagtgaatgagtttgatgaacgttttaaattgagtgtgttagagggcaagacagcagtaattggagacgatgtaccagttggtgtgtatgtcgatgattcttcaaactttaaaagtgtagttactggcgatccagtgttggttgagtttaaaaataaacccttatatagagcgacttttaagtgtacagttattcaatcaacgaatggaatgcctaaatttaaagacaaaacaggcgggactttaagaaggttattgatagtaccgtttaatgccaattttaatggcattaaagagaattttaaaatcaaagaagactatataaaaaatcagcaagtgctagagtatgtgctttataaagcaattaatttagattttgaaacctttgacattcctgatgcatctaaaaaaatgcttgaagtatttaaagaagataacgatccagtttatgggtttaaagtaaatatgtttgatcaatggactattagaaaagtgccgaaatatattgtatacgcattttataaagaatattgtgatgaaaatggctataatgcattgagttcaaacaagttttataaacaatttgaacattatttagagaattattggaaaactgatgcacagcgaagatatgacaatgaagaacttgctaagaggatatacaactttaatgacaatagaaattacattgaacctattgaaagtggaaaaaactataaatcgtatgaaaaggtgaagctaaaagcaatatag

SEQ ID NO: 409050 - DNA, 345 bp, Staphylococcus aureus
atgaatagaagtagaatgaaacaaatcattttagaatatataaagaacaatggcagcacttcgtttgtagagattgagaatgtatttgaagaacaaggttttaaatacaaaggtaacggcgcatataccagtggcaaccataagaatattatattttggatgggttggaatgaagaagcgtttaatattgtggcagatttaaaacgcgacgggctaattgaaatgcaaatttgtccgccaatgtactatcttattgatggtaaaggtctaaggctaccaattgtaaagaataaaaatataaaaatagatcattggctaccagtaacatttagtttagtaaattaa

SEQ ID NO: 409051 - DNA, 207 bp, Staphylococcus aureus
gtgctagatcatacaaatgaatctgtaaaacgtgtgtttaagtatagagataagcaagaactattaaataagtatcacgaattattagacaaatactttcttcataacatttcgttctatgaagaagataaaaacaacgaacgtatatatggtttagttgttcatactaaaaacaaattaggagatgaagattatgaaagagtttaa

SEQ ID NO: 409052 - DNA, 1059 bp, Staphylococcus aureus
atgaaagagtttaaagaacaatttgggtatcaactatctaactttgatgatatggatattaaaggatatgccaatctatatcaaaaggatataggtaaagatgtaagtatgattgaacaggggttaaagcaattaagtattactgaaacagaagttttattaccagagcaaattaacaaaaaattattaggagtgttaaatatgaatgaagtaaatcaatcaagtaatacatgggtaggtaccctaacaaaacaattagttagtagtgagaataactttaatattcaagagttaccaactgcacgtaaagaagtatttaaagagttattagtgaatcgtgagctacttcaaacattacgtgatgtgattactattacagatgatgaacatgttgaatctataccagcactaacacacattaaagataagttagctactaacggtattgagctatcacttaatggcagtagtaaatattttgatagacgtgagggacatatctacacagaagtatcagacagtgtagtgcatggctctgatagaacattagatgatctacttaaagagatatttattaatgagtgtgtctcatatgaaacaacattactattagataagaacaatgcgagtggattaattgataaagataaccaagatttatcactatataatcaaggtattaaagaagtaagcaatacctcaatgtatgatggtatcaagcaagcgataaaagatataccgcaaacatttagatgcagtgtatctattgtgatgaacacagatcatcatgataagttaatcaaagagttggcacaggtgggattaggtgcacttgcatatgatttaactaagctatttaatgtatctcacgtagtagttacagatgatgcacaagatatctttgtaggcgactttgggcatgctatatatgctaagtacgagcctattatgtacaacaaaaagaaacaagcgttaaaaggtgtataccaatttgcattgaattacgtgttcgatatcaaaattgtgccagagttactgagaatcgttaaggttaaataa

SEQ ID NO: 409053 - DNA, 492 bp, Staphylococcus aureus
ttggtatctgactttgaaagcaatgataaaatcactgaagtagaacttttaatgcattacaatccgaaagtcattaatagcaaaattaaagcgatgagatcacaaatagaaagcttatatcacttgaacatgaaccatgtgatcacgaatgataacgatatgctggtatctgtatcatatccattagataaattagtactttatattatagaagagaaagataaacttgaatattacatgaaaacagctcaggataggctaaatttgtttaaagatatcatcaaaaactattctgaaaatgaacaacaggatgttatgaggtacatgttaagtagtgggaaagttaaaaatgaaggagtcattgaacgtttaaaagtagatatttataaagttgaaagtagaaagcgtcaagaacgacaaaaccagcgagaagaattacatcgaatagagtttaataagcatttagaacaagttaaaaaagaactttcatag

SEQ ID NO: 409054 - DNA, 699 bp, Staphylococcus aureus; identical to SEQ ID NO: 407040

SEQ ID NO: 409055 - DNA, 357 bp, Staphylococcus aureus
atggattttaataaagagaatattaacatggtggatgcaaagaaagctaaaaaaaccgttgttgcaaccggtatcggtaatgcaatggaatggttcgattttggtgtctatgcatatacaactgcgtacattggagcgaacttcttctctccagtagagaatgcagacattcgacaaatgttgactttcgcagcattagccattgcgtttttattaagaccaattggtggtgtcgtatttggtattattggtgacaaatatggacgtaaagttgtattaacatctacaattattttaatggcattttcaacattaaccattggattattgccaagctatgatcaaattggactttga

SEQ ID NO: 409056 - DNA, 189 bp, Staphylococcus aureus; identical to SEQ ID NO: 407433

SEQ ID NO: 409057 - DNA, 141 bp, Staphylococcus aureus; identical to SEQ ID NO: 407391

SEQ ID NO: 409058 - DNA, 1773 bp, Staphylococcus aureus
atgaagagtaaaaaaagaatggaaagattgtacgatgatttatttagtactaattttttaattaattatggttattttgatattactcctaaaaataatcaagatttaacagaattaaacagctacggtaaatcagatgcattttatttgaaaatatttaatatgagtaaattagctgaatatattacttataatccattttacattaaaaaaatttttaatgatagaaacatacgtagtactgaaccaataatatttactattccgaaaaataatacatcaagaagagaatataagattcctaatatttatagctatttaaatttgatgtttttcatgcaagaaaataaaaaagaatttaaagaagtttttctaaccaataaattttcaacatctaaatttttttcacttccagattttgattttaaatttactgacaatttaaaaaagactttactttacggtggtaatcatatattaaacgttgatttatctaatttttatcattctctttatacacatagcataccttgggtaataatgggaaagaagaatgctaaaaaagaaagaaagaaaggtttttcaaatcaattagataaattaattacatcctgtcaatataatcaaactcatggaatacctactggcaacatattaagtcgtattattagtgaattatatatgtgttatattgattctgaaatggaaaataaagggtatagatatgcgagatatgtggatgacatatcattctcatttaattttgaagaagagaaagataaattttacagagattttaacaaactatgtatgaaatatgaattaaaaattaatgacaagaaaactgaagtaaatgattttccatatatacatccacaaaacaaagactttatatttaattatttcaaaaattattcctcaaatagtaaagatgaaacttggattataggtattaagaactttattgatttatgtatagatgaagaaagaaaaggaaataaaggggcaataaaaagtattttcccagtaatagaaaatactttaaagaagaaaaaaataaataaacatcaaataagtaagatatttggatataggaataatattactaaattcaatatcttgcaattcatattagatttatcactaaaagactctaaattaacaaatagatgcctatctttattaaactatttgactattaaaatggacgataaaaaaatagtctcaaaacaagttaaacagtattttaaaaatagaaacgaagaaattagaaaattgttagtattttataataaaaataattatcatcaagaagcataccaaattcttgtttatattgttgaatatgatgtagatattcttttaaaaaatgatgttttgagtttgctaaatgaaaatacagataacttatctctatcgttattgacaataatatatctaagaaagtcttggaaaatagaaaatttattaaaaaaaattgataatctatttaaaaattctaaggatgattatcctgcaacagtaggtgtaatgtcgcaaaatttatggtatttcagatactttatttactatttaataaaagaaaatgtgatttcaaaaaaagaaattaatagttattgcatgagtcaaaaatatggttcaaatcagaaaggatataagagcgatttaaactggaattatattaattcaaaagataatgtggatgaattttttagtgaattattagaagaaaaagtaccactcatagatttaaattatgtaaatttaatataa

SEQ ID NO: 409059 - DNA, 480 bp, Staphylococcus aureus
atggctaaattactaataacgagcgtagtaagcttttgttttatatttctattgttagtattttttaagtacatattaaaacgctattttaattatagtttaaattataaagtttggtatctaactgtgcttgctggattaattccttttatcccaattaaattctcttttataaaattgaataatgtgaataatcaagcgcccacagttgaaagtaagtcacacgacttgaaccataacataaataccaccaaacctgttcaagagttcacaacagatatccataagtttaattgggattcaattgataatatctgcacagttgtttggatagttttagttattattttaagttttaaatttttgaaatcattattatatcttaaatatttaaagaaacagtcactttatctaaacgaaaatgaaaaaaataaaatagatacgatacttttcaaccatcaatataaaaaaatattgtga

SEQ ID NO: 409060 - DNA, 804 bp, Staphylococcus aureus
atgaacactatttacgaaccgtcaagtatttgtatgattagaacacctttattatcagttgaatttttcaatttatttttaaatactgaacaaattaaatatagcgacttacaattaaatgctcagatgaaagaatcaatcctaacaacaacatttaacttatattgtactttacaagaaataaattttgatggcgataacaagaaggttagagatgctaaagaaagtttattaaaatatttaattagaatgtcaacacgtccaactccatttggattattaagtggtattaatttggggcattttgtaaatgaaccaacacgtcttaaagttggaaatagtattcaaaaatatgtgaaagtcgatggcgaatggttgtataaactggttagttatattgagagtattgatgaatattatcaaaatttgaaagttatttggaatagtaaagcacatattatcaatgatcgaatatatttaaatgaacaaagtgctatttatttaaacaacaataaagatacatctttttccattaaaaatagcgaattactcgtattcatcaaaaccactgtgacgaataataatattactttttcaaatttagctgaaaagataaatcaagaatttgaaattaatgatattactaaagtgaaagtatatatccataatcttgtctcaaaggaaattatatattcaacaatcagaccaccgttatcatatagcgataatttaaattatattttaaataaactttctttacataatgatgattttgtgaaaaaattagagaaatccagaaattga

SEQ ID NO: 409061 - DNA, 189 bp, Staphylococcus aureus; identical to SEQ ID NO: 407427

SEQ ID NO: 409062 - DNA, 147 bp, Staphylococcus aureus; identical to SEQ ID NO: 407426

SEQ ID NO: 409063 - DNA, 969 bp, Staphylococcus aureus; identical to SEQ ID NO: 407348

SEQ ID NO: 409064 - DNA, 195 bp, Staphylococcus aureus
gtggctaaaaaagtgaagctaagcaaccaacaagcgcatagatttatgaaagttagtgaagagtacgaaggttcaaatttaacgacgtcgttaaatttagggttaaatgttttgtatcaaatcgcaactcttcctgagccagaacgcagcaaagaacacataacatcaaatggtgaaactaaaattccatactaa

SEQ ID NO: 409065 - DNA, 1557 bp, Staphylococcus aureus
atgtctattactgaaaaacaacgtcagcaacaagctgaattacataaaaaattatggtcgattgcgaatgatttaagagggaacatggatgcgagtgaattccgtaattacattttaggcttgattttctatcgcttcttatctgaaaaagccgaacaagaatatgcagatgccttgtcaggtgaagacatcacgtatcaagaagcatgggcagatgaagaatatcgtgaagacttaaaagcagaattaattgatcaagtcggttacttcattgagccacaagatttattcagtgcgatgattcgtgaaattgaaacgcaagatttcgatatagaacatctagcgacggcgattcgcaaagttgaaacatctacattaggtgaagaaagtgaaaatgactttatcggtctgttcagcgatatggatttgagttcaacgcgactaggtaacaatgtcaaagaacgtactgctttaatctctaaagtcatggttaatcttgacgacttaccattcgttcacagtgacatggaaattgatatgttaggtgatgcatatgaattcctaatcgggcgctttgcggcgacagcgggtaaaaaagcaggcgagttctatacaccacaacaagtatctaagatactggcgaagattgtcacagacggtaaagataaattacgtcacgtgtatgacccaacatgtggttcaggttcactgttgttacgtgttggtaaagaaacacaagtgtatcgttatttcggtcaagaacgtaacaatactacatacaacttagcacgcatgaatatgttattacatgatgtgcgttatgagaacttcgatatccgtaatgatgacacattggaaaacccagcctttttaggcaatacatttgatgcggttattgcgaacccaccgtatagtgcgaaatggactgcagattcaaagtttgaaaatgacgaacgattcagtggttacggcaaacttgcgcctaagtctaaagcagactttgcctttattcaacacatggtacattacctagacgatgaaggtaccatggccgttgtactcccacatggtgtattattccgaggtgctgcagaaggtgtcattcgtcgttatttaattgaagaaaagaactacttagaagctgtgattggtttgccagcgaatattttctatgggacaagtattccaacatgtattttagtatttaaaaaatgtcgccaacaagacgacaacgtactatttatcgatgcatccaatgattttgaaaaaggaaaaaatcaaaatcatttaagcgatgcccaagtcgaacgtattatagacacatataagcgtaaggaaacaattgataaatatagctacagcgcgacactacaagagattgccgataacgattacaacctaaatataccgagatatgtcgatacattcgaagaagaagcaccgattgatttagatcaagtccaacaagatttgaaaaatatcgataaagaaatcgcagaaattgagcaagaaatcaatgcatacctgaaagaacttggggtgttgaaagatgagtaa

SEQ ID NO: 409066 - DNA, 288 bp, Staphylococcus aureus
atgtttggtggttatgatgaattgatggaacctgtgtgtaacacatttactgctaaggaaccatttaatcaacttggtggttatccatattttgaccaaatagatccaagaacgaacgatcaagaactgaaaatgtatgatagagtcttactgcaaattgattctacaagagatggtaattcttcgattatatggggtgatttaggtattgccaatatcttagtgaaatctactgaccttgaggctatgaagtttgatgattacatgtattcatgggattgcagctaa

SEQ ID NO: 409067 - DNA, 630 bp, Staphylococcus aureus
ttgaagcctgagtcaacacgtacgcaaatcgatcaaatcatcgatgaagcgaaagcatacaattttaaatctgtatgtgtgaatccaacacatgttaaatatgcagcagagcgactagctgattcagaggtgctcgtttgtacggtaataggattcccattaggtgcatcgacaactgcgacgaaagcatttgaaacagaagatgcgattcaaaatggtgcagatgaaattgacatggtcatcaacatcggcgcattaaaagatggacgttttgatgatgtacaacaagacattgaagcagtggttaaagctgcgaaaggtcacacagtaaaagtgattattgagacggtattgttggaccatgacgaaattgtaaaagcgagtgaattaacaaaagcggctggtgcggacttcgttaaaacttcaacaggttttgcaggtggcggtgcgactgcagaagacgttaaattaatgaaagatacagtaggtgctgatatagaagtaaaagcatcaggtggcgtacgtaatttagaagatttcaataaaatggttgaagcaggtgcgacacgtattggtgcgagcgcaggcgttcaaattatgcaaggtttagaagcagattcagattactaa

SEQ ID NO: 409068 - DNA, 345 bp, Staphylococcus aureus
ttgtttgttgattcttctccacctgtttcaggtagttcagatttcttagattgtgcttttttagttggtaccactgctttaaccttttcattgatttcaataacaggtgttactactttaccttgttccactggtttagaaggttttttaggttcttctttagcaggtggtattggtttaccaggttcagttggtacctctggcgttggcggtgttggtgtttccggctcgcttggtacttctggtgtcggtggtgttggtgtttccggctcgcttggtacttctggtgtcggtggcgttggtggcacgattggaggtgttgtatcttcttcaatcgtttgttga

SEQ ID NO: 409069 - DNA, 180 bp, Staphylococcus aureus; identical to SEQ ID NO: 408994

SEQ ID NO: 409070 - DNA, 180 bp, Staphylococcus aureus
atgttaagttatggtggattacttaaagaaaagcataaaattttaaacttagacgatgccgaagatggtaatttgattaatacaagtgatgaagataaaacgacagacgaagaagaaaaagcacattcgattacagcaatttggaatttcgaaaagcaaaattattatttaagacattag

SEQ ID NO: 409071 - DNA, 1056 bp, Staphylococcus aureus
atgacatcaattaaaacaattacacccaaagattttatatttagagttttatcaggtgtcgccataggtattgttgcgggtttagttcctaatgcgatacttggagaaatttttaaatactttatggattatcatccgatttttaaaacgttattaggcgttgtcgttgcaattcaatttacagtacctgctttgattggtgcattggttgccatgaaatttgacctatcgccattagcaattgctgttgtggcaagtgcagcatatgtaggaagcggtgcagcgcagtttaaaaatggtgcttggatgattacgggtattggtgatttaattaatacaatgattacagcagcgattgcagtgttgttcattttacttattcaacatcgtgtaggtagtatggcattgattgtattcccaacagttgttggcggtatttcaggtgcaattggtgttttaatattgccgtatacgaaaatgattacaacagccatcggtaatatggttaatggttttacagaattacaaccgattgtcatgagtattttgatttcaatggtatttagtcttattattatttcgccactatcaactgtggccattgcctttgcgataggtattacaggtttagcagctggatcagcgtcaattggtatctccgcgactgaagcagtattgataattggtacaagtaaagtgaatcgtttaggggtgccgttatccgtcttctttggaggcgttaaaatgatgatacctaatatggtgaaatatccaattcttatgttaccaatattgacaacagccattgtatcaggtttggtatcagcattagtaggtattcatggaacgaaagaatcagctggatttggttttataggaatggtaggaccgattaatgcatttaaatttatggaggttgattctgcttggttgagtgtcttactaattgtagtagcgttctttgttgtgccatttgtaacagcttggcttgcagatatcatttatcgtaaagtgtttcgtttatatactaatgatatttttaaattcatgggataa

SEQ ID NO: 409072 - DNA, 276 bp, Staphylococcus aureus
atggctataaacataattgaatataataggtcttataaggaagagctaatcgagtttattttatcgattcaaaaaaatgaatttaatataaaaattgatagagatgatcaacctgatttggagaacatcgaacataactatttgaatagtggagggcaattttggcttgcaataaacaatcatcaaaatattgttggtactataggtttgattagactagataataatatgtctgcacttaaaaaatgtttgttgataaaggttataggaatttaa

SEQ ID NO: 409073 - DNA, 1494 bp, Staphylococcus aureus
atgactaaacatatcatcgttattggtggtggcttaggtgggatttctgcagcaattcgaatggcacaaagtggctattcggtctcattatatgaacaaaatactcatataggaggcaaagtgaatcgtcatgaatcagatggctttggctttgatttaggtccatctattttaacgatgccttatatttttgaaaaattattcgaatatagcaagaagcaaatgtcagactacgttacaatcaagcgtttgccacatcaatggcgtagcttttttccagatggcacgactatcgatttgtatgaaggtattaaagaaacaggtcagcataatgcgatattgtcgaaacaggatatagaggaactgcaaaattatttgaattatacaagacgaatcgatcgtattactgaaaaagggtattttaactatggtttagatacactatctcaaattattaaatttcatgggccattaaatgctcttattaattatgattatgtacatactatgcaacaggccatagacaagcgtatctcgaatccatacttgcgacaaatgttaggctattttatcaaatatgtaggttcttcatcatacgatgcgccagctgtattatctatgttattccatatgcaacaagagcaaggcctttggtatgtagaaggtggaatccatcatttagccaatgccttggaaaagctagcgcgtgaagaaggtgtcacaattcatacaggtgcacgtgtggacaatattaaaacatatcaaagacgtgtgacgggtgtcagattagatacaggtgagtttgtaaaggcagattatattatttcaaatatggaagtcatacctacttataaatatttaattcaccttgatactcaacgattaaacaaattagagagggaatttgagccggcaagctcaggatatgtgatgcatttaggtgttgcttgccaatacccgcaattagcacatcataatttcttttttacggaaaatgcttatctcaattatcaacaagtttttcatgaaaaggtattgccagatgatccgaccatttatctagtaaatacgaataaaactgatcacacacaagcgccagtaggttatgaaaatatcaaagtcttaccacatattccatatattcaagatcagccttttaccactgaagattatgcgaagtttagggataaaattttggataaattagaaaaaatgggacttactgatttaagaaaacacattatttatgaagatgtttggacaccggaggatattgaaaaaaattatcgttctaatcgtggtgcaatatatggtgttgtagcagataaaaagaaaaacaaaggatttaaatttcctaaagaaagtcagtattttgaaaacttgtactttgtaggtggatcagtaaatcctggtggtggcatgccaatggttacattaagtgggcaacaagtcgcagacaaaataaacgcgcgagaagcgaagaataggaagtga

SEQ ID NO: 409074 - DNA, 372 bp, Staphylococcus aureus
atgaggaaagttttaaatatttttacaatagcttttaaatcaatattgaaaaataaaggtagaaatatatttacaatgataggtataatcatcggtatttcttctgttattacgataatgtctttgggaaatggctttaaaaaaactgctgctgatcaattttcagatgctggcgccggaaaacaagaagcgttgattagctttacttttaaagttgatgagaaaatcaaaaagtatccttttaatcaaagagatatagagttggtaaatcaagttgatggcgtactagatgcgaagctaaaggaaaataaagaagaaggaattgaagccacaataactaatgtccagaaaaaagtgacatcttcattataa

SEQ ID NO: 409075 - DNA, 1719 bp, Staphylococcus aureus; identical to SEQ ID NO: 408077

SEQ ID NO: 409076 - DNA, 495 bp, Staphylococcus aureus
atgttgttaaaggtagataaaaacacacataaaataactggtgaatatgacacaactacaaacgatagaaaagatgctactgactcgacatacaaaagttatccagtaaaagtagttaataataaaatcgttttcacaaaagacgtaaaagatcccgcgctgaaacaaaaaatcgaaaacaatcaatttttgattcaaagtggtgatttaacaagcattttaaatagcaatgatttgaaagtcacacatgatcctaccactgattattataatttatctggtaagttgtcgaatgataatccaaacgttaaacaattaaaacgtagatataatattcccagtaatgcatcaacaaaggtggaattaaagggaatgagtgatttaaaaggcaataatcatcaagatcagaaactttatttttatttttcaagtcctggaaaaaaccaaattatatacaaagaaagccttacttataataaattaagtgaacattaa

SEQ ID NO: 409077 - DNA, 2076 bp, Staphylococcus aureus
atgttaagaggacaagaagaaagaaagtatagtattagaaagtattcaataggcgtggtgtcagtgttagcggctacaatgtttgttgtgtcatcacatgaagcacaagcctcggaaaaaacaccaacgtccaatgcagcggcacaaaaagaaacactaaatcaaccgggagaacaagggaacgcgataacgtcacatcaaatgcagtcaggaaagcaattagacgatatgcataaagagaatggtaaaagtggaacagtgacagaaggtaaagacacgcttcaatcatcgaagcatcaatcaacacaaaatagtaaaacaatcagaacgcaaaatgataatcaagtaaagcaagattctgaacgacaaggttctaaacagtcacaccaaaataatgcgactaataatactgaacgtcaaaatgatcaggttcaaaatacccatcatgctgaacgtaatggatcacaatcgacaacgtcacaatcgaatgatgttgataaatcacaaccatccattccggcacaaaaggtattacccaatcatgataaagcagcaccaacttcaactacacccccgtctaatgataaaactgcacctaaatcaacaaaagcacaagatgcaaccacggacaaacatccaaatcaacaagatacacatcaacccgcgcatcaaatcatagatgcaaagcaagatgatactgttcgccaaagtgaacagaaaccacaagttggcgatttaagtaaacatatcgatggtcaaaattccccagagaaaccgacagataaaaatactgataataaacaactaatcaaagatgcgcttcaagcgcctaaaacacgttcgactacaaatgcagcagcagatgctaaaaaggttcgaccacttaaagcgaatcaagtacaaccacttaacaaatatccagttgtttttgtacatggatttttaggattagtaggcgataatgcacctgctttatatccaaattattggggtggaaataaatttaaagttatcgaggaattgagaaagcaaggctataatgtacatcaagcaagtgtaagtgcatttggtagtaactatgatcgcgctgtagaactttattattacattaaaggtggtcgcgtagattatggcgcagcacatgcagctaaatacggacatgagcgctatggtaagacttataaaggaatcatgcctaattgggaacctggtaaaaaggtacatcttgtagggcatagtatgggtggtcaaacaattcgtttaatggaagagtttttaagaaatggtaacaaagaagaaattgcctatcataaagcgcatggtggagaaatatcaccattattcactggtggtcataacaatatggttgcatcaatcacaacattagcaacaccacataatggttcacaagcagctgataagtttggaaatacagaagctgttagaaaaatcatgttcgctttaaatcgatttatgggtaacaagtattcgaatatcgatttaggattaacgcaatggggctttaaacaattaccaaatgagagttacattgactatataaaacgcgttagtaaaagcaaaatttggacatcagacgataatgctgcctatgatttaacgttagatggctctgcaaaattgaacaacatgacaagtatgaatcctaatattacgtatacgacttatacaggtgtgtcttcacatactggtccattaggttatgaaaatcctgatttaggtacatttttcttaatggatacaacgagtagaattattggtcatgatgcaagagaagaatggcgtaaaaatgatggtgtcgtaccagtgatttcgtcgttacatccatccaatcaaccatttattaatgttacgaatgatgaacctgccacacgcagaggtatctggcaagttaaaccaatcatacaaggatgggatcatgtcgattttatcggtgtggacttcctggatttcaaacgtaaaggtgcagaacttgccaacttctatacaggtattataaatgacttgttgcgtgtggaagcgactgaaagtaaaggaacacaattgaaagcaagttaa

SEQ ID NO: 409078 - DNA, 708 bp, Staphylococcus aureus
atgaataaaaatgtaatggttaaaggtttaactgctttaactattttaacatctcttggtttcgctgaaaatatttctaatcagcctcattcaattgccaaagcagaaaagaatgtcaaagaaattaccgatgcaactaaggcaccatacaattcagtggtagcatttgcgggtggtactggtgtagttgttggtaaaaatacaatcgtaactaacaaacatatcgctaaaagtaatgatatttttaaaaatagagtagcagcacattattcgagtaaaggtaaaggcggaggaaactacgacgttaaagacattgtagaatatcctggaaaagaagaccttgcgatagttcatgttcatgaaacaagtacagaaggtttgaattttaataagaacgttagttatacaaaatttgcagaaggagcaaaagcgaaagatagaatttctgttattggttatccaaagggtgcacaaacaaaatataaaatgtttgaatcgacaggaacgattaaccatatcagtggaacgtttatagaatttgatgcgtatgcacaaccaggtaattcaggatctcctgtattgaattctaaacatgaactgattggtattttatatgcaggtagtggaaaagatgaatctgaaaagaatttcggtgtttatttcacaccacaattaaaagaatttattcaaaataatattgaaaaataa

SEQ ID NO: 409079 - DNA, 783 bp, Staphylococcus aureus; identical to SEQ ID NO: 408857

SEQ ID NO: 409080 - DNA, 732 bp, Staphylococcus aureus
atgaaccagaaaaaccctaaagacacgcaaaattttattacttctaaaaagcatgtaaaagaaatattgaatcacacgaatatcagtaaacaagacaacgtaatagaaatcggatcaggaaaaggacattttaccaaagagctagtcaaaatgagtcgatcagttactgctatagaaattgatggaggcttatgtcaagtgactaaagaagcggtaaacccctctgagaatataaaagtgattcaaacggatattctaaaattttccttcccaaaacatataaactataagatatatggtaatattccttataacatcagtacggatattgtcaaaagaattacctttgaaagtcaggctaaatatagctatcttatcgttgagaagggatttgcgaaaagattgcaaaatctgcaacgagctttgggtttactattaatggtggagatggatataaaaatgctcaaaaaagtaccaccactatattttcatcctaagccaagtgtagactctgtattgattgttcttgaacgacatcaaccattgatttcaaagaaggactacaaaaagtatcgatcttttgtttataagtgggtaaaccgtgaatatcgtgttcttttcactaaaaaccaattccgacaggctttgaagcatgcaaatgtcactaatattaataaactatcgaaggaacaatttctttctattttcaatagttacaaattgtttcactaa

SEQ ID NO: 409081 - DNA, 663 bp, Staphylococcus aureus; identical to SEQ ID NO: 408855

SEQ ID NO: 409082 - DNA, 960 bp, Staphylococcus aureus
ttggtaaaaatagttgtttcgaggaaaattccagataaattttatcaacaattaagtaaacttggtgacgttgttatgtggcaaaaatcattagtgcctatgcctaaagatcaatttgtgacagcacttcgtgacgcagatgcttgttttattacattaagtgaacagatcgatgcagaaattttagcacaatcaccaaatttaaaagtaattgcgaatatggctgtaggatatgacaacatcgatgttgaaagtgcaacagcgaataacgtggttgtcacgaatacaccaaatgtacttactgaaacaactgcagaattaggatttacattaatgcttgctatagcacgccgtattgtagaagctgaaaaatatgtagaagcagatgcatggcaaagctggggtccttatttattgtcaggtaaagatgtcttcaattcaactattggaatatatggtatgggagatattggtaaagcttttgcaagaaggttgcaagggtttaatactaatattctttatcataatcgatcaagacataaagatgcagaggcggactttaatgcaacatatgtttcttttgaaacgttgttagcagaaagtgattttatcatctgtacagcgccacttacaaaagaaacacatcataaatttaatgctgaagcatttgaacaaatgaaaaatgatgcaatttttattaatatcggtagagggcaaattgtagatgaaacagcattaatcgatgcactagacaataaagaaattttagcatgtggtttagatgtattagcaaatgaaccgattgatcatacacatccattaatgggacgtgataatgttctgattacaccacacattggtagcgcatcagtaacaacacgggacaatatgattcaattatgtattaataatatagaagcggttatgacaaatcaggtaccacatactccagtaaattga

SEQ ID NO: 409083 - DNA, 357 bp, Staphylococcus aureus
ttgattaaactatttttgcttaagttatactgggcacacttttcgactaaacaaattcatcaatttttaatggcatatcctaatgtaattaaagaggagggaagaaaaaaagatagttatttatgtgaatgggtgaatagggaagaaaatgttcttttattacgtaaatactatgcttttataaaacttgatcataacgatattattaaagaactgcagaaattaaaagtaagttacattacatatatggattctgaatacccagtgctattaaaagaaatatatcaatttccattacttcttttctataaagggaacatcaaattaataaaaataatatgcatcatttggcagtag

SEQ ID NO: 409084 - DNA, 1749 bp, Staphylococcus aureus
atgggtatggcaacctatgccgttgtggatttggaaacaacaggcaaccaattagattttgacgatatcattcaaattggtataacgtttgtgcgcaataaccaaattattgatacatatcattctatgattagaacaaatttagagattccgccgttcattcaagcgttaacatccattgaagaaaatatgctacaacaagcgccatattttaatcaagttgcacaagaaatctacgataagataaaagattgcatttttgtcgctcataatgtagattttgatttgaattttattaaaaaggcatttaaagattgtaatattcaatatcgtcccaaaaaagttatagatacactagaaatctttaaaatagcttttcctacagataaaagctatcaattaagtgaattagcagaggcacatggtattaccttagcaaatgcccatcgagctgacgaagatgccgctactactgctaaattgatgatattagcttttgaaaaatttgaaaagttaccgttagatactttgaagcaattatattatttaagtaaacagttgaaatacgatttgtatgatattttctttgagatggttaggcaatatgatgcaaagccattggataaatcgtacgaaaagttcgaacagattatctatcgtaagcaagttgattttaaaaagccgacaacaaattataatggcagcttgaagtctttatatagcaaagctgtagatcaacttggcttaacatatcgaccgcaacaattatatttagcggaaactatattagatcagctcatgcatagtgaaaaagcaatgattgaagcatcactaggcagtggtaaatcattagcatatttacttgcggccttgatgtataatattgaaactgggaagcatgtcatgatttctaccaatactaaattactgcaaagtcaattgttagaaaaagatattccagcaatgaatgaagcgttaaattttaaaattaatgcactattgattaaaagtaaaagtgattacatttcattgggacttattagtcaaattttaaaagatgacacaagtaattacgaagtgaatatcttgaaaatgcaattgttaatttggattacagagacgccgtccggagatatacaggaattaaatttaaaaggtggtcaaaagatgtattttgaccagaaaattgaaacatatgtaccggcacgtcacgatgttcattattataattttattaagcgaaatgcacagaacattcaaattggtattacaaatcatgcacatttaattcattctgatgttgaaaattcaatatatcaattgtttgatgattgtatagtggatgaagcacatcgcttaccagactatgccttaaatcaagtgacaaatgagttgagttatgctgatattaaatatcagcttggtttgattggtaaaaacgaaaatgaaaaattgttaaaggcaatcgatcaactggaaaagcagcgaattttggaaaaattagatattgcaccaattgatatttttggcttgaaggctagtatgaatgagattcatgagttaaatgagcaattgttctcaacgatatttacgattatcaatgattctgatgtttatgatgatgatattcatcgcttccataatgtatttacttttgaaacaaaagacattttgaaggatttacatgcgattatcgataagttaaataaaacgctagaaatattcaatggcattagtcataaaacgtga

SEQ ID NO: 409085 - DNA, 201 bp, Staphylococcus aureus
atgatggtaaaaaaaacaaaatccaattcactaaaaaaagttgcaacacttgcattagcaaatttattattagttggtgcacttactgacaatagtgccaaagccgaatctaagaaagatgatactgatttgaagttagttagtcataacgtttatatgttatcgaccgttttgtatccaaactggagacttttaacataa

SEQ ID NO: 409086 - DNA, 546 bp, Staphylococcus aureus
atgatttcacacttgataacggatacttcgaagaagatacatcagacagtgattcagactcagacagtgattcagactcagacagcgactcagattcagacagtgattcagactcagatagcgattcagattcagacagcgactcagactcagatagcgactcagactcagacagcgactcagactcagatagcgactcagattcggacagcgattcagactcagatagcgactcagattcagacagcgattcagactcagatagcgactcagattcagacagtgactcagactcagatagcgactcagactcagacagtgactcagactcagacagcgattcagattcagatagcgactcagattcggacagtgattcagactcagatagcgactcagattcagacagcgactcagactcagatagcgactcagattcggacagcgactcagactcagatagcgactcagactcagacagtgattcagactcagatagcgattcggactcggatgcaggaaaacatacacctgttaaaccaatga

SEQ ID NO: 409087 - DNA, 537 bp, Staphylococcus aureus; identical to SEQ ID NO: 406140

SEQ ID NO: 409088 - DNA, 1041 bp, Staphylococcus aureus
gtgatcattgccataattatattgatatttatttcgtttttcttttcaggaagcgagacggcattaacggctgccaataaaacaaaatttaaaactgaagctgacaaaggtgataaaaaagcaaaaggcattgtaaagttacttgaaaaaccaagtgagtttattacaacgattctaattgggaataatgtcgcgaatattttattaccaacacttgttacaattatggctttacgttgggggattagcgttggtattgcatcagctgttttaacagttgttatcattttgatttccgaagtgattcccaagtctgtcgctgcaacatttccagataaaataacaaggcttgtatatccaattattaatatttgtgtcattgtgtttcgccctatcacattacttttaaataagttgacggacagtattaatcgaagtttatctaagggtcaacctcaagaacatcaattttcaaaagaagaatttaaaacaatgttagcaattgctggacatgaaggtgctttaaatgaaattgagacgagtaggttggaaggtgtcattaattttgaaaatttaaaagtaaaagatgtagatacaacacctagaattaatgtgacggcatttgcttcaaatgcgacatacgaagaagtttatgaaacggttatgaataagccatacactagatatccagtgtacgagggagatattgataacattattggggtgtttcattctaaatatctgttggcttggagtaataaaaaagaagatcaaattacaaactattcagctaagccattatttgtgaatgaacacaataaagctgaatgggtattacgtaagatgactatttctagaaaacatttagcaattgtgttggacgaatttggtggtaccgaagcgatagtgtcacatgaagacttaattgaagaattattaggtatggaaattgaagatgagatggataaaaaggaaaaagaaaaactttctcaacagcaaattcaatttcaacaacggaaaaatcgcaacgtatctatataa

SEQ ID NO: 409089 - DNA, 558 bp, Staphylococcus aureus
atgaataaaaaactattaacaaaaacattgatagcaagtgctttagttttaacaacagtaggttcaggttttcattcttcttcaaattataatggtattaataacgttgcaaaagcttctgaaataacagatagcgaattgtggaaaaatgtaagagacgctttaaaagacgcaaatatcattgataaaacagacaaagaaacgattaaagtaaaatataaattaaaaaacggtggagagagcgaaatttctgggactgcgaacttagataatcttagtaatactaataacagcaccgttagtcctgatagcgttaaccgtgtcgatattacaagagttaatccaaacggaaacacaatagaggcaaatgatgcatggaaaaaattagtagataaattaaaagaaaagcatattgttaaagtcggtgataaagtaactatccatagtaaagatccttctgatgaaaaagtatatggcaaggtaggagatcaagattctaatgtaaaaaatagactgattagtcctaaagatataactcatataacaatagaaagataa

SEQ ID NO: 409090 - DNA, 1899 bp, Staphylococcus aureus
atgggattacctaatccgaaaaatagaaagcccacagctagtgaagtggttgaatgggcgttatatatcgctaaaaacaaaatagctattgatgtacctggttctggaatgggagcacaatgctgggatttacctaattatttactcgataaatattggggatttagaacatggggaaatgctgatgctatggctcagaaatctaattatagaggtagagatttcaagataattagaaatacaaaagactttgtaccacaaccaggcgactggggtgtttggactggtggttgggcaggtcatgtgaacattgtagtagggccatgcacaaaagactattggtatggtgtggatcaaaactggtatacaaataatgcaacaggaagtccgccgtataaaatcaaacactcttatcatgatggaccaggtggaggagttaaatattttgttagaccaccatatcatccggagaaatctacgccggcacctaaaccagaagatgatagtgatgataacgaaaaaaataataaaaaagttccaatttggaaagatgtaacaactataaagtacactatttctagccaagaggttaattatccagaatatatttatcactttatagtagaaggtaatcgacgactcgaaaaacctaaaggaataatgattagaaacgcacaaacgatgagctcggtagaaagtttatataacagtaggaagaaatacaaacaggatgtagaatatccccacttttatgttgacagacataatatttgggcacctagaagagctgtatttgaagttcctaatgaacctgattatatagttatagacgtatgtgaagattatagtgcgagtaaaaatgaatttatttttaatgagattcacgcaatggttgtagctgtagatatgatggccaaatatgagatacctctaagtattgaaaatttaaaagtagacgacagcatttggcgttcgatgttggaacatgttaattggaatatgattgacaacggtgttccccctaaagataaatacgaagcattagaaaaggcattacttaatatatttaaaaacagagaaaaattattaaattctataactaaaccaacagtaacaaaatctagaataaaagttatggtagataataaaaacgctgatatagcgaatgtaagagactcatcaccaacagctaataatggctcggcatctaaacaaccgcagatcataacagaaacgagtccttatacattcaaacaagcactggataaacaaatggcaagaggtaacccgaaaaaatctaatgcttggggttgggctaacgctacacgagcacaaacgagttcagcaatgaatgttaaacgaatatgggaaagtaacacgcagtgctaccaaatgcttaatttaggcaagtatcaaggcgtttcagttagttcgcttaataagatacttaaaggtaaggggacattgaataatcaaggtaaagcgttcgcagaagcttgtaaaaagcacaacattaatgaaatttatttaatcgcgcatgctttcttagaaagtggatatggaacaagtaacttcgctaacggaaaagatggagtatacaactacttcggtattggcgcttacgacaacaatcctaactacgcaatgacgtttgctaggaataaaggttggacatctccagcaaaagcaatcatgggcggtgctagcttcgtaagaaaggattacatcaacaaaggacagaatacactgtacagaatcagatggaatcctaagaatccagctacgcaccaatacgctactgctatagagtggtgccaacatcaagctagtacaatcgctaagctatataaacaaatcggcttaaaaggtatctactttataagagataaatataaataa

SEQ ID NO: 409091 - DNA, 1296 bp, Staphylococcus aureus
atgtatgaaatacttgatctaaaaaataaaatcggtggtggctacaataagttttggcacaacaaaaacttttaccgtgttgttaaaggttcaaggggtagcaagaaaagtaaaactaccgctattaatctcatttatcgaataatgaaatatgattgggcaaatatacttgtagtcagaagatttagcaacactaacaaacaatcaacgtatacagatttaaagtgggcaactaaccaattaggcgttgctcacttatttaaattcaacgaaagtttgccggaaataacgtataaacctactggacaaaaaatactgtttagaggtttagacgacccattgaaaataacatcgattactgttgatacaggcattttgtgttgggcttggtttgaagaggcttatcaaatagaaacattcgctaagtttagcactgttgttgagtcaatacgtggtagctacgatagtccggaatttttcaagcaaatcacagtcacttttaacccgtggtcggaaagacattggttgaagcctacattttttgatgaagaaacaaaattaaacaatactttttcagatacaacaacttatagagttaatgaatggctagataaagtcgatattgaacgatatgaagatttgtatataaagaatcctagacgtgcaagaatcgtttgtgatggagattggggtgttgcagaggggcttgtattcgataattttaaagtggaagactttgattggtttgaggagtttaaaagaacgcaagaaataactcacggaatggattttggatttagtcaagaccctacaacagttgttagtacggttgtagatttaaaaaacaaaaagttattcatctatgatgaacactataaaaaagcgatgttaactgatgatataaaacaaatgcttattaaaaaaggattaggtgatgtagatattgcagctgattatggggctggtggagatagagtgatcagtgaattgaaatctaaagggattaaaggtataagaaaagcgttgaaaggcgctaatactattttaccaggcattcaattcattcaaggctttgaagttattatacacccatcatgtgaacacgctattgaagagttcaacacttatacatttgaccaagataatgatggtaagtggttgaacaagcctatagatgctaataaccatattatcgatgcattgcgttatagtcttgagaaatatcatatcgtacgtaaaaaacgtaaaaagaatatagaaagcaaaacaaaagtaattaaatctctaggattatag

SEQ ID NO: 409092 - DNA, 495 bp, Staphylococcus aureus
atgaacaaattaactaaaaagcaacgtttgtttgcagaagtatatacaatacctggtactgaatgttatggcaatgctactaagtcagctgtgcatgccggatatagcgaaaagacggcgtactcacaaggacagcgtatgttgaagaatgttgaaattcagaattatatcaaggaggttgaaacaaaactctttgacgagaatattatgtcaggtaaagaagtgttgtataggctaactagaacagctagaggagaacacacggaagttgaagctgtcgtaacaaaaactggagactataaagagaatccggatactggcaaaatgcaattagtatacgatgaacacatacaacttgttactaagtcacctaaaataagtgaccaaaacaaagccttagagatgttaggtagacatcacaaattatttacagacaaacaagaagtcgaccacaaaataccgatgtttgttgataatattccggaagatgattag

SEQ ID NO: 409093 - DNA, 423 bp, Staphylococcus aureus
atgactaaaaagaaatacggattaaaattatcaacagttcggaaattagaagacgagttgtgcgattatcctaattatcataaacaacttgaagatttaagaagtgaaataatgacaccgtggattccaacagatacaaatataggcggggagtttgtaccatctaatacatcaaaaacagaaatggcagtaactaattatctttgtagtatacgaagaggtaaaattcttgagtttaagagtgcgattgaacgtataatcaacacatcaagtaggaaagaacgcgaattcattcaagagtattattttaataaaaagactttgattgcggtttgttatgacatacacatctctgaaagtacagcgcatagaatcaagaagaaaatagtgtctaaactagccgaagaattaggagaatactaa

SEQ ID NO: 409094 - DNA, 204 bp, Staphylococcus aureus
atgaatcagctgagaattttattacatgacggtagtagtttgatattacatgaagatgaattatttaacgaaatagtatttgttttggacaattttagaaatgatgatgactatttaacgatagaaaaagattatggcagagaacttgtattgaacaaaggttatatagttgggatcaatgttgaggaggcagacgatgattaa

SEQ ID NO: 409095 - DNA, 195 bp, Staphylococcus aureus
atgacggatgttaaaattaaaactatttcaggtggagtttattttgtaaaaacagctgaaccttttgaaaaatatgttgaaagaacggtaaattttaatggttttatttacgtaagtaatataatcaaacagccaacgtatattaaaacagatacgattgaatcaatcacacttattgaggagcgtgggaaatga

SEQ ID NO: 409096 - DNA, 534 bp, Staphylococcus aureus
atgactaacacattacaagtaaaactattatcagaaaatgctagaatgcccgaacgaaatcataagacagatgcaggttatgacatattctcagccgaaaccgtcgtacttgagccgcaagaaaaggcagtgattaaaacagatgtagctgtaagtataccagagggctatgtcgggctattaactagccgtagtggtgtaagtagtaaaacgtatttagtgattgaaacaggaaagatagacgcgggatatcatggcaatttagggattaatatcaagaatgatattgaaacgttagagatttgggatgatggtaactttagtcgaaatgttgctgggatagacggaaagtatgccccaccacatccatcagataaaattttatttatgaatggtagttatgtcataaacaaaggcgacaaactagctcaattggttatcgtgcctatatggacaccggaactaaagcaagtggaggaattcgagagtgtttcagaacgtggagcaaaaggcttcggaagtagcggagtgtaa

SEQ ID NO: 409097 - DNA, 171 bp, Staphylococcus aureus
atgaaaaaatttaatgttcaaatcacatacactggcatgattgaagagactatcgaggctgaaagtttagacgaagcagaaaatgaggcgcatgatattgcgagaatggaagtgccatttgattgtgatgagtatgaaatttatgtagatgtggagcaggaaaatgactaa

SEQ ID NO: 409098 - DNA, 255 bp, Staphylococcus aureus
atgaataaccgtgaacaaatagaacagtccgttataagtgctagtgcgtataacggcaatgacacagagggattactaaaagagattgaggacgtgtataagaaagcacaagcgtttgatgaaatacttgagggtttacctaatgctatgcaagatgcactcaaagaagatattgaacttgatgaagcagtagggattatgacgggtcaagttgtctataaatatgaggaggagcaggaagatgaaaaaatttaa

SEQ ID NO: 409099 - DNA, 372 bp, Staphylococcus aureus
atgaaagtgaactatgaaacagggttccaactaggtgtaatggaagctaggttgaagaagatgagaaaacaacgtgatgcgtgcaagaagcaacgtgatgagcttatcgtggatatagctaagttaagagagcgtaacgaagagctggagaacatgtggcgcacagtcaaaaatgaattgcttggaagatacgaattttaccgttttagacttaacgaactacagattgagagtagagcgaacaaggcagtagctataaacatgggagctaaaatcaacgcaagtgctatattgtaccgaatggacaaattagacggaacaaatgagttctacgaatttttaggacaaatggaggatgacactaatgaataa

SEQ ID NO: 409100 - DNA, 243 bp, Staphylococcus aureus
atgacagataacgcacgcaaagaatacctaaatcaattctttggatctaagagatatctgtatcaagataacgaacgagtggcacatatccatgtagtaaacggcacttattactttcatgggcatatcgtgccaggttggaaaagtgttaaaaagacatttgatactgctgaagagctcgaaatatatataaagcaacatggtttggaatacgaagaacagaaggaactaactttattttag

SEQ ID NO: 409101 - DNA, 357 bp, Staphylococcus aureus
atgagtatcgtaaagattaacggtaaaccatataaatttaccgaacatgaaaatgaattgataaaaaagaatggtttaactccaggaatggttgcaaaaagagtacgaggtggctgggcgttgttagaagccttacatgcaccttatggtatgcgcttagctgagtataaagaaattgtgttatccaaaatcatggagcgagagagcaaagaacgtgaaatggctaggcaacgacgtaaagaggctgagctaagaagaaagaagccacatttgtttaatgtgccacaagtgcatccaagaggacgttatgcgtgctacctgatggaaaacgacatattcgtgaaagttaagaagtag

SEQ ID NO: 409102 - DNA, 306 bp, Staphylococcus aureus
atggcaagaattaccaaagaaacaaaaactgtaagcgacggttattcaagagaagaccgagaaacgacattgaactatgattacgaaaatcaagaatggattgcttactcatcggtaccgacacatattactagaatgacaaagttgtacggcgatgatgtagaggtattggaacgattagaatctgggactgcggtattggttagggcgaaactacctaaaagcgcaataggttttagaaaattaatgtctgaagagcgacgacaagaattatctgagagagcaaaaagagcttttggtcattag

SEQ ID NO: 409103 - DNA, 159 bp, Staphylococcus aureus
atggtaaccaaagaatttttgaaaattaaacttgagtgttcagatatgtacgctcagaaactcatagacgaggcacagggcgatgaaaataagttatatgacctatttatccaaaaacttgcagaacgtcatacacgccccgctatcgtcgaatattaa

SEQ ID NO: 409104 - DNA, 780 bp, Staphylococcus aureus
atgaaaccactattcagcgaaaagataaacgaaagcttgaaaaaatatcaacctactcatgtcgaaaaaggattgaaatgtgagagatgtggaagtgaatacgacttatataagtttgctcctactaaaaaacacccgaatggttacgagtataaagacggttgcaaatgtgaaatctatgaggaatataagcgaaacaagcaacggaagataaacaacatattcaatcaatcaaacgttaatccgtctttaagagatgcaacagtcaaaaactacaagccacaaaatgaaaaacaagtacacgctaaacaaacagcaatagagtatgttcaaggcttctctacaaaagagccaaaatcattaatattgcaaggttcatacggaactggtaaaagccacctagcatacgctatcgcaaaagcagttaaagctaaagggcatacggttgcttttatgcacataccaatgttgatggatcgtatcaaagcgacatacaacaaaaatgcagtagagactacagacgagctagtcagattgctaagtgatattgatttacttgtactagatgatatgggtgtagaaaacacagagcacactttaaataaacttttcagcattgttgataacagagtaggtaaaaacaacatctttacaactaactttagtgataaagaactaaatcaaaatatgaactggcaacgtatcaattcaagaatgaaacacaatgcaagaaaagtaagagtaatcggagacgatttcagggagcgagacgcatggtaa

SEQ ID NO: 409105 - DNA, 303 bp, Staphylococcus aureus
atgactaaaaattataaagacatgactcaggacgaaataaaagacttattatctgaaaaaagcggagaattgtatgaattagcgaaagaaattaagggagaaagtaaatttgatattttgcttttctcatcaataggagttatcgacggagattatttagcaggttcaaattctgtgattggtcatactttcgatcttgcttccttattggatagcactaagagttataaagacattgtcaatgttctccaaatgtgtaaatcacaaaaatttctcggtattgatgacgacaaggaggactaa

SEQ ID NO: 409106 - DNA, 222 bp, Staphylococcus aureus
atgatgaaaaatagtttgcaagctaaagaacttgcggtaattttatctgtttctaaatccaaagcaggacaaataataagagaactgaataaagagcttgaagatgaaggatacattgcgatacgaggcagaataccagtccaattagctaggaaaaaattcctttatcacgacttatcagaccagagaataatggaggagttgaaaaaagaaaatgagtaa

SEQ ID NO: 409107 - DNA, 450 bp, Staphylococcus aureus
atgaacacactatataaaacaaccctcctcatcacaatggcagttgtgacgtggaaggtttggaagattgaacgaaatacgagaaagcctgtaatcaatcggaatgattttagtaaagagtctacagcagaaacgattgagcgacacagtgatcctgattcaggaataaaactacttaaggcattttccgacttcactaaacaagctgaaaagcaaaaacctacactaggagaagtttatagacggaacaaacctgaattaccaaccgttactttagacgaaaacggactgtttataaatgattttagggtgccttatgtacttgaggaaggggttaacgtaaagaaatctatgaacaacctatataaggtcagtttggactttttcgctaaaagtattattgcagataattacgaagcagataacccagagaatcaacagttattttaa

SEQ ID NO: 409108 - DNA, 225 bp, Staphylococcus aureus
atgacaccagaacaaaaagaaaagctaaacaatatagtattaacactttatgcagttaaagaaaacaaaagtcaaacatacacacacaaagatactcttactgtgacatatgcaggcgagattgagcacacttacgaagtcgacagagagaaacaccttgaatcaatgattgagtgggcaattgaccaaatcgaacagcactttgatttagacgaagaagaataa

SEQ ID NO: 409109 - DNA, 768 bp, Staphylococcus aureus
atgaatgaaattaaaactttcagtaacgacatgttttcaatcttaatcaaacaagataatgaaaataatttattcgatttagaaactgtcgcaaaaagtttggggttcactcagtttaaaaacggcaaacaatatattcgttgggaaactatcaataaatatttaggtaaatatctttcccaagaagttgggaaaggcgatttcataccagaaccaatggtatataagttggctttcaaagcaggtaatgctgtagcagaaaaatttcaagattggttggcgatggaagtcctaccagctattcgcaaacacggtatctacgcaacagacaatgtaattgaacaaacattaaaagatccagactacatcattacagtgttgactgagtataagaaagaaaaagagcaaaacttacttttacaacaagaaatcggagaactaaaacccaaagcagactatgtagatgaaatcttaaagtcaactggcacattagccacaactcaaatcgcggcagactacggtatatcagcacaaaagttaaacaaactactacacgaagctagactacaacgaaaagtaaataaacagtgggtgctttactcagaacacatgggcaagagttacacagattcagacactataacaattgtgcgttctgatggcagagaagacacagttttacaaactagatggacacaaaaaggcagattgaaaatacatgaaatcatgactgaattcggttatgaagctaatttagggggagcgtaa

SEQ ID NO: 409110 - DNA, 933 bp, Staphylococcus aureus
atggaagagaataaaactttaaaagaatacttgcgtaattttttagaaggttacaaatatgtagttgaaaacagatacatttatcagtttagtagtaatccggaagccttcccattcatgagaaaagacgattacaagatttcgatattttatctaaatcaatctttttttgaagaaccttgcatcgttgttatctcaaatgacagtaaattaaaagaaatatataattttcgtaatactgatatcaaacatttgtctaaacactttacttcatacatatatgattctaaaaagtatgtagaagaacaatccggattattagattttaataactacatttattacacgtctatttactacggaaaatatatcgggactgtaataatacaaaacaatttagatttattttttaattatggcaaacgattagctaacgatcattacaatacattgatatcgaagtcgaaagagaaattgataaacaaagcacatgatgaaatacaaccgttcaaccacttagatttaaatagcatgaaaaagattgttgatgatataactttttcttatcaaatagaacaaggattacaagcttataaaagggagttgtatttgccagctgcagcaacctttgctgttgctatagagacgtttttaatcaaattaaaaaaagtgaataaaatcaaacataaagacaccgattcaactatgtacaccaaattattaggagaattaactaaagagggtaaagtgaattatagaaccaaaaaacgggtagaaattgcttatagtatgagaaatataatcaaccattcacaagccggtgcagtagccaaaggtgattgcgacttccttttaaacacactaaaggacatcgttgatgaaaacgaaagaatattaaccgaatacagtaaatcaattaataagacggaataa

SEQ ID NO: 409111 - DNA, 180 bp, Staphylococcus aureus
atgtgcgtaaagtttactgacgcagaaatagcttatataaaagaatcagttgaaaattatagtagtgaatttgatatttatgacgatgaacaagaacttaaattaaaaatttatgaacaaattatgttaaaaatagagtccgaatacaaggatatctatttattccgtcttattaattga

SEQ ID NO: 409112 - DNA, 792 bp, Staphylococcus aureus
atgcatgacaacacaattaaatctattagcaaagactattttgattacttacaaacagaatcaaagtttatcccattagaaaatgaaactatagaattttattcacctatcgtcgattattttggtgattctatttctgtaaatatatctttttcaggggatcgatataaactaactgatcatggtgaaactttatggaacatggaacaattaggtatagatttaactagtaataaaaaacaaaaaaagtatcaacttctcaataatattgtacaaaactacagtctagtcatcgaaaataagcacataaacttttatacaaatagaataaacttatctcaagctattcatgattatgttttggctatttccgagatcagttatttgggaatattaaagaaagaaaatattaagtccttatttaaagacgaagtgatgcaatattttctatcaaacagaaagatttatcctaatatatttcccgaatttaaggtagaggggaaatctaagttaatccatagtttcgaagcagtatttccaggagaagctacagagtatgttaaaacaattaaacgaatcgataaaaacaatgcaaaaaatgtccttttcgattggaatgatgttgaaatacatagaaataaaaattttgattctaatgctagacttaatatcattacagaacaacaagatgatattagcgaagcagtatcaacaatgttgtctcaatataatgtagaggtattttcatttgaaaacaaaaaacaacttgaagaaaagtttagtaacgtataa

SEQ ID NO: 409113 - DNA, 270 bp, Staphylococcus aureus
atgattcaccattcaaatgagtataacattgatataacagcgcaaaatattaataaatatactgcattacaatatatatttgatgcagatgttaaatatatagcatttggtaatgaccacaatgatattttcatgttacaacatgctagtagtggctatattataggaccatcagaagcatacacacacgcaatattgaaacttgataaaatcaaacacatcaataataatacacaagctatttgcaaagtcttaaaatcatataaataa

SEQ ID NO: 409114 - DNA, 303 bp, Staphylococcus aureus
atgagatttgtctttgatattgatggtacgctttgttttgacggccgattaattgaccagactattattgatacattgttacaattacaacatgatggtcatgaacttatatttgcatcagcacgtccgattcgtgatttgttgccagttttaccatcagtatttcatcagcacacattaattggcgcaaatggtgctatgatttcacagcaatcaaagatttctgttatcaaagcaattcatacagatacatatcaccatatcttaaaaataattcaaaagtatgagttagaatattattga

SEQ ID NO: 409115 - DNA, 747 bp, Staphylococcus aureus; identical to SEQ ID NO: 408196

SEQ ID NO: 409116 - DNA, 840 bp, Staphylococcus aureus
atgacaaaacagattatagtaacagactcaacatccgatttatctaaagaatacttagaagcaaacaacattcatgtaattcctttaagtttaactattgaaggagcttcatacgttgaccaagtagatattacatcagaagaatttattaatcatattgaaaatgatgaagatgtaaagacaagtcagccagccataggtgaatttatatctgcttatgaagaactaggaaaagatggctctgaaatcataagtattcatctttcttcaggattaagtggtacatataacactgcttaccaagcaagtcaaatggtagatgctaatgtaactgttattgattcaaaatctatttcttttggtttagggtatcaaatacaacacctagtagagcttgtaaaagaaggtgtctcaacttctgaaatagttaaaaagttaaatcatttaagagaaaacattaaattatttgtagttatagggcaattgaatcaattaattaaaggtggcagaattagtaaaacaaaaggtttgattggtaatcttatgaaaattaaaccaattggtacacttgatgatggtcgcttagagcttgtgcacaatgcgagaactcaaaattctagtatccaatacttgaaaaaggaaattgctgaatttataggagatcatgaaatcaaatccattggtgtcgcacatgctaacgtcattgaatatgttgataaattgaagaaagtttttaacgaagcttttcatgtgaataattacgatataaatgtaactacaccagttatttctgcacatactggtcaaggtgcgattggcctcgtagtccttaagaagtaa

SEQ ID NO: 409117 - DNA, 924 bp, Staphylococcus aureus
atgaaacctaaagttttattagcaggtggaacaggatatattggtaagtatttaagtgaagtgattgaaaatgatgctgaactttttactatatcaaaatatccagacaataaaaaaacagatgatgttgaaatgacttggattcagtgtgatatatttcattacgaacaggttgttgcagcaatgaatcaaatagatattgctgtattctttatcgacccaacaaagaattctgccaaaataacacaatcatcagcaagagatttaacattaatcgcagcagataattttggtcgagcagcggctatcaatcaagtaaaaaaagtaatctacatacctgggagtcgttatgataatgaaacaattgaacgcctaggtgcatatggcacacctgtagaaacaacaaatttagtttttaaacgttctttagttaatgtagaattacaagtttcaaagtatgatgatgttagatcaacgatgaaggtagttttaccaaagggatggacattaaagaacgttgtaaaccattttattgcatggatgggttacactaaaggaacttttgtgaaaacagaaaaatcacatgatcaatttaagatatatattaagaataaggtgcgaccgctcgcagtatttaaaatagaagaaacagctgacggaataataactttaattttattgagtggaagtttagtgaaaaaatacacagttaatcaaggggagttagaatttagattaatcaaagagtcggcagtcgtttatatacatctatacgattatatccctcgattattttggccgatttattactttatacaagcaccaatgcaaaaaatgatgattcatggctttgaagttgactgccggattaaagattttcaaagtcgattaaaatcaggagaaaatatgaaatatactaaatga

SEQ ID NO: 409118 - DNA, 1125 bp, Staphylococcus aureus
atgaaagtattagtagccatggatgagtttcatggaattatttcgagttatcaagctaatagatatgttgaagaggcagttgcaagccaaattgaaactgcagatgtagttcaagtaccattgtttaatggaagacatgaattattagattctgtatttttatggcaatctgggcaaaagtatcgtataccagtacatgatgcagatatgaatgaagttgaaggtgtttacggacaaactgatacagggatgaccgttatcgaggggaatttatttttaaaaggtaaaaaaccaattgttgaacgaacaagttatggtttaggagaaatgattaaacatgcattagataatgacgcaaaacatgttgtaatttcactaggtgggattgatagttttgatgctggtgcaggtatgttacaagcattaggtgctcaattctatgatgacgaagggcgtgtcgtagatatgagacaaggtgctggtgtaattaaatatattcgtcgtatggatatgtcgaacttacaccctaaaatggaaacagcaagaattcaagtaatgtcggatttttcaagtcgattatatggtaagcaaagtgaaatcatgcaaacttatgatgcgcatcagttgcatcataatcaagcagcagaaatcgataatttaatttggtattttagtgagttatttaaaagtgaattgaaaattgcaattggtccagttgaacgtggtggtgctggtggtggaattgcagcagtcttgaatggactgtatcaagctgaaatattaaccagtcatgcattagtagaccaactaacacatttagaaaatttagttgaacaagcggatttaattatttttggagaaggattaaatgaaaatgatcagttgctagaaacgacaacattgcgtattgcagaactttgtcataaacatcaaaaggttgccattgcaatttgtgcaactgctgaaaagtttgatttatttgaatcacaaggggttacagcaatgtttaatacatttatcgatatgccagaaacttatactgactttaaaatgggattacaaattaggcattatacggttcagtctttaaaactgttgaaaacacattttaatgttgaggtttag

SEQ ID NO: 409119 - DNA, 480 bp, Staphylococcus aureus
atggctaaattactaataacgagcgtagtaagcttttgttttatatttctattgttagtattttttaagtacatattaaaacgctattttaattatagtttaaattataaagtttggtatctaactgtgcttgctggattaattccttttatcccaattaaattctcttttataaaattgaataacgtgaataatcaagcgcccacagttgaaagtaagtcacacgacttgaaccataacataaataccaccaaacctgttcaagagttcacaacagatatccataagtttaattgggattcaattgataatatctgcacagttgtttggatagttttagttattattttaagttttaaatttttgaaatcattattatatcttaaatatttaaagaaacagtcactttatctaaacgaaaatgaaaaaaataaaatagatacgatacttttcaaccatcaatataaaaaaatattgtga

SEQ ID NO: 409120 - DNA, 780 bp, Staphylococcus aureus; identical to SEQ ID NO: 407206

SEQ ID NO: 409121 - DNA, 216 bp, Staphylococcus aureus
ttgcaaaaggatttaaaattgtataataatgatactctcggaggaaaaatacagcgcggaaaaatagagtttgattcttctgatgggtctaaagtctcttatgatttatttgatgttaagggtgattttcccgaaaaacaattacgaatatacagtgataataaaacattatccacagagcaccttcatattgacatctatttatatgaaaagtag

SEQ ID NO: 409122 - DNA, 501 bp, Staphylococcus aureus
atggcacatggccgtcaacaagatgaattacaagatataactttattaggaaatcaagacaatacttacaattttgactatcgtcctgatgtattagaatcgtttgataataagcatcaaggtcgtgactatttcgtaaaattcaactgtccagaatttacatcattatgtccaattactgggcaaccagattttgcaactatctatatttcatatattccaaatgttaaaatggttgaatcaaaatctttgaaattatacttatttagtttcagaaatcacggtgattttcacgaagattgtatgaatattattatgaatgatttgatagagcttatggacccacattatattgaagtctggggcaagttcacaccacgtggtggaatttctattgatccttatacaaactatggacgtccaaattctaaatatgaaaaaatggctgagcatcgtttgatgaatcatgatttatatcccgaaaaaatagataatcgttaa

SEQ ID NO: 409123 - DNA, 879 bp, Staphylococcus aureus
atgaaaaaaattgttattatcgctgttttagcgattttatttgtagtaataagtgcttgtggtaataaagaaaaagaggcacaacatcaatttactaagcaatttaaagatgttgagcaaaaacaaaaagaattacaacatgtcatggataatatacatttgaaagaaattgatcatctaagtaaaactgatacaactgataaaaatagtaaagaatttaaggcactacaagaagatgttaaaaaccatctcatacctaaatttgaagcatattataagtcagcaaaaaatttgcctgatgatacaatgaaagttaagaaattaaaaaaagaatatatgacgcttgcaaatgagaagaaggatgcgatatatcaattaaaaaaattcataggtttatgtaatcaatctatcaagtataacgaagacattttagattatacgaaacaatttgaaaaaaatagatacaaagttgaatcagaaattaaattagctgataataaaagtgaagcaactaatcttacgacaaaattagaacataataataaagcgttaagagatactgcgaagaagaacctagatgatagtaaagaaaatgaagtaaaaggcgcgattaaaaatcacattatgccaatgattgaaaaacaaattaccgatattaaccaaactaatattagtgataagcatgttaataatgcaaggaaaaacgcaatagaaatgtattacagtctgcagaactattataatacacgtattgaaacaataaaggttagtgagaagttatcaaaagtcgatgtagataagttgccgaaaaagggtatagatataactcacggcgataaagcctttgaaaaaaagcttgaaaaattagaagaaaaataa

SEQ ID NO: 409124 - DNA, 558 bp, Staphylococcus aureus
atgaacaagattacttatttaaatgaattagaaacagcacttgatgcgctacctaggcatttaagagatcaaaaaatgtatgaatatgaacgttatttttatgagcaagaacttaatggcgttgatgaaggggaaattttaaagaagttaaaagacccacaagatgttgcagctgaaacaaaagctagaagtgttattgattatgctgaatctaaaccaacatttgaaaatatttcaagagctgttgctgcttcattaagtttaggcattctatctatttttgtcatccttataccagtatctatagttggattatttgtattagcattatttttaatatcacttttgctgctgttttgtccaattattttattagcatcagcaatatccagaggaattgtagactcaattagtaatgtattttttgccatatcatattcaggattaggattagtatttatcattgtcatatttaagattttagaatacatttatcgtttaatcttaaaatatttactttggtatattaaaactgtcaaaggaagcgttagaaaatga

SEQ ID NO: 409125 - DNA, 156 bp, Staphylococcus aureus
atgagtacggttaaagatcagcataaaacagctaaagcattaccagaaacaggtagtgaaaataataattcaaataatggcacattattcggtggattattcgcggcattaggatcattattgttattcggtcgtcgtaaaaaacaaaataaataa

SEQ ID NO: 409126 - DNA, 288 bp, Staphylococcus aureus
gtgggacttgattttagtggtttaccagatttagcagtattggaacaaatgaaggaaaaagaacagattagtgaggttattgcgcctgaacatgttcgtatgcatcatgatcatcaaaataagctgaaaagtgatgagaaaatattacttgaccaaatggtaagtcatttcaaaaactttgaagatgattttaaaaatgcggcacaaggggcttgggtgaaaaatgccacagacgaattaaaagatattagtaatgatttagaaaaaattcaagatattaaagtataa

SEQ ID NO: 409127 - DNA, 1326 bp, Staphylococcus aureus
atgaacaaaactaaatatcaaataaattctgacaatataaagagtaactctgaagaaacaagcgcaatatctagtataagttatgaaatagaaaacgcaaataataacgatttaaataatgcaagtattcaaacgcaaatagaaatattaaaatcacaaaatagtttccctaaaaatctttcatatcttaaaagttatacggaccccaaaacaggtacgactacaagcgcctttttaaataaagacactggcaaagttactttaggtatgacaggtactaatgtacacaaagacgcaatattaaaacaaacatttggtgttccttcttatcaaggatatatagatgcgagtgaaacgctaaaggatattggggccgatgtcaatattggccttcattccgtcacagataaagatccacattataaaaatacccaagactttatcaaaaatatcaaaaaagactatgatattgatattattaccggacattcgctgggcggtagagatgcgatgattttaggtatgagtaatgatattaaacatatcgttgtgtataatccagctccattagcgatcaaagatgtgagcggcctttatgccgatcaagaagaacttaaaaaattgattgaaaagtacgatggtcacattgtaagatttgtgtctgatgaagacgaattagatgcaggtgtccgcaatcatttatatgaaactgctggagaaaaaatagtacttaaaaatggagaaggccatgcaatgagtggtattttaatgagcagaacacaggctataatcttagctgaattaaacaaagttaaaggctaccaagacgaaaataataaagcattaaaatccgttcgtaaacaaacgaggcatagattacataaagtagagacgttaagagcgaattggattcaaacaacgggtggatcactctcttcctcccaacaacaattattagaagctttaacagcactaaccattgccgaaggcttaaatcaattagtgaatgaagaaagccaacatttgaaaaaaatgtatcacgcgatggcacataaatttggagacaactggaaaaaagcgcaagaagttggaaatgaaattggtgaaaaattaacctctgaagaggttatagatgaattaagaaaaggtggcgcgtatgaaagtaaacttgaaacagatcccaaaagaaaaattgatgataagataaagaaattaaatgatgtttataaaaattgtaatggctatatcgcaaaaattaaacagagtatcgaagcaattgtttctaatgaccaaatgttagcgagccagattgatgggatgatgtaa

SEQ ID NO: 409128 - DNA, 795 bp, Staphylococcus aureus
atgattcattcaaaaaaattaacgctcggtatatgtttggtattactcattatattgattggaggttgtatcattatgacaaaaataaatagtcgaaatgcccaaattaaagacacatttaatcaaacattaaatgtgtatccaaccaagaatcttgatgatttttacgataaggaaggctttcgagatcaagaatttgataaaagagataaagggacttggattattaattctggaatgtacatccaattaaaaggaggagccttaaaatccagagcgatggtactttacatcaatcgtaacactagaacagctaagggatattttttaataagtgagacaacagaagacaaaaaaggatacgttcataataaagataaaaaataccctgtcaagatggaacgtaatcgaataattccaacgaagcccataacggacgagaagttaaaaaaagagattgaaaactttaagttctttgtacaatatgggaattttaaagattttaaagattataaagatggggatatttcatacaatcctaacgtaccaagttattccgcaaagtatcaattgaataatgatgattataatgtccaacaattaagaaaacgatatgatatatcaaccaaaagggcacctgaattaaaattgagaggatctggcgatttaaaaggctcatccgtaggttctaaagaactagaatttaactttgtaagaaataaagaggaaaatgtgtatttttctgatggtattaatttcaaacctactgaggaaatgaatcatgaacaaaactaa

SEQ ID NO: 409129 - DNA, 156 bp, Staphylococcus aureus
atgagtactactaaagaccatcacaataaagcaaaagcattaccagaaacaggtaatgaaaatagtggctcaaataacgcaacgttatttggcggattattcgcagcattaggatcattattgttattcggtcgtcgtaaaaaacaaaataaataa

SEQ ID NO: 409130 - DNA, 237 bp, Staphylococcus aureus; identical to SEQ ID NO: 408128

SEQ ID NO: 409131 - DNA, 987 bp, Staphylococcus aureus
atgaacgatcaatggtataaacatttaattggtgccagaacaattaaaactggtattgccatttttttaacagctgtcttttgtatggcactagatttaacacccatctatgccattttaacagctgtagtcacaattgaaccaactgccaaggcatcacttattaaaggttatcgtagattacctgctacggtaattggtgcaggctttgcagtattatttacatatttattcggcgatcaatcaccttttacatatgcattgagtgcaacgttcacgattttattctgtacaaaactcaaattgcaagttggtacgaatgtcgctgtactaacatcattagctatgattccaggtattcatgatgcctacatattcaactttttgtctcgaacattgacagcaattattggactcgtgacatcaggtttaattaacttcatggtgtttccacctaagtattatggtcaggtcgaagaaaaattaagtaagacagatgccttgatgtataaattattttacaatcgctgccaagaacttatcttatcaagactgcaatctgataaaagcgaaaaagcatataaaaatattttcaatttaaacaatcaagttgaaacgttaataagttatcaacgtgatgaattaagctatcataagaaaaaagaatgtgattggaaattactcaatcaattaactaaacgtgcatatacgaatcgtttgtttatcactcatttatcaaatatcatttacttgcctaaaaatactcgtgttaacttttcaggtgacgaaaaaatggcattgctaaaaattagtagtagcatcaaagatatattttatgatggtacttttaagagagaagatgattctgtagaaactttacgttcgactataaaagcacttgaaattagtggtgaaaatcaaattaaaagtcatatactatacgaagttctaatgatttatcgactgctagacagcagatatgcttaa

SEQ ID NO: 409132 - DNA, 189 bp, Staphylococcus aureus; identical to SEQ ID NO: 407427

SEQ ID NO: 409133 - DNA, 147 bp, Staphylococcus aureus; identical to SEQ ID NO: 407426

SEQ ID NO: 409134 - DNA, 189 bp, Staphylococcus aureus; identical to SEQ ID NO: 407433

SEQ ID NO: 409135 - DNA, 189 bp, Staphylococcus aureus; identical to SEQ ID NO: 407433

SEQ ID NO: 409136 - DNA, 189 bp, Staphylococcus aureus; identical to SEQ ID NO: 407433

SEQ ID NO: 409137 - DNA, 189 bp, Staphylococcus aureus; identical to SEQ ID NO: 407433

SEQ ID NO: 409138 - DNA, 501 bp, Staphylococcus aureus
atgatgatttcacacttgataatggctactacgaagaagaaacatcagatagcgactcagattcagatagcgattcagactcagacagcgattcagattcagacagcgactcagactcagatagcgactcagattcggacagcgattcagactcagatagcgactcagactcagacagcgattcagactcagatagcgactcagactcagatagcgattcagattcagacagcgactcagattcagatagcgattcagactcagactcagatagcgattcagattcagacagcgactcagattcggacagcgactcagactcagacagtgattcagattcagatagcgactcagactcagatagcgactcagattcagacagcgattcagactcagatagtgactcagattcggacagcgattcagactcagatagcgactcagattcagacagtgattcagactcagatgcaggtaagcacacacctgttaaaccaatga

SEQ ID NO: 409139 - DNA, 213 bp, Staphylococcus aureus; identical to SEQ ID NO: 408127

SEQ ID NO: 409140 - DNA, 1707 bp, Staphylococcus aureus
atgaatcgaatttatgattcgggtattaagtttccggatcgtattatggcattgattactggtgacgtaaaagaaattaatgagcaatttaaggaacgtgttaaagaaataggtatatatcatttgctggcagttagtggctcgcatatagctgcaattgtattcttaatttaccaacctttaaaacgattaaatttacctttatttgtcattaaaggaattacaatcattgtattagccttatttgctcaatacacaaattatgcacctagtgctgtaagagctataataatgacaacgcttgtactgcttattactaatcaaattaaaataaagggtattcagcttttagcatttgcatttataattatgtttattttaaatccactagttgtttatgatattggatttcaattttcattcatcatttcattttttattatgttactttttccttttttacagcaattgtcgaagttacaatcattattcataattacgtttattgcacaattagcttcatttatcgttgccattccaaactttcatcaacttcaatgggtgggatttttatctaatttgatttttgtaccatactattcgattatattgtttcctctatctattttattctttattacaagtcattttattgtgggattaacgccgctaaattacttggttgacctaagttttaattttcatgactggttactagacctattcacaagaatcaagcaatcacatttttctgttcccaagtttaatgattggatatttataatatttataatttccgtttattacatattttggttattggctaaacgtaaatatatattggttacgttttggactataattattctgacattattaataacgtttccaacaaattcacatcacaaaattacaatgttaaatgtggggcagggagacagtattttatatgaaggtggtaagaaccaaaatgtcttgattgatacaggtgggaaagtgattgatgatactaaacaacctagttattcaatttctaaatatcatattttaccaacgctaaatgagagagggataaatgaattagagtatctaattttaacacatccacacaatgaccatattggtgaattggaatatattattagtcatattaaaattaaacatatagtgatatacaataagggatatagtagtaatacattgatgttattatcgaaattaagccataagtataacattaaacttatggatgtaaggcaagttagtagttttaaacttggagatagtagttttctattttttgatagttttattccaaatagccgagataaaaatgaatactcgattattactatgattacatatcaaaataaaaaagttttattaatgggcgatgctagtaaaaataatgaatctttacttctaaaaaaatataatttgccggagattgatattttaaaagtaggacatcatgggagtaagacaagtagttctaaagaatttatagagatgattaagcctaaaataagtttgatttcttctggaaagaacaatatgtatcatcttcctaacatagaagttgttaaacgattgcaaaggattcgcagtcgcatttacaatagccaacaaaacggtcaagttacaatagacttagatgataatttaaaagttgattcaaactcttatggaaatgcaagtggtttatag

SEQ ID NO: 409141 - DNA, 1683 bp, Staphylococcus aureus
atggaaaaattaaatgaagcaattaaaaactatatagatagtgatgaattgttcgccctttttatagatggacaatggggagtagggaaaacttattatattaaaaataaaatattaaaggaatttgatgataaaatagaaattaggtatataagtttatatggcctgcaaaacttatatgaaattaagagtataatcataagtaaattgataaatacatctactaaaaatcttaggaaagtcctaaaaagcatgaaaaatttccaagtagtaccttatttaaatatgaataacttttctgataacatattacgttatattgatgataattcattaaaaaagataaaaaattccctgatgaaaaataataaaagtgctttgctaataatcgatgatgttgaaagaatgagtgacaaagtaagttttgaagaatttttgggatttattagaaatgatttaattgattatttagactgtaaagtgctatttataggaaatttagatgagctaaataaaaaagcggattttcataagaatagtgagaaaataatttctagaatattaaagtttcctaataatagagaagtagcaatggatatagtaaaaagtaatttacctaagttatttgtaaagaacatctctactaaagagctatttaatggtttttttgatataagtgatgaaaaaaaagaaattattttcgaaaaatctaaacaaaataatttaaattataaatattaccatttgaatatgagaactttgaatttagtagtttcaaacttcaagttaattattaataaaatgcaagatgagattaaatataaatcaaaagattttaaaatcaccttgtacatttcattattcatttcattattcattctgtataatgaatttcgaagcggaaatttaggtgaatctgaaattaaggatcttcaatttacatataatgattttaacaatttaaatacgaaaacatctattgctttgtttaaatacttatacaaaaataatgaactagcaaattatgtcttttttgatatagagctaaagaacttattattatatggtatttttgatgaatcaatttttttgaaaaatataacgaataacttcaaagaagaagatgctaaagctgatttattaaatgtattaaaagaattctttaaattaagtgaaagtgaactacttgaaaaagaaattcaagtagtggataattacgatttgcatcagaataatttaatagttggagatacgataaatagactagatttagttagcttttcaaacgagcaactatatgaagaaatcaaaagtttaaaagaccgtttaataaataaaagaacaactttgatgacttctatatataaccaatacttagaaactattttaaatggtgactttacaaatagaactaaattaaaagaagcgtatattggaatgaaagatatagatactatagaaataatctataataatttaaacaaagtatcaaatgagcttaaaagtagtaatgagaaaattattaatttaagtgcattcattaaagataatcattgtaataatgatgataatattcaattagaatatattataggtgagatgaaaaaattaaaagatggtactaaagatagagttacacaaatgtgttttagcatgttgatcgatacactgaaagatatatag

SEQ ID NO: 409142 - DNA, 2421 bp, Staphylococcus aureus
atgacaaataaaatgaagaaatggcaaaaattatccaccattacgttattaatgaccggagtgattgctttaaataatggtgaatttagaaatgttgataaacatcaaatcgctgtggctgatacgaatgttcaaacgccagattatgaaaaattgaagaagacgtggctcgacgttaactacggttatgatcagtatgatgagaataatcaagatatgaagaagaagtttgatgctaaagaaaaagaagccaagaagttacttgatgacatgaaaactgatacgaatagaacatatttgtggtcaggagctgaaaaccttgaaactaattcttctcacatgacaaaaacctatcgtaatatcgagaaaatcgcagaatcaatgcaacataagaatacggtattaaaaacagttgaaaacaagttgaaaataaaagaagccctagattggatgcacaaaaatgtttatggcaagaatccttctcaaaaagtcgaggatttaactaaaaatcgtaaggggcaaactacacccaagaataactcattgaattggtgggattatgaaattggtacgccaagagcattaacaaatacactacttctaatggatgatatgctcactaaagatgaaatgaaaaattattcaaaacctattagtacatatgcaccatccagtgacaaaattttatcttctgttggtgaatcagaagatgctaaaggtggaaatttagtggacatttctaaagtaaaacttttagaaagtgttattgaagaagatgtagatatgttgaaaaagtctatagattcttttaataaagtgttcacttatgttcaagattctgccactggtaaaggtcgcaatggattctataaagatggctcttacattgatcatcaagatgtcccttacactggtgcttatggtgttgtactattagagggtatttctcaaatgatgccgatgataaaagaatctccttttaaaactacacaagataatgctacattaagcaattggattgacgaagggtttatgccattaatctataaaggtgaaatgatggatttatcacgaggtagagctatcagtcgtgaaaatgaaacgagtcatacagcgtcagcgactgtaatgaaatcattgttgagattgaatgataccatggatgattcaacaaaaactagatataagcaaatcgttaaaacttctgttaattctgattcaagttacaaccaaaataattatttaaattcatattcagacatagctaaaatgaaaaagttaatgaatgatagtactatttctaaaaacgatttaacacagcaacttaaaatatataatgacatggatcgtgtcacctatcacaataaagacctggactttgcatttggtttaagtatgacatcgaaaaacatcgcacgatacgaaaatatcaacggagagaacttaaaaggttggcacaccggtgcaggcatgtcttatttatataacagcgatgtcaaacactatcgcgataacttctgggcaacagccgatatgacttgtcttccaggcactactactttaaatgatatgccatctactaatactaagaatgataaatcttttgttggcgggacaaaattaaataataaatacgcaagcatcggtatggattttgaaaatcaggacaaaactttaactgccaaaaaatcatatttcatattaaacgataaaattgtcttcttaggaactggcattaaaagtactgattcatcaaagaatccagttacaagtgttgaaaatcgcaaagcaaatgggtataaattatttaaagatgatattgaaattaccacttcagatgttaatgctcaggaaacccattcagtctttttagagtccaacgatactaaaaagaacattggttatcatttcttagacaagccaaaaataactgtaaaaaaagaaagtcatactggtaagtggagtgaaattaataaaagtcaaaaaaaagatgacaaaaaagatgagtattatgaagtaactcaaacacataatacatctgacagtaaatatgcatatgttttgtatcctggtttatcaaaaagtgattttaaatcgaagaataataatgtaagtattgttaaacaagatgaagattttcatgtgataaaagataatgatggcgtatttgctggggttaattatagtgataatactaaatcttttgatataaacggaattactgttgaattaaaagaaaaaggcatgtttgtaattaaaaagaaagatgataaagcatataaatgtagcttctataatcctgaaactacaaataccgcttcaaatatagaatcaaaaatttttattaaaggttacaccataactaataaaagtgtcataaactctaatgatgctggtgtaaactttgaattaactaaataa

SEQ ID NO: 409143 - DNA, 354 bp, Staphylococcus aureus
ttgattttattcgaaaaacattttgaaccggttccgggtatcaagatgcaacatagtggaggtcatagctttggccacacaatcattacgattgaaagtcaaggagataaagcagttcatatgggtgatatattcccgactactgcacataaaaatcctctatgggtaacagcatatgatgattatcctatgcaatcaattcgtgaaaaggaacgcatgataccatattttatccagcaacaatattggttcttgttttatcatgatgaaaactactttgctgtaaaatacagcgatgatggcgaaagtatagatgcatatattttacgtgaaacattagttgataataactaa

SEQ ID NO: 409144 - DNA, 837 bp, Staphylococcus aureus
atgaacaaacatcacccaaaattaaggtctttctattctattagaaaatcaactctaggcgttgcatcggtcattgtcagtacactatttttaattacttctcaacatcaagcgcaagcagcagaaaatacaaatacttcagataaaatctcggaaaatcaaaataataatgcaactacaactcagccaccaaaggatacaaatcaaacacaacctgctacgcaaccaacaaacactgcgaaaacctatcctgcagcggatgaatcacttaaagatgcaattaaaaatcctgcagtagaaaataaagaacatgatataggtccaagagaacaagttaattttcaattattagataaaaacaatgaaacgcagtactatcactttttcagcatcaaagatccagcagatgtatattacactaaaaagaaagctgaggttgaattagacatcaatactgcttcaacatggaagaagtttgaagtttatgaaaacaatcaaaaattgccagtgagacttgtatcgtatagtcctgttccagaagaccatgcctatattcgattccctgtttcagatggtacacaagagctgaaaattgtctcttcaactcaaattgatgatggagctgaaacaaattatgattatactaaattagtatttgctaaacctatttataacgatccttcacttgtaaaatcagatacaaatgatgcagtagcaacgaatgatcaatcaagttcagacgcaagtaatcaaacaaacacgaatacatctaatcaaaatacatcaacgaccaacaatactaatgatcaaccgcaggcaacgaacaatatgagttaa

SEQ ID NO: 409145 - DNA, 870 bp, Staphylococcus aureus
atgaatgaaattaaattagaatatgacacacatgtttcagtggtacattatgaaagtttagactcacgttcatttaagagcttttcaaaacctaaatggagtaagttggttaataaactgtctgtacctatagaagcgaattataagtatgcacgtggtgttgctgtttacggtgatattaaaaacggtgcaaatgatcatggtgaaattatcaaaaagcatcgaaacgataaaaatgtcatatacagagatgtgattgtacttgattatgatgaaataaatgatttaaagcaattacatgaagcaatcagctcagctttaatcaatgttgcatggttttggcacacaagttactcgcacagaactgaacaagctagaatacgcctgtatatccctctaaatgagcgaataagtgcagatgattatcgtaaatattcaaaggtattagcaaataaaattggtcataaagtggatgaaggttcatatcagccaagtagatgttttgcactaccagttattcaaaaaggacacatatttattaaacgagtgaatgactgtccaattatggatgttgatatgcttgaacagtggttaaaggagtatgaacaatcaaatgttagtccgagtgtcataggatacacgcgacgagatagtaagtattggcgagagttatgctttggaacaaccgaaggcaatcgtaacaatgcactagctagcttagttgggcatttattaagatgtcacgttaatgattatattgtttattcatttgctttattatgggggcaattcgcatgtaaaccacctatgaaagaacaagaaatcaacgccacttttcaatcgatattaaataaacactataacaattag

SEQ ID NO: 409146 - DNA, 1008 bp, Staphylococcus aureus
atgaacagaaaaacacctaaaactactgatggtttaatgagacatataagagacaataaaggtatccaaataaatggtagcacggaaaaaaaccagttacgaaacatcggctattttcatggattcaaagggtataatttctttttaaacaaagaagaagaacttaattttgaaaaattcagcgaattacacgctttatacagttttgatacagaaattaaaaaccttttctataaacacgttatgttctgtgaaacggctattaaaaatagattgctagaaatagtttgtgtaaactctggctttgatttagatagtttatttcaaaaatcattaacatattataaaagttatagtcccggtagttcaaaatataaaaaacatttaaaaaatactactagactaagaagagatatttacgacatgatccatgaacattgtaattcaaaaccttacatttatcattacatacatcaagatagaaccgtgccactatatgccgtatttgaattattcactttaggaaatctggtatttttcactcgttgcatgtcccaaaatttaaatatagaagctcaaaaacaactaaaattatactccccagcatttgatcaaagtaaagatatactaggtgacatcattgattgtatgaaaggcttaagaaatgctatagctcacaatggtgtactttatgactgtagatttaaaactggagagacaagtaatagattaaaagaatatttagcagtaaaaatggatatacacaatttagatttcgacagaataattgattatctcattttattaattctaatttgttctggtctctcttattctaaagcagaactccaaagaattataaggcaattcgaacaaaaccttgattttttacgatcaaagataagcgagtcgacttatgataaaattataggcgttcgagcaagacctaaattaagaagtttaaagaactttatcaataaccttgatttttatctaaaaacagattaa

SEQ ID NO: 409147 - DNA, 684 bp, Staphylococcus aureus
atgaaattgacagcattagcaaaagtaacattagcattagggattttaacaacaggaactttaacaacagaggcccattcaggtcatgctaaacaaaatcaaaagtcagtaaacaaacatgacaaagaagcattacaccgatactacactggaaactttaaggaaatgaaaaacattaatgctttgagacatggtaaaaataacttacgttttaaatatagagggatgaagactcaagtattattgcctggagatgagtaccgtaaatatcaacagcgaagacatacgggcttagatgtgttttttgttcaagaaagaagagacaagcacgacatatcatatactgttggtggtgtaacaaagaccaataaaacatccggctttgtcagcacaccaagattaaatgttacaaaagaaaagggtgaagatgcttttgtgaaaggttacccttatgatattaaaaaagaagaaatatcattgaaagagttagattttaagttgagaaagcatctaattgaaaaatacggtctttataaaacactctcaaaagatggtaggattaaaattagtctgaaagatggtagcttttataaccttgatttaagaactaaattaaaattcaaacatatgggggaagtcatagatagtaaacaaattaaggatattgaagtgaatttaaagtaa

SEQ ID NO: 409148 - DNA, 249 bp, Staphylococcus aureus
ttgttgaagtataaagtaacgaattataaaccttctcctgatggaattatatatatattacaaaaatatgacttacataacaaagacactatatatgttggagatgctgtttttgatattaaaatggctaaaaatgccaatattgattcttgtgctgtaacttggggaagtcatagtattgaagtattaaacactgaaaatccaaattttataattaataatgttaaagaacttaattttgaggagtaa

SEQ ID NO: 409149 - DNA, 639 bp, Staphylococcus aureus
atgcacattttagtaacagggttcgcgccttttgacaatcaagatattaatccttcttgggaagctgtgactcaactagaaaatattattggcacacatacaatcgataaattaaaactaccaacctcttttaagaaagtagatactattataaataaaacgttggcatctaatcattatgatgttgtactagctataggacaagctggtggtagaaatgccattaccccagaacgtgtcgccattaatattgatgatgcacgtattccagataatgatgattttcaacctattgatcaagccattcatttagacggtgcgccagcttatttttcaaatttaccagttaaagcaatgactcaaagtattattaaccaaggacttcctggagcactttcaaatagtgcaggtacgttcgtatgtaatcacgtactttatcacttaggttatttacaagataagcattaccctcaccttcgattcggttttattcatgtgccatatataccagagcaagtcgttggtaaacccgatacaccatctatgccattagaaaagatagttgcaggtttgactgcagctattgaagctatttctaatgatgaggatttacacctagccctaggcacaacgcaatag

SEQ ID NO: 409150 - DNA, 273 bp, Staphylococcus aureus
atggtcaagcccagacagagggaatacccaacgctaaaatcatcgctaaacattataagagaaacagcacttatcgctatatcgtgtgtcttttggatatattgtttagttgttctactcgtttatattggtactatatttgaaattcatgacgaaagtatcaatacaatacgtgttgctttaaacattgaaaatactgaaattttagatatatttgaaactatgggcattttcgcgattatcatttttgtttttttacaattagcatattga

SEQ ID NO: 409151 - DNA, 1092 bp, Staphylococcus aureus
atgactttaaaaaaccagtgtaccccccttactaataggggggtagagcgtacaaataaaagtgccgtggaggcagttgttgactgggttcaggtcactttccatataacccctatttcagcagtaattgaggacgttatcggtttgcctataacgttgttcaaaaaacgaaatagtggcatttatttttataatcgcggttatgaattttcaaacattaaattgtattattcaagtgatgatgaatcaatgggcattcacttacagttaactggtacaggttgtagagagtttgaacatcatttacaacagttgaataaaacttggcaagatttttttgataaatgtttatcagttaatgcaaattttacaagaattgatattgcaattgatgattataaaacatatttaaaagtgcctttattaattaaaaaggctgaaaaagctgagtgtgtttcacgttttagatctggaagcgcaataaacggttttaatttgtcagacggaagaagtaaaggcgctactttttatattggttctaaacaaagcaatttatattgtcgtttttatgaaaagaattatgaacaagcgtttaaacgtcattgtgatgtcgaagacattgggttatggaatcgttatgaaatacaaatgcgaaaggcatatgcagttaattgtgcgaaagttttgagtagaacagataatataagcgaaattgtaaagtctatattgcataataatttgcgttttatctcccctcctaaagatggaaatgataaaaatcgtaagcggtggccattatatagaccttgggcgttatttattaaagatactgaaaaattgaatttaactactagaccaacattaaagtccattgaggataatcttgattggttatgtaaacaagttgctactactttagatacagtgttaactgccgaaagtatggcgcaatctgaggggttgcttacagatactgattttttagataaaattttagcgcattcacaatttaatgatgagcatacgaatagaattaatcattatttggaggctttaaaacaaaaaaagcacttatcaaaagataagtgttaa

SEQ ID NO: 409152 - DNA, 1056 bp, Staphylococcus aureus
atgaaaataataagcaagtacattttaacacgattttctaaaaacggaaagcattttgatattcctaaagaacaacgccgagtaattccaaaatttaaaaatcgtcgtaagatgattgtaatttgtttttactcattattagctattttgttaattcttttattagcttcttttattaaagctacaagagcaaataatgatagtaaagaagcagttaataaaacgaatatgatccaaaaaaagtatgaagataatgcgaatacagttcagtatagtcctaaattaaagttatatgctgataaatttattgatacgtatatgaatatttctaaagactcaaaagaattagaatctagagaaaaagagttattgaaatattttccatcagattataaaaagcctgaagaaaaaacatcagatactgaacgtaaattaaatagtaaggaattttataatattaaacgtaaagataaacaaacgattatacagtatattgttaattatgatgtgaatattactgaaaaaaaagaagttaaagtaaagaagaaaaagaaaaatgataaagataaagatgagtatgaaacaaaaacagaagaaaagcaacgtaaagtaaatcaaaatattctaattaatatacctattaagagtgagaataataagtatgttgttgttgaatatccttattttactccaattcctgatagtcaattaaataaagctaagatggttgaggataacttgaaagataataaacgtgaagataatccgaaagcaaaagcatttattgaagatttctttaataaatattcttctagtaagtctgatgatatggcttatttaatggataatcctgagggattagaaggaactagagaagtttctcaaataagagaaattagattatatccaaaaggcgatgattatgttgctaaagttgaaattttgatgaaagataaagattctcctttggagaatttggaacattacacattagatataacgaaaaaagatggtaaatattacgttaaaaatatgactaattctattggaggttaa

SEQ ID NO: 409153 - DNA, 669 bp, Staphylococcus aureus
atgccaataattactagttatatcactcaagatgacggtacaacaacagttgtcatctcgggtgttgaattaggcaataaagaaacattactacttgataacggatttgatgtggaagtcgatgtaagcgtcatagatccgtttcaaattaccggcaagcaacgacgaaaaatattcgcgcttgtcaaagacatagaagaatatacaggtcaaccaatggactatatgcgacatatgttcatcgagtatgtaaggacttactacggctatgatgaacgtatttcactaagtaattgtacgagaacacaagcaagtcaaatcattgaagcaacgcttgactggacgttctacaatgacataccacttagctacaaaacaagcgacttgctgaaacaagataaatcgttcttatactggtcaactgtcaaccgcaactgtgtaatatgcggaaagcctcacgcagacctggcacattatgaagcagtcggcagaggcatgaacagaaacaaaatgaaccactatgacaaacatgtattagcgttatgtcgcgaacatcacaacgagcaacatgcgattggcgttaagtcgtttgatgataaatatcacttgcatgactcatggctaaaagttgatgagaggctcaacaaaatgctgaaaggaggagaataa

SEQ ID NO: 409154 - DNA, 765 bp, Staphylococcus aureus; identical to SEQ ID NO: 407332

SEQ ID NO: 409155 - DNA, 288 bp, Staphylococcus aureus
atgtttggtggttatgatgaattaatggaacctgtgtgtaacacatttactgctaaggaaccatttaatcaacttggtggttatccatattttgaccaaatagatccaagaacgaacgatcaagaactgaaaatgtatgatagagtcttactgcaaattgattctacaagagatggtaattcttcgattatatggggtgatttaggtattgccaatatcttagtaaaatctactgaccttgaggctatgaagtttgatgattacatgtattcatgggattgcagctaa

SEQ ID NO: 409156 - DNA, 186 bp, Staphylococcus aureus
atgaacaaagatgtatctttaggtcaaccaattgttagatatgaagatggaaaattattcaatacaacagatcaatatgtgacagaatttccacttacaattatggtgaatggtgaagaatttgcgactgttatatgcagtccaacaaaccttgaggagttagtcattggatttctggcttcgtaa

SEQ ID NO: 409157 - DNA, 495 bp, Staphylococcus aureus
atgattgcatcttgttgtggaaagagtcgtgagttttattttcaaaatgatgctgctgttgctaaaacatctatgtctaaaatcactttaacaccacaacaaattattaatatgatgacgcgtttacaaagtgccagtcatatttaccaagaaacaggtggcctgcataatgctgctctaagcgatggtttgacattttttgtacatcgacaagacattggcagacataacgctctagataaattatatggattttgtattcagcgacatattactgtccgagataaagtattaattttcagtggacgtatttcatcagaaattttaattaaagccgcgaaaattggtgttggcgtcattttatctaaatctgctccgacaacgcttgctgtaaccttagctaatgacctaaatattacggcagttggatttattcgaaatggtggctttaatatatacagtcatccagaacgtatcattgattctgaacaataa

SEQ ID NO: 409158 - DNA, 585 bp, Staphylococcus aureus
atggaaaaaaatgaaagtaatattactgatgtaactcagaacgaagagcaactagacaacagtgatgaacaatcacaacagaatgagaaaacattttctcaagaggaagtatcacaattgattaaagagcgtatagctagagaacgcaaaaaatcagatgaacgtattaaaaatgccaaagaaaacaatgatagcaatgaagtagcttatttattaaaaggtgctaaagttacaaaagtatatggcgatcaaaatagtgtatcttttgtgccaggggaaaaagcaaccgaattattatttgacagtaaaccgaattcaattgttatgttacataaccatcctggacagtcaggattttcattgaatgatttagcagtttttactattaataattctattaagactatgacaattgtaactaataaaggacgtattaaatttataagtaagacagaacattttaaagaaaaagtaatgaaaaaaatgatagcaaacttattaatagaaaaatctctagatgtaattagtacaaaagatattgaaaggttattaaaagagttatacaataacgataatataatataa

SEQ ID NO: 409159 - DNA, 198 bp, Staphylococcus aureus
atgttaatcaaagatgtatatcgtaaaaatgttatagttacactaaaaaatgatgaaaaattaaaaggttttgttatagattttgaaaatccgttagaaagtgattctggtaactattgcatggatttagaaacagatttaggtttttattctattgatgaatcagatattaaagacatacaaataattacagaatag

SEQ ID NO: 409160 - DNA, 771 bp, Staphylococcus aureus
atgggatatttaaaaaggattggaatgtgcataagcctattgattgtaattatttttgtaacatcttgcggtggtggtaataagatcactggagattcaaaagaaacacaaatcaaaaagagttttgcgaaaacgttagatatgtacccaatcaaaaatctcgaggacctatatgataaagaaggctatcgagatggcgaatttgaaaaaggtgacaaagggatgtggacgatatatacagattttgctaaaagcaataaatcagacgaattggatgatgaaggtatggttttaaatctggatagaaatactcgaacggctaagggatattattttgttaagaaattttatgaaaaggataaattttcagatagaaaaaattataaagttgaaatgaaaaacaataaaattattttattagacaaggtaaacgatccaaaccttaaagaaagaatagaaaattttaagttttttggacaatatgcaaattttaaggatttggaaaattacaacaatggcgatgtgtcaataaattggaatgttccaagttatgacgtggaatataaaatgagcaataaagatgaaaatgttaagcaattaagaagtcgttataacattcctactgataaagctccaatgttaaaaatgcatattgacggggacttaaaaggaagttctgttggatataaaaggttagaaatagacttttcaaaagaagatagggatatttcagtcattgattatttaagttataagccagcgaaaaaatag

SEQ ID NO: 409161 - DNA, 822 bp, Staphylococcus aureus
atgatggagtatataaaaaaaattgctttgtacatgagtgtattacttttaatcatttttattgggggatgtggaaatatgaaagatgaacagaaaaaagaggaacaaacaaataaaacagattcaaaagaagaacaaatcaaaaagagttttgcgaaaacgttagatatgtatccaattaagaatctcgaggatttatacgacaaagaaggctatcgagatggcgaatttgaaaaaggtgacaaagggatgtgggttctgtattcatctattgtatcagaattcaaaggcgagagtttaaaatcacgaggaatgatattaaagttagatagaaataagagaactgctaaaggaagttatattataagagaattgaaagaagataaaaatcatgatgttcaaaaaaacgaaaaaaagtatccagttaaattggtgaataataaaataattccaactgaagatgtaaaaaacgaagatttaaaaagagaaattgaaaacttcaaattattttctcaatatggtgaatttaagagtttaaatacggataggataacaaatatttcttataatcctaatgcgcctaactattcagctgaatataaaattaatgatgatgataataacatcaaacaattaaaaaatcgattcaatattaagtctaataaaaatcctaagttattgttcaaaggagcaggtaatctaaaagggtcttctgttggatataaggagatacagataattttcaataggaacaaagaagaaagtgtttcttgtattgatagtatagagtttaaaccgagtgaaggagactataatgagtaa

SEQ ID NO: 409162 - DNA, 573 bp, Staphylococcus aureus
atggaaggctttctgaccgaagaagaacaaaaagctataaaaaaagaacttaaaaaactaaaaggttatgcagaagaaaataataagtcatttgtaaagcattcaaataatgctatctctaaattagctagtatagaattacttagagccaatatgatgactgcaaatggaggaggattatcttcttcgcagcagaaagttttagacagtttaacagctttaacaattgcgcagtcattcagtcaactgatagacgatgaaattaatcaaatcaaaaaaatgtataatgaaaagaaaaagaaatttggaaaaaattgggaagacgctcaaaaagctggaaaagctgtaggtgaagatttgagtgtaaatgaagttcttaatgctttagatgaaggtcaagtgaatgaaagtagtatggtaagagaacctgaacaaatgatatctgcaaaagaaagacaactttcaacgatagggtcttctgtatcaaattatattatgagagttagactcagtattaatgaaatcgtagataaagatcaagtgcttgcatcacaaataggtggattactatga

SEQ ID NO: 409163 - DNA, 822 bp, Staphylococcus aureus
gtggatcaatataaagagatagaacttaataaaaaaattaaagttgataatgtaagagacattagagcgatttatgataaattagtttcaaatgaaattaacgaacaagataagttagatggagagctatttcgtaaaaattttgtcggtgtgcatgatgggtcaacgaataaatatatacatgttgggttacaacctgaaaccaaaattgttgaatatataggtgaaatgctaacatttttaaaatattttgatgcgcctcagccgttcaaaatcatggctagtcattatatgtttgaatatatacatcctttttatgatggcaatggtagagttggaagatttataattgccaagctcttgagtgattattatgataattatactgctttgacattttcatatgttataaataggaataaatcgaaatattacaaggcgtttatgactgcttcaaatcatttgaattgtggtgatttgacggaatttattgacacaatgcttgagttattgatagcaggacaagaaagaatacttgatgagttaataccaaaaatggatgcgactgaaaaattaacgctttatttaactagtcattataaaaagatagattatgaatttttgtatctcctttcaatggataaattgtttggaaataaaagaaatagattaacattaattgatttagaaaacatattgggagtaggaagagtaaaaattaataatacaattaaaaaatttggtaactacttagttaaaattaaaagtagaccaagaatttatgagataagtgatgaatttctaaattcgattataaaataa

SEQ ID NO: 409164 - DNA, 1446 bp, Staphylococcus aureus
atgcaagcaaaattaactaaaaaagagtttatagagtggttgaaaacttctgagggaaaacaattcaatgtggacttatggtatggatttcaatgctttgattatgccaatgctggttggaaagttttgtttggattacttctgaaaggtttaggtgcaaaagatataccatttgcaaacaatttcgatggactagctactgtataccaaaatacaccggactttttggcacaacccggcgacatggttgtattcggtagcaattacggtgcaggatacggacacgtagcatgggtaattgaagcaactttagattatatcattgtatatgagcagaattggctaggcggtggctggactgacagaatcgaacaacccggctggggttgggaaaaagttacaagacgacaacatgcttacgatttccctatgtggtttatccgtcctaacttcaaaagcgaaacagctccacgatcaatacaatctcctacgcaagcatctaaaaaggaaacagctaagccacaacctaaagcggtagaacttaaaattatcaaagatgtggttaaaggttatgaccttcctaaacgtggtggtaatcctaagggtatagttattcataacgacgcaggaagcaaaggggcaacagcagaagcgtatcgaaacggattagttaacgcacctttatcaagattagaagcgggtattgcgcatagttatgtatcaggtaacacagtgtggcaagctttagatgaatcgcaagtaggttggcatactgctaaccaattaggcaataaatattattacggtattgaagtgtgtcaatcaatgggagcggataatgcgacgtttttaaaaaatgaacaggcgactttccaagaatgcgctagattgttgaaaaaatggggattaccagcaaacagaaatacaatcagattacacaacgaattcacttcaacatcatgcccacacagaagctcagtattgcacactggttttgacccagtaactcgtggcctattgccggaagataaacaattacaacttaaagactactttatcaagcaaattagagtgtatatggacggtaagataccagttgccactgtctctaatgagtcaagcgcttcaagtaatacagttaaaccagttgcgagtgcatggaaacgtaataaatatggtacttactacatggaagaaagtgctagattcacaaacggtaatcaaccaatcactgtaagaaaaataggaccattcttatcatgcccggtagcttaccaattccaacctggtggatattgtgattatacagaagtgatgttacaagatggtcatgtttgggtaggatatacatgggaggggcaacgttattacttgcctattagaacatggaatggttctgccccacctaatcagatattaggtgacttatggggagaaatcagttag

SEQ ID NO: 409165 - DNA, 1887 bp, Staphylococcus aureus
atgccaattttattaaaaagtctacagggtgtagggcacgctattaatgttagtacaaaggtaagtaaaaagctaaatgaagatagttctttggatctaactattatcgagaacgcgagtacgtttgacgcaataggtgctataactaaaatgtggacgatcactcatgttgaaggtgaagatgatttcaacgaatatgtaattgtcatacttgataagtctactattggcgaaaaaataaggcttgatatcaaagctaggcaaaaagaacttgatgaccttaacaattctaggatttaccaagagtataacgaaagttttacaggcgttgagttcttcaatactgtctttaaaggaacgggttataagtatgtattacatccaaaagtagatgcatctaaattcgagggattaggcaaaggagatacacgattagaaatctttaaaaaaggacttgagcgttatcatctcgaatatgaatacgatgcaaagactaaaacgtttcatttgtatgatgaattatctaagtttgccaattattacattaaagctggtgtgaatgctgataacgtcaaaatacaagaagatgcatctaaatgttatacctttattaaaggttatggtgattttgatggacaacagacttttgcagaagcgggactacaaattgaattcactcatccattagcacaattgataggtaaaagagaagcgccaccgcttgttgatggacgtattaaaaaagaagatagtttaaaaaaagcaatggagctagtgataaagaaaagtgtcactgcttctatttccttagactttgtagcgttacgtgaacatttcccagaagctaaccctaaaataggtgatgttgttagagtggtggattctgccataggatataacgacttagtgagaatagtcgaaatcactacacatagagatgcgtacaataatatcactaagcaagatgtagtattaggagactttacaaggcgtaatcgttataacaaagcagttcatgatgctgcaaattatgttaaaagcgtaaaatctacaaaatccgacccatctaaagaactaaaagcattaaacgcaaaagttaacgcaagtttatctataaataatgaattggttaagcagaatgaaaaaataaacgctaaagtcgataagatgaatactaaaacagttacaactgctaatggtacgatcatgtacgactttactagtcaatcaagtataagaaacatcaaatcaattggaacgattggcgactctgtagctagagggtcgcacgcaaaaactaatttcacagaaatgttaggcaagaaattgaaagccaaaacgactaatcttgcaagaggtggcgcaacaatggcaacagttccaataggtaaagaagcggtagaaaacagcatttatagacaagcagagcaaataagaggagacttaatcatattacaaggcactgatgatgactggttacacggttattgggcaggcgtaccgataggcactgataaaacggatacaaaaacgttttacggtgccttttgttctgcaattgaagttattagaaagaataatccagattcaaaaatactagtgatgacagctacaagacaatgccctatgagtggtacaataatacgccgtaaagacacggacaaaaacaaactagggttaacacttgaggactatgtaaacgctcaaatactagcttgtagcgagctggacgtgccagtgtttgacgcatatcacacagattactttaaaccatacaatccagcttttaggaaagcgagcatggaggacggcttacaccctaatgaaaaaggtcacgaggttattatgtacgagttaatcaaggattattacagtttttacgactaa

SEQ ID NO: 409166 - DNA, 207 bp, Staphylococcus aureus
atggattttaaaataaaagtaaatgttgatactggcgaagctatagaaaagttagaacgcattaaatccttgtacgaagagataatagagttacaaaacgaaaaagttgttgtaaacgtaacagttaaaaatgaagctgatttagatatggttaaaacatctattagcgaagaaaatgctaaaaataatgatttcacacttttttag

SEQ ID NO: 409167 - DNA, 177 bp, Staphylococcus aureus
atgatggttaaacaaatattaagactattattcttattagcaatgtatgagctaggtaagtatgtaactgaacaagtatatattatgatgacggctaatgatgatgtagaggcgccgagtgatttcgctcatctatgcgaccagtcggatttgatgagggcggaggtgtcggaatag

SEQ ID NO: 409168 - DNA, 237 bp, Staphylococcus aureus
atgtttaatacacctaaaatgaaattaccagaaaagcacaccgaggtatttaagacgtataaaaatggaacgccagaagaaaaagctgagattgaaggctgttttattaaaactgttaaagatgaagatagtgaattttacagccctatgttagccagtctaaatgaacaacagttaaagagtatgttgagacaggtactttttttgattgatacaggagatgacaatgatgattaa

SEQ ID NO: 409169 - DNA, 237 bp, Staphylococcus aureus
gtgacacaatacttagtcacaacattcaaagattcaacaggacaaccacatgaacattttactgctgttagagataatcagacgtttacagttgttgaggcggagagtaaagaagaagcgaaagagaagtacgagtcacaaaatacacctattgtttactacactaataattctaaagtgaccttattcgaaagacctagtgaagaagtattaggttctttgttcgaaaagaaataa

SEQ ID NO: 409170 - DNA, 243 bp, Staphylococcus aureus
atgaaaattaatgaatctttgaagaaattaaaagaaaaaggatacaaagaaaatgaagataaagctatttttaatttagctgatggtacgctagaaatttacatcgaccatgacgaaaaaacaataattacagaattccatgatttaaaggtattcgtgtcagaagatttaaaagataaaagtatggagagcgttatgtatgaattggctggaattgatgaggaggacaaggaaaatgactaa

SEQ ID NO: 409171 - DNA, 237 bp, Staphylococcus aureus
atgaataaccgcgaacaaatcgaacaatcagttatcagtgctagcgcgtataacggcaatgacacagagggattgctaaaagagattgaagacgtgtataagaaagcgcaagcgtttgatgaaattcgcgaatctattaatgcgcaatgggttgagtatccagaagactgggcgtcagaggttttgagagaagtaagagagcttgaatatgaggaggaacaggaaaatgaaaattaa

SEQ ID NO: 409172 - DNA, 372 bp, Staphylococcus aureus
atgaaagtgaactatgaaacaggattccaaataggcgtaatggaagctaggttgaagaagatgagaaaacaacgtgatgagtacaagaagcaacgtgacgagcttattggggatatagctaagttaagagagcgtaacgaagagctggagaacatgtggcgcacagtcaaaaatgaattgcttggaagatacgaacattgctgttttaaaattagagaactacaccctgagagcaaagcgaacaggataggagctctctatataggaggtaaaagcactgcagatattatactgtcgcgaatggaagaactagacggaacaaatgagttctacgaatttttagggcaaatggaggatgacacaaatgaataa

SEQ ID NO: 409173 - DNA, 1554 bp, Staphylococcus aureus
atgattccaagcctaaaaattgaaacttatgatgtagatagattaacaaagattttacaaaataattatacagatataaaaattcctagttttgaagttatagattggttgcgtaatggtttagaattgcataatgttgaagagagtatatgtaaattttgtggaaacaatttaaattataatttgattaaagaaaaaatagaaatatatttattaaatgaaaagaaaaaagattttgattatcttaaagatgtcgaaaaatcaattgaacaattatcggataattatgaacaatatttatctaatattgatatatttgttaatgaattaggggtccaaaagtcagtagaagaaagtttgggagactcaattgatgaaattaagagaattttaaaacaaaaattaggaaatatggagaatgacaatcttaaatttccttctgatgattacattacattaataagcagattatctgaaattgaagaggaatgtaaggaaaagaagaaaataaaattaaaagaattaaataaaaaaacagaaaatataaatgtaatagttactggctctataagtttagaaatattagagaatcaaagtataagagaagaactttcaagtattcaatatgaagaaaatgaatgtaagaagcaagaacaactaaatgaggaaattaatgcaaaaatatcgaaattacatgaaaatcaatcggattataatgattttaaaatttacttaaatggtgtatttgaaagtattaatttacatattaggttgaaatctgatgaaactacacaaaattattatctttatcatgatttagaaaatatatcactaaatataaaagatataagtgaaggagagaaaaatctaatagcatttttattcttttattttgaactttttgaggatgagaaacaagaaaccattaaaagtaacattaaaacgttaatcattgatgatcctattaatagcttcgacgaagcaaatagattttacgttttagaattaattaaaaaagtacttaaaagcaaatttaatcaaatatttatatttacccattcttggaatgacttttgtgatataacttatagattaaaaggggaagatcataatttttatgaagtgtacaaagatcatcagggaactagttttttagaaaaatttaagaaagtaaagacgccttataaaaagttatttcaagagatttacgagttatcgagaaaaagtcaaaaggacatagttgaggaagattgttattactatcattcaataaatagcattagaagagtgtttgaagaatttttaagttttaagttaaaaaatagtgacctagctcagaaatcaaaccaaccagaaattgaagaagtttatagaaaaatgacaggcaatgaaatgagtaataacaaaaaaataaagttaggatcatttttaacaattataaatgtattgtcacataaaccatacagagcaatagatgtaattggttcagcaaaatttttgatgaggtatattgaagatgtagataaagctcattatgatgctatgaaggattga

SEQ ID NO: 409174 - DNA, 1128 bp, Staphylococcus aureus
ttggatacaaagcagttaaagcaagatatcattgactatgcatatacaattggtatcgacagtattggatttactactgccgatccctttgatgaattgaagcaaaagctagaagcatatcatgcaaatggttatgcctcaggatttgaagaatctgatattgctttacgaacggagcctaaattatccttaccaacagcaaggtcaatcatagcaattgcagttggttatcctaacaaactgaaaggtgcacctaagagtgttagaggtgatcgcagaggcttatttgctagagcatcgtggggtcaagattatcatacaattatgcgtaaacggttagatatgttagctgcatttattgaatctaaagttccagatgttgaaatcaaatctatggtagatacgggtgtattatcagatagggcagtagcagaacgtgcaggtttaggatttgttggtcgtaatggctttgtcatcaatcctaaactaggaacatggacatacctcggtgaaatgttagtcagtataccttttgaacctgatgatccattattagatagctgtggtgattgtacaatttgtgttgatcgttgtccaacaagtgcattagttggaaatggccaattaaatagtcagaaatgcattagttttttaacgcaaacaaaaggctatatgcctgaccaatatcgttataaaattgggaatagattatatggttgcgatacgtgtcaacaagtttgcccgaaaaatagaggtattaataccgaacaagatgacatcattttggaaccagaaattttaaagccaagattagtacctttactacgtatgtctaataaagaattcaaacaaacatatggtcaccttgcaggtgcttggcgtggtaaaaaaccgatacaacgaaatgctattttagcattggcgcattttaatgaagtggatgcaattccagaattgaaaaaagttgcaacaacagatgaaagaccgatgattcgagcaactgcttattgggctattggtcaaattcttggggaagaagcaagagattttatcaatgcaaattacgatcaagaggatgcagaagttcagaatgaaatgataaaaggattggacacaaggagagaatag

SEQ ID NO: 409175 - DNA, 345 bp, Staphylococcus aureus
atgaagccaaattcgaaatccaataagaaaatcatgaagaattataattgggaatactttaaagcccaaattaatcaaaagctttctgaaccagaaacgaaaaaaatctatagtcaaagaaaaattgatgtagagcctgtttttggatttatgaaggctattttgggtttcactcgaatgtcagttcgaggaataaataaagttaaacgagagctaggttttgtattaatggcacttaatataaggaaaatagtagatcgacgagctgtatattatcaaatacatttaaaaaaagctgatttctatcaaataattaatagaaatcagcttttttacattgcctaa

SEQ ID NO: 409176 - DNA, 255 bp, Staphylococcus aureus
atgatgaataatcgcgaacaaattgaacaatccgttatcagtgctagtgcgtataacggtaatgatacagagggattactaaaagagattgaggacgtatataagaaagcgcgagcgtttgatgaaatacttgaaggtttacctaatgctatgcaagatgcactcaaagaagatattggtcttgatgaagcagtagggattatgacggggcaagtggtctataaatatgaggaggagcaggaaaatgagtattag

SEQ ID NO: 409177 - DNA, 174 bp, Staphylococcus aureus
atgagtattagtgtaggagataaagtatataaccatgaaacaaacgaaagtctagagattgtgcaattggtcggagatattagagatacacattataaactgtctgatgattcagttattagcattatagattttattactaaaccaatttatctaattaagggggacgagtga

SEQ ID NO: 409178 - DNA, 282 bp, Staphylococcus aureus
gtggaatggaaacgattaaaaaatgtggtgccgcacccagttatcaaaaataaaaacttaaagtcggtatacgtaacaaaagataatgtgaaagaggttcaaaaagaattaggtttctttgaaatttttaatgaagaagtgttattaactggatttttatcatttcaaaggatacctatttacattatttggattaaccctaaatctcataagacgcctagatattactttgctaacgagcatgagattgaaagatattttgaatttttggaggacgagtaa

SEQ ID NO: 409179 - DNA, 159 bp, Staphylococcus aureus
atgcttgaaatcatcgaccaacgtgatgcattgctagaagaaaagtatttaaacgacgactggtggcacgagttagattattggttgaataaacgcaagtcagaaaatgaacagattgatattgatagagtgcttaaatttattgaggaattaaaatga

SEQ ID NO: 409180 - DNA, 534 bp, Staphylococcus aureus
atgaataatttaacagtagatcaattaaaagaacttttacaaatacaaaaggagttcgacgatagaataccgactagaaatttaaatgacgcagtagctagtatgattattgaatttgcggagtgggttaacacacttgagttttttaaaaattggaagaaacaaccaggtaagccattagatatacaattagatgagattgctgattacttagctttcagtttgcaattaactttgactattgttgatgaagaagatttggaagaaactactgaggttatggttgatttgattgaaaatgaagttactttacctaaactacattcagtttattttgttcatgtaatgcatacactaacagaacaatttgtaaaaggtattgataatagtattgtacaagttttaataatgccttttttgtacgccaatacttactatacaatcgaccaactcattgacgcatacaaaaagaaaatgaaaaggaaccacgaaagacaagatggaacagcagacgcaggaaaaggatacgtgtaa

SEQ ID NO: 409181 - DNA, 189 bp, Staphylococcus aureus
gtgacgcaatacttagtcacaacattcaaagattcaacaggacaaccacatgaacattttactactgctagagataatcagacgtttacagttgttgaggcagagagtaaagaagaagctgagcgcaaatacgaggcacaagttaagataaggagagatggagatgccaaagaaaacggtaacgattga

SEQ ID NO: 409182 - DNA, 153 bp, Staphylococcus aureus
gtggtggttaaagaaattttgagactattattcttactagcgatgtatgagttaggtaagtatgtaactgagcaagtatatattatgatgacggctaatgatgatgtagaggcgccgagtgattacgtctttcgagcggaggtgagtgaataa

SEQ ID NO: 409183 - DNA, 153 bp, Staphylococcus aureus
atgagaatatttatttatgatttgatcgttttgctgtttgctttcttaatatccatatatattattgatgatggagtgataataaatgcattaggaatttttggtatgtataaaattatagattccttttcagaaaatattataaagaggtag

SEQ ID NO: 409184 - DNA, 651 bp, Staphylococcus aureus
atgaacgagcaaataataggaagcatatatactttagcaggaggtgttgtgctttattcagttaaagagatttttaggtattttacagattctaacttacaacgtaaaaaaatcaatttagaacaaatatatccgatatatttagattgttttaaaaaggctaaaaagatgattggagcttatattattccaacagaacagcatgaatttttagatttttttgatattgaagtctttaataatttagataagcaaagtaaaaaagcgtatgaaaatgttattggatttagacaaatgattaatttatcaaatagagttaaggcaatggaagattttaagatgagtttcaacaatgaatttagtacaaatcagattttttttaatccttcttttgttatggaaacaattgctattataaatgaatatcaaaaagatatatcttatttaaaaaatataattaataaaatgaatgaaaatagagcttataatcatattaatagttttatcacttcagagtaccgacgaaaaataaacgattataatctttatcttgataaatttgaagaacagtttagtcaaaagtttaaaataaacagaacttcgataaaagaaagaattattattaatttaaacaagaggagatttaaatga

SEQ ID NO: 409185 - DNA, 1662 bp, Staphylococcus aureus
atgattagtaataaatacgttgatgaatatataaatttgtggaaacaaggaaagataattttaaataaagaaagaattgatctctttaattatctacaaaaacatatatattcacgagatgatgtatattttgatgaacagaaaatcgaggattgtatcaaatttattgaaaaatggtattttccaacattaccatttcaaaggtttatcatagctaatatatttcttatagataaaaatacagatgaagctttctttacagaatttgctattttcatgggacgtggaggcgggaaaaacggtctaataagtgctattagtgattttctttctacgcccttacacggagttaaagaatatcacatctccattgttgctaatagtgaagatcaagcaaaaacatcgtttgatgaaatcagaaccgttttaatggataacaaacgaaataagacgggtaaaacgccaaaagctccttatgaagttagtaaagcaaaaataataaaccgtgcaactaaatcggttattcgatataacacatcaaacacaaaaaccaaagacggtggacgtgaggggtgtgttatttttgatgaaattcattatttctttggtcctgaaatggtaaacgtcaaacgtggtggattaggtaaaaagaaaaatagaagaacgttttatataagtactgatggttttgttagagagggttatatcgatgcaatgaagcacaaaattgcaagtgtattaagtggcaaggttaaaaatagtagattgtttgctttttattgtaagttagacgatccaaaagaagttgatgacagacagacgtgggaaaaggcgaacccaatgttacataaaccgttatcagaatacgctaaaacactgctaagtacgattgaagaagaatataacgatttaccattcaaccgttcaaataagcccgaattcatgactaagcgaatgaatttgcctgaagttgaccttgaaaaagtaatagcaccatggaaagaaatactagcgactaatagagagataccaaatttagataatcaaatgtgtattggtggtttagactttgcaaacattcgagattttgcaagtgtagggctattattccgaaaaaacgatgattacatttggttaggacattcgtttgtaagacaagggtttttggatgatgtcaaattagaacctcctattaaagaatgggaaaaaatgggattattgaccattgtcgatgatgatgtcattgaaattgaatatatagttgattggtttttaaaggctagagaaaaatatgggcttgaaaaagtcatagctgataattatagaactgatattgtaagacgtgcgtttgaggatgctggcataaaacttgaagtacttagaaatccaaaagcaatacatggattacttgcaccacgtatcgatacaatgtttgcgaaacataacgtaatatatggagacaatcctttgatgcgttggtttactaataatgttgcagtaaaggttaaacccgatggtaataaagaatatattaaaaaagatgaaaatagaagaaaaaccgatgggttcatggcttttgttcacgcattatatagagcagacgatatagtagacaaagacatgtctaaagcgcttgatgcattaatgagtatagatttctaa

SEQ ID NO: 409186 - DNA, 1005 bp, Staphylococcus aureus
atgacaacagtttattatgatcaagatgtaaaaacggacgctttacaaggcaaaaaaattgcagtagtaggttatggatcacaaggccacgcgcatgcacaaaacttaaaagacaatggatatgatgtagtcatcggtattcgcccaggtcgctcttttgacaaagctaaagaagatggatttgatgtgttccctgttgcagaagcagttaagcaagctgatgtaattatggtgctattacctgatgaaattcaaggtgatgtatacaaaaacgaaattgaaccaaatttagaaaaacataatgcgcttgcatttgctcatggctttaacattcattttggtgttattcaaccaccagctgatgttgatgtatttttagtagctcctaaaggaccgggtcatttagttagacgtacatttgttgaaggttctgctgtaccatcactatttggtattcaacaagacgcttcaggtcaagcacgtaatattgctttaagttacgcaaaaggtattggtgcaaatcgtgcaggtgttattgaaacaacatttaaagaagaaactgagacagatttatttggtgaacaagcagtactttgcggtggtgtatcgaaattaattcaaagtggctttgaaacattagtagaagcaggttatcaaccagaattagcttattttgaagtattacatgaaatgaaattaatcgttgatttgatgtatgaaggcggtatggaaaatgtacgttactcaatttcaaatactgctgaatttggtgactatgtttcaggaccacgtgttatcacaccagatgttaaagaaaatatgaaagctgtattaactgatatccaaaatggtaacttcagtaatcgctttatcgaagacaataaaaatggattcaaagaattttataaattacgcgaagaacaacatggtcatcaaattgaaaaagttggtcgtgaattacgcgaaatgatgccttttataaaatctaaaagcattgaaaaataa

SEQ ID NO: 409187 - DNA, 543 bp, Staphylococcus aureus
atgcgaagcgacatgatcaaaaaaggagatcaccaagcaccagcaagaagtcttttacatgccacgggcgcgcttaaaagtccaactgatatgaacaaaccatttgtagctatttgtaactcttatattgatatcgttccaggacatgttcatttaagagagcttgcagatatagctaaagaagcaattagagaagccggtgccattccatttgaattcaatacaattggtgttgatgatggaatagctatgggacatatcggaatgcgatattctctaccatcacgtgaaattattgcagatgcagctgaaactgtaattaacgctcattggtttgacggcgtattttacattcctaattgtgacaagattacacccggtatgattttagcagccatgaggacaaacgtaccagctatcttttgctctggtggaccaatgaaagctggcttatctgcacatggtaaagcattaacactttcatcaatgtttgaagcagtcggcgcttttaaaaaggatcgatttctaaagaagaatttttag

SEQ ID NO: 409188 - DNA, 342 bp, Staphylococcus aureus; identical to SEQ ID NO: 408510

SEQ ID NO: 409189 - DNA, 1308 bp, Staphylococcus aureus
atgaacaaagtccacaaacctttatatttttatttaatgcttttcttctctacaactatcataggtgcacttttattgtatttacctttcactggtaaaaagccaatatcttttttagatgccctatttatagcttcaagtgcatttacagttactggcttgtccccagttgatataggatcacagtttaatatacttggtgagatagtaatactattattaatacaaataggtggtctaggtatcgtaaccgtaaccctattgacactagtatttttaaatagaaagatatcaatgaaaaatagatttttgattatggttacatggaatattgacgaacctggtggtgttattaagctaattaaacacttggctatttatagtttagtcactgaattaattggtatgatttgtttgtgtttatcttttataccaaaatttggtataggcaaaggattatttttaagcttattcacatcagtatcagcttttaataatgctggatttgccctttttaagaataacttaatagattattctaatgatccaattgtcattatcacaatctcaatactcataatatttggaggtattggacattttgtcgtaatagactttattaattgtaaaaaattgagtaaattatctttacattctaaattagtcttaactacaactagtatcctaataattataggagctattacattctttttattagaacagtttaatactatgcaaaatatgggactagttgaaaaaatcggaaattcttttttccaatcaataacaacacgaacagcgggctttaacagtattgatatagcaagcattaacaaatctactgctttaatgttaatgctacttatgtttattggtggtgcccctctcagtgcagctggaggaattaaaataactacttttgcagtagcgtttatttttgtattaaattatatacgtaaagaaaataatgtttcagtattcaataaagaaatatctgacaaatatataaaactatctattgttaccattaatatctcatttctatttatcagtatcattacttttatattatcgataattaatccgaacatatcattaatcaagttattattcgaagtggtttctgcatttggaacagtcgggttaagtatgaaccttaccacagaatatcatggtattactaaaataattattatattcgttatgctttgcggtaaagtaggactattaactttattaagaacatttataccaccaaaaagtccaaaaaattaccgctacactaaaggacaaatttatctataa

SEQ ID NO: 409190 - DNA, 1056 bp, Staphylococcus aureus
atgaaaaataaaaagcgcgtattcattgcgtcatcattatcatgtgtacttttattgttatcagcagcaaatacagaagcgaattcagcgaataaagactcacaagaccaaactaagaaagaacatgttgataaggctcaacaaaaagaaaagcgtaatgtgaatgataaagataaaaatacaccaggacctgatgatattggtaaaaacggtaaagttacaaagcgtactgtatctgaatacgataaagagacaaatattttacaaaatttacaattcgactttatcgatgatccaacatatgacaagaatgtcttacttgtcaaaaaacaagggtcaattcattcaaatttaaagtttgaatctcatcgaaatgaaacaaacgcatcatggttaaaatacccgagtgaatatcacgttgattttcaagtacaaagaaaccctaaaactgaaattttagatcaactgccaaaaaataaaatttccactgcgaaagtagatagtacattttcttatagcttaggtggtaaattcgattcaacaaaaggtattggacgaacatcatctaatagctattctaaatctatcagttataaccaacaaaattacgacacaattgcgagcggtaaaaataataatagacacgtacactggtctgttgttgccaacgatttaaaatacgggaatgaaattaagaacagaaatgatgaattcttattctatagaaatactagattatctactgtagaaaatcctgaattaagttttgcatcaaaatatagatatcctgcgcttgtaagaagcggatttaacccagaattcttaacttatatttctaatgaaaagtcaaatgaaaaaacacgattcgaagttacatatacacgtaatcaagatattttgaaaaataaacctggtatacattatggacaaccaattttagaacaaaataaagatggtcaaagatttattgtagtttatgaagtagattggaaaaataaaacagttaaagtcgttgaaaaatactctgatcaaaataaaccatataaagaaggataa

SEQ ID NO: 409191 - DNA, 321 bp, Staphylococcus aureus
atgccacatattttaaacgtaacagttccaatacctgaaacacatgtacttatcacaaaagatgaatatgatgagctaattggttattcattagaccctgtatggaacatgagtgacttaaagaagaaattaaaaattgcatctgatgagactatcaaggacagattactatttcatcctagatttgaaaaagaactaagagcgcaaggaattgtgcattaccctgatgagaattttaatcgctggagatttaacgcaagaaagatgaataaattcgtcgatgagcatttcaatgaaatatataaggagagaataaaatga

SEQ ID NO: 409192 - DNA, 330 bp, Staphylococcus aureus
atgactgaaaatattaaaactgaacaacattattacactaaagatttttcaggatacagaaatgaagaagataactttgtagcaaatcaagaattgacagtaacaatcacattgaacgagtacagaaaacttattgaaataaaggctgttaaagataaagaagaagatacttacagaggtaagtattttgcggaagaaagaaaaaacgaaaaattggaaaaagaaaatataaaactaaaaaacaaaatttatgaattacaaaacgaagaagataacgaggaggacgaagaagacaaggaggacgagaacgatgtattacaaaattggtga

SEQ ID NO: 409193 - DNA, 261 bp, Staphylococcus aureus
atgtattacaaaattggtgagataaaaaacaaaattataagctttaacgggtttgaatttaaagtgtctgtgatgaagagacatgacggtatcagtatacaaatcaaggatatgaataatgttccacttaaatcgtttcatgtcatagatttaagtgaactatatattgcgacggatgcaatgcgtgacgttataaacgaatggattgaaaataacacagatgaacaggacagactaattaacttagtcatgaaatggtag

SEQ ID NO: 409194 - DNA, 222 bp, Staphylococcus aureus
atgaagcagactgtaacttatctaatcaagcataaagatgaaaatctatttattacaaaccgaccaaccgaagtgaacgatacagtgaagtattcaactgatatgcgagacgcaagagaattcgacggactagacaaaactgttattgatatgtctaagcacaaagcaatcaagaaaacagtgacagaaacaattgagtatgaggaggtagaacatgactga

SEQ ID NO: 409195 - DNA, 789 bp, Staphylococcus aureus
atgactgaggaaaaacaagaaccacaagaaaaagtaagcatactcaaaaaactaaagataaataatatcgctgagaaaaataaaaggaaattctataaatttgcagtatacggaaaaattggctcaggaaaaaccacgtttgctacaagagataaagacgctttcgtcattgacattaacgaaggtggaacaacggttactgacgaaggatcagacgtagaaatcgagaactatcaacactttgtttatgttgtaaattttttacctcaaattttacaggagatgagagaaaacggacaagaaatcaatgttgtagttattgaaactattcaaaaacttagagatatgacattgaatgatgtgatgaaaaataagtctaaaaaaccaacgtttaatgattggggagaagttgctgaacgaattgtcagtatgtacagattaataggaaaacttcaagaagaatacaaattccactttgttattacaggtcatgaaggtatcaacaaagataaagataatgaaggtagcactatcaaccctactatcactattgaagcgcaagaacaaattaaaaaagctattacttctcaaagtgatgtgttagctagggcaatgattgaagaatttgatgataacggagaaaagaaagctagatatattctaaacgctgaaccttctaatacgtttgaaacaaagattagacattcaccttcaataacaattaacaataagaaatttgcaaatcctagcattacggacgtagtagaagcaattagaaatggaaactaa

SEQ ID NO: 409196 - DNA, 552 bp, Staphylococcus aureus
atgaaaatcacaggacaagcgcaatttactaaagaaacaaatcaagaaaagttttataacggctcagcagggtttcaagctggagaattcacagtgaaagttaaaaatattgaattcaatgatagagaaaatagatatttcacaatcgtatttgaaaatgatgaaggcaaacaatataaacataatcaatttgtaccgccgtataaatatgatttccaagaaaaacaattgattgaattagttactcgattaggtattaagttaaatcttcctagcttagattttgataccaatgatcttattggtaagttttgtcacttggtattgaaatggaaattcaatgaagatgaaggtaagtattttacggatttttcatttattaaaccttacaaaaagggcgatgatgttgttaacaaacctattccgaagacagataagcaaaaagctgaagaaaataacggggcacaacaacaaacatcaatgtctcaacaaagcaatccatttgaaagcagtggccaatttggatatgacgaccaagatttagcgttttaa

SEQ ID NO: 409197 - DNA, 693 bp, Staphylococcus aureus
atgcaatacattacaagataccagaaagacaatgacggcacttattccgtcgttgctactggtgttgaacttgaacaaagtcacattgacttactagaaaacggatatccactaaaagcagaagtagaggttccggataataaaaaactatctatagaacaacgcaaaaaaatattcgcaatgtgtagagatatagaacttcactggggagaaccggtggaatcaactagaaaattattacaaacagaattggaaattatgaaaggttatgaagaaatcagtctgcgcgactgttctatgaaagttgcaagggagttaatagaactgattatagcgtttatgtttcatcatcaaatacctatgagtgtagaaacgagtaagttgttaagcgaagataaagcgttattatattgggctacaatcaaccgcaactgtgtaatatgcggaaagcctcacgcagacctggcacattatgaagcagtcggcagaggaatgaacagaaacaaaatgaatcactacaacaaacatgtattagcgttatgtcgcgaacatcataaccagcaacatgcgattggcgttaagtcgtttgatgataaatatcacttgcatgactcgtggataaaagttgatgagaggctcaacaaaatgctgaaaggagaaaacaatgggagaagtatcgtggataaaacttaa

SEQ ID NO: 409198 - DNA, 804 bp, Staphylococcus aureus
atgggagaagtatcgtggataaaacttaaagttggcatgtttgatgacagcaaaatcaaatatatcgaagctttacccgaaagagatacgatcataactatttgggttaagttgctaactttatcaggaaagtacaacgaacaaggttacattatgctatctgaaaatttgccgtacaacgaagaaatgttagcaaatgagtttagccgacctatcaactcgataaggttagcaatacaaacttttgagacattaggcatgattgaaaaagttaatggtgtcataaaagtgacaaactgggaaaagcaccaaaacattgaaggactcgagaaaatcagggcgcagaacaggttgaggaaacaaaagcaacgagaaaacaacagaaaattgctaaatggtcacgtgacgtcacgtgacagtcacgcaacagaagaagataaagaattagataaagaattagaaagagataaagaaaaagatatagataagaacttaagttcaattaatagcgcaactgacgttacgcatgagcaatttgaggaatggtggaaactttacgacaagaagaaagataagaagatgtcttttactaaattcaaatcatgcttaaagaaacattcttttgaacaaatcatgcaaggcactcgagagtatttaaaaactattacagacaaacaatatcaaaagtaccccaaaacgttcttaactaatgaaagctatatgaatgattatagcgaagagattaaagaaactggcatagatcaattggaacgtatgaagtacgacgaaagttattgggattag

SEQ ID NO: 409199 - DNA, 486 bp, Staphylococcus aureus; identical to SEQ ID NO: 408474

SEQ ID NO: 409200 - DNA, 393 bp, Staphylococcus aureus
ttgcaagaaagatcaaaattgcttgaaaatcagcaagttctggcattagagagtaataaaaagattcaaaaattagaaaatcaattagaaaaagaaaaacaccttaattatccctttgatacatctactaacactagacaaaacgttgatgcacaagaaaaaacatatactactaatcctgtaaatattaacagagatcaggaagaaaccaaagaaacagagattcaatataaggatatatctggaagtcaaagcgacgaaagtacacaaggtgaagaagcaaaaagagaagacgttccagctaatctaaatgacaatgatagtgatatagaagaaaagagtgaagaaacggaacctaaaaaggggttttggagtcgtttgtttggtagctaa

SEQ ID NO: 409201 - DNA, 882 bp, Staphylococcus aureus; identical to SEQ ID NO: 408512

SEQ ID NO: 409202 - DNA, 981 bp, Staphylococcus aureus; identical to SEQ ID NO: 408513

SEQ ID NO: 409203 - DNA, 987 bp, Staphylococcus aureus; identical to SEQ ID NO: 408514

SEQ ID NO: 409204 - DNA, 720 bp, Staphylococcus aureus
atgagaatagaacgagtagatgatacaactgtaaaattgtttataacatatagcgatatcgaggcccgtggatttagtcgtgaagatttatggacaaatcgcaaacgtggcgaagaattcttttggtcaatgatggatgaaattaacgaagaagaagattttgttgtagaaggtccattatggattcaagtacatgcctttgaaaaaggtgtcgaagtcacaatttctaaatctaaaaatgaagatatgatgaatatgtctgatgatgatgcaactgatcaatttgatgaacaagttcaagaattgttagctcaaacattagaaggtgaagatcaattagaagaattattcgagcaacgaacaaaagaaaaagaggctcaaggttctaaacgtcaaaagtcttcagcacgtaaaaatacaagaacaattattgtgaaatttaacgatttagaagatgttattaattatgcatatcatagcaatccaataactacagagtttgaagatttgttatatatggttgatggtacttattattatgctgtacattttgatagtcatgttgatcaagaggtcattaatgatagttacagtcaattgcttgaatttgcttatccaacagacagaacagaagtttatttaaatgactatgctaaaataattatgagtcataacgtaacagctcaagttcgacgttattttccggagacaactgaataa

SEQ ID NO: 409205 - DNA, 2070 bp, Staphylococcus aureus; identical to SEQ ID NO: 408490

SEQ ID NO: 409206 - DNA, 405 bp, Staphylococcus aureus
atgagtaaatacaatgctaagaaagttgagtacaaaggaattgtatttgatagcaaagtagagtgcgaatattaccaatatttagaaagtaatatgaatggcactaactatgatcatatcgaaatacaaccgaaatttgaattattaccaaaattagataaacaacgaaagattgaatatattgcagacttcgcgttatatctcgatggcaaactgattgaagttatcgacattaaaggtatgccaaccgaagcagcaaaacttaaagctaaaattttcagacataaatatagaaacataaaactcaattggatatgtaaagcacctaagtacacaggcaaaacatggattgcgtacgaggaattaattaaagcaagacgagaacgcaaaagagaaatgaagtga

SEQ ID NO: 409207 - DNA, 222 bp, Staphylococcus aureus
atgccgaaagaaaaatattacttataccgagaagatggcacagaagatattaaggtcatcaagtataaagacaacgtaaatgaagtttattcgctcacaggagcccatttcagcgacgaaaagaaaattatgactgatagtgacctaaaacgattcaaaggcgctcacgggcttctatatgagcaagagctaggattgcaagcaacgatatttgatatttag

SEQ ID NO: 409208 - DNA, 327 bp, Staphylococcus aureus
atgcatataccaatgttgatggatcgtatcaaagcgacatacaacaaaaatgcagtagagactacagacgaactagtcaaattacttagtgagattgatttacttgtactagatgatatgggtgtagaaaacacagaacacactataaataaacttttcagcattgttgataacagagtaggtaaaaacaacatctttacaactaactttagtgataaagaactaaatcaaaatatgaactggcaacgtataaattcgagaatgaaaaaaagagcaagaaaagtaagagtaatcggagacgatttcagggagcgagatgcgtggtaa

SEQ ID NO: 409209 - DNA, 249 bp, Staphylococcus aureus
atgcctaaaaccgatagcgcatgtaaagaatacttaaaccaatttttcggatctaagagatatctgtatcaggataacgaacgagtggcacatatccatgtagtgaatggcacttattactttcacgggcatatcgtaccaggctggcaaggcgtgaaaaagacatttgatacaaccgaagagctcgaaacatatataaagcaacatggtttggaatacgaggaacagaagcaactaactttattttag

SEQ ID NO: 409210 - DNA, 777 bp, Staphylococcus aureus; identical to SEQ ID NO: 408049

SEQ ID NO: 409211 - DNA, 795 bp, Staphylococcus aureus
atgattcattcaaagaaattaacgctcggtatatgcttggtattactcattatattgattgtaggttatgtcattatgacaaaaacaaatggtcgaaacgcccaaattaaagacacatttaatcaaacattaaaattatatccaaccaaaaatctcgatgatttttacgataaagaaggctttcgagatcaagaatttaaaaagggtgataaaggtacttggatagttaattctgaaatggtaatcgagccaaaaggtaaggatatggaaacgagaggaatggtgctctatatcaatcgcaatactagaaccacaaaagggtattattttataagtgaaatgacagatgacagtaacggcagaccaaaggatgatgaaaaaaggtatccggtaaaaatggaacataataaaatcataccaacgaagccactaccgaatgacaagttaagaaaagaaatcgaaaactttaaattctttgtacaatacggtgactttaaagatattaatgattataaagatggtgacatttcatataatcctaatgttccaagttattccgcaaaatatcaattgaaaaacgatgactacaatgtgaagcaacttcgaaaaagatataatattccaaccaacaaagctccgaaattattaataaaaggtgatggtgatttaaaaggctcatctgtagggtcaaaaaatctagaatttacctttgtagaaaataaagaagaaaacatttattttacagattctgtacaatatacttcaagtgaggatacaagttatgagtcaaactga

SEQ ID NO: 409212 - DNA, 1131 bp, Staphylococcus aureus
gtgaagaaaattttatttgatgttgatggcatttttttaagtgaagaacgttgtttcgatgtctctgcattaacggtatatgaattattaatggataagtgttatttaggtcttcattcacatatagattgggaaactttgactgataacgatatacaagacattaggaatcgaatttttcaaaaagataagattttaaacaaattaaaatcgctagggctgaattcaaattgggatatgttatttatcgtttttagtattcatttaattgatattttgaaaaagttatcacatgatgaaattgaggcattcatgtatcaagatgagcctgtcgaattgaagttgcaaaatataagcacaaacttagcagactgttttaatttaaatgaacaactacctttacaatttttggataatgtaaaagttggtaaaaataatatttatgctgctttggaagagtttgcaacaacagagttacatgtttcggatgctactttatttagtttgaagggtgcattatggacgttagcgcaagaagtttatcaagaatggtatttaggatcgaagttgtatgaagatgttgaaaagaaaatagcacgaactacttttaagacaggttatatttatcaagaaattattttgagaccagtagatgaagttaaggtacttctgaatgatttaaaaggtgctggtttcgaattaggtattgcaacaggtcgtccttatactgagactgttgtgccatttgaaaatttaggattgttaccatattttgaagctgattttattgcaacagcaagtgatgttttagaagcagagaatatgtatccgcaagcacgaccattaggaaagccgaatccttttagttatatcgcagctttatatggtaataatcgcgataaatatgaatcttatatcaataagcaagataacattgtaaataaagatgacgtatttatagtaggcgattcgttagctgacttattaagtgctcaaaaaataggtgcaacgtttattggaacattaacaggtttaaaaggtaaggatgctgcaggtgagttagaagcgcatcatgccgactatgttattaatcatttaggtgaacttagaggtgtactagataatttgtaa

SEQ ID NO: 409213 - DNA, 549 bp, Staphylococcus aureus
atggtaagggggcgtattgctgattacacattatcgcaattaaaatcatttgattttggtagttataaagatgttgcttttaagggagaacgaatacccacgttagatgaagtactttcattatgcttaaagtatgataaaaagcttttgattgaattgaaaagtccgaatttatatccagaaatagaatgtaaattgctggcatttttggaagaaaagaaagtcgatgcgacacaagtagttatacaatcttttgatatcgaatgcatcgaaaagttaaacacattgggcagtatatatgaattaggtgtgctttgtagtaaacgtaattattggtataaaaagccaaacttttcaagaattgctcaaattgctagttatgttaatcctaattatgcattagtggccagaaaatttgttgataaagcacatcatcatcaattacaggttatgccatacacagttaataaattgaaaactggagaaaaattaagacaaatgggtgtagatggattaattacagataatccgaaattatttattaagtga

SEQ ID NO: 409214 - DNA, 219 bp, Staphylococcus aureus
atgaatgaagaaaaagtaaaagtagtacaacaagttttaggacaagttgaacaagaaataagctttgctcttggtacagatgaaggatcacaaatcaaaaagaaaattgaacataacggtagggaatacgaaatctatatgacaagagaagaatgtttagaagataccttgattgaaattactaaactactagaagcaattaatttcgggttttattaa

SEQ ID NO: 409215 - DNA, 336 bp, Staphylococcus aureus
atgggagagttgaagcctaaagcagattatgttgatgaaatcttaaaatcaactggcacattagctacaactcagattgcagcagactatgggatttcagcacaaaagttaaacaaactactacacgaagctagattacaacgaaaagtaaataaacagtgggtgctttactcagaacacatgggcaagagttacacagaatcagacactataccaattgtacgctctgacggtagagaagacacagtgctacaaactagatggacgcaaaaaggcagattaaaaatacacgaaatcatgactgaatttggttatgaagctaacgtaacagcttaa

SEQ ID NO: 409216 - DNA, 165 bp, Staphylococcus aureus
atgcaagcattacaaacatttaattttgaagaattaccagtaagaacattaacagtagataacgaaccatattttgtaggtaaagatgtggcagaaatcttaggatactcgaatacgcgtgacgcattaagtaaacacgctgaacaatccagattacatcattaa

SEQ ID NO: 409217 - DNA, 228 bp, Staphylococcus aureus
atgaacaaagcgaaactttattctgctttagcgatgaaagagatgcatgtaaatgattttttaaaagaattgaataatcatggtttaaaactttctaaaagcgcttattatagtagaattagaggagaacaagaatttgacatcaaagaaattaagacgatagtcaaagttcttaatttaaccagagaagaaatgaacgatattttttttggagaattggtgtcctaa

SEQ ID NO: 409218 - DNA, 615 bp, Staphylococcus aureus
atgaaaccagacattaaaagcagacgtaaagaattgaatttaactctagaacaagttggagatttagttggtgtaggtaaatccacagtaagaaaatgggaaactggcgatatcgaaaatatgaagagagataaaatagtaaaattagctaaagcattaagagtatctccatcatatatcatgggtattgaagatgagaaacctcaacttgaaaccataccagttaaaaagataccggttgtatcaaagatatctgcgggaatgcccatatatacagaagagaatttaatcgactacatatactttgctactaaaaatttgaactctaataaagaagagttcggattgcaagtgtctggggatagtatggataaactctttcaagacggagacgttgtagttgttgaaaaggattcgactgttgagaatggccaattaggtgttgtattagtcaatggatacaacggtactgtcaaaagaatacgttacaacaacgaccaaattattttaattcctgaatcaaacaatcctagtcactacccacaagtatatggaaaagatgacgaggttaagattgtaggtagagttgtagcaagtcaaaaactattcaaataa

SEQ ID NO: 409219 - DNA, 921 bp, Staphylococcus aureus
atggattttgtagcgatcgatgtcgaaacagctaacgaacaacgcagttctatttgttcaatagcactattaaaatttcaagacaacaaaatgcgtgatgctatttatactcacataaatcctgaaacttatttttcttctataaacacttctatacatggaatatccgaagaagacgtaatggattcccctaaaatgtatcaaatgcatgaagctattattagattcttagataaccatatattagtagcccataatacatctttcgatatgtatgctctatgtgattctttcaaaaaatacaatctacctttacctagcaatcaatatttttgtacttatcgattaagtaaagatttatataatttaccttcatatagactccaagatttagctgaacattttgacattaaaaacgaagaatatcacaatgctttttatgatgctaaagtgtgtgccaaaattgcatataacatattaaaagaccaagatgcaaacttgaacgatttagtcgaaaaccaaaattttaagtacggtgtgtttggtcagaatggattcataaaaaaatcggctaataagaaaatagagctagtatacaatgaagagttaaacgataaaaatcatatattatatggtaaacatgtttgttttaccggagcgttaaaaggtttcacacggaacgaaatagcccaaactgtaactaatattggttctgtttacgattcctctgtaaaaaagtcaactaactacctcgttgtcggtaatttagaaaacctagaaaaaactcataactataccaagtcaagtaagattaaaaaagcagaaaaattatcaagtgaaggacaagacattgaaattttaagtgaaatggatttcttaaaattattaactaccttcacttctgtagaaacgaaaacgtga

SEQ ID NO: 409220 - DNA, 183 bp, Staphylococcus aureus
atgaaaataactaattgcaaaataaaaaaagaaactatagtatatgaagttttaactagtggtaatcaaccattcacttatgagttacctaaagatttatcgtcacataatgcgcgtaaatacttggaatttatttcacaaaaaatagatggagataagttaaccaaagaagattcattatga

SEQ ID NO: 409221 - DNA, 126 bp, Staphylococcus aureus
atggtagataaaaacaaaaaacgagaaactactcgtagtaacccattaaacaaaagttttgaaaagtcaggcgccagccaaaaattaaaaagcactttatcagaaaaagctaagaaaaaagattag

SEQ ID NO: 409222 - DNA, 372 bp, Staphylococcus aureus
atggataataaaacgtatgaaatatcatctgcagaatgggaagttatgaatatcatttggatgaaaaaatatgcaagtgcgaataatataatagaagaaatacaaatgcaaaaggactggagtccaaaaaccattcgtacacttataacgagattgtataaaaagggatttatagatcgtaaaaaagacaataaaatttttcaatattactctcttgtagaagaaagtgatataaaatataaaacatctaaaaactttatcaataaagtatacaaaggcggtttcaattcacttgtcttaaactttgtagaaaaagaagatctatcacaagatgaaatagaagaattgagaaatatattgaataaaaaataa

SEQ ID NO: 409223 - DNA, 1758 bp, Staphylococcus aureus
gtgttatcatcttttttaatgttaagtataatcagttcattgctcacgatatgtgtaatttttttagtgagaatgctctatataaaatatactcaaaatattatgtcacataagatttggttattagtgctcgtctccacgttaattccattaataccattttacaaaatatcgaattttacattttcaaaagatatgatgaatcgaaatgtatctgacacgacttcttcggttagtcatatgttagatggtcaacaatcatctgttacgaaagacttagcaattaatgttaatcagtttgagacctcaaatataacgtatatgattcttttgatatgggtatttggtagtttgttgtgcttattttatatgattaaggcattccgacaaattgatgttattaaaagttcgtcattggaatcgtcatatcttaatgaacgacttaaagtatgtcaaagtaagatgcagttctacaaaaagcatataacaattagttatagttcaaacattgataatccgatggtatttggtttagtgaaatcccaaattgtactaccaactgtcgtagtcgaaaccatgaatgacaaagaaattgaatatattattctacatgaactatcacatgtgaaaagtcatgacttaatattcaaccagctttatgttgtttttaaaatgatattctggtttaatcctgcactatatataagtaaaacaatgatggacaatgactgtgaaaaagtatgtgatagaaacgttttaaaaattttgaatcgccatgaacatatacgttatggtgaatcgatattaaaatgctctattttaaaatctcagcacataaataatgtggcagcacaatatttactaggttttaattcaaatattaaagaacgtgttaagtatattgcactttatgattcaatgcctaaacctaatcgaaacaagcgtattgttgcgtatattgtatgtagtatatcgcttttaatacaagcaccgttactatctgcacatgttcaacaagacaaatatgaaacaaatgtatcatataaaaaattaaatcaactagctccgtatttcaaaggatttgatggaagttttgtgctttataatgaacgggagcaagcttattctatttataatgaaccagaaagtaaacaacgatattcacctaattctacttacaaaatttatttagcgttaatggcattcgaccaaaatttactctcattaaatcatactgaacaacaatgggataaacatcaatatccatttaaagaatggaaccaagatcaaaatttaaattcttcaatgaaatattcagtaaattggtattacgaaaatttaaacaaacatttaagacaagatgaggttaaatcttatttagatctaattgaatatggtaatgaagaaatatcagggaatgaaaattattggaatgaatcttcattaaaaatttctgcaatagaacaggttaatttgttgaaaaatatgaaacaacataacatgcattttgataataaggctattgaaaaagttgaaaatagtatgactttgaaacaaaaagatacttataaatatgtaggtaaaactggaacaggaatcgtgaatcacaaagaagcaaatggatggttcgtaggttatgttgaaacgaaagataatacgtattattttgctacacatttaaaaggcgaagacaatgcgaatggcgaaaaagcacaacaaatttctgagcgtattttaaaagaaatggaattaatataa

SEQ ID NO: 409224 - DNA, 2007 bp, Staphylococcus aureus
atgaaaaagataaaaattgttccacttattttaatagttgtagttgtcgggtttggtatatatttttatgcttcaaaagataaagaaattaataatactattgatgcaattgaagataaaaatttcaaacaagtttataaagatagcagttatatttctaaaagcgataatggtgaagtagaaatgactgaacgtccgataaaaatatataatagtttaggcgttaaagatataaacattcaggatcgtaaaataaaaaaagtatctaaaaataaaaaacgagtagatgctcaatataaaattaaaacaaactacggtaacattgatcgcaacgttcaatttaattttgttaaagaagatggtatgtggaagttagattgggatcatagcgtcattattccaggaatgcagaaagaccaaagcatacatattgaaaatttaaaatcagaacgtggtaaaattttagaccgaaacaatgtggaattggccaatacaggaacagcatatgagataggcatcgttccaaagaatgtatctaaaaaagattataaagcaatcgctaaagaactaagtatttctgaagactatatcaaacaacaaatggatcaaaattgggtacaagatgataccttcgttccacttaaaaccgttaaaaaaatggatgaatatttaagtgatttcgcaaaaaaatttcatcttacaactaatgaaacagaaagtcgtaactatcctctaggaaaagcgacttcacatctattaggttatgttggtcccattaactctgaagaattaaaacaaaaagaatataaaggctataaagatgatgcagttattggtaaaaagggactcgaaaaactttacgataaaaagctccaacatgaagatggctatcgtgtcacaatcgttgacgataatagcaatacaatcgcacatacattaatagagaaaaagaaaaaagatggcaaagatattcaactaactattgatgctaaagttcaaaagagtatttataacaacatgaaaaatgattatggctcaggtactgctatccaccctcaaacaggtgaattattagcacttgtaagcacaccttcatatgacgtctatccatttatgtatggcatgagtaacgaagaatataataaattaaccgaagataaaaaagaacctctgctcaacaagttccagattacaacttcaccaggttcaactcaaaaaatattaacagcaatgattgggttaaataacaaaacattagacgataaaacaagttataaaatcgatggtaaaggttggcaaaaagataaatcttggggtggttacaacgttacaagatatgaagtggtaaatggtaatatcgacttaaaacaagcaatagaatcatcagataacattttctttgctagagtagcactcgaattaggcagtaagaaatttgaaaaaggcatgaaaaaactaggtgttggtgaagatataccaagtgattatccattttataatgctcaaatttcaaacaaaaatttagataatgaaatattattagctgattcaggttacggacaaggtgaaatactgattaacccagtacagatcctttcaatctatagcgcattagaaaataatggcaatattaacgcacctcacttattaaaagacacgaaaaacaaagtttggaagaaaaatattatttccaaagaaaatatcaatctattaactgatggtatgcaacaagtcgtaaataaaacacataaagaagatatttatagatcttatgcaaacttaattggcaaatccggtactgcagaactcaaaatgaaacaaggagaaactggcagacaaattgggtggtttatatcatatgataaagataatccaaacatgatgatggctattaatgttaaagatgtacaagataaaggaatggctagctacaatgccaaaatctcaggtaaagtgtatgatgagctatatgagaacggtaataaaaaatacgatatagatgaataa

SEQ ID NO: 409225 - DNA, 429 bp, Staphylococcus aureus
atgaaatacgatgattttatagtaggagaaacattcaaaacaaaaagccttcatattacagaagaagaaattatccaatttgcaacaacttttgatcctcaatatatgcatatagataaagaaaaagcagaacaaagtagatttaaaggtatcattgcatctggcatgcatacactttcaatatcatttaaattatgggtagaagaaggtaaatacggagaagaagttgtagcaggaacacaaatgaataacgttaaatttattaaacctgtatacccaggtaatacattgtacgttatcgctgaaattacaaataagaaatccataaaaaaagaaaatggactcgttacagtgtcactttcaacatacaatgaaaatgaagaaattgtatttaagggagaagtaacagcacttattaataattcataa

SEQ ID NO: 409226 - DNA, 744 bp, Staphylococcus aureus
atgctaactgtatatggacatagaggattacctagtaaagctccggaaaatacaattgcatcatttaaagctgcttcagaagtagaaggtataaactggttggagttagatgttgcaattacaaaagatgaacaactgattatcattcatgatgattatttagaacggactacaaatatgtccggggaaataactgaattgaattatgatgaaattaaagatgcttctgcaggatcttggtttggtgaaaaattcaaagatgaacatttgccaactttcgatgatgtagtaaaaatagcaaatgaatataatatgaatttaaatgtagaattaaaaggtattactggaccgaatggactagcactttctaaaagtatggttaagcaagtggaagaacaattaacaaacttaaatcagaatcaagaagtgctcatttcaagctttaatgttgtgcttgttaaacttgcagaagaaatcatgccacaatataacagagcagttatattccatacaacttcgtttcgtgaagactggagaacacttttagattactgtaatgctaaaatagtaaacactgaagatgccaaacttactaaagcaaaagtaaaaatggtaaaagaagcgggttatgaattgaacgtatggactgtaaacaaaccagcacgtgcaaaccaacttgctaattggggagttgatggtatctttacagacaatgcagataaaatggtgcatttgtctcaatag

SEQ ID NO: 409227 - DNA, 675 bp, Staphylococcus aureus
atgaactatttcagatataaacaatttaacaaggatgttatcactgtagccgttggctactatctaagatatacattgagttatcgtgatatatctgaaatattaagggaacgtggtgtaaacgttcatcattcaacggtctaccgttgggttcaagaatatgccccaattttgtatcaaatttggaagaaaaagcataaaaaagcttattacaaatggcgtattgatgagacgtacatcaaaataaaaggaaaatggagctatttatatcgtgccattgatgcagagggacatacattagatatttggttgcgtaagcaacgagataatcattcagcatatgcgtttatcaaacgtctcattaaacaatttggtaaacctcaaaaggtaattacagatcaggcaccttcaacgaaggtagcaatggctaaagtaattaaagcttttaaacttaaacctgactgtcattgtacatcgaaatatctgaataacctcattgagcaagatcaccgtcatattaaagtaagaaagacaaggtatcaaagtatcaatacagcaaagaatactttaaaaggtattgaatgtatttacgctctatataaaaagaaccgcaggtctcttcagatctacggattttcgccatgccacgaaattagcatcatgctagcaagttaa

SEQ ID NO: 409228 - DNA, 744 bp, Staphylococcus aureus
atgactagagaagaaagaatgaagattgttcatgaaattaaggaacgaatattggataaatatggggatgatgttaaggctattggtgtttatggctctcttggtcgtcagactgatgggccctattcggatattgagatgatgtgtgtcatgtcaacagaggaagcagagttcagccatgaatggacaaccggtgagtggaaggtggaagtgaattttgatagcgaagagattctactagattatgcatctcaggtggaatcagattggcctcttacacatggtcaatttttctctattttgccgatttatgattcaggtggatacttagagaaagtgtatcaaactgctaaatcggtagaagcccaaacgttccacgatgcgatttgtgcccttatcgtagaagagctgtttgaatatgcaggcaaatggcgtaatattcgtgtgcaaggaccgacaacatttctaccatccttgactgtacaggtagcaatggcaggtgccatgttgattggtctgcatcatcgcatctgttatacgacgagcgcttcggtcttaactgaagcagttaagcaatcagatcttccttcaggttatgaccatctgtgccagttcgtaatgtctggtcaactttccgactctgagaaacttctggaatcgctagagaatttctggaatgggattcaggagtggacagaacgacacggatatatagtggatgtgtcaaaacgcataccattttga

SEQ ID NO: 409229 - DNA, 405 bp, Staphylococcus aureus
gtgagaatgttacagtctatcccggcattgccagtcggggatattaaaaagagtataggtttttattgcgataaactaggtttcactttggttcaccatgaagatggattcgcagttctaatgtgtaatgaggttcggattcatctatgggaggcaagtgatgaaggctggcgctctcgtagtaatgattcaccggtttgtacaggtgcggagtcgtttattgctggtactgctagttgccgcattgaagtagagggaattgatgaattatatcaacatattaagcctttgggcattttgcaccccaatacatcattaaaagatcagtggtgggatgaacgagactttgcagtaattgatcccgacaacaatttgattagcttttttcaacaaataaaaagctaa

SEQ ID NO: 409230 - DNA, 1263 bp, Staphylococcus aureus
atgagttatgcagtttgtagaatgcaaaaagtgaaatcagctggactaaaaggcatgcaatttcataatcaaagagagcgaaaaagtagaacgaatgatgatattgaccatgagcgaacacgtgaaaattatgatttgaaaaatgataaaaatattgattacaacgaacgtgtcaaagaaattattgaatcacaaaaaacaggtacaagaaaaacgaggaaagatgctgttcttgtaaatgagttgctagtaacatctgaccgagatttttttgagcaactggatccaggagaacaaaaacgattttttgaggaaagttataaattattttccgaacgatatggcaagcaaaatattgcttatgcaacagttcataatgatgagcaaacccctcacatgcatttaggtgttgtgcctatgcgtgatggaaaactgcaaggaaaaaatgtgtttaatcgtcaagaactgttatggctacaagataaattccccgagcatatgaaaaaacagggttttgagttgaagcgtggtgaacgtggctctgaccgtaaacatattgagacagctaaatttaaaaaacaaactttggaaaaagagattgattttctagaaaaaaatttagcagttaaaaaagatgaatggactgcttatagcgataaagttaaatcagatttagaagtaccagcgaaacgacacatgaaaagtgttgaagtgccaacgggtgaaaagtctatgtttggtttgggaaaagaaataatgaaaacagaaaagaaaccaaccaaaaatgttgttatatcggagcgtgattataaaaacttagtgactgctgcgagagataacgataggttaaaacagcatgttagaaatctcatgagtactgatatggcgagagaatataaaaaattaagtaaagaacatgggcaagttaaagaaaaatatagtggtcttgtagagcgatttaatgaaaatgtaaatgattataatgagttgcttgaagaaaacaagtctttaaagtctaaaataagcgatttaaagcgtgatgtgagtttaatctatgaaagcactaaggaattccttaaggaacgtacagacggcttaaaagcctttaaaaacgtttttaaggggtttgtagacaaggtaaaggataaaacagcacaattccaagaaaaacacgatttagaacctaaaaagaacgaatttgaactaactcataaccgagaggtaaaaaaagaacgaagtcgagatcagggaatgagtttataa

SEQ ID NO: 409231 - DNA, 774 bp, Staphylococcus aureus
atgtgtcctaatagtagcatttattcagatgaaaaatcaagggttttagtggacaagacaaaaagtggaaaagtgagaccatggagagaaaagaaaatcgctaatgttgattactttgaacttctgcatattcttgaatttaaaaaggctgaaagagtaaaagattgtgctgaaatattagagtataaacaaaatcgtgaaacaggcgaaagaaagttgtatcgagtgtggttttgtaaatccaggctttgtccaatgtgcaactggaggagagcaatgaaacatggcattcagtcacaaaaggttgttgctgaagttattaaacaaaagccaacagttcgttggttgtttctcacattaacagttaaaaatgtttatgatggcgaagaattaaataagagtttgtcagatatggctcaaggatttcgccgaatgatgcaatataaaaaaattaataaaaatcttgttggttttatgcgtgcaacggaagtgacaataaataataaagataattcttataatcagcacatgcatgtattggtatgtgtggaaccaacttattttaagaatacagaaaactacgtgaatcaaaaacaatggattcaattttggaaaaaggcaatgaaattagactatgatccaaatgtaaaagttcaaatgattcgaccgaaaaataaatataaatcggatatacaatcggcaattgacgaaactgcaaaatatcctgtaaaggatacggattttatgaccgatgatgaagaaaagaatttgtaa

SEQ ID NO: 409232 - DNA, 207 bp, Staphylococcus aureus
ttgtctgatttggaggaaggtttacaccgtaaaaggttaatctcctatggtggtttgttaaaagaaatacataaaaaattaaaccttgatgacacagaagaaggcgatttgattcatacagatgatgacgaaaaagccgatgaagatggattttctattattgcaatgtggaattgggaacggaaaaattattttattaaagagtag

SEQ ID NO: 409233 - DNA, 675 bp, Staphylococcus aureus; identical to SEQ ID NO: 409227

SEQ ID NO: 409234 - DNA, 240 bp, Staphylococcus aureus
atgagtgataatttgtcattattcattgactatatcaatgataatataatctatggtagtgaaatcaaacgggagaaattagagaatttatttaatcaatttgctataaaaaatgttgaaaagaacattgtctatgatgaactgaaatctttagatattacaatcattgagtcacaggattcatataaaaataaattgaagagattattttcggttctgttgcaaagtaaaaaaatatag

SEQ ID NO: 409235 - DNA, 1257 bp, Staphylococcus aureus
atgatagacaactttatgcaggtccttaaattaattaaagagaaacgtaccaataatgtagttaaaaaatctgattgggataaaggtgatctatataaaactttagtccatgataagttacccaagcagttaaaagtgcatataaaagaagataaatattcagttgtagggaaggttgctactgggaactatagtaaagttccttggatttcaatatatgatgagaatataacaaaagaaacaaaggatggatattatttggtatatctttttcatccggaaggagaaggcatatacttatctttgaatcaaggatggtcaaagataagtgatatgtttccgcgggataaaaatgctgcaaaacaaagagcattaactttatcttccgaactcaataaatatattacatcaaatgaatttaatactggaagattttattacgcagaaaataaagattcatcttatgatttaaaaaatgattatccatcaggatattctcatggatcaataagattcaaatattatgatttgaatgaaggattcacagaagaagatatgctagaggatttaaagaaatttttagaactatttaatgaattagcttcaaaagttacaaaaacatcctatgatagcttggtcaatagcatagacgaaatacaggaagacagcgaaattgaagaaattagaacagcacaaaaagataagacactcaaggaagtggaagcacctaaaggaataattccaaaatataaaaaaggtgtatcaaagactactaaaaatgattcagaaattgaaaaatcaaataaagagaataaattaaccggtaaagttggagaaaaattagcgctaaattactttaatgagctaattgataataaaatagacgaagataagaaagaacagtttaggaatattttaaatgataatccaggctctcaacacggtcatggctatgatttagtagcttttgatccaacaaatacagataaagctgtagaaaaatttattgaaattaaaacatctacatcttctagtattgaggaaccattttttatgtcgctaaatgaaatgtttgctatgaaagaatataagcagaaatatttaatattaagaatatttaatgtttccggtaaagaaccacaattttattttatagatccatatgcaaattattctgaatttaaagatgtagatgatctcattgacaaagtatttaatgtagaagctattcagtataaagtttttggcgaaaaatga

SEQ ID NO: 409236 - DNA, 906 bp, Staphylococcus aureus; identical to SEQ ID NO: 407985

SEQ ID NO: 409237 - DNA, 348 bp, Staphylococcus aureus
gtgtttttttttcggggcgaaaaaagggcaaattatttaaataagggcaaacatgcgtggaaaacacagaggtttaaaaatgccaaaaccgttgatatgacaaggtttttatacgtttgtatacaacgacgaattatctattcgccatcacattatgatgatatgtttattttaaacacacaagctcatgcacgtcttgatcaaatggcacaacagtttgaagttgtttgtaatggcttgaacgaaaatgaaggacaagcaattcaaacgatggatcaatctgcctctctaatacggtcaaacttaattcaagttaaagaacaattagaaaaactagctgtatactaa

SEQ ID NO: 409238 - DNA, 1065 bp, Staphylococcus aureus; identical to SEQ ID NO: 408109

SEQ ID NO: 409239 - DNA, 1509 bp, Staphylococcus aureus
ttgaatgaagaaatcttacgcgaagtagcagatatttttataggtgatgacagagatagcatttatgattataaaactgggaacgaattagtgaggttttttaatcattactttaataaaggggacatatatcaggctccgtttccatctagatggctatatgttgtgaaacatttgcaaactctgattcaggagagaaagatcaatcaatttttcacattaattttaagcaatcactatattaagtatgaactgaaaattgacgaggttgaagcagcaaagcaggctgctaaagcacttaagttgttcaacaaaagattaaatcattatgggtactacataacaggaactaacaatgctagatattttatggataaggatgaagatacggagtctattggttatggagggtatgcgaatatttatttacagaagtctacaggtcttgctgtaaaaaaattgaaagaggagtatcttactgattcttcaattaaaagtaggtttaagagagaatttgatctcactaaatcttttgatacaaatccattgttcattaatgtgtttgaatttaatgaatcagattattcatacacgatggagttagctgatgaaactttgaaagattacattgaaagcaagacaattagtgagctagaaaaagtaaagataataatgaaaattttaaaagcgatgagtcaagcacatagtgaaaataaaatacacagagatatcagttctaaaaatgtattaatgtttagaggaaaagtcaaaatatcagacttaggattaggtaaaaaccttgatgaaattcattcgcatcaaacctttgatacaaacggtgtaggacaatataaatactgtgcaccggaacagatgtatagtttaaaacaagcagataaacaatctgatgtttttagtttaggaagattgataaattttattatgactggaaatgtagttaacaaccatcacctatttagaggtgtatctgataaggctacgaacagtagtaaagaatacagatttgaagatgcaaatgaaatgttgaaaatgctgcagagaattttagagtatcacagtagtgcaaagcacgtcgaaaaatgtcaagaaaagctgaaaagaggagtgtttgatgatgaaagcgaagaatttattatgacacgaagtgatgaacaattatgtcaaatggttctaagttctaataataatgagcaagcgtgtttaattcgttatatgcaaaaaaacgaatcttcagcatgtgatttaatagagagtattaatagaaagtatcaagagttttgtggaaggtttgaagactacgatccttttgctaaattagcatatatgattttatgtaataacttcagttatagagtgaatgaaacagcagctagagtgctaaattatgttgcttggtctgtaaatagattttcggcacaagacttaattaaaggtttaattaatagaggagtggagcctttgattgaagaaaaattaaaggacaattaa

SEQ ID NO: 409240 - DNA, 627 bp, Staphylococcus aureus
atgcaattacaaaccatgagtaattccatatttataaaaaatttgatttttgcaataaatgaatcgttagaatattctgaaaccaactctgtcatggaagttacttttcaaaaggctataggcttcactcaatacaattttgaaggagaaaaattaaaattaaaggatgacttgaaggagttaataagccttgttggacgagaagaagctgtattgatattcgtaaaccgattgaatgaaggtctatattgtattttaaatcaactaatagaatgggataatctaaattatcaattcgccatgtataaagaggctatgcataattacttatttaatacaattgagaaattaaatgatgacacacttttcctcctgcatcaagatggtttaattacattgcctgagcataagtacaaaactgtagccgtaaaaagtacattcggtagtagagattttacttttagatttaaatttccagaagaatcagatacagttaatacacaccaaatgctaaataaagcaatatcaattacaggtagtctagcaaatacacatttggaacaaccccaaaaatacaaggcacattttaaaaaaataccaatcgaaacaaaaaatttgacatcttag

SEQ ID NO: 409241 - DNA, 150 bp, Staphylococcus aureus
atgcaatccatattttcgtttatgcttgaagttatacatctaaaaacagtattggtttcttcgtataaaaataacttattaatagaggtaacattgattaagactgagtatacgtataataagagtgactctgacatctcatttagataa

SEQ ID NO: 409242 - DNA, 897 bp, Staphylococcus aureus
atggaaaaaattctatatcaaactgacgaattcaagctcaaaccttcgggatggtacaaaaccatccctcctaaaaaagatgggggtacggagtttgaaataatgttatctggaccgattgctttcacagatcgttttatagaccccgcgactcgtaaagaaaaagtatttctttcggatttgaataatatagagcttgtcgaaaaggcttcaatccttactgctttgcaattaccctccttaattgaatatggatttaccattaatgaaaagcacattagagatttagggttcgtactgcaacaaatgagaagcaccacacctttatcaacaatatactcaggtgtaggaatgcttcatacattacttggaccattaatttcattagaccagccttatttttctaatgagattactaatagcacttctattatatgtgataacaagtacgatttaataccaaaaggcaatttatcagaatggttacaaatgtataaagaagaagtccatgggaacttatctttagaactagatgtgttgtttggcgtatcttcattagtcactgctttccttaagtatcataataacgtcgagttttcaggaactattttctctttcactggccaatcatcaacaggaaaatcgacagccgctatgttagccgcatcggtagctggcaacccaacaaaaggtactgaaaacctattccggagttggaatgcaacaagaaatgcactagaaggatatcttagcggaaattatggtgtacccatagtattagatgaattatcagcggcaacatttcatgatacaacaggtcttctatattcatttgcagagggacaaggacgtcaaagagcaaatataaatggtgatgtcaaaacacctaaaaactag

SEQ ID NO: 409243 - DNA, 870 bp, Staphylococcus aureus
gtgatttcaacttctgaacatagtattttcaaaaatccagctaaaaatgatggtttgcgtgttcgtactattgaggtgtctgaaaaattcacatcaagtgctcaaaactcagatactataaaaaaagtggttagtcaaaataatggtcatgttttacctataattgctcaattcctattagacaacactaatgatgttacttccctttttcaaaaagaagacagtgttttttatcaattactatcaactgaatccagtaacactggtattcgaatgattaaacattatgcaactctaacaacaacagcccatattttaaatcaatcactagacctacagttaaacgttagcagcataaagaactatttattaagctatcataatgaaacggtgtcagaacgttctcttgcagataaagcgatggatacaatcgtacagtttattgcggaaaacctgggcaagttttcacaacaaacacgtcttgctaatatgattcaaaactttggtatcctctcacttaaagatgactacatcgaagtaaaaattatccgaaatgtattcgataagatgttaacagacagtcaattcgaagacacgaaaaatgttattgatgctttggataatgcaggaaaattagtttccgatcgggatcgaaagacaacaaaaagaaatgcgaaagatgatacaggcaaaagtacttctcttgtcttctaccaaatcaaaattgatttagattatgctgacgttcttggattgcaatcccaaggacgcgacaacgtaattcaaaaacattcaaatccatcacagtttaaaaacacaaacttagaggagtttatgaaaagtgaaaacaccacactcattgtgttttag

SEQ ID NO: 409244 - DNA, 198 bp, Staphylococcus aureus
gtgaccgcttctggctctggtttagacccagatattacggttgacaatgcgaaacaacaagtaaaacgcattgcgaaagaaagaaacatagatgcttcaaaaattaatcaccttattgatgaaaacaaacaagcatcaccaatggcagatgattatgttaatgtcttaaaattgaatatcactttagataaactctaa

SEQ ID NO: 409245 - DNA, 363 bp, Staphylococcus aureus
atgcagacaataagaaaaagtttaggactagtactgattatgtttgttttatgcggatttatcttcccgctgactgtcacagcgcttggacaagtattatttccagaacaagcaaacggcagtttagtgaaacaagatggcaaagtaattggttcaaagctcattggacaacaatggacagaacctaaatatttccatggacgtatcagtgcagtcaattacaatatgaatgcgaatgaagtgaaagaaagtggcggacctgcttcaggcggctcaaactacggcaattcaaatcctgaattgaaaaaaagagttcaagagactattaaacaagaaggaaaaaaatttcaagtgatgcggtga

SEQ ID NO: 409246 - DNA, 2022 bp, Staphylococcus aureus
atggctgaaactactaaaatatttgaatcacatttggtcaaacaggctctaaaagacagtgtattgaagctctatcctgtttatatgattaaaaatccgattatgtttgttgtagaagtgggcatgctgcttgccttaggattaaccatttatccggatttatttcaccaagaaagtgtatcacggctatatgtgttcagtatctttatcatattattactgacacttgtctttgcgaacttctctgaagcattagctgaaggtcgcggtaaagcacaagccaacgctttacgccaaacacaaactgaaatgaaggcacgtcgtattaaacaagacggcagttatgaaatgattgacgctagtgacctgaaaaaaggacatatcgtacgtgtcgcgacaggtgaacaaatcccaaatgacggtaaagttattaagggcctcgcaacagtggatgaatctgcgattacaggtgaatctgcacctgtaatcaaagaaagcggtggagatttcgataatgtaattggaggaacttctgtagcttcagactggttagaagttgagattacttcagaaccaggtcattcatttttagataaaatgattggtttggttgaaggggctacaagaaagaaaacacctaatgaaattgcgttatttactttattgatgacattaacgattatcttcttggtcgttattttaacgatgtatccattggcgaaattcctgaatttcaatttatccattgcgatgctgattgctttggctgtgtgtttaattccaacaaccattgggggattattatcggctatagggattgcagggatggatcgtgtgacacagtttaatatcttggctaaaagcggacgttctgtagagacttgtggtgatgtgaatgtcttgattttagataaaacaggtaccattacctacggcaaccgtatggcagatgcgtttattccggtgaaatcatcaagctttgaacgtttagttaaagcggcctatgaaagttctatcgcagatgacacaccagagggacgtagtattgtgaaattagcttataaacaacatatcgacttaccgcaagaggtcggagaatatattccgtttactgctgaaacacgtatgagcggtgtgaaatttacgacacgtgaagtatataaaggtgcaccgaatagtatggttaagcgtgtgaaagaagcagggggacatattccagttgatttagacgctcttgtcaaaggggtgtctaaaaaaggtggcacaccgctggttgtgcttgaagataatgagattttaggtgttatttatttgaaagatgtcattaaagatggactcgtagaacgtttccgtgaattacgtgagatggggattgaaacggtgatgtgtacaggagataacgaattgacagctgcgacaatagcgaaagaagcgggtgtggatcgctttgtggcagagtgtaaacctgaagataaaatcaatgtgattagagaagaacaagcgaaaggtcatattgttgcgatgacgggtgacggtacgaatgacgcgccagctttagcagaagctaatgtaggtttggcaatgaactcaggaaccatgagtgccaaagaagcggcgaatttaattgatttagattctaatccaaccaaactgatggaagtcgttctaattgggaaacaattattaatgacacgtggctcactcactacatttagtattgcgaatgacattgcgaaatactttgcgattttaccagccatgtttatggcggctatgcctgcgatgaatcatttgaatattatgcatctgcattcacctgaatcagcagtattatctgcgttaatctttaatgcgttgattattgtattattgattccgattgcgatgaaaggcgtgaaatttaaaggtgcctcaacgcaaaccatattgatgaaaaatatgttagtttacggcttaggcggtatgatcgtgccatttatcggcattaagctcattgatctcatcatccaactctttgtctaa

SEQ ID NO: 409247 - DNA, 1677 bp, Staphylococcus aureus
atgagtattgtgttgtttttgattgtatttatcttgctctcactcattgtgagccgatatttatattcagttgctttaaatgtgccatctaaaatagatgttgtttttaatccgattgagaaattgatttatcaactgattggcacgaaattagaacacatgtctgggaagacgtatatcaaacattttttgttgtttaacggattgatgggcggattgtcctttgtattattgcttattcaacaatggctgtttttgaatcctaaccataatttaaatcaatctgtatcgttagcctttaatactatggcatcttttttgaccaatactaacttacagcattatgcaggtgaaacagatttaagttatttaacacaaatgtgtgtcatcactttcttaatgttcacgtcagcagcgtcaggttacgccgtatgtattgcgatgttaagacgtttgactggaatgacagatgtgattggtaatttctatcaagatattacgcgttttattgtacgggtgctcatacctttcgcattgatcatcagtttgtttttaatcagtcagggcacaccgcaaacgcttaaaggtaatttggtgattgagacattatcaggtgtgaaacaaacgattgcatatggaccgatggcgtctttagaatctattaaacatttagggacaaatggtggtggtttcttaggtgcgaactcttctacaccttttgaaaatccgacatactggtctaattacgctgaagctttaagtatgatgttgattccaggttcattagtctttctattcggtagaatgttgaaaactaaactacagattcatccgcatgcgattatgattttcgttgcgatgtttgtaatgttcatcggctttttagtgacatgtctctattttgaatttgcggggaatccagtgttgcatcacttaggtattgccggtggcaatatggaaggcaaagaaacacgtttcggtattggcttatccgctttatttacaaccattacgaccgcttttactacaggaacagttaacaatatgcacgatagtcttacaccgctaggcggcatggttccaatggtattaatgatgttgaatgcagtttttggcggtgaaggtgttgggctgatgaacatgttgatttatgtcgtgttaacggtctttatctgtagtttgatgattgggaaaacaccaagttatttaggaatgaagattgaaggtaaagagatgaaactcattgcgctttctttcttagtacatcctttacttattttggttttttcagcactagcttttattgtgccaggggcatcagatgcgttaactaatccgcaattccacggtgtatcacaagtgttgtatgagtttacatcatcttcagcgaataatggctctggttttgaaggattaggagacaatacggtattttggaacatttcaacaggcattgtgatgttgcttgcacgatatattccaatcgttttacaaattttgattgtatctagtttggtaaataaaaagacctatcagcaacatactcaagatgtaccgattaataatttatttttcagcagtgtattgattatctttattattttgttgagcggcttaacgttcttacctgacttaatgcttggaccaataggcgaacagcttttgctgcacgcatag

SEQ ID NO: 409248 - DNA, 2670 bp, Staphylococcus aureus
atggaaagtacatataaaaaaagagggaaacttaccatttatttaggctatagcccaggggtaggtaaaacgtatgaaatgttatcaaatggtattgatcagtatcaagaaggtgcagatattaaaattggttatatcgaaccccatcaacgccctgaaaccaatgcactggttcaacaattgcctgaaatttcgacctccagccgtaaatttggcagccacacctttcactatatagatgtctctaaaatcatagaagctaatccagatgtggtcttaattgatgaactagcacatacaaacatttcaaaagagcgccatttaaaacgttataaggatatagaagaaattctatcgcatggtatcgatgtctggacaacactcaacatccaacatatcgagagtctaagcggacaaattgcgttaatgacaggtattcaagttacagaacgtgtgcccgaccaattcattacgtcagcagatgcctttgaagttgtggatatttcaccaaatatgttgattcagcgccttaaagcaggaaaagtatataaaaaagaacgcttagaaacagccttttctaatttctttacgtatgaaaatctgacagagctgcgtgaacttacactcagaactgtcgcagatattatgagtcaaaaaggacaacaatataaaactaaacataccgacattacaccgcatattgcggtagctatcagcggcagtatttataacgaacgggtcatacgagaagcaagacgtgctgcctataaagaacatgctaaattcacagctgtgtatattgatgtctttgagacaccgtcagaaagcagaaaacaagatcattatgtccataaaaatctaatgctcgccaaagcgttaggtgcagaaatcaaagtgttgtatgcacaagatattgcgaaagcgttaaccgattggtgtgatctcgcttttgtgacgaagctagtccttggacagtcagaacagccacgttggaaagattactttaaacagtcactcattgaacaaattaatcacgtaccacaccatttcaagttagaaattgtaccgattcattatattcattcagacaaacctacaaatacacctaagcaagctcaaaaatcctctcgtttaactgtagagattatgaagatgcttgtaattcaaacgatctgtgtcttgctcggtatatgggtttacaacttagataaaagcgaatccagtgccattatcttgctgatgttctttatcggtattatcgtgctttctatttggacccaatcctatttaatcggattctttgcgtctatcttaaatgtgtttgtttttaattatttctttacggtgccaagattcactttagaaatgtatcgctttgaatatccgattacgtttgcgaccagtatttttgctagtatctttacgagtgccatcttaaagaatttaaaacatcagcattccttaacagaacggcagttatatcggaccaatattatgctgcaatttaaccagtccattaaagaatcttattcaattgaacgcttattaaatattgctggtgatcagattcatcagctactcaatcaggatgtcacggtattcttaattcaaagtaagaaagtcgctgcttccaactcatttggaaacagaagcatttcaagctcagataagacacatgatgctgagacattgagctgggtcattgaaaatgaaagccgtgccggtaaattaaccgatacctttcctggcagtaaatttttgtgtattcccattggcacaaatccagtcaaaggtgtgatttctatccgcttcaccgacgaaacttacatcgacacctatgacaattcaatattagactctatgttgaacgatattaccctggcaatagagaatgtggatctattaaaacaaaccagacaatccatattgaaagctgaacgagaagccacacgttcaaacttcttgcattcaatttcacatgatattagaacaccactgacttccattatgggcaacttagatatgctgaaataccataacgagcatttaaacgatcaacaacaagcagaactcttaactgcttcttatggcgaagcacaatatctgcataccttagtcacaaatattttatctttgactaagttagaaagctctgacattcaaatacaacgcaccccttatttagtagaagaacttctagaagaatttgaagaaggcctcatacgcagacaccaagcaaatcatgtcattattgaaaatgaggatgacgcttcactcattaatatcgacagtaaattaatactgcaagtgctattcaaccttatcgataatgctttaaagcatgcagaatcacattctgaaataaaactgcacgttcaacatgaaacaaacaaaataaaattcgaaatgatagattgcggaaaaggtattccagaagaagaacgtcaattgatttttaatccctattattcaggagacaactttaaagacaataaaaaagatagtttgggattagggctctatttagtacaactcatcttgaaacaacacaacagtgaattagaatatcaaccgaatacaccacaaggcagtattttttatttttatttgactgttaatccaattgaaatggagggagccatggatgaaaacaacattattggtcgttga

SEQ ID NO: 409249 - DNA, 696 bp, Staphylococcus aureus
atgaaaacaacattattggtcgttgaagatgatgaagcgattttacatttaatcgatgttgcgctaactatgaattattataaagtggttacggcgaagacggggaaagaagcggactttcgcctaagaacagaacaaccagatattatcttattagatttaggcttaccagatattgatggtttatctctcattcagcaattcagagactttgtggacacacctattattgtgattagtgcacgaacagaggaacaaaccattgtcgaagtattagatcgcggtgccaatgattatatgactaagcctttcaatatcgatgagttaagagcacgtatcagagtagcattacgtatgtcacgttctactgagacaattcaaagtcgtttcacaaatggtccattaaccattgatttcgatgcgaaatcagtccttgtcaatgaacagtccgtacatctaacaccgaatgaattccaactcctaacgatattatgccatcatgtcggcaaagtattaacctatcaagtgttattaaaatcactctatggctatgtcaatcatacagaaatggctgccttacgtgtacatatggcctctttacgtaaaaagttgaattatacgcaagacccaaacactgaaaagaaattaatcatcacacatcctagaatcggctaccaaatgcaacacttagaataa

SEQ ID NO: 409250 - DNA, 903 bp, Staphylococcus aureus
gtgggtagtacattctcaacaatcaacccattctcagtcgtcattgcttctaatgcagcaggaacaacttttactgatggtctttattggagaataggcgcttgtatcatcggtgccatatttgttattagttatttattctggtattgtaaaaaaattaaaaaagatcctaaatcctcttattcttatgaagacaaagcagcatttgaaaaacagtggtctgtgctccatgatgacggttcttctgagtttacattacgtaaaaagattattcttacgcttttcgtcctaccattccctattatggtttggggtgttatgacacaaggatggtggttcccagtcatggcatctgcattcttaatctttaccattgtcatcatgtttattgctggaacaggacaatatggtttaggcgaaaaaggcactgtagatgcattcgttaatggcgcttcaagtttagtaggtgtatctttaatcattggtttagctcgtggaatcaacttagtattgaataaaggaatgatttctgacacaatcttgcacttttcatcatctatcgtgcaacatatgagtgggcctttatttatcattgttctgctctttatctttttctgtttaggatttatcgtaccatcatcatcaggattagcagtattatctatgcctatctttgcgccattagctgatacagtaggtataccaagatttgttattgttacaacatatcaattcggtcagtatgcaatgttgttcttagcgcctactggacttgtaatggcaacacttcaaatgttaaacgtgcgctactcacactggttacgtttcgtatggcctgttgtcgcgtttgttttaatatttggtggaggcttactcattacacaagttttaatatattcttaa

SEQ ID NO: 409251 - DNA, 315 bp, Staphylococcus aureus
atgaaaagagtttcttattcagtagaaacaaagtataaagcagttgaaatgaaagcagcaggattttcaacaaaagaaattatgaaagaattaaatattaaaaatagaacacaagtggaaacttggtggcgatggtatcgaaatggggaaagttatagattttcacaacacgttggtaaacaatatacctacggtaaaggattagaagagctgtcagaagtagaacaattaaaattagaaaataagagaaaagatatagaattggatattttaaaaaagtacaaggcattggaaaggaagtggtaccaacagtag

SEQ ID NO: 409252 - DNA, 1056 bp, Staphylococcus aureus
  misc_feature (789)..(798): n is a, c, g, or t
atgaataataaagacatatatagcgatgattttcaaaatgctttagtagacataattttgaacattgataaaataaatgtcaaagaagtttttgatgattcatgtagggctgtagatcaagataataaaaaggatactttaaatcgttctcctaaagatttttccataaatataagtgatatagtaagatatagtatactttgcatggaaaatttaagtagtgacaagattgaagaaaatatcaatatgattaaaaatcatagttcagaattaaatgacaacgacatgtttattcaagaaaaaaataattttacaactaattttaataaattctgcaacgctctaggaataaacatagcaaactttaaatcaggaaaatcatatgtatttaaaccaaaaagtttatttgtattatatgatatactctcaaacaactcagtttatctacacttttttaaaaacggtatcaatgacaaagatatagattcttctaatcgtatcaaagagaacttatattatttcatcaatcatgaaattactgatcaaagagattatgaacatgctctgactaattattatctctattttctagtagacagtaatatagaaattggaatcaaatctatcattattaagattttcactgaaaaaggtatcacttctaaagataaacttcagattcttgaatattatttagatgaaatagacgatttaaacactgaaataagtcccaaaattgctgatgctcatgttaaaaatagtacaaactttttagaaaatgaaaaagtnnnnnnnnnnagtataaacagtaatttagcaaaatatattactcatcgagacaccagagcttcggcacctaaaaatatgctgttatcattaattttaaatagtgacctagtgtctccaaaagacttagaagaaaaagaactcaaatatccaaagaaaataacaaaagaacatcatgataaattaataaaagaaatcaataaagcactagattattataatgataataacaccactccttctgactacttttatataacttcagattaa

SEQ ID NO: 409253 - DNA, 297 bp, Staphylococcus aureus
atgtatttcaatcaatcagataaattcgagcagttaaaaaagaaaatattaggtatttcattcaatttacctgaaggagaagaatttacatttcatgacttgaacagtcgtgcaaatgtacaatgttcaaaagctgtacaacaaaatgttggacgttggttcgcatattttgtaaaacatgcgccacgtgttccatttattattatcggtaaggatactcacggtcacttagtttatcttaaaacaggtcctaatccacactataacagcaacccttcgaaaggaggtgttcgctaa

SEQ ID NO: 409254 - DNA, 1794 bp, Staphylococcus aureus
atgactcaaactaacccttcatttaatccttcaccacgatacaaatcaaaaaaaggttggtataaagacaagcctcccaaagaaaaaggaggaatgcctactgaagttgaaatcgcaggtcctatcgttatcgaaaataagtttattgaccctaaaactaacactgaaaaagtaattattacagacgaggatcaaaaagtaattgttgaatctagtgatattttaacaacacaaaaactgccctctttaatgaaatatggatttagtattaatgaaaaatatacaaaagatttaggttatgcgttgcaacaaatgcgcaaccaattacccatttcctacttatatgaaggggtaggtatactggaaacaccgtttggtcctattgtatcgttaaatgaaatctatactactacggaatttgataataaatctccatctgacgccatttgtgagaatacttatgacttagcacctaggggaacatttgataattggtttaacatgtatctaaaagaggttaaaggttctcttcttttagaattagcagtcgtatttggtatttctgccttagtgacgagtttcctgaagcacaaacatgaaaccgaatttgccggaatcatttttagttttacaggtcaatcctcaaccggtaagtcaactgcagcttctttagctgtatcagtcgctggtaaccctaccaaaggtaatgaaactctctttagaaattggaatgccacacgtaatgcacttgaaggttacttgagtaacaattttggtatacctattgtatttgatgaactctcatcagcaacttttagagatacaacggggttattgtactccatcactgaaggtcaaggtcgtcaacgttcaaacgttcatggagaagttaaaacgcctaagaattggggtacttctgtcatttcaacgtcagaacacagtatttttaatgattcagctcaaaacgatggattacgtgtaagaaccatcgagattaatgaacaattcactacaaatgcgaccaatgctgacaatattaaaaaagctgtagcactaaactatggtcatgttttaccgttagtagctaaatatcttataaatcgtgaagatgaagttattcaatggttttacaaggaagtagattggtttgaagctaaattgaaagatgataaaagcaacacaggcaatcgtatgtttaagcgttatgcagtcattacaacatctgcaaaaatattaggtcgtgttttagctacagatattgatatcgctaaaataagagactactttattgattatcatggtcatacaatctctgaacgctcattagctgataaagctatcgatgtcatcattcaatttgtagcacaaaacagaggtaagttttcagatgaaggtgctttgaaaaatatgtttgagaactatggattaatctcattaaaagatgaccatatcgaagtaaaaatgattgcaaacgtttttaaacagatgctaaacaatcatcaatttcaagatgttaataatgttgtcaacgccttaagagataaaggtttcatattagctgaccgtggacgccaaacaactaaaagaagtgtcaaagataatagcggtaaaaaacaatcacttgtattttaccatctaaaattagatgtagagtttgcatctatcctgggattaactaaagataagtcgttaattcaaaattggacaccggcaaatgataacaaagctgcgaaagaactttttaaatccgctaatgaggggataggcccttcaggagttcacgaagatttctga

SEQ ID NO: 409255 - DNA, 1350 bp, Staphylococcus aureus
atgaaacaagtcataggctatttacgtcaaagtacgatgaaacaacaatctcttgcagcacagaaacaggctatcgaagcaatagccgaaaaacatcatattcaacatatcaacttttatagcgacaaacaatcaggacgcaaagataatcgtagtgggtatcgacaaatgacgcaattaattcaacaagggcaatgtgacatattatgttgttatcgtcttaatagattacatcgtaatctgaaaaatgcattaaaactcatcaaattatgtcaaacataccatgttcatatcttaagcgtacacgatggttactttgatatggatcaagctttcgaccgattcaagcttaatatttttatcagcttggccgaacttgaatcagataacattggagaacaagtcagaaatgggcttcaagaaaaagcaaagcaaggtcgattgattacaacccatgcgccctttggttacgaatatcacaacggagcattcatcatcaatcaaaatgagtcaccaacggtaaaggctgtattcaattattacattaaaggtcatggttataagaaaattgcacagttattagaagaagataacacgtatatcaatcgacaaccctatcaagttcgtaacattatcatcaatcctaattattgtggtcgtgtcaacaatcaatatggccaattcgacaatatgtttccttctattgtttccacaagtatatatgagcaagcgcagagacttcgatcgcaaaaacaaatcaaacagacatcttcggataaccaactaaaacaaaaaatcaaatgcccatgttgtaatacaacacttacgaatatgaccgttagaaaaaagaatcatacattacgttactacgtctgtcctaaaaacatgaatgcttctcgctttgtctgtgattttaaaggcatcaatgcacaaacacttgaagataaagtattagaagtgtgcaaagacttttatcaaaatcaacgcatctacacaaaaattaaaggtgcgattgacaaacgcatcaaaagacaaagaaacatagaaaaacatcacacattgactcaagaacaactgatagaaaagttggcacaaggcatcatcgatgcagaaacgttcagagaacaaacgcaatcattacgtcaacaaccgcaacgcactacatctatcaatggacatcaaatacaacacaccattcaaaatattattcaaaaacgtttcacgttaaacatattgtacccctatattgaaaccattcacattacgaaagataaaaatcttataggaatctatttcaaaaatgaaccactcaatatcgtcaatcaaaccatgcaatcatcgattgcataa

SEQ ID NO: 409256 - DNA, 1629 bp, Staphylococcus aureus
atgcaacaacttaaaacaaaacgtgtcggtatctatgtacgtgtatcaacagaaatgcaaagcacagaaggttatagtatcgacggacaaatcaatcaaatcaaagaatactgtgacttccatcattttgaagttaaagatatatacgctgaccgtggtatttcaggtaaatctatgaatcgacctgagctccaacgtatattgaaggatgcgaaagaaggctatatcgactgtgttatggtctacaaaacaaaccgattagctcgtaatacatctgatcttctcaaaattgtcgaagatttacacaaacaaaatgtcgaatttttcagtttatcagagcgtatggaagtcaatacttcatcgggtaagctcatgttacaaatacttgcgagtttctcagaattcgaacgtaataacattgtcgagaatgtatttatgggtcaaacgagacgtgcccaagaaggctattatcaaggcaatttgccgctgggctatgacaaaatacctaatagtaaacatgaactgatgattaatcaacatgaagctaatattgtgaaatatatattcgagtcctatgccaaaggccatggctatcgtaaaatagccaatgcattaaatcacaaaggctatgtcactaaaaagggtaaaccttttagtattagttctatcacatatatattagctaacccattctatatcggcaaaattcaatttgcgaaatacaaagattggagtgaaaaacgtcgtaaagggcttaatgataaaccagtgatagctgaaggtaagcattcccccattattaatcaagatttatgggataaagtacaaatgcgtaaaaaacaagtcagtcaaaaaccccaagtccatggcaaaggaacgaatctgcttacaggcattattcactgtccccaatgtggcgcacctatggcagcaagcaataccacgaatacacttaaagacgggactaagaaacgtattcgttactattcatgtagtaattttcggaacaagggttccaaagtatgttcggcaaacagtgtaagagctgatgtgattgaagattatgtgatgaagcaaatacttgaaatagtcaaaagtgataaagtcattcaacgcgtagtaacacacgtcaatcaagaaaatcaagttgatggcgctgcacttcatcacgatattgcttataagcaacaacaatatgatgaagtacaaatcaaactaaataacttgattaaaaccatcgaggataatccggacttaacatcagtaatcagaccaagtattcaaaaatatgaaaagcaactcaatgacattacgaatcaaatcaaccaactcaaaaatcaacaaaatgaagataagcctttatttgatgccaaagaaatcagtaaactattacaacacatctttcatgatattaagcacatagaaaaatctcgactcaaagcattgtatctatcagtgattgatcgcattgatattaaaaaagatggtaatcataaaaaacaattctatgtcacactcaaacttaataacgaaatcataaaacaacttttcaataataaacaactcgacgaagtgcatctcagcacttcgtctttgtttttgccccaaacactatatcttactatttag

SEQ ID NO: 409257 - DNA, 351 bp, Staphylococcus aureus
atgaaaacgaccactcaagaactcaaacaatatataactcgtctattccaactatctaacaatgaaacatgggaatgcgaagcgttagaagaagcagcagaaaatattctaccggaacgttttattaatgattccccacttgcacatcttacacttgaaacttatacctactacaataatgaactacatgacctaagtatctatccatttcttatgtacgctaataaccaactcatcagcgttggttatctgaatcattttgacatggactttttatatctcacagatactaaaaatacgattatcgatgaacgtcatttactaagagaaggagggactcaccatgaataa

SEQ ID NO: 409258 - DNA, 312 bp, Staphylococcus aureus
atgaaaatcaatcgatacatcacaagaggtattagtgaatacctatctctagaccttcaaatcttactttggaatatggtaaaagaaagagataatcaacctcatacagattacctacacatttttaaactgcaagaagatgagaatatactctcaatcacacatgaacaagaacaacctgcatacaaattggaatatcactatacaaactatgtaaaaaatcaaaatgcattacctaagaaagtctacgtcattcgtgaagatggcgtagacgctttttattatgtgatgcttttaccagaagaatactaa

SEQ ID NO: 409259 - DNA, 507 bp, Staphylococcus aureus
atgaatacaatcaaaaatacgatatacacagaagctatatttagcaaggatgaaaaacaccgctatttactcaagaaaacatgggatgaaaagaaacccgcttgtacagtgataacgatgtaccctcatttagatggtgtattatcactcgatctcacaactgttcttatcctcaatcaattagcgaattcagaacgatacggtgctgtatatcttgtaaatctattctctaatattaaaacaccagagaaccttaaacatattaaagaaccttatgataaacacacagacatccacttgatgaaagcaattagcgaaagtgacacagtgattctagcttatggtgcttatgcgaagcggccagttgttgtagaacgtgtcgaacaagtaatggaaatgttgaagcctcataaaaagaaagtcaaaaagctcattaatccagccacaaatgaaatcatgcacccactcaaccctaaagcacgtcaaaaatggactttgaaagcataa

SEQ ID NO: 409260 - DNA, 318 bp, Staphylococcus aureus
atgaaggaaatcaatattgtttcactacaaatgataaaaacagatacattaagttatctaaaaaatcgtatttcaaaccctgaggatgcggcagaaatcatgcgttcattcattggaaacagtgaccgagagcatctcattctcatatgtatgaacagtaaaaatgaacctacacatattcaaacactatcgattggatctattaaccaaacggtgattcaccctagagaaatattcaaaacagcgatactcagtaacgcaaatagtataatgctcggtcataatcatccaagtggagatgtattaaccatagtataa

SEQ ID NO: 409261 - DNA, 630 bp, Staphylococcus aureus
atggatacttcaataaaaaacggtattgagataaaaatagcttttgtacaaaaaacagagaaatattttataaataataaagagctagagaaaaaattttatgaatttgaaaaggatattgtaaatccaggtaagtactacaacttaggctataaaaatactcaagcattagtatcaaattttagaaatactccaaataatacactgagccttttttggcatgagaatgatcagtggaaacctttatttaaaagaaaagctaaaaatgattttagtaataaatggaaagaaaaggttcatattattagatggtttctggcatataaaaaagttcctaaaattttggtagataaaattatagcaataatgtatgttaaaaatcatgctgatatgaaatcgaaatttttagaaattgagattaataggatattattatataatgacaatatattgcaagaatgtctttctcaaaaatttctaattaaacaaacagatttttatattattacttatgcaggaatagaattactaaaaaaatatggattagaaaaaataactttaagtaatatactttatgaatttaagagtaacggattacatcagcagaaaaattttgatggtaataaataa

SEQ ID NO: 409262 - DNA, 648 bp, Staphylococcus aureus
ttgaaacaaaatgtagaatttaatcaagcggttattaagtttaataaaagaaataaaataaataaatcatctaatgatgagtatataaaaaattttagaaataaattcggaaaatttctaagtcaaagttttttgaatagtaataatgtaataaagcaagagattataaaaattattaaagatgaatattattattatgatcaagaaaatacgaagaaatatttaataaagttttgtcaagatcttatagaacatataaaagagcacagaaatcaaatcaatgattgtcactttacaaatatattaaataaagatgcagaaaaaactaatagttcaagtatcttaacttcattatttttaactgcaaacaatataccaaataatctatcatctaatttttctaaagcagtggaatattattttgcaaaaaacaaggaaatatatggagatggatatgaaaagtatttagacgagtattttagaaatgttttaggcgaaaaaagttatttaattttgatagatgatttttcagggacaggaaaatcaatcagcgactttattgatgcaataaaaaagtatatactaacattaaaaatagagattattatattttgcatacatataaccgaagatgcagaaaaaaaataa

SEQ ID NO: 409263 - DNA, 720 bp, Staphylococcus aureus; identical to SEQ ID NO: 408188

SEQ ID NO: 409264 - DNA, 423 bp, Staphylococcus aureus
ttgaaaatttatgaccttactttaactactaaatctaacgttacaaacatattctatgaagaagtatttgaattcttatatgaccaaaaaataagaggtttagcacaagtttctgtttctggagaatcaggtttaaaatattctattgattatattgtttctgaaacaaaatcacaaccagaaaaactagttaactttacaaacaacttagatttcaacaaaataactaatgaagcttatatttaccgtgatatcaaaccaaacagaccatccagaaacaaattagaacctatcatgttgataattgtaaatgatgtagatcatccgataaatgaaagagcacaaactgtagcagaacatgaaaaccttgagatattaaaatggtctaataaatcaaaaatcattgaaactttaacctcataa

SEQ ID NO: 409265 - DNA, 405 bp, Staphylococcus aureus; identical to SEQ ID NO: 408172

SEQ ID NO: 409266 - DNA, 237 bp, Staphylococcus aureus; identical to SEQ ID NO: 408991

SEQ ID NO: 409267 - DNA, 543 bp, Staphylococcus aureus
atgactaacacattacaagtaaaactattatcaaaaaatgctagaatgcccgaacgaaatcataagacggatgcaggttatgacatattctcagctgaaactgtcgtactcgaaccacaagaaaaagcagtgatcaaaacagatgtagctgtgagtataccagagggctatgtcggactattaactagtcgtagtggtgtaagtagtaaaacgtatttagtgattgaaacaggcaagatagacgcgggatatcatagcaatttagggattaatatcaagaatgatgaagaacgtgatggaataccctttttatatgatgatatagacgctgaattagaagatggattaataagcattttagatataaaaggtaactatgtacaagatggaagaggcataagaagagtttaccaaatcaacaaaggcgataaactagctcaattggttatcgtgcctatatggacaccggaactaaagcaagtggaggaattcgaaagtgtttcagaacgtggagcaaaaggcttcggaagtagcggagtgtaa

SEQ ID NO: 409268 - DNA, 189 bp, Staphylococcus aureus; identical to SEQ ID NO: 407438

SEQ ID NO: 409269 - DNA, 201 bp, Staphylococcus aureus; identical to SEQ ID NO: 407437

SEQ ID NO: 409270 - DNA, 156 bp, Staphylococcus aureus
gtggtggttaaagaaattttgagactattattcttactagcgatgtatgagctaggtaagtatgtaactgagcaagtatatattatgatgacggctaatgatgatgtagaggcgccaagtgactttgaaaaaatcagagctgaagtttcatggtaa

SEQ ID NO: 409271 - DNA, 1467 bp, Staphylococcus aureus; identical to SEQ ID NO: 406381

SEQ ID NO: 409272 - DNA, 264 bp, Staphylococcus aureus
atgtttttcatgcaagaaaataaaaaagaatttaaagaagtttttctaaccaataaattttcaacatctaaatttttttcacttccagattttgattttaaatttactgacaatttaaaaaagactttactttacggtggtaatcatatattaaacgttgatttatctaatttttatcattctctttatacacatagcataccttgggtaataatgggaaagaagaatgctaaaaaagaaagaaaggtttttcaaatcaattag

SEQ ID NO: 409273 - DNA, 252 bp, Staphylococcus aureus
atgaagagtaaaaaaagaatggaaagattgtacgatgatttatttagtactaattttttaattaattatggttattttgatattactcctaaaaataatcaagatttaacagaattaaacagctacggtaaatcagatgcattttatttgaaaatatttaatatgagtaaattagctgaatatattacttataatccattttacattaaaaaatttttaatgatagaaacatacgtagtactgaaccaataa

SEQ ID NO: 409274 - DNA, 195 bp, Staphylococcus aureus; identical to SEQ ID NO: 409095

SEQ ID NO: 409275 - DNA, 207 bp, Staphylococcus aureus
atgatacaatacttagttacaacattcaaagattcaacaggacgtaagcatacacacataactcgagctaagagcaatcaaagctttacagttgttgaggcagagagtaaagaagaagcaaaagagaagtacgaggcgcaagttaaaagagatgcagttattaaagtgggtcagttgtttgaaaatataagggagtgtgggaaatga

SEQ ID NO: 409276 - DNA, 315 bp, Staphylococcus aureus
gtgattgaaacaggaaagatagacgcgggatatcatggcaatttagggattaatatcaagaatgatattgaaacgttagagatttgggatgatggtaactttagtcgaaatgttgctgggatagacggaaagtatgccccaccacatccatcagataaaattttatttatgaatggtagttatgtcataaacaaaggcgacaaactagctcaattggttatcgtgcctatatggacaccggaactaaagcaagtggaggaattcgagagtgtttcagaacgtggagcaaaaggcttcggaagtagcggagtgtaa

SEQ ID NO: 409277 - DNA, 513 bp, Staphylococcus aureus
ttgactgaatttaatccaattacaacattaaaaattaacgacggagaaaaagattacgaagtagaagcgaaagtatcttttgcatttgaccaaaaagcagaaaagttctcacaagaaaccactgatgaaaacggtagaaaaggaacgacaccaggatttaatgttattttcaatggcttattagaatctcgtaacaaagcgattttgcagttttgggaatgtgcaacagcttacctaaaaaacccgccaactcgcgaacagttagaaaaagcaattgatgatttcattactgagagcgaagacactttaccactattacaaggtgctttagacaaacttaacaacagtggttttttcaagagagagagtcgctcgtactggatgacgttgcacaaagcagtgagcatgtcgaagagcgacgacaaagagatgacaaaaatgggtgtagaaatgatgaaagagaattacaaggaaatcatgggcgcagaaccttacacgattactcaaaagtaa

SEQ ID NO: 409278 - DNA, 390 bp, Staphylococcus aureus
atgatgattaaaaaacttaaaaatatggattggttcgatatctttattgctggaatactgcgattattcggcgtaatcgcactgatgcttgttgtcatatcgcctatatacacagtggctagttaccaacacaaagaagtacatcaaggaactattacagataaatataacaagagacaagataaagaagacaagttctatattgtattagacaacaaacaagtcattgaaaattctgatttattattcaaaaagaagtttgatagcgcagacatacaagctaggttaaaagtaggcgacaaagtagaagttaagacgattggatatagaatacactttttaaatttatatccggtcttatacgaagtaaagaaggtagataaaaaatga

SEQ ID NO: 409279 - DNA, 237 bp, Staphylococcus aureus
atgattaacatacctaaaatgaaattcccgaaaaagtacactgaaataatcaaaaaatataaaaataaaacacctgaagaaaaagctaagattgaagatgatttcattaaagaaattaatgataaagacagtgaattttacagtcctatgatggctaatatgaatgaacatgaattaagggctatgttaagaatgatgcctagtttaattgatactggagatggcaatgatgattaa

SEQ ID NO: 409280 - DNA, 288 bp, Staphylococcus aureus
gtgacgcaatacttagtcacaacattcaaagattcaacaggacgtaagcatacacacataactaaagctaagagcaatcaaaggtttacagttgttgaggcagagagtaaagaagaagcgaaagagaagtacgaggcgcgaaatgcgccagttgatggagcgaccaacttaaacgatatcaaatcaaatattggtatctttcacgttgaaaaagtcgaaccaaacgagggtatggtggatattaatattgagacaatgaaaccattcgaggaggcagatgatgattaa

SEQ ID NO: 409281 - DNA, 726 bp, Staphylococcus aureus; identical to SEQ ID NO: 407376

SEQ ID NO: 409282 - DNA, 630 bp, Staphylococcus aureus
atgactattatgttgctaattggcgtactgggtggatttatatctggattaataggtattgggggcgcaattattatttacccagctattcttatattgccaccattaataggtatacctgcgtatagtgcatatattgcttcgggacttacctctagtcaagtatttttcagtacacttagtggatcattaaatgcaagaaaacaaccagctttctctcctaaacttgttatatatatgggagggggtatgttgattggaagcatgttaggggcaattttagctagtttgtttaatgctacttttgtaaatacggtatatgtaataatcgccatacttgctttaatattgatgtttattaaagttaaacctactacacaagagacgaaatctaaacctttgctatttattatagttggatttggaattggtgtaatttcgggaattgtgggtgcaggtggagcatttatcatcattcctgtattattagcattatttaaattaccaatgaatacggtagtgaacaatagcatagcaattgcttttatatcttcagtaggggcattttttataaaattaatgcaaggatatataccagtagaaagtgcaatttttttgataattgaatga

SEQ ID NO: 409283 - DNA, 261 bp, Staphylococcus aureus
atgacttatgataaaaaaatgattaatcgtataaatagaatacaaggtcaattaaatggtgtcgtaaaaatgatggaagaagaaaaagattgcaaagatataattacgcaacttagtgcatctaaaggttctatacaacgtttaatggggattataattagtgaaaatttaatagaatgcgttaaaacagcagaagaaaataatgaaagttctcaagaattaattaatgaagcagttaatttattagttaaaagtaaataa

SEQ ID NO: 409284 - DNA, 1065 bp, Staphylococcus aureus
atggaacaatacaaagaagtacacattaattcattaaacaaagaagaattagaaaaattggcaaaaatgggtcaattgattgatgttagaacaaaagaagaatatgaattaggacacattaacggttcaactttacacccagtagaagagattaaatcattcaataagaatagcaacaaaacgtattatatacattgtaaaagcggtaaccgaagcactaaagcttgcgattatttagccaaacaaggttatgatgtcgtgaatttaaagggtggatataaagattatgaagcaaagaacttcaatagtgctcctttaatagaaaaagatattgaaatcaaagagaatcgtaaacaatttgattttagaggtcttcagtgccctggacctattgttaatatcagtaaagaaattaacaatatttcaacgggtgagcaaatcgaggtaacagttacagatcctggtttcaatagtgatattaaaagttgggcgaaacaaacagggaatacccttgtaaatcttactgaagaagcaaatgtaattaatgcaattattcaaaaagaaaagccaaaagaatttgaaatcaatgacactgctacaggtacaacaattgttttatttagcggtgagttagataaggcagtagcagcaatgatcatcgcaaatggcgctaaagcagcaggtaaagatgtaactattttctttactttttggggcctcaacgcattaaaaaaagcgcaatcaactcgcgttaaaaagaaaggtatttccaaaatgtttgaccttatgttacctaaggatccaatacatatgccattatcaaaaatgaatatgtttggactaggtaatattatgatgcgttatgtaatgaacaagaaaaatgttgattctttatactcacttatcgatcaagcaatcgatcaagatataaagttaattgcttgtaccatgagtatggatgttatgggaatttcaaaagaagaattaagagatgaagtcgattatggtggcgtaggtacttatattggacatactgagcaagcaaatcataacttatttatctaa

SEQ ID NO: 409285 - DNA, 939 bp, Staphylococcus aureus
ttgtttttcaaacaattttatgaagacaatttttcacaagcatcttatttaattggatgtcaacgtacaggagaagcaatgattattgaccctatacgagatttaacaaaatatttaaaagttgcagataaagaaggattcacaattactaaagctgcagaaacacatattcatgctgattttgcttcaggtattagagatgtggcaaataaattgaatgcaagtatatacgtatctgatgaaggtaaagatgaatttaattataaaaatatgcctaaacaaacacatttcgttaagcatcaagatattatctatttaggaaagattaaattagaagtcttacacactccaggccatccccctgagagtattagttttttacttactgacgaaggtgggggttccagtataccaatgggattatttagcggtgacttcatctttgttggtgatgtaggtagaccagatctattagaaaaagctgtaaatgttgaaggttctacaaaaatcggagcaaaacaaatgtatcagtccatacaatttgctgcaacattaccagactatattcaaatttggccaggtcatggtgcagggagtccttgtggtaaagcgctaggttcattacctacaactactttgggttatgagaaaataaacaactgggcttttaatgttaaagatgaaacttcatttatcgaaactttaacactcaatcagccagctccaccacaccatttttcacaaatgaaaaaaataaatcaatttggtatgcaaatgtaccaaccatataatgtttaccctagttcaagcaatacacaaactgcttttgatcttcgaagtaaagaagcattccatggtggtcatatgcatggaactatcaatattccttttaataaaacttttataaatcaaattggttggtatttagattatgactaa

SEQ ID NO: 409286 - DNA, 306 bp, Staphylococcus aureus
ttgccacaaacaaatatcgtcacatcatctattcatagttctgaaatgactggtgaagaacataatgtattagatgttcgtaatgatgatgaatggcgtaaaggtcatttaaaacaagcaattcatattcctcacggtaaacttttaaatgaagatatacctttcgataaaaatgacctaatttatgtacattgtcaatcaggtgttagaagttcaatagcggtaggaatattagaatataaaggatttacgaatattgttaacgttagaggtggctatcaacatttaccagcatttttaaaatag

SEQ ID NO: 409287 - DNA, 1110 bp, Staphylococcus aureus
gtgctaagggaaatttataaccatcataatatttcgcgtactcaaatatctaaaaatcttgagattaataaggcaacgatttctagtattttgaataagttaaagtataaatctcttgttaatgaggttggtgagggtgatagcacgaagagtggtggtagaaaacctattcttctgaaggttaatcatctttatggttattttatttctttggatttaacttatagttctgttgaagtgatgtacaattattttgatggtaatgtcattaagcatgaatcttatgatttacctgatgaaaaggttagtagtatattaagcataataaaaaaacatattgatattcaggagaaacttgatacttataacggactattaggtgtgtctgtttctatacatggagttgtggataatgagcagcatgtgacatatttaccattccatgaaactgaaggaatttcaattgctaagaaaataaaagaaattactaatgttccagtcgtagttgaaaatgaagcgaatctttcagcgttatatgaacgtaattttaatcataatttatcctacaataatcttattgctttaagtatacataaaggtattggtgctgggcttattattaataatcaattgtatcgtggtgcaaatggggaagcgggtgaaattggaaaaacacttgtctcaaaagttagcgataatgtggagatctttcataagattgaagatattttttcacaagaagctttactgcataatttaagtaatcaactaaatgagaagatgacgcttagcaaattaattcaattttataatgaaaaaaatccagtcgtagttgaagaaatggaacaatttataaataaaattgctgttttaatacataatttaaacacccagtttaatccgaatgcaatttacattaactgtccattgttcaatgaaatgcctgaaatattagaagcaattaagaaccagttcaaacaatattcacgtaacgaaattcaaataaagttaacatctaatgtcaaatttgcaactttgctaggtggtacattagcaattatccaaaaagtactacagattaatgatatttacttagatataaaagcataa

SEQ ID NO: 409288 - DNA, 177 bp, Staphylococcus aureus
atgaacacactatacaaaacaaccctcctcatcacaatggcagttgtgacgtggaaggttgtaaagattgagaaaaacacaagatttaaacttagaaattttgattatccaaaaattaataatgctcagagcaaatcattgttggatattgctagtcacgatttaaaagatatttaa

SEQ ID NO: 409289 - DNA, 162 bp, Staphylococcus aureus
atgagtgacacatataaaagctacctagtagcagtactatgcttcacagtcttagcaattgtgcttatgccattgctgtacttcactacagcatggtcaatcgcgggattcgcaagtatagcgacattcatattttataaggaatacttttatggagaataa

SEQ ID NO: 409290 - DNA, 1326 bp, Staphylococcus aureus; identical to SEQ ID NO: 409127

SEQ ID NO: 409291 - DNA, 327 bp, Staphylococcus aureus
atgtttactacgtataaaaatattaatgaacttgaaaatgcctatgatgaagaaagaaaacaattgaatgatgcattcaatcaaattgatgaattaagacatcaaacacgcaagaaatgtgaacaaatgtatgatcatttcttatatctcaaacataaaatgaattatagtgaagacgctatgatcaggatgacacgtattatagaatctttcgatagagaaacgaatcaacgtatccgacatcacgaaatgaaattagaagattataaagatgagttaagaagagaatatctaaaacaatctgacagaattgaaggagatgaataa

SEQ ID NO: 409292 - DNA, 432 bp, Staphylococcus aureus
atgataccggtagagtgggaaaaagtatatacaatggcttatatagatgatggaggaggtgaagtattctttaattatactaaaccaggtagtgatgacttgaattattacaccgatatacctaaggagtataacatttctgtgcaagtatttgatgatttatggatggatttatatgatttgtttgaggagttaagagatttatttaaagaagaagatttagaaccatggacatcatgtgaatttgattttacaagtgaaggtaaattaaaagtttcatttgattatattgattggataaatacagagtttgatcaattaggccgtgaaaattattatatgtacaaaaaatttggggttataccagaaatggaatatgaaatggaggaggttaaacaaatcgagcaatatattaaagagcaagaagaatag

SEQ ID NO: 409293 - DNA, 300 bp, Staphylococcus aureus
atgtttggatttaccaaacggcacgaacatgaatggcgaattagaagattagaagagaatgataaaacaatgcttagcactctcaatgagattaaattaggtcaaaaaactcaagagcaagttaacattaaattagataaaactttagatgctatccagagggaaagacagatagacgaaaaaaataagaaagaaaacgacaaaaatatacgcgatatgaaaatgtggattctcggtttgatagggactatcttcagtacgattgtcatagctttactaagaactatttttggtatttaa

SEQ ID NO: 409294 - DNA, 177 bp, Staphylococcus aureus
atgatgaagatgatttatccaacttttaaagacattaaaactttttatgtgtggggttgctataaaaatgagcaaattaagtggtacgtagacatgggtgtaatcgacaaagaagaatatgcattgatcactggtgaaaaatatccagaggcaaaagatgaaaagtcacaggtgtaa

SEQ ID NO: 409295 - DNA, 135 bp, Staphylococcus aureus
atggttgcaagtatgcaaatgcagatgacgcaagtgaacatgttgacaatgcaattgacgcaacaaaacgctatgttaacacaacagttgaccgaactgaaaactaacaaaacaaatactgagggggacgtttaa

SEQ ID NO: 409296 - DNA, 618 bp, Staphylococcus aureus; identical to SEQ ID NO: 407393

SEQ ID NO: 409297 - DNA, 960 bp, Staphylococcus aureus
atgaaaacacgtatagtcagctcagtaacaacaacactattgctaggttccatattaatgaatcctgtcgctaatgccgcagattctgatattaatattaaaaccggtactacagatattggaagcaatactacagtaaaaacaggtgatttagtcacttatgataaagaaaatggcatgcacaaaaaagtattttatagttttatcgatgataaaaatcacaataaaaaactgctagttattagaacgaaaggtaccattgctggtcaatatagagtttatagcgaagaaggtgctaacaaaagtggtttagcctggccttcagcctttaaggtacagttgcaactacctgataatgaagtagctcaaatatctgattactatccaagaaattcgattgatacaaaagagtatatgagtactttaacttatggattcaacggtaatgttactggtgatgatacaggaaaaattggcggccttattggtgcaaatgtttcgattggtcatacactgaaatatgttcaacctgatttcaaaacaattttagagagcccaactgataaaaaagtaggctggaaagtgatatttaacaatatggtgaatcaaaattggggaccatatgatagagattcttggaacccggtatatggcaatcaacttttcatgaaaactagaaatggttctatgaaagcagcagagaacttccttgatcctaacaaagcaagttctctattatcttcagggttttcaccagacttcgctacagttattactatggatagaaaagcatccaaacaacaaacaaatatagatgtaatatacgaacgagttcgtgatgactaccaattgcattggacttcaacaaattggaaaggtaccaatactaaagataaatggacagatcgttcttcagaaagatataaaatcgattgggaaaaagaagaaatgacaaattaa

SEQ ID NO: 409298 - DNA, 303 bp, Staphylococcus aureus
atggatgcaaaagtaataacaagatacatcgtattgatcttagcattagtaaatcaattcttagcgaacaaaggtattagcccgattccagtagacgatgagactatatcatcaataatacttactgttgttgctttatatactacgtataaagacaatccaacatctcaagaaggtaaatgggcaaatcaaaagctaaagaaatataaagctgaaaacaagtatagaaaagcaacagggcaagcgccaattaaagaagtaatgacacctacgaatatgaacgacacaaatgatttagggtag

SEQ ID NO: 409299 - DNA, 486 bp, Staphylococcus aureus
atgactgctggaacacaacgagctatggattttgaaagtcatcgcttatgcacgattaaggcaaagcaagagctacgaattggtacgtggtcaattttaccatttgacattgaacatgatgctaacgagcctgtggctttcttattacaaagcacattaggttataaggtcctgtatgttactgatacgaagtatctgaaatacaaatttaacggcattacgcacatgatgttagaagttaattatatctatgaacaaatgcaagaaaacataaaaaacggcagtgtacacagcgcattagcaaacagaattatggagtctcattttagcttagaacatgctatcggaatgttaaaagcaaatgatttaactagactcgaagaaatacatttaattcatttaagtagtcaaaattcaaatgcaaaatacattaaaagtgaaatacaaaaagtgacgggcgcgcccgtttatgttggaggtttataa

SEQ ID NO: 409300 - DNA, 462 bp, Staphylococcus aureus; identical to SEQ ID NO: 408096

SEQ ID NO: 409301 - DNA, 189 bp, Staphylococcus aureus; identical to SEQ ID NO: 407433

SEQ ID NO: 409302 - DNA, 699 bp, Staphylococcus aureus
atgacaaaaataaatagtcgaagcgcccaaattaaagacacatttaatcaaacattaaaattatatccaaccaaaaatcttgaagacttttatgataaggaaggctttcgagatcaagagtttgaaaagggcgacaaaggcaattggattgttgattctgagatggtaattgagctgaaggataaaaaaatggaatctagaagtatggtgctctatataaatcgtaatactagaacaacgaaaggtaattttattgttagagaattgtgggaagatagtaaagggtatgcacaaagtaaagatacaaaatatccagtgaaaatggaacataatcgaattatcccaacgaaaccgatagctgatgataaattaagaaaagaaatagaaaactttaaattctttgtacaatacggtgactttaaagatattaatgattataaagatggtgacatttcatataatcctaatgttccaagttattccgcaaaatatcaattgaaaaacgatgattacaatgtgaagcaacttcgaaaaagatataatattccaaccaacaaagctccgaaactattattgaaaggtgatggtgatttaaaaggttcatcaataggatcaaaaaatctagaatttacctttgtagaaaataaagaagagaacatttatttttctgatagtattaatttcaaacctactgaatag

SEQ ID NO: 409303 - DNA, 333 bp, Staphylococcus aureus
ttgttcgacggtggcgcaaatggtgtaggtacaacaatcaatctaactgaaccgtacacaaactattctattttgttggtaagtggaacttatccaggtggcgttattgagggattcggactaactgcattacctaacgcgattcaattgagtaaagcgaatgtagttgactcagacggcaacggtggcggtatttatgagtgcttactatccaaaacaagtagcactactttaagaatcgataacgatgtgtactttgatttaggtaaaacatcaggttctggagcgaatgccaacaaagttactataactaaaattatggggtggaaataa

SEQ ID NO: 409304 - DNA, 207 bp, Staphylococcus aureus
atgaaaatcaaaattgaaaaagaaatgaatttacctgaacttatccaatgggcttgggataaccccaagttatcaggtaataaaagattctattcaaatgatgttgaacgcaactgttgtgtgacttttgatgttgatagcatcttatgtaatgtgactggatatgtatcaattaacgataaatttactgttcaagaggagatataa

SEQ ID NO: 409305 - DNA, 219 bp, Staphylococcus aureus; identical to SEQ ID NO: 407417

SEQ ID NO: 409306 - DNA, 348 bp, Staphylococcus aureus; identical to SEQ ID NO: 407407

SEQ ID NO: 409307 - DNA, 348 bp, Staphylococcus aureus
ttggtagctggtaatgttaaaacatcagctaaaaaccaaaaaaatccaccagtgccagcaggttatacacttgataaaaacaatgtaccgtataaaaaagagactggttattacacagttgccaatgttaaaggtaataacgtaagggacggctattcaactaattcaagaattacaggtgtattacctaataacgcaacaattgaatatgacggcgcatattgcatcaatgggtatagatggattacttatattgctaatagtggacaacgtcgctatattgcgacaggagaggtagataaagcaggtaataggataagtagttttggtaagtttagcacgatttag

SEQ ID NO: 409308 - DNA, 264 bp, Staphylococcus aureus
ttgcaacagattggctcaaaagttagtacagaagattttgaggaattcaaacaaacactaaacgatttatatgctccaaaaaatcataatcatgatgagcggtatgttttgtcatctcaagcttttactaaacaacaagcggataatttatatcaactaaaaagcgcatctcaaccgacggttaaaatttggacaggaacagaaaatgaatataactatatatatcaaaaagaccctaatacactttacttaattaaggggtga

SEQ ID NO: 409309 - DNA, 228 bp, Staphylococcus aureus
atgtacaccaaattattaggagaattaactaaagagggtaaagtgaattatagaaccaaaaaacgggtagaaattgcttatagtatgagaaatataatcaaccattcacaagccggtgcagtagccaaaggtgattgcgacttccttttaaacacactaaaggacatcgttgatgaaaacgaaagaatattaaccgaatacagtaaatcaattaataagacggaataa

SEQ ID NO: 409310 - DNA, 195 bp, Staphylococcus aureus
ttgaaattatggacttacattggtaaaaaagtattgatcgagttaactaatgggcaaaaatttattggagaagttacaaattatgacgatgaaatagataacgaaagtggagaagattctatacatttagatgacggaatagatttatatgattttgatgaaagccaaatcaaatatattgaagttttaaaataa

SEQ ID NO: 409311 - DNA, 642 bp, Staphylococcus aureus; identical to SEQ ID NO: 405408

SEQ ID NO: 409312 - DNA, 933 bp, Staphylococcus aureus
atgaaaaaattcattggatcagttttagctacgacattaattttagggggatgttccacgatggaaaatgaatcaaaaaaagacacaaaaacagaagcaaaatctgtaccagaagaaatggaagcttcaaaatatgtaggtcaaggcttccaaccacctgcagaaaaagatgcgattgaatttgcgaagaagcataaagataaaattgccaaacgaggcgaacaattttttatggataacttcggtctaaaagttaaagctaccaatgttgtaggtagtggcgacggtgtagaagtttatgtgcattgcgatgaccacgatatcgtatttaatgcgagtattccctttgataaatcaattattgacagtgatagctcattaagaagtgaggataagggcgatgatatgagtactttagttggtacagtactcagtggatttgaatatcgagcacataagcaagagttggatagtttaacagaagttttgaaagaatataaaagtaaatataaatatactggttatacagaaaatgcaattatgaaaacgcagaatagtggttttagaaatgaatattattatttgactgcaattccatatactttagatgaatataaaaagtattttcaacccttaatcaaagaggatgataagacttttagggacggtatgaaaaactcaaaaaaacaacttaaagataaatctcgtccatatgttgttacaactttatttagcactaaagacaattacactaaagataatacaatagacgagatgattgatttttctgaagtactaaaaaagaaaaagaatattcctcatgatttgaatgtttctcttcaaattactgataaatatataaattcagcaagacctagttacagtaagaaagattcaatagaagtaggagtatttattcatgaaaaaaattaa

SEQ ID NO: 409313 - DNA, 615 bp, Staphylococcus aureus
atgatattccacatcctttggcatagcctgattggtctaatgttttttctaacttgcttcccaggtatattgcttatttgcattagaaaagtaccgtattttaaatacctaactgaatttcacaagtacattttggtactaattatcgtactgataatagatatgtgtttatttttaagttatattaatatctacttatgtgtatttgttataatcattacaccagtaataatttatattacagaaaaatcattactgtttaacaaaaatttgttcgacttttataacaaaaacagcaaatttattttaagtgtgttaattgcatatccaatactagaagaattaaatttccgttacttcttgtataattttagcttgatatatcattatcattatattcagtacatcatcttatcagtactaacctttgtgttctctcattttctatatcaaggaaagtcttctataataaaaatcttttttgctacaatgcaaacactgatttatttgtgttttagagatattttcatcaatataattgttcataagatatttaatatattagtatttagtagccaaatgaagaaaataaattattctataataacaaaatag

SEQ ID NO: 409314 - DNA, 1326 bp, Staphylococcus aureus
atgataacctttaaaaataatttgaattataatctgtatagacaaaacttattaggcggaaatgtagcaggtatttggaaagataacagctttttcttaggtttaaattcatatccaattatgaattatcattatgtcacagcccaatttaataattttgaaaaaaactttttaagtgaagatttcaaagtgaattatcatttaagtggttacggcattcattataatgaagcactagcgtcattcttaggagaaagttcagaaagatatgcttttacgctgttgtatcaaaatttaaaaagaaaaatcatatatgcgtcacatgcacaaatttcagaacaattaaaaaattcaaatagcttaatattacctttaaatttaatcaatatatattttgaggaaaaagactctaaacattatatttgtgaagatgatgtcattcaatggattccacttaaatctctgtatcaaccagaccgtgatgttttaatacctttacaaatgcttgttctatttgataaaacgatatttaaagatgaaaagcagtttacgaatagtggtgtttcaactggtacagctagtcatgaaacatttgaaaaaagtttaaccaattctattattgagattttacaaatagattcatacaatttgtggtggtacggaggcattgaaggaaaggcgatttctgtaaatattgctgaaaaactaaatgaatggtttaaacgggaaagcattgtgcacaaatttcttgataattttgatgtatccttcactgatattagctttgataagccaattcatgttgttgtctgtgaggttaaatctaaagctaaagatttaagcttgcctaaatatgttgttggagttcaaggtgatacgaacttagaacagtgtatctatagaagcttattagaatgtgttaccgtgttagagtatacaatgactgaagtttggagtaatactacacattttaagaacatctcagaaaatattaaaaatcatcctattgataatttagatgataatgttatgtattatgctaaatatggtttgaattttaatatgcataaaagaaaaatcaccttccaaaatattaaaaacgccaaaaatttacatgagatcatcaatgagttaaaacatttaagttattatgcgtgttatttagatattacgcccgtggaattctataataaaaatttagttgtcgttagaacttttatacctgaattattgacgatagctctaccatcatatccaccttatctgcatccaagatataaagaaatagggggaataataaatgatattccacatcctttggcatag

SEQ ID NO: 409315 - DNA, 930 bp, Staphylococcus aureus
atgaaaacgtttattaaacctaaagatttgtttgtcgaagaaaacaatagtgagtatatattaaaaaaggggtatttacatcaacattcaatagctattgataaagaagaaagcagtaaaaattttatagtcaaattcaaaacgttaattgctgaaaatcaaatagaactaaatgaaaatgacgatgttatagacgattttaataaactaacacaattgaatttaatacataaaaaaatcgatacttttaataaaatttgtattattacagacaaggcggccaaagcattttttaaagaccatctcgatcaagttgatgaaatatatgagtttaatgaagttctagaaagacatgaaattgaaaccttgaataatcaaaaaagtaatttatctataaatgaagttgtaaaaaaacagcaatcaaagttagcaaatatgaatgtttttgttattttatcatacgccaatcaaccttttattaaagcgtttaactttttaacaaacttgttggatataacttatacacttgctttttatgataatgaaaatgtatttttcacaaatattcaacatggagagacagggtgttatgaatgtttagaacgacaattagtttctaagtttcctggtaagatagaaaattatttagtaccggatgagcaaaatcaaggtatatacaatctcaaattatacagttatatattaagtataatgataaatgaaattaataatatagaaatttatggagattcaacactaataggaaatgtacttcatttttatttacccacatatgaatacaactttaatttcaataagagacagtctacttgttcgacatgttcgacgataaataatgttttgtttaaagagcaaaatataaagtcagctaatattttaaaaagggtgttagaaaatgataacctttaa

SEQ ID NO: 409316 - DNA, 879 bp, Staphylococcus aureus
atgattaattatcagttgaaaggaatgtttaatcagcattcgttatttaaattaaatgacgataatattgcaaataatgataatcgaaataactttgctcaaattattttaggaaatcaagaatcagaatctttaaagtacttattaaatgtaaatcatcagagacttagtgacttcaaaagcatgttagcttataatgaaacgaattatgcagctttagttaatgaacatcaaattttgaatgaaattaatgatgaagatacaaggtcacttcctaaaagtgataaaaaaataaaagaatctttttataatgttttaaatcacagaaaaagtacaaggaaattcacatcttttgaaatggcttgtaaagaattgtcaacaatacttaaattttcttttggtatagcacctagaaaagtggaatatggggatataaagacaagtacgcgattctatgcatcggcaggtgggttatatccgattgatatatatctttatatcaacaatgtagaagattatgataaaggtatttatttataccaaccgataagtcactcattattaaaaattgtggctcaaaaggacataaacacagatgacattttagaaggtgataatatagatatcgaaaattgtaattttttagtcttttttggctataattttaattctagttttttgaaatacggtgaattagcgttattaaatagtttgatagaaattggttgtatgtcacataattttgatttagtcattacgtcattaggctatacaggatgcccaatagctggctttaagaaaaataatatagaaaaattacttgaactagatcatgttaatgaacatatactatttacgaatatatgtgggaaggaatag

SEQ ID NO: 409317 - DNA, 294 bp, Staphylococcus aureus
atgttgaagagacaagaaatgcgagtgattattgaaattttagcaggtattgtgttatccgccatcatcacagccatcgcgatttcaacaggttactttattatcaataaaaatggttatgcgaattttgatgtaaatttattaggattaaatttatacagaatacaaaattatggcgttagtggagagccaattataacaaatattatgtttttaggtgtgatcttatccatattattagtgattattattgaattgcttgtagcaactaacaaaagaggtaaaaagcaatga

SEQ ID NO: 409318 - DNA, 735 bp, Staphylococcus aureus
atgataaataaaattttgttaagcataaaaatgcaatttagagttcctatatcggtgttcttttcattaatttttccaatcatcatgataatagttataattttgtcttatggaaattttagtataggaaatggaagacactttatagataaatattttttaattagtacgagtattggactgctaccaattgcttttattagttttccaatttggttaagtgagagcattgagaatgagacgctgaagcgattaaaatattttgaagtaaatattagtagtttaatcgtttctaatattatttcatactgcttcttagcgatttttagtgttattttaaatatcattattggtaaagtatttttctcattaactttaccaaacacgcaatattttatagccttctttttccaaattttttataacattatcgctctattaatgataggaacatttttagctttattaataagaaagagtaaggttttattgccttttggaatgatattgctttttcttacttatatgattattggtgtttttgttcagtatggagagctccctaatgttttaaaggaaataggaaattggataccaatcaaatatgttactaatgatttttattcaatttggataaatgaacgtatgtgggatgcatcatttttaaaattaaattcattgtatatcatagtgacgagtgttttaagtttatttatttataagtttaagaaatga

SEQ ID NO: 409319 - DNA, 267 bp, Staphylococcus aureus
ttgtattacggcagtatagatcaatttttctcaaaattttatcactatgcactgattgaaatagagaatcaagaattagattatcaatttagagttgttattgaaaaaataaatgccgatgtatattttaatactaagattgttacccataataaagagcaaatgaatgaagttattaatatattaaatgaacgaaaaatagaatttaaaataaacatgcaaaatatatactcaacatatttaatatcaactttggaggaaatatga

SEQ ID NO: 409320 - DNA, 471 bp, Staphylococcus aureus
atggaaagtttaatgactattaagaatttaaaagttgatattaataatagaaaaattctaaaccttaataatagtactataaatatttatagtaaagataaaatagcactgatagggaaaaatggcgcgggaaaaacgactttgattaattgcttgttaaatgagataaaatatagtggcgtaattgacagaaagataaagtctaaagatataggaattgtttttcaagagaataagtatggggatttaatcaaagtacatgaattaatttatttaataacagcttatagcaaaagaagtaaacaatttaaagcatttacgaaagctttctcattagaacatcttataaataaattcgttaaagatttatccttgggggagcaaaagcgcttaactgtaggattagtattaaatgaacaaaaaaagttatacataactttgatgaggttgaaaattgggcgaataaattaa

SEQ ID NO: 409321 - DNA, 4719 bp, Staphylococcus aureus
atggaaaatcaagaaaattacaatgcttctagttttgatgatttaattagccaaattaatgagacagcacaagatgttcaaagagagcgaggaacactttttgaaagattagtattagcctatttaaaaaacgaacctacgtataaaaatctttataaaaatgtatggttactaaaggatgtaccttcagaatttaatatttcaaaaaaagatttaggcgtagatttagttgctgaacaacaaaatggtgatttagtggctatacaagcgaaatttaataaaggaaaaataggtaaaagtgaaattaattctttcgtcgcagaacttggatcaacatattatactagaggattaattatagcaactgttgacgagtggaatagtaatgcaagagcgacgattgataagaatgaaaaagggatagagataattgggctatcagatttgagaaactcacaaattaattgggctgattttagttttgagaggccagaacaaacaacaattaaacagcctaaatcattacgtccataccaattagatgctttagatagtgcaataagttattttaaaactaaagatcgtgggcagttaatcatggcacctgggacaggtaaaacgttcacaagtttaaaaattgctgaagcattatctaaacaatcaaatcgacaatttaaagttctttatttagtaccaagtattcaattgcttacgcaaacattaagaggatggaataacgatactgaatatactatgacaagtatggcagttacttcagatagagatgcttctagaggtgatgatggtactgaagatattaaagctacagatatcggatatccagcaacgacatctaaagatcagttgcttaaaaattggaatgatgtacaaaaaaaagaatcaaatactgatttatttgtagtatttagtacttatcaaagtattgaagtaatcggaaaagctcaaaaagaaggattcccagagtttgatttaataatttcggatgaagcacatagaacaacgggcgcacatgaaatgaataaggatgctagtgtatttacaaaagttcatgataatgaaaatgtaaaaggaaaactgcgcatgtatcaaacagcaacacctaagatttatggtgataatgctaagaagaatgcaaaagataaaagtatcttattatcttcaatggatgatgaatcaaaatatggtgaagttatttatcgcatgggatttggacaagcagtatcacgtggcatattaacggattataaagtgatggtcttggcagtagatgaaacagctattcaaagagatatgcaacgaacattagctgattctgaaaatggtttaaatatagatgatgttggtagaatcgtaggtatttggaacggtatgatgcgtagaaatggatataaaaatccaattaaaaatagcccttttgatggtgcaccattagagagagccattgcatttaccagaacaattgaagattctaaaaaagtatcacatcaatttgaagaagttgttaatgaatatattggtgcggatattgaagaacaatcgaaaaagctatcaatgagacacgcagatggaacaatgaatgcattacaaaaaggtgaattattggattggttagcagatccaaataaatcatctgatgaagcacgaatagtttcaaacgtacgattcttaacagaaggtatagatgtaccgacattagatgctgttatcttcttagcacctaaaaaatctcaagttgatattgtacaagcagttgggcgtattatgcgtaaatctgaaaataaagattatggctatatcatattacctatagttatcccagcaggtgaaaaacctgagacgatactagataataataaaaactatgaagcagtatggcaaataataaatgcgttacgctctgttgatgaacgtttcgaagcaatggttgataaaattaacatagctaagccaaaacagttaaaagtcattggtgttggaagcgcacctaataaagaaaatgacttagaagataatgttggaaatgctgatacgccaaaccctaaagaatttgaacctactcaattagaattccaatgggataagtacgaaaaagcaatatttggtaaaatcgtagaaaaagtagggaatcgtaaatatttagagaactggtctgatgatgtagcaaaaatagcgcaaaggcaaattagttggataaagacaaaattagaaaataaaaatgatcctatttcaatagaatttaaaaagtttgtgtcttctctacaacataatatcaatgaaagtatagatgaaagccaagctgctgaaatgttatctcaacatttaatcacaaaacctatatttgaagcattatttagtaagtatagctttgtaaataataatccagtatcctcagctatggaaaacatcgttctagaattagagaaagctggttttgccaaggaacaagaaaatcttgcacctttatatgagtctgtaaaaatgagagcagaagatgtagaaaaagcagaagataaacagaaaataattataactttatatgataagttctttaaaacggcatttaattcaactacaaaaaaattaggtattgtattcactcctgtagaagttgtggattttatagtaaagtcagttgatcttacattagagagacattttggcaaaaatcttgctagtgagagtgttcatattttagatcctttcacagggactgggacatttatggttagaacactagaatacttaaaagaacaaatgaaagaaggagaaatttcgttagcggatattacacgtaaatttacacaagaattacatgcaaatgaaattgtattgttaagttattatattgctgcaattaatattgaagcaacatttgatgatattaatggtaatgaacaaggatatacaccatttgaaggtatagtattaactgatacatttgaaactactgttcatgaatattcaatagatgaatattttattggaaatgatgaaaggcttaaaagacaattaaaagaaaatattacagcgataattggtaaccctccctattcagtaggacaagactcggaaaatgataataatcaaaatatcaaataccctattttagaagaaagaattaagaatacttattccaaatactctaaagcgaaattgaaacaagcattgtatgattcatatgttcaagcgataagatgggctacagatagaatagggagtaagggggttataagttttgtaactaatggagcttttatcgataatcaaagtttcgatggatttagaaaatgtgtttatgaagaatttaactatatttatatttataatttacgaggtgatcaacgaacacaaggtgaaaaatctagaaaagagggggggaaaatatttggctctggaagtagaacaccaatagcaattacagttctagtgaaagacgaaagtgaaaaacacgaaattaagtattgtgatataggtgattatctgtccacacaagaaaaacttgaaatcattaaaaataatagttcgattgctggagtgaaatggaaaacaattcaacccgatgataataatgattggataaatcaaagagatgaaaaatatcaagattatatttctctgtacgaaaatgatggagaatcaatttttaatgattatactttaggagttcaaacaggtagagactggtggacaacgggttttagtaaattagagaccataaataatagtgaacgaatgatagaaaactttaattcagaaattaaaagattatggtttgaagaagaaccaatcaaaaaaataaatttggatccctcttttataaactggtcagacgtattaaagaaaagattagtaagaaaagattcaatacgaaaaaaagaaaatccgatgattataacttcgtttagaccatttacaaaaaagtggatgtattatgatgaagcaattattcatagacagagaaaatatagtcagataggtcagattgataaattgatttttactacaggaacaggaataagtaaagatttttcttgtttaattactaatcatatacccaattatcattatctagatacgggacgtgcatattatcaagaaataaatgataataccattaaagatatttattctgaaaatgtcacagatttttcgtctgagtactttgatataaagaaggaagatattatttattatgtatatgctttattgcatcatgaagagtttagaaacaaatatttatcagatttgaataagcaagcaccaaggattccaatcgttaaagaaaaaaataaatacattgaagttggacgtaaattatcagagcttcatattaattatgaaaagcagactcctcttgcagaaataaatgttaatcaaacatcgaataattattacgttaataaaatgaaatttaataaaaaagataaatcaataataatttttaataatgatattaaaatcgaaaatatacctttggaagcctataaatacgttataaatggaaaatcagctattgagtggattatggatcagtatcaagtgaaaaccgataagaagtcagggattgtagataatcctaataagtttagtacagatccacagtatattttaaaattattattgtctgttataacagtaagtgtgaaaacgcttgaattagtagaagaattacctggttttgagataattcattattaa

SEQ ID NO: 409322 - DNA, 888 bp, Staphylococcus aureus
atggaaacttataaaatcaaaatgccatattatatcaatcaaaattcatattatataaatgaattaaatcaaagtatgcatagagctttagagaaagtaaaagaaaacgatagaatcatattagacttcacaaatactgagtggtttaatgctgaattgacagtactattgtctgactatatcgaaacgtttcatgaaaagaatattcatgttgaagtttcaggattaaaaaaagcaattgagataatcttaaggaaaaatcatttttttacttattatcaagtttttgaatctttaccagataaatataacacgactatcagttttacaatccataattttaacgatatagaaaaaatagatgactatatacaagattcattatttacaagtttaagtaaaacgataaataatgattttgtgcaatacattaaagaaaatttgtttgaagttattcataatataagagatcattcaaattcaaataaagtctttatgtgcggacaattttatcccaataaagatagattaacatttgctattagtgatataggtataggattatccaaaaagataaaagagtctaacaagcatattaaaacaaatgaagatgcaatattatggagttttgaaaaaggtaactctaccaaagaatcattagatgctgggttaggtctatacgaattacattcacgtcttagaaataaaggtagtttgataattttgacagaaaatgctttttttaaactaaataaaaacggacaatatgactttgtagaacttgaagattcattgataggaactgttattattattaactttaatataaatgattgtttacaggctaacagctttgctataataaataatgaaaacttagaatggtag

SEQ ID NO: 409323 - DNA, 345 bp, Staphylococcus aureus
atgaagagcatagaaattaaatctgtattaaattcaaatttagcagttacatcagatcaagcagagataatatataaattattatctgattctataaaaaaaggggaaaatattgaggttaatttcgaaggaatcacagtcttaaccactgcttttctaaatgcagctataggtagactatatgatattgctgatagtaaacaattaaatgagtatgttaagataaatacattacatttaaataattcacattttaataaaatcaaaatggttatgagtaacagtagagagaaacgagaggctaaccaagttctgatggaaagagttttaaatgatggctattga

SEQ ID NO: 409324 - DNA, 528 bp, Staphylococcus aureus
atgatggctattgattataatttgaataatacagagttgcctgtagaaaaggatatttttatagataataatatattaatttatctgtttaatccaaatacagttaatgattacggatactcgaattttttaagtgatgctcttgaaaagaattgtaaattatatattaattctcaagttatttcagaatttgttaatacactttgcagagtatctttctatgagtataaaaatcaaaattcattgcctcctaattatgattataagcgtgaatttagaaatactgaatattttcaaactgtatatcagggcgcattacaaatagttagtaatgagattcttccaattactactgtgtcaacgatagatttacaacatatcacctcatctttactctataatcatgaactattagattataatgattgcataatagttagccaatgtttagctgaaaatattgcaatagtgactcatgatagagacataataaattgcagtgaaaatattgaagtatatcattattaa

SEQ ID NO: 409325 - DNA, 1347 bp, Staphylococcus aureus
atgcacatgttagaagtgaaatatgatatgagaactgggcattatacgcccatacctaacgaacctcattatttggttattagtcatgcggataaacttaccgcaacagaaaaagcgaaattaagattattaatcataaaacagaaattagatatttcattggcagaaagtgtagtttcttcgcctatagcgagcgaacatgtgatagaacaattgacactatttcaacatgagcgacgacatttaaggcctaaaataagtgcgacatttttagcctggttgttgatatttttaatgtttgcattaccaatcggtatcgcttatcaattttcagattggtttcaaaatcagtatgtatcagcatggatagaatatttaactcaaacaacattgctcaatcacgatatattacagcatatattatttggtgattatggtgtgctatcacttggaacatattcgctcgtatgggcattgccggttgtaatattaattagtttatcaactgcaataattgatcaaacaggactcaaatcatggatgatatgggcaattgaaccgtcaatgttatggatcggattacaaggtaatgatatcgtgccactattagaaggatttggatgtaatgcagcagctatttcacaagcagcacaccaatgccatacctgcacgaagacacagtgtatgagtttaataagctttggtagttcttgtagttatcaaataggtgcgacattatctatttttagtgtagctggaaagtcatggctatttatgccgtacttaatattagtacttttaggtggcatcttacataataggatatggttgaaaaagaatgatcaacaacttagcgttccgctaccttatgatagacaattacatatgccaaatatacgtcaaatgttgctgcaaatgtggcaaaatatacaaatgtttatcgttcaagcgctacctatttttatcacaatctgtcttattgttagtattttatcactaacgccaattttgaatgttttatcacaaatatttacacctatattatcgttattaggcatctcgtcagaattgtcaccagggattttattttcaatgattcgaaaagacggcatgctcttgtttaatttgcatcagggcgccttattacaaggaatgacagcaacacagttactactacttgtgttttttagttcaacttttacagcgtgctcggtcacaatgacgatgcttttgaaacatttaggtggtcagtcagcactaaaattaattggaaagcaaatggtgacatcattgtctttagttattggtgtaggcatcattgttaaaatagtaatgctgattatttaa

SEQ ID NO: 409326 - DNA, 867 bp, Staphylococcus aureus
atgaatgaacaatggttagagcatttacctttaaaagatattaaagagatttcaccagtgagtggtggtgatgtaaacgaagcatatcgagtcgaaacagatacggatacatttttcttacttgtccaacgtggacgtaaagaatcattttatgctgcagaaattgcaggtttaaatgaatttgaacgtgcaggtatcacggcacctagagtaattgcaagtggcgaggttaacggtgatgcgtatttaatgatgacgtatttagaagaaggggcttcagggagtcaacgccaattagggcaactcgtagctcaattacacagtcagcaacaagaagaaggcaaatttggcttctcattaccttatgaaggtggcgatatttcttttgataatcattggcaagacgattggtgtaccatttttgtcgacaagcgcttggaccatttgaaagatgagttgctaaatagagggctatgggatgccaacgatatcaaagtatatgacaaagtgcgacgtcaaattgtggcggaattagaaaagcatcaaagtaaaccgtctttattacatggtgacctatggggtggtaattatatgttcttacaagatggtcgtccggcgttatttgatccagcgccattatatggtgacagagaattcgatatcggtattacaacggtatttggtggttttacgagcgaattttatgatgcgtataataaacattatccactcgcaaaaggtgcatcctatagacttgaattttatcgtttatatttattgatggtccatttattgaaatttggtgaaatgtaccgtgatagtgttgcgcattctatggataagattttacaagatacaacaagttag

SEQ ID NO: 409327 - DNA, 2730 bp, Staphylococcus aureus
atgaaaaatatagatatcgcaatttatgatatagataaagttatttgtaaaagtattgagaataactcatcagatttaggttatttatcacaaagtatcttatcacatttaagaaactacgtagaacatattggtatgaaatattatttcgaaagtgtaaatgaagatatgactaatagttcttcaaatatctataatgaaatacaaatgggaatagattattttaggaagcattacaaattgaattggcttaaaaattttcatgaattacttcagcaatctgtttctcattatacatttgatgaagatagatccgaacggttatttataaagtattatgacttaatgttagaattaaaagaaaagttaaagaaagattttgaaatggatttattgcaaagtttatataaagtaccgctgaatattgatagtgatttaaaaggatattatcatacaatatctcaattaataggtaataaatacactgataatgaatatgaagtagataattcaaggtattatattgaaaaaacaaaaccatttgttattgaaaataaagtatattatgaaattacatttagaaatgcaaatgataaaactagtaaatacgaaagactgattggttattcaaaatatagaataaacacaaattatgctgtaaaattcgcattagaaaggcaaacaataagttatttagggattaaagctaacgtaataataataaatgattacgaaatatctataaggccttgtgaatttaataattttgctaaaatattagattacgatttaaaattacaaacaaatcataatgaatataaaaaattaatgaaattgttaaaagaatttaatttacatttacttgatattgttttgttagatgacgatgaatttaatgaattggagtatttagtgaatagcgaatcagcagttattaatatttttaatgtgttgagactagcaagaagatatattttaacaaataaatcaggcgcaaatgttcttaggtatttattatttgtttttaacaataggataattcgtttacagttaccttataataggaataaatgttataaattatctaaccttatattggattataaatgtgttccatttgatcaaatgccatttacagcctctttaaaaggccataatcctaatatctatactttgttacaatgtatagaatacaaagggagagaatatgaattattagtcaggaagattcaaaagaatactttgaagaataagaaagtttatacaatcaaagaagaaattgagcagtatggtgttgtaaacgaactaatcgataaatataataataatttgtattataagcatcgaccgaatagagaaatacattcatttggtgataattattatttatatgaaaatgagcagagtattatgagtataataaagtcaattaaactattgtcaaatgaaagcgtagagggctattcaaattcagtagagttttggctaaataatgaatatacatcgttggattgtaaagaaaagaaggaaatactcttaagaatgttttcaaatagcaaaatatcgatggtatacggagctgctggaacagggaaatcaactttaataaaccatatttgcaattttttctatgataaagatgttatcgtcatagcaaatactaatactgcagtagacaatattaaaagaaaaatcaaattatctaacattaaaacgtctactatttctaaatttttatataatgataaagaaaagtatgacttgttaataatcgatgaggcaggtacagttagtaataaggacatgaatcgaattcttgaaaacaagcaatttgaattattattaattgtcggtgataattatcaaatcgaatcgatagattttggaaattggttcgaaattgccaaagatgttttgccaaaaaatataatcaacgaactaactaatatgtatcgaactaaaaatgatgatttactttacttttggaaatctgttagagaaaaaaagagtaatttaaatgaaattattaatatgaataaatattctacaagattagatgaaagtatatttaatgaattcaataaagatgaaattattctttgtttaaattacgatggtatatatggtatcaataacattaatagattattacaagcaaataataaaaatgattctgtaatttggggtgtgaaagaatataaagttggtgatcctattctatttaatgaaactaataagtactcaccaatactttttaataatttaaaagggtcaataattgaaatatatgtttttgaagaatatatattgtttgatttagaaataaataaagttataaatgaacttgatattattttgttagaaattgatttaataagttcttctgaaaatagttcggtgattaggattagagtagaaaaaagtgatgggttgaatgatgatgataatgattcatctgatagtatagttccttttcaagtgagttatgcaatttcaatacataaagctcaagggttagagtttaattcagtaaaaattgttatatctgatgatttagacgaacaaatcactaacaatattttttatactgcaattacacgagctagagaaaatttaaagatttattggtcaccacgaactgaaaagaaaattattgataatataatttctaaaagaaacttgaaggatctttctatattaaaatctcgaataaaaaaacaaaatgcttag

SEQ ID NO: 409328 - DNA, 783 bp, Staphylococcus aureus
gtgttcaatacaacatataaagaaatatatagcatgtttcctaataaaccatacccagtacatgatatctatgaagactgtagaactattcttgctgacttgcaaatagaaatgtttaatagaattaatacacagctttataaaacctgtcattacaataagcctagaaaacatcacgaaatgattaagaaattactaatcgaatttattatagacaacaaagatagcaaaatcgttagcgcggaaccatttgaattaaacctagaagctttttatgctatcaaacaaaattgtaatattagtaataacaataaacccttagatgaatatattattacatattttgaggatttattgtctaatataagtaacacattaacaaataataatagggctaatggaaataacccaataataaattacatctatgttactcaaagaaaagatggcatggtttgcgtagttggaaaatcacatttcaaatatgaatttaagggtaatgaatataaattagttaaaaatcaagaaggtgacttatttaagaagatggatgaagataaaggttccggaaaaatattatcttcattgtatataaaagacaatgaattaaaaaaacaatattctacatgtagagaatttctagatgattatttatatacagcatggattattcctgttttgctgaatgaacatgcaacaagtcaattagaggaatatttaggtagatatttaattaaccaaaacgtaccaatccttaatttactttcacatactttcaaataa

SEQ ID NO: 409329 - DNA, 456 bp, Staphylococcus aureus
atgcactggaaagaaaatagaataaaatcagccaaaaatgacacgattcggatggtaatcaaagaattaaaaggtagttatgtggtttttggagatgttcagtttcttccaggttattgtgtattacttcctaaaagagaggtaagattattgaatgatcttactttagaagagcgacaagattacttattagatatgagctttgttggtgatgctatgatgaaagcattgaaacctacaagagtaaattatgaaatactaggtaataaagattactttcttcatgcacatttattccaaagatatgaatgggaagatgaatctgttaggtatatgccagtgtgggcgtatgatgcttctaattggtctaatgaagaaacggcttacgattctgataaacatgatgaaattagaaataagataaagaacgaacttgaacagttgtataacatataa

SEQ ID NO: 409330 - DNA, 282 bp, Staphylococcus aureus; identical to SEQ ID NO: 407864

SEQ ID NO: 409331 - DNA, 549 bp, Staphylococcus aureus
atggttgatgtaactagttcttggattttctttttcattccaatgcttaattggggtgtacctaagaagtttgcgaagattagtcaaagtgagtttgaagaattaaatacatttacaccgaaaaatagtagctcagctggatggatagcaggtgggggatcagttttattggcagtattgacgagaaaatatatacagttgttaaatatacaagttaatcaaattgctgtgaatattttatgctgtctcgtacttttgggggttttcctttcagctttatatattaattcgaaatctaaattaaatgtttataatagaaataactgtgatgaaaagataattttaataccaacttttaaaaatttatgcttaatgctcctttcgtatattatttttggtggtttaagcatacttgctttttatatgtttatcacagaaggtattcaaaacatcattttatttattacttggattatgcttgtaataatgttcttacttagtaatgtagctttggtagtcaataaaaaagtatatgttataaaaaggtag

SEQ ID NO: 409332 - DNA, 558 bp, Staphylococcus aureus
atggttgatttagtaagtacttggattgcttattttttgcccatgattaattggtttattcccaaaaagtacgtgaaaattagtagagaagaatttgaaagtttaaatattgtcaaacccgctaaaaataatactttctggcctgttgcaggatttgcagtgttattaacaaccttaacaagaaaatatatttatttgcttaatatccatttagaaaaagaattagttatattaacatgctgcatgatacttctaggtgttttcgcattgtttatatatataaatacaaaattgaagttacatatttttgataaaaataaaagtaataacgaaaagatcatattaatacctacatttaaaaatatttgtttatctttatttgcttatatattatttggtggattgtcaacaatggctctgagtatgttagtaacttcatcccctcaaaatataatagaatttcttgctttaattggcatgactgcatgcttctttctactgaatatgtcatcggttttagataaaaatattcatgttattttaaaaacaaataagtag

SEQ ID NO: 409333 - DNA, 633 bp, Staphylococcus aureus
ttggtttgcgaggtaatagctatatacaaaaatcccaaatatagaattattaaatataatgatgaatatttgatggtgaatataataaataattggttagttttattcattccattgcttaattggttgacaccaaaaagatacatcaagatcagtcaagaagaattagaaagtttaaatactttcaaacctgctaaaaacaatgcattttggccagcattaggtagttcagttttatttagtgtgacttttagaaagtatatgcctttatttaatgttagattggaaaaaacaatagtaatagccatattttttgttgtatttcttggtattttatttttctacctaaatttaaatcgtaggctagcattaagtgtttttactttgaataaagaaaaaagtcggaaaatgatattgctacctaatttaaaacattttttctttataatatttgcatatttatatttcggtggtttttcatttttcactttatatgccctgataactatagatgttcaaaatataattatatttatctgttggggtgcagtaactatgtttttcttttttataaacattgttcccattggcattaaaaaagctcatgtaatacttcttaaaaaagctgaataa

SEQ ID NO: 409334 - DNA, 309 bp, Staphylococcus aureus
atgttaacttcaaagggaaaattcccgttgaattataaatacaattcagaccgaaaagaaagcatatgtaacttcaagagtgaaggggcatatgcttctttttcaattgagtatagagtattagcaagacgtagtaggtatatgagacaacttctacaatggttgaaggaagacgtttttgtaagtagctatgctgataaagaatgtgatgtcttgttaaaggtggggttccaatatcatcgaatgggttattatttgctacttgcatatgaatatgagtcttttcaaatttttattgaccctgagtaa

SEQ ID NO: 409335 - DNA, 2421 bp, Staphylococcus aureus
atgacatataaaatgaagaaatggcaaaaattatccaccattacgttattaatggtcggagtgattactttaaataatggtgaatttagaaatgttgataaacatcaaattgctgtggctgatacgaatgttcaaacgccagattatgaaaaattgaagaagacgtggctcgacgttaactacggttatgatcagtatgatgagaataatcaagatatgaagaagaagtttgatgctacggagaaagaggcagagaaattactcaaggaaatgaaaactgaaagtgataggaaatacttgtgggaaaactcaaaagatttagatacgaagtctgcggatatgactcgtacctatcgtaatattgagaaaatcgcagaagcgatgaagcataaagatactaagttaaaaacagatgaaaacaagaagaaagtgaaagatgcacttgactggctgcatgaaaatgcctatggaaaagagccagataaaaaagtaaaagaattgactgagaattttaaaataactgattcatcaaagaaaaaagctttaaattggtgggattatgaaattggaacacctagagcattaacaaataccctaatattactgaatggtgatatttcaagtgatgaaaagaaaaaatacactgcccctattaaaactttcgccccagatagtgacaaaatattatcttctgtaggaaaacctgaacaagctaaaggcggaaatttagtagatattactaaggtgaaacttttagaaagtattatcgaagaagatgaaactatgatgaaaaattcaatcgattcttttaataaagcgttcacttatgttcaagattctgccactggtaaagctcgcaatggattctataaagatggctcttacattgatcatcaagatgtcccttacactggcgcttatggtgttgtactattagagggtatttctcaaattttcccgatgataaaagaaacaccttttaaaactacacaagataatgctacattaagcaattggatttatgaaggatttatgccactcatttataaaggtgaaatgatggatttatcacgaggtagagctatcagtcgcgaaaatgaaacgagtcatacagcttcagcgactgtaatgaaatcattgttgagattgagtgataccatggatgattcaacaaaaacaaagtataagcaaatcgtcaaaacttctgttgattctgattcaagttacaaccaaaatgattatttaaattcatattcagacatagataaaatgaaaaagttaattgatgataaatctattactaaaaatgatttaacacaacaacttaaaatatataatgacatggatcgtgtcacctatcacaataaagaccttgactttgcatttggattaagtatgacatcgaaaaacgtcgcacgttacgaaagtatcaataatgaaaacttaaaaggttggcacaccggtgcaggcatgtcttatttatataacagcgatgtcaaacactatcgtgataacttctgggcaacagccgatatgactcgtcttccaggtactactactttaaatgatatgccatctacaaatactaagaatgataattcctttgttggcgggacaaaattaaataataaatacgcaagcatcggtatggattttgaaaatcaggacaaaattttaactgccaaaaaatcatatttcatattaaacgataaaattgtcttcttaggaactggcattaaaagtactgattcatcaaagaatccagttacaagtgttgaaaatcgcaaagcaaatgggtataaattatataaagatgatattgaaattaccacttcagatgttaatgctcaggaaacccattcagtctttttagaatctaacgatactaaaaagaacattggttatcattttttagacaagccaaaaataactataaaaaaagaaagtcatactggtaagtggagtgaaattaataaaagtcaaaaaccagatgacaaaaaagatgagtattatgaagtaactcaaacacataatacatctgacagtaaatatgcttatgttttgtatcctggtttatcaaaaagtgattttaaaccgaagaataataatgtaagtattcttaaacaagatgaagattttcatgtgataaaagataatgatggcgtatttgctggggttaattatagtgatagtactaaaatttttgatatagacggaactactgttgaattaaaagaaaaaggcatgtttgtaattaaaaagaaagatgataacacatatgaatgtagtttttataatccgacatccacaaattccacttcaaatatagaatcaaaaatttcaatgactggatactctattacaaacaaaaatacatcgacttctaatgaatccggcgcgcgctatgaattaactaaataa

SEQ ID NO: 409336 - DNA, 444 bp, Staphylococcus aureus
atgaaaaagaaatatatcttaataatagttgtagtaattataataggtttggtagttattgcatatgcgcataataagcaaattaaagaccattacattgagacgcaagaaaagagaatagatttattttttaagtataacctgaatcattatcattcaatgaaagttactagttttaaaaagaatccaatgggtggttattttataaagggctttgtcaataataaaaataattataaatttgatgctgtgatattttctgatactaataaacaatttaaaggagatttaggttataaagaggataaaataggtgaattatttagagaaaaagatgctaaagacagattaaatgttgatgaaataattgaaaaagaacatttggataaaagtgattatgtagcggaaccaccattattcttcttttcggggagattagagtga

SEQ ID NO: 409337 - DNA, 444 bp, Staphylococcus aureus
atgaaaaagaaatatattttaataatggttagtgtaattttaataggtatgatagttattgcatatgcacataataaacaaaaaaaagaccattacattgaaatacaagaaaaaaggatagatttatattttactcataatcttaacaattataaaaatatgaaagtgacagattttcataaaaatccaatggggggatattttgttgtaggttatattaatgataataaaaaatatgaattccaagctagtattgattcgggaagcgatgatcagtttcataaagatattggatatgatggagataaaataggggaattattcaaagaaaaagaccctaaatataaactctcagtcgatgaaataattgaaaaagaacacttagacaaaagtgattatgaagcggaaccaccattattcttcttttcaggatcgatggattag

SEQ ID NO: 409338 - DNA, 744 bp, Staphylococcus aureus
atgacatttataaaatatcaaaatataaaattatttcgatcttattcgttcattcctccgtacgctttttttatcataggaataatgcttttttatttttataaaaaccagatgatattgcctagttatgctagttcaatgacattactttatgccactttatcctggctaacaattataaatttcaatttagattctatacaagaaaaacatatgctttttattcagtttgacagtaaattaaaatatctaaattacaaaatgttattttctttcctgtcatcaatcccattggttatgttttcaattttatatccaattattactaatagattttcagaatcatttgatctttataccctaatactcagcatttatttacatttaattatagtaatgattgctgtattagttacttcatttattactgttcaaaggtttttttcacaaaaatatagttggttattattagtcttggtttatgttttatcaataattaaatttgcgatagttcaaagttatccagtgctaaagttcttactattttttataccgcctgttggaaatttcttaaatctatttaataagactacatctgatatatggtcaaaagagtttatcttattaaatttagagattgttctgtttatctgtatagccatagttttaatcaattatatatacaaaaaagcgagtattattaattttggtattcgtaatactcactttttgtatgttatgtaa

SEQ ID NO: 409339 - DNA, 828 bp, Staphylococcus aureus
ttggctactggaattgttaatataaataatgtaaaaaaaacaattaacggaaatactatacttaataatctaaatttaactatacccaaaaattctattactttaattgatggatataatggctcaggaaaaagtgtaacattgaaattaattgccaaaatatataaaccaactagtggaaaattaatatctgatggcgtagtgagttatgcaccagatcaatttcctacctctttaaacctgactttagatgaatactttaattatttgaaaaaaatttataaattacctacttactccaaaatgattgattatatggtttcaaatttcaatcttgagcaatttttagattttaaagtaaataattgttctaagggcactcgacaaaaagttaatataatccaatgcttagttaagcctgcagatatttacattttggatgaacctttttcaggattagataaagattccatttactttttagctaattatttgtgtgagattaaaagtaaagcaactattattatctcttctcatgaacacgatataaacaaaaaaattattactcatacattcaacttaaaatccaatgctttttctaagcaatattttaataaaacagcagaggttactattatcgacttttcaaatgcagactttgaaaaagcaattaaaacattaaactttagttttcaaataacaaaagaaaatgaaaataatagagcaaaaattattgtacctttttctaaaaccaatattacattgttaacactaattaaaaataatttaactgtttataaagtaataagtaaggatgagaatctatga

SEQ ID NO: 409340 - DNA, 1488 bp, Staphylococcus aureus
gtgaaaacaattcaattacacaagacaactttgatattaattgcgatattattgttttatacttttatgggtatcttactaccactcatgcacgatgatttacaatggtttagcaattataatactgatattttaaaagtaggatttgcatcacttaatggtcgctatatcggaaatatctttgaaattatagctgtatatgtaagctggttacgttggctttcatatggcctcattagtatgggcatcatttggatgattatgcacattacacgttgtaaagcgtggacaagctattatttgttagcattttctttaatgttaattttaccaagtgctatttatgcagatacatatggctggtttgcaggattttataattatgcgacatcaacactaatttcactctttattatttattattgtattaatgcaattatatataaagaaaagcagccggtaagtgttactgtactattctatgttttatgcttcttcggtcaattatttatggagaatgtgacattattccactgtatcattttaattttagcttttctgtatgaatttactgcaaatcgaacacttaattataaattattgttttcatttatgattgctactataggtacaatcattatgttttccaatccaaattatcgcaaaattttatttgaaggatcagaatatcaacaagtttcaaataatcaaggtatcttttcaaaatttgcagaaatgatatcaacgtcacttccatatggtgtcattttcagtcagattataattttaagtatgattgcagcgcttattatttatctactgcttagaagtgatcggtatgtacatttaacaatattaaagcgtcgtatcattatgataggatttatcactttaccgctttattatttactattttacaatcagtttttattaaataaaaatacagatattggattggttggttttgtgaacgtaattgtatgtggttactttgcgttttcgatatttgtaggtatttatttgtctattaatgatcgtaaaacacaaatcactttatattccttacttattgcaatatgtgtttcggcgtcgacactagtcattgttactccaatagaaccaggtaattttttgattgtttatacgatacatgtaatcattttaattattttattaaaagaatttcggaaatataagtcaatcaatgttaattttattaaaggtgcatcactagttttagctgtgatatatcttagtgcatttatttatgttcattatgaacatgaaaaaagagttcagttattaaaacaacaaattaaagatcatccacgacaagaggtttatacagtggaatcattgccgtttgaacattatatgcatcatccgtcaccaatcaataaaaattaccaagagtggtttaataattatgaagaattaccgaaaatgaccaaagttaaatatattccatttggttcagacgattcataa

SEQ ID NO: 409341 - DNA, 2631 bp, Staphylococcus aureus
gtgaataaattagtattaatcgatggtaatagcttaagttttagagctttttatgcattacctttgttatcaaacaaagcaggcattcataccaatgcagtatatggttttgcaatgttactagagaagattttaaaagaagaaaagccaaatcattttttagtagcgtttgatgcaggtaaaacgactttcagacatgaaaaatatagtgaatataaaggtggacgccagaaaacgccgcctgaactaagtgagcaatttccttatattcgccaattattagatgcttatcatattaaacgttatgaattagataactatgaggcagatgatattatcggaactttaagtaaagaagcagataaagcgggctttcagacaattattattacgggagaccgagatttaacacaacttgcaacggataatgtaaccatttattacactaaaaaaggtgttactgatgttgatcattatacacctgactttattgcggaaaaatacaacgggttaacacctaatcaaattattgatatgaaaggattaatgggagatacttctgataatataccaggtgttgcaggtgttggagagaaaacagcaataaaattgctaaaccaatttgacacagtagaaggtgtctatgaacatttagatgaaatttcaggtaaaaagttaaaagaaaaacttcaaaatagcaaagaagatgcattaatgagtaaagaattagcaacgattaatgtagatagtccgattgaagtaaaacttgaagatacgttaatgactcatcaagatgaacaacaagaaaaaatcgaattgtttaagaagttagaattcaaacaattgttggctgacattgatcaatcagcaagcgttgaagatgcaatagaaaagacatttgaaattgaaacgtcttttgataatattgattttacttcattgaaagaagcggccatccatttcgaattagacggtggtaactatttgcgaaataatattttaaaattctctttatttacaggtgagaaacatattgtaattaatgcggatgacataaataattatgtcgaactagtttcatggttagaaaatccgaattcgaaaaaagtcgtatatgatgctaaaaaaacatatgtagcatcacatagattggggattgatattcaaaatatttctttcgatattatgttggccagttatataattgatccatctcgtacgattagtgatgttcaatcagttgtttcattgtacggtcaaagttttgtgaaagacgatgtgagtatatatggaaaaggtaagaaatttaaggtacctgaagatgatgttttaaatccatatgttgcttctattactgatgcaatttactttgcgaaaccaaatatggataaacaattagaagaatacaatcaggtagaactcttggctgatttagagctaccgctagctaagattttaagtgaaatggaagaaattggtatatttacagatgttcatgatttagaagaaatggaaaaagaaattcaagaaaaattagacgtcttgattcgaaatatccatgatgcagctggtgaagattttaatataaattctcctaagcaattaggtgttgtattgtttgagacattacaattacctgttattaaaaagacgaaaacaggatattctactgctgtagatgtcttagagcaattgcaaggtgaacatcctatcattgattatattttagaatatcgtcaattatctaagttacagtctacttatgttgaaggattgcaaaaggtaattagtgatgatcaacgtatccatacacgttttaatcaaactttagcgcaaactggacgtttatcaagtgtagatcctaatttacaaaatattccggttagacttgaagaagggcgtaaaataagaaaagcctttaaaccaacttcaaaagatagcgttatattatcagcagattattctcaaattgaattgcgtgtattagcacacattacacaagatgagagtatgaaagaagcatttatcaacggcgatgatattcatacagcaactgctatgaaagtatttggtgtagaagctgatcaagtcgatagtttaatgcgtcgtcaagcaaaagcagttaactttggaattgtttatgggataagtgattatggtttaagtcaaagtttaggtattactcgtaaaaaagcaaaagcattcattgatgattatttagctagtttcccaggtgtaaaacaatatatgtctgatattgtaaaagatgccaaagctttaggttacgtggaaacattgctacatcgtcgacgctatattcctgatattacgagtcgtaactttaatttacgcggctttgctgaacgtactgctatgaatacgccaatacagggcagtgctgcagatatcattaaactggcaatggttaaatttgctcaaaaaatgaaagagacaacatatcaagctaaactattattacaagtacacgatgaattaatttttgaagtacctaagtcagaagtagattcatttagtgaatttgtagaagagataatggaaaatgcattgcaattagatgttccattaaaagtagactcaagttatggtgcaacctggtatgatgcaaaataa

SEQ ID NO: 409342 - DNA, 681 bp, Staphylococcus aureus
atgaaatttaaagcgatagcaaaagcaagtttagcattgggaatgttagcaacaggtgtaattacatcgaatgtacaatcagtacaagcgaaagcagaagttaaacaacaaagtgaatcagagttaaaacactattataataaaccaattttagagcgtaaaaatgtgactggatataaatatactgaacatggtaaagattatatagacgttatagtagacaatcaatattctcaaattgctttacttggatctgataaagataaatttaaagacggagaaaactcaaatatagatgtgtttatccttagagaaggcgacagtagacaagcaacgaattattcaattggtggcgttacaaaatcaaatagtgtgcagtatattgattatatcaatacgccaattttagaaatcaagaaaggtaaagaagaaccacaaagtagtctataccaaatttataaagaagacatctcactaaaagaacttgattttaaattaagaaagcaattaattagtcaaagtggcttgtattcaaaaggtcttaaacaaggtcgaattacaattacaatgaatgatggcacaacacatacaatcgatttaagtcaaaaacttgaaaaagaacgtatgggtgagtcaatcgacggcagacaaatacaaaaaattctagtagaaatgaaataa

SEQ ID NO: 409343 - DNA, 699 bp, Staphylococcus aureus
atgaaattaaaaacgatagctaaagcaacattagcattgggattgttagctactggtgtaataacaacagaaagtcaaacagtaaaagcggcagaatcaactcaaggtcaacacaattataaatcgttaaaatactactatagcaagccaagtatagagttaaaaaatcttgatggtttgtatagacaacatttaactgataaaggtgcatatgtatggaaaaatcttaaagattattatattgggctactaggtgaagatagtaagaaattcaaaacagatgtatacggagacctagatgcatttttagtcatagaagaagaacctgttaaaggaagacaatattcaattggcggtataagtaagacaaatagtaaagaatttaaagaaagagaagtcgatgttaaagtaacaagaaaagcagacaaagatactacatcaactaaaaatagtaaatttaaaattacaaaagaagaaatctcgttaaaagagttagattttaaattaagacaaaaattgatgaaagaagagaatttatacgatgcaattaaccatagaataggtaaaattgtagttaaaatggcagatgataagttttatactttcgaacttacaaaaaaattacaaccgcatcgcatgggtgacacgatagatggtactaaaatcaaagaaattagtgttgagctagaatataaataa

SEQ ID NO: 409344 - DNA, 765 bp, Staphylococcus aureus
atgaataagcttcgagaatatggattcgtaagatatgatttattaaaagaattaaactatgaaggcatagaatttgattacttagaactattgaattatttttcagatttacctattgatgaatatgctccaacgctaaatagatatagacgctattcaagagcattaattttacctggtaatgatcaaattttttggctccctatacaaaaaataaataatagtgagtattctgtatatttccaaggaaagtttaatcctgaatttccagaatcatatcgaaagtttcgccctatagatcaacacattcaaaataataaacttttaaataaaattatctcttcaaacttcaaaaaaacattttggaatgaagaagataaaatacttccaatccatgtcggagttcatttcgtgaaattattcgtaaatgatgcttttaaaaaagctacttcgtctcccgattgtttgcatcaagatggagaaccatttacatttgctcacttgattgagagaaagaatgttaaaggaggaacaaatgtaatagcttcacctcaagtagtaggtaaaaaaccacatgaaataaataacgaagacataattgaaattttcgaactatcaaaagctttagaatcttatggtgttcatgatacatctgtaagtcattatgtaagtgcaatagaacaagataataaatctaatcctgccacacgatctgtaatccttatcgactaccaacaaactattgtagctgatattaatgaataa

SEQ ID NO: 409345 - DNA, 1668 bp, Staphylococcus aureus
atggaaatgtcggttacagaagtcattttctcctttttaggtggtttaggtattttcctttacggcttaaaaatcatgggagacgggcttcaagcatcagcaggagacaggctacgagatattttaaacaaatttacatcaaatccagtattaggtgttattgcaggtatcgttgtaactattttaatacaaagtagttcaggtacgacagttatcacaatcggactggtaacagctggatttatgacattgaaacaagccattggagtgataatgggtgctaatatcggaacaacggtaactgcatttattatcggtatagatttaggcgaatatgcaatgccaattttagcattaggtgcatttttaatctttttctttaaacgctctaaaattaataacattggccgcatactattcggtttcggttctctattcttcggtctagaatttatgggtgatgccgttaaacctttagcatcattagatggatttaagcaattaatgcttgatatgtcatcaaatccaatacttgctgtcattgtcggcgcagggttaacagcactagttcaaagttcaagtgcgacgattggtattttacaagaattttatcaacaagatttaatcagcttaaacgcagcaatccctgtgttactaggcgataacattggtacaacgattacagctatcttagctagtttagccggctcaatcgctgcaaaacgtgcggcgcttgtacacgtcatctttaacttaatcggggtaattatcttcacaattttcttgccagttgtgattcatttgattagtttgttacaagatgtatggcacttaaaaccagcgatgacgattgcagtatcacatggtatcttcaacataacaaatactttgattcaattaccatttgtagcaggtttagcatggatagttacaaagcttgtcccaggtaaagatattgctgatgactataaacctcagcacttaaacaaagatcttgtttatcacgcacctggtgttgcattacaagaaactcaaaaagaattacaaaatgtgggtcagattgtcttaacgatgtttgaagacattcgcgaaattacaaaagacgataaaaaattgatcaaaaagcttgaacaaaagcaccaagctgttgaaacaatcaatgatagtattcgcaattatttagttagaatttctacaaaagccattacgaaggcagacgttgagcgtttagcagttatgtttgatgtcaatcgctctattttaaaagtagcagagctaacagaagagtatgtcgctcaattaaaacgccaacatgatgaagatattcgcattacagaagatgcacaacgcggtatggataaattattcaaccatgttgccgagtcatttgataaagccatcgacatgttagatgtttatgacaaaacgaaaaaagatgaaattgtagaacgtagtagagaatcatttaatattgaacataaactacgcaaaggtcatattaaacgccttaatcgtggtgaatgtacaacaaaaggcggattactatatatcgatatgattggtgttcttgaacgtatcggttatcattcacgaaatgtttctgaagcacttgttggccttaacgatgatgtacctacagatgaagaaattgcaacaactgaaatttaa

SEQ ID NO: 409346 - DNA, 771 bp, Staphylococcus aureus
atgatgaaacgtttaaacaaattagtgttaggtattagtcttctgtttttaatcatcagtatcactgctggttgtggcatgggtaaagaagcggaaataaagaaaagttttgaaaaaacattgagtatgtatccgattaaaaatctagaggatttatacgataaagaaggctatcgtgatgatcaatttgataaaaacgataaaggcacatggattattaattctgaaatggttgttcaacctaaaggggaacgtatgaaatcaaaaggtatggttctatatatgaatagaaacactaagactacaaccgggaagtatatagtgagtgaaacacttcatgatgaagatggtagacctaagagtaaagataaagaatatcccgttaaaatggtcgacaataaaattataccaactaaagatatcaaagacgaaaaaataaaaaaagaaatcgaaaactttaagttttttgttcaatacggcgattttaaagatttgtcgaagtacaaagatggagatatttcatacaatccagaggtaccgagttattcagctcaatatcaattaactaatgatgattataatgtaaaacaattacgtaaaagatatgacataccaacaaataacgcgctgaagctgttgttgaaaggtacagggaatttaaaaggttcatcagttggatataaaaaaattgaatttacttttttagagaataaaaatgaaaatatttactttactgatagtctacatcttgaaccgagcgaggataaataa

SEQ ID NO: 409347 - DNA, 582 bp, Staphylococcus aureus
atgcagaaaattttctcacaggaactgagatttaaagatgagaatggtaatgattatccggagtgggaagagagaagatttgctgatatatttaaatttcataataaactaagaaagccaattaaagaaaatttaagagtaaagggttcttatccatattatggtgctacaggtattattgattacgttgacgactttatatttgacgggaattatttacttattggagaagatggtgcaaatattatcactagaagtgcacccctagtgtacttagtaaatggaaagttttgggtaaataatcatgctcatatattatctcctttaaatggaaatatacagtacttgtatcaagttgcagaattagttaattatgaaaaatacaatactggaactgctcagcctaaattaaacattcaaaatttaaaaattattagtgttgtaatttcaacgaatttagaagaacaacaaaaaatcggaagctttttaagtaaacttgatcgtcaaatcgatttagaagaacaaaaactcgaattacttcaacaacgaaaaaaagccttacttaaattgatgtttgtttaa

SEQ ID NO: 409348 - DNA, 699 bp, Staphylococcus aureus
atgaaattaaaaaatattgctaaagcaagtttagcactagggattttaacaacagggatgattacaactactgctcagccagtaaaagcaaacgaaattagtagcagattatcagttacttcaaaagatacacaaaatttaaagacgtattatactggagcaagttttgatcttagaggattaagcggatataaagaaggagataaagtaatatttcctcaaaatggtcaacaaattgatgttacattaacaggtaaagagggagacgtggttcaacctaatgacgacgttacaaatgttgatgtgtttgctgttcctgaaggtacaggtcgttctgccataatgactacaattggtggaattactacaccaaacactcaaagttataaagacactacaaataatgtgaacttaagagtatcaaagagtacaagtccaaataccacatctgtgtctgtaaaaaaatatgatatttttaaagaaaaaatttcattaaaagaacttgatttcaaattaagaaagcatttaattgataatcatgatctttataaaacagaacctaaagacagtaaaattataattaatatgaaagatggcggctactacacatttgaattaaataaaaaattacaagaacaccgcatgggtgatgtaatagatggtactaaaataaaagaaattaatgttgaattaaactaa

SEQ ID NO: 409349 - DNA, 783 bp, Staphylococcus aureus
atgggatatttaaaaaggattgcattgtacataagcgttatgattttaatatttgcgatagcaggttgtggcaaaagtgatgaaacaaaagaaggttccaaagaagaacaaattaaaaagagctttgcgaaaacgttagatatgtacccaattaagaatctcgaggacttatatgacaaagaaggatatcgagatggcgaatttaaaaagggtgataagggtacatggactttactcacaagttttgctaaaagtaacaagccaggtgaaatagatgacgaaggtatggttttattccttaatagaaatacaaagaaggcaacaggatattattatatgaataaagctcatgatgaatttaatgaaaaagatcaacaaaaaaaatatcatgttgaactaaaaaataataaaatagttcttttggataatgtagaagatccaaatctcaaaaataaaatagagaattttaaattctttagtcagtatgctgattttagagatcttaaaaattataaaaatggaaatatatcaagtacagataatgtgccaagctacgatgcagaatataaaatgagtaatacggataaaaatgtaaaaaaacttagagaagtttatcctattacaaccaaaaagtcgccagtattaaaattacatatagatggcgacataaaaggaagttcagttggttataaaaatatagaatataatttttcaaaagtaaaagaccaagaaacagctgtaagagattttgtgaattttggaccatctgatggaggtagctaa

SEQ ID NO: 409350 - DNA, 792 bp, Staphylococcus aureus; identical to SEQ ID NO: 407977

SEQ ID NO: 409351 - DNA, 816 bp, Staphylococcus aureus; identical to SEQ ID NO: 408182

SEQ ID NO: 409352 - DNA, 363 bp, Staphylococcus aureus
atgttaaaagaaaaagaaagttttagattgctatatcaagctataagagagattgcagataaaattggagataatcagttagaaactaattccgttagtttattattattggactttgattttgaacatgaagtatttgatgaattgtatcttgcgattttaaaatatttaaatacagtaagtatagagaacataagtcatagtgagcttttgaatttaatagaaaatacgattccagaagatcgagatattaacacgtttgtaaaaaataaaataataattggctttgctaataattatttccctgaattacaagtattagcaaacgaaataaaatctgatatggctagttcattaaaataa

SEQ ID NO: 409353 - DNA, 795 bp, Staphylococcus aureus
atgattcattcaaaaaggttaaaattgtgtctatgcctgataatactatctgtttttataggcgcttgcggaatgaaaaaagaagaaagtagtaaagataaacaaattaaagaaaacttcaacaaaacgttgagcttgtatccaaccaaaaatattgaagacttttatgataaggaaggttttcgagatgaagagtttgaaaagggtgacaaaggcacttggataattcactctaaaatgattattgagacaaataatagcaatatggaatctagaggaatggtgctctatataaatcgtaatactagaacaacgaaaggtaattttgttgttagagaaataaccgaggatagtaaagggtattcacatagtaaagatacaaaatatccagtgaaaatggaacataatagaatcattccaaccaaaccgatagctgatgataaattaagaaaagaaattgaagactttaagttttttgtacaatacggtgactttaaagatattaatgattataaagatggtgacatttcatataatcctaatgttccaagttattccgcaaaatatcaattgaaaaacgatgactacaatgtgaagcaacttcgaaaaagatataatattccaaccaacaaagctccgaaattattaataaaaggtgatggtgatttaaaaggctcatctgtagggtcaaaaaatctagaatttacctttgtagaaaataaagaagaaaacatttattttacagattctgtacaatatactccaagtgaggatacaagttatgagtcaaactga

SEQ ID NO: 409354 - DNA, 792 bp, Staphylococcus aureus
atgcattcaaagaaattaacgctcggtatatgcttggtattactcattatattgattgtaggttatgtcattatgacaaaagcaaatggtcaaaacgcccaaattaaagacacatttaatcaaacattaaaattatatccaaccaaaaatctcgatgatttttacgataaagaaggctttcgagatcaagaatttaaaaagggtgataaaggtacttggatagttaattctggaatgaacatccaattaaaaggaggagccttaaaatccagagagatggtactttacatcaatcgtaacactagaacaacgaaaggatattttatagtaggtgagataactaaagataaaaaaggatatacacatgataaagataaaaaataccctgtcaagatggaacataatcaaattatcccaacaaaacctataaaagacgagaagttaaaaaaagaaattgaagactttaagttttttgtacaatatggcaactttaaagattttaaagattataaaaatggggatatttcatacaatccaaacgtaccaagttattcggcaaaatatcaattaagtaatgatgattataatatccaacaattaagaaaaagatatgatataccgactaaaaaagcaccagaactattgttgaaaggtgatggcgatttaaaaggttcatccataggctctaaagacttagaatttacctttgtacaaaataaaagagagaatatctattttacagattcggttgaatttactccaagcgaggatacaagttatgagtcaaactaa

SEQ ID NO: 409355 - DNA, 1614 bp, Staphylococcus aureus
atgactgaaaaacctaatattgagaacttagtaaaatttattaaattaaaggaaagcataggtaactacatttttgttagtttagggaatccgttagttaaagctcaagtaaagattttgaaaaatattaattatttagaaaatgatttgaataaactgtgtcaaaagtttaaaaataaatcaggaaagtacccaacttgggtcaaattagatattgtaactagtcaaaaaacaattccttttcatattttgcaagatgaaatgattaacactaggaggaattatatagattttggcatttcgttagataaatactggaatgtaacatttctacctgaggaaattaatgccaatgcttttattagaccaaagaaaaatacaaacgaattatatttatctgaaaaaaatgtgaataattatattagtaaatacaaaaattataaatacaaattttctaaagaattctatgattctaaggacgtaattaaattttttacgaaatcgtttttttttgacggagaagagatttatgaactaaaatctgaaggttaccaaaagggattaagggaagttgataaattagatgtggaaattaataaaatgatagaaactagcagtgcttttttaaaaggtatgttgaatgaaaatggtaaatatgattatggctattttccacatttcgataaaaatattaatttttacaatattttacgtcattcttcatcaacttatgcattaattgaaggattaaattatttgaataagccgcttgattgtgtgaaaaaggctatagattttataatagataattatatttatgaaaagggagataaagcttttatatttgatgatacaaataatataaatgaaattaaattaggtcaaaatgcttcttttataattgcagtttgtgaatatttaaaagttcacgaaaatggttattatcttaaaaaagcacagaaagtagcaaatggtatattgtatatgattgatgaaaataaatgggatacaactcatgttttaaattatccagatttatctataaaagaaaagttcagaattatttattatgatggggaagctgctttagctttaatgagattatttcaacaagataataatgaaaaatggcttaacatagttaggaaattagttgatcagtttatttttaaagaatattttaaataccatgatcattggcttggatattgcacaaatgaacttgtccagatttatccggaagcaaaatactttgaatttggtataaaaaatgtgagtacttatttagattacataaataatcgtgaaacaacgtttccaacatttctagaaatgttaatggcaacatataaattaatacaaaaagctaaggttgaaggttatggtgaattagtagaatctttaattgatgaaaatgaattgttgtctgttattcataaacgtgcaaattatcaaagaacaggatatttttatcctgaaattgcgatgtattttaaaaatccatctagagtattagggagcttctttattaaacatcatggctatagagttagaatagatgacattgaacactatatttcagggtatgtacaatatcaaaaggtgtttaattaa

SEQ ID NO: 409356 - DNA, 156 bp, Staphylococcus aureus
atgagtgttactaaagatcatcataataaagccaaagcattaccagaaacaggtagtggaaatgatgaatcaaataatggaacattattcggaggattattcgcagcattaggttcattattattattcggtcgtcgcaaaaaacaaaataaataa

SEQ ID NO: 409357 - DNA, 231 bp, Staphylococcus aureus
atgattataacttttacagatgtttcctctgttgaaccatctggatatgttactttcactggaatatctacttttgttcctggtgttacgtccgccggtggcgttactgatactttcccatctggatctactgttactgtccatccttctggtactcgatcttttggaatctcaaagttcgttcctggtggtaagtctttatctcctgtttgcggaatatctactttttga

SEQ ID NO: 409358 - DNA, 351 bp, Staphylococcus aureus
atggataagctagcaatgaaaagtaatattgcaatattgacaacggttttaaatatatttgaattacgtaaaaatttgagggaacattatgggcttactcttgatgattatttagtactgatctatttgaacgaatttaaaaatagacaaggaaaatattttatgagagatgtaattacatatattggtttagaccaatctaggatagttaaaagcgtaaaagaattagtgaaaaagggctacttatctaaatctagggatcttaaagatagtagaaatgtaatattaacacttactgaactacaacaaaaaacaattgagaatattttgaatgaaataatttatcgttaa

SEQ ID NO: 409359 - DNA, 747 bp, Staphylococcus aureus
atgatgaaacatcatgcatataaaaaagttaacacccttttagatgtagagtcctatgttttttttctaggtcgagaactaaaacaaaatttcgaattgtccacaaaagaatttttaataattgcatatctttattataggaagaatgaggatgtacctctaaaggagattataggagacattttttataaacaatcagatgttgttaaaattgtgaaatttcttaataaaaagggatttataaataaatatagaaacagtacagatgaacgttgcattttaatatcaattaacgaagtgcaaaggactaaaatttatagtatgctaattgagctagataaaattgtatataacttcaatattgaaaggaattacactaaatataattggttacctagaaataacaaggaatttttcaatctgtttatgaacatcatgcactcgaaagattctttaaaatataaattaaatttaacttatctcgaactttccattttatacacaatatcaactagaccaagcgaaattttaaacttaaaagatatatttactgatagtagatttatgtatccgcaaattgcaagagctgttaatagattagataataaaggaatactaattaaagaacgttctattgatgatgaacgattagtattaattaaaattaatgaagtacaatgtagtctaatcaataccatcattgttaatacttctatgcttgtaaaaagaagaaaacttttcttttga

SEQ ID NO: 409360 - DNA, 867 bp, Staphylococcus aureus
ttgaaaaaaataaaaaaggcaatcattcccgctgctggtttagggactagatttttaccagcaactaaagcgatgccaaaggaaatgcttcctatcttagataaacccacaatacaatatatcgttgaagaagctgcaagagctggaattgaagatattattatagtgacaggtcgccacaaacgcgcgattgaagatcattttgatagtcaaaaagaattagaaatggtgttaaaagaaaaaggtaaatctgaattactagaaaaagttcagtattcaacggaacttgcgaatattttttatgtaaggcagaaagaacaaaaaggtttagggcatgcgattagttctgcgcgtcaatttatcggcaatgaaccatttgcggtattattaggtgacgatattgttgaatctgaagtgccagcagtgaaacagttgattgacgtttatgaagaaactgggcactcagttataggtgtccaagaagttccggaagcagatactcatcgttatggaattattgatccattaactaaaaatggacgtcagtatgaagtgaaaaagtttgttgaaaagccagcacaaggtacggcaccatcaaacctagctattatgggacgttatgtactaacacctgaaattttcgattatttaaaaacgcaaaaagaaggcgcaggtaacgaaattcagttaacagatgcgattgagcgtatgaataatgataaccaagtgtatgcatatgacttcgaaggcgaacgttatgacgttggagaaaaattaggcttcgttaaaaccaccatagaatatgcattgaaagatgacagtatgcgagaagaattaacacgatttattaaagaattaggtttataa

SEQ ID NO: 409361 - DNA, 609 bp, Staphylococcus aureus
gtgccacatattcacggattcaataagcacactgaaattattgaagaagatacaaacaaagacaaacctaattatcaattcggtggacacaacattgttgattttgaagaagatacacttccaaaagtaagcggccaaaatgaaggtcaacaaacgattgaagaagatacaacgccgccaacaccaccaacaccaccaacaccagaagtaccaagtgagccggaaacaccaacaccaccgacaccagaggtaccaagtgagccggaaacaccaacaccgccaacaccagaggtaccaagtgagccggaaacaccaacaccaccaacgccagaggtaccagctgaacctggtaaaccagtaccacctgccaaagaagaacctaaaaagccttctaaaccagtggaacaaggtaaggtagtaacacctgttattgaaatcaatgaaaaggttaaagcagtggcaccaactaaaaaagcacaatctaagaaatctgaattacctgaaacaggtggagaagaatcaacaaacaaaggtatgttgttcggcggattatttagcattttaggattagcgttattacgtagaaataaaaagaatcacaaagcataa

SEQ ID NO: 409362 - DNA, 1746 bp, Staphylococcus aureus
atgaaatttaagtcattgattacaacaacattagcattaggcgttatagcatcaacaggagcaaactttaatactaacgaagcatctgccgcagctaagccattagataaatcatcaagtacattacaccatggacattctaacatccagattccatatacaattactgtgaacggtacaagccaaaacattttatcaagcttaacatttaataagaatcaaaatattagttataaagatatagagaataaagttaaatcagttttatactttaatagaggtattagtgatatcgatttaagactttcaaagcaagcggaatatacggttcattttaaaaatggaacaaaaagagttatcgatttgaaatcaggtatctacacagctgacttaatcaatacaagtgacattaaagctatcagtgttaacgtagatactaaaaagcaacctaaagataaagctaaagcaaatgttcaagtgccatatacaatcacagtgaacggcacaagccaaaacattttatcaaacctaacatttaataaaaatcaaaatattagttacaaagatttagagggtaaagttaaatcagttttagaatcaaatagaggtattactgatgttgatttaagactttcgaagcaagcgaaatatacagttaattttaaaaatggaacgaagaaagttatagatttgaaatcaggtatttacacagcgaatttaatcaattcaagtgatattaaaagtatcaatattaacgtagatacaaaaaaacatatcgaaaataaagctaaaagaaactatcaagttccatattcaattaatttaaatggtacatctacaaacattttatcgaatctttcattttcaaataaaccttggacaaattacaaaaatttaactagtcaaataaaatcagtactgaagcatgatagaggtattagtgaacaagatttaaaatatgctaagaaagcttattatactgtttattttaaaaatggtggtaaaagaatcttacagttaaattcaaaaaattacacagcaaacttagttcatgtgaaagatgttaagagaattgaaattactgttaaaacaggaactaaagcgaaagcagacagatatgtaccatacacaattgcagtaaatggcacatcaacaccaattttatcaaaactaaaaatttcgaataaacaattaattagttacaaatatttaaacgacaaagtgaaatctgtattaaaaagtgaaagaggtatcagtgatcttgacttaaaatttgcgaaacaagcaaaatatacagtatatttcaaaaatggaaagaaacaagtagtgaatttaaaatcagacatctttacacctaatttatttagtgccaaagatattaaaaagatagatattgatgttaaaacagggtcaaaagcgaaagcggatagctatgtaccatatacaattgcagtaaatggcacatcaacaccaattttatcaaaactaaaaatttcgaataaacaattaattagttacaaatatttaaatgacaaagtgaaatctgtattaaaaagtgaaagaggcatcagtgatcttgacttaaaatttgcgaaacaagcaaaatatacagtatatttcaaaaatggaaagaaacaagtagtgaatttaaaatcagacatctttacacctaatttatttagtgccaaagatattaaaaagattgatattgatgtaaaacaatacactaaatcaaaaaaaaaataa

SEQ ID NO: 409363 - DNA, 792 bp, Staphylococcus aureus
atgaagcaactggttggaattcccgaatcaatgttaattcctttgatagctcgagcaaaagagtacgaaaacgaaaaaccaataataaaagacgcactatctaaaaaaatatttgatggtttagatgatatgtacaaaaatgttacatgtgatgacatgtctcaaattggaattagtatacgtactgtgataatagattgtgttactaagaggcttatcaaggataataaagatttaatcgtggtcaatataggttgtggcttagatacaaggtttcaaagatttaataaagaaaaaatatcatggatagatttagatgtaccagaatcaatagaaatacgaaaaacattttttaaagaaagtaatagttataagatgatatctaaatctatgctagattacagttggattgatgatgtcaaaaattataaattttttaatagtaagtcagatatattgtttattattgaaggtgtattgatgtattttgatgagagtgtaatgactcaattattggacactattatcaaaaagatgggagatcataatttgacatttgcgattgaattttgctcaaaaacaattgcgaataatacaaagagacatcaatcggtatcaaagttatcctcacaacctgtttttaaatatggttacaatgatttaaaaaaattgaatgaaattttaccaaatacaataagagtaatacatgaatataattattttgactattataagaatcgatggggcttatttggatattgtagatttataccttatttaaaaaaaggttaa

SEQ ID NO: 409364 - DNA, 912 bp, Staphylococcus aureus; identical to SEQ ID NO: 406760

SEQ ID NO: 409365 - DNA, 1308 bp, Staphylococcus aureus
atgaacaaagtccacaaacctttatatttttatttaatgcttttcttctctacaactatcataggtgcacttttattgtatttaccttttactggtaaaaagccaatatcttttttagatgccctatttatagcttcaagtgcatttacagttactggcctatccccagttgatataggatcacagtttaatatacttggtgaaatagtaatactattattaattcaaataggtggtctgggtatcgtgaccgtaaccctattgacactagtatttttaaatagaaagatatcaatgaaaaatagattcttgattatggttacatggaatattgacgaacctggtggtgttattaagctaattaaacacttggctatttatagtttagtcactgaattaattggtatgatttgtttgtgtttatcttttataccaaaatttggtataggcaaaggtttatttttaagcttatttacatcagtatcagcttttaataatgctggatttgccctttttaagaataacttaataaattattctagtgatccaattgtcattattacaatctcaatactcataatatttggaggtattggacattttgtcgtaatagactttattaattgtaaaaaattgagtaaattatctttacattctaaattagtcttaactacaactagtatcctaataattataggagctattacattctttttattagaacagtttaatactatgcaacatatgggactagttgaaaaaatcggaaattcttttttccaatcagtaacaacacgaacagcgggttttaacagtattgatatagcaagcattaacaaatctaccgccttaatgttaatgttacttatgtttattggtggtgcccctctcagtgcagctggaggaattaaaataactacttttgcagtggcgtttatatttgttctaaattatatacgtaaagaaaataatgtttcagtattcaataaagaaatatctgacaaacatataaaactatctattgttaccattaatatctcatttctatttatcagtatcattacttttatattatcgataattaatccgaacatatcattaatcaagttattattcgaagtggtttctgcatttggaacagtcgggttaagtatgaaccttaccacagaatatcatggtattactaaaataattattatattcgttatgctttgcggtaaagtaggactattaactttattaagaacatttataccaccaaaaagtcctaaaaattaccgctacactaaaggacaaatttatctataa

SEQ ID NO: 409366 - DNA, 261 bp, Staphylococcus aureus
ttgtttaatcttagtttgctgcaatttaaaattgttgatatttctaggaagaatcattcgaaattggaagagaaaattgagagtgaactcataagtggctcaataacgaattgtataaaaaatattgatgataatatcgatagactcatcgataaaattaccgagatgcaaaatgaagttaattcattaggtagtacattatctgtactagaaaatgcaataaattcaatagctgctgctattgaaaaattaactaattaa

SEQ ID NO: 409367 - DNA, 684 bp, Staphylococcus aureus
atgactactaaggaaaatatagacattcttcgaaagccaggtgcacaagccttaagtttagcatcattatttatgatacttttttcatgtctaactttcttttttggtttagattatgaaaggtttccaaattatttaaagataacgacaattatagaattaataattattgtaattagtttacttcaatggattagatttatagatttcgaaaaggaaagcgcacagaaatacaaaaaaatatatgcccgatttttagttgttataaatgtgctaactactatcactgcagtatttgcaacatgtaatctttactattttgttgctgtacaaaatcattatgacctattcaattattggttgatgggtacgatttcaatcataattagctatttattattagtaattggcggaatgtttacgttgttaaaattacctaaagtaacaaaacgttggggtggtaaaactaaaacacatttcggtttattattaaccgcgttgagcgcatttatatatattgaaagaattatcgaatatatattggtgcccaatgtcgtagaatccaagtttgtcataatggtaagtatcattattattgcttgtacacaatttgtagcctttcaatttattatgcaatacagtagattctatatttttgaattaaatacagaagatgatgactaa

SEQ ID NO: 409368 - DNA, 492 bp, Staphylococcus aureus
atgactttcgaagaaaaattaagtgaaatgtacaacgagattgcgaataaaattagtagcatgataccggtagagtgggaaaaagtatatgcaatggcatatatcgatgaagaatgtggagaagtgttttacaattatactgaaccaagcagtgatgaattattttactatacaagtgtgataaagaagtataatttattgaaatcaagctttatggattcagtatatgagttgcatgatcaatttgaggaactaagggaaatatttaaagaagaaggtcttgaaccatggacatcatgcgaattcgactttacaagcgagggtaaattaaacgtatcttttgattatattgattggactaaattagaatttggacaaatagcaaaagaaaattattatatgtacataaaatttggaattttaccagaaacggaatatgaaattaataaagtaaaagaaatcgagcaatatattaaagagcaagaagaataa

SEQ ID NO: 409369 - DNA, 501 bp, Staphylococcus aureus
atgactttcgaagaaaaattaagtgaaatgtacaacgagattgcgaataaaattagtagcatgataccagtagaatgggaaaaggtatatacaatggcttatatagatgatggaggaggtgaagtattctttaattatactaaaccaaacagcgatgaattgaattattacaccgatatacctaaggagtataacatttctgtgcaagtatttgatgatttatggatggatttatatgatttgtttgaggaattaagaaatttatttaaagaagaaggactagaaccatggacatcatgcgaatttgattttacaagagaaggtaaattaaaagtttcatttgattatatagattggataaattcagaatttggtcaaataggtcgacaaaattactataagtatagaaaatttggaattttaccagaaacggaatatgaaattaataaagttaaagaaatcgaacaatatattaaagagcaagaagaagctgaacaatag

SEQ ID NO: 409370 - DNA, 684 bp, Staphylococcus aureus
atgactactaaggaaaatatagacattcttcgaaagccaggtgcacaagccttaagtttaatatcattgtttttgatacttttttcatgtctaactttcttttttggtttagattatgaaaggtttccaaactatttaaagataacgacaattatagaattaataattattgtaattagtttacttcaatggattaggtttatagatttcgaaaaagaaagtgcacagaaatataaaaaaatatatgctcgatttttagttattataaatgtgttaactacgatcactgtagtatttgcactgtgtaacctttattattttgcagctgtacaaaaccattatgatttattcaattattggttaatgggtacgatttcaatcataattagctatttattattagtaattggcggaatgtttacgttgttaaaattacctaaagtaacaaaacgctggggtggtaaaactaaaacacatttcggtttattattaactgcgttgagctcatttatatatattgaaaaaattatcgaatatatattgattcctaatgtcgtagaatccaagtttataattattgtgagcatgttggttatcgctggagcacaatttgtggcatttcaatttattatgcaatacagtagattctatatttttgaattaaatacagaagatgatgactaa

SEQ ID NO: 409371 - DNA, 648 bp, Staphylococcus aureus
atggagataaaggaaattgtagcaaatataaaaaggccgtacttaacaccttttgtaatatttacgattttgctctcattgttttttgatgcgattatgtttttcaatagtaaactttatgataagttgccattatatttagtcgtatttttaatttttgcaatagtagtgtcaattttactgtatttacaagaaaaaagtgagaaggtaaaagttgagaaaaagaatgtgattttgtatatgacactaaatgttataactggttattcaatgccattatttattgcttctacttatgttgttggtgcagcagtaaatgatatagatgtgttttattattggtgcggagtagctttgatgttatttatttcttggttaggtttatttttattttataaaaatgaatttgatagtgaaaatcctaatcctgcagttaacgccatagcaattattataaagttatttgctttagcaactatattttatataagtaaagttgcgcctagtattgcggatgaaaagaactttatatttgtaagtatactaataaatttaggtgttgatgctctacttgttaggtcatattttaattacgcgttatataagagtattaagaaagatatcgaaaatgaaggaaagacaatgtaa

SEQ ID NO: 409372 - DNA, 552 bp, Staphylococcus aureus
ttgtttgttgattcttctccacctgtttcaggtaattcagatttcttagattgtgcttttttagttggtgccactgctttaaccttttcattgatttcaataacaggtgttactaccttaccttgttccactggtttagaaggctttttaggttcttctttggcaggtggtactggtttaccaggttcagctggtacctctggcgttggtggtgttggtgtttccggctcacttggtacctctggtgttggcggtgttggtgtttccggctcacttggtacctctggtgttggcggtgttggtgtttccggctcacttggtacctctggtgttggcggtgttggtgtttccggctcacttggtacctctggtgttggcggtgttggtgtttccggctcacttggtacctctggtgttggcggtgttggtgtttccggctcacttggtacttctggtgtcggtggtgttggtgtttccggctcacttggtacttctggtgttggtggtgttggtggtgttggcggcgttgtatcttcttcaatcgtttgttga

SEQ ID NO: 409373 - DNA, 861 bp, Staphylococcus aureus; identical to SEQ ID NO: 408477

SEQ ID NO: 409374 - DNA, 342 bp, Staphylococcus aureus
atgaaattagctgaagctataaaagaacagagagaattaaaaggatggtctcaagaggaattagccaatatattaaaggtttccagacaaagtgtttctaaatgggaaagtgccaaaaactatccttccttagatattttgattgctatgagcgatttattcggaatctctttagagcatttaattaaaggagatgcacgttttaaaaaagttattttagagggaaattatagagagagtaacagggtaccttccatagttgattttctttatgatttttggtggcttttctttcctgttgccggatttttagtttgggccattcattcgttcatgggttga

SEQ ID NO: 409375 - DNA, 186 bp, Staphylococcus aureus
atgtttggcgatcaaagacaagaagctacaaaatatgtcattaaagaaggttatcaagatatttatttcctcaacaaaaacggggaatggtattatttcgaagtaagaagtgtctggcgtggcaaacatattattagagttaaagatggtttgttaggttggagaaaagaaatagtaactgaataa

SEQ ID NO: 409376 - DNA, 744 bp, Staphylococcus aureus
atgaaaagtgtaaaaaggttgagtgaagaattaggggttagtaagcaaacgatttttaataatattaagagattgaatatagagacaataaaacaggaaaacacttcgtttattaaagaagataccgatatagaaaaaatcattcaaagagtaaatgaaaataaaaagaaatatggttttgaaagtgctactgaagacaaacaaaaaaaagagtcggataatattaattttgaatctaaaagcgatgctcaaatagtagaaatacttaaaaatcagattaatactttaaataatcaaattgaaaaacaagaaagtcgtcatgaaacaacaattgaattttacagaaaagagttgcaagaaagatcaaaattgcttgagaatcagcaagttctggcattagagagtaataaaaagattcaaaaattagaaaatcaattagaaaaagaaaaacaccttaattatccctttgatacatctactaacgctagacaaaacgttgatgcacaagaaaaaacatatactactagtcctgtaaatattaaccgagatcaggaagaaactaaagaaacagagattcaatataaggatatatctggaagtcaaagcgacgaaagtacacaaggtgaagaagcacaaagagaagacgtttcagctaatccaaatgacaatgatagtgatatagaagaaaagagtgaagaaacggaacctaaaaaggggttttggagtcgtctatttggtaactaa

SEQ ID NO: 409377 - DNA, 276 bp, Staphylococcus aureus
atgtcaattaaactttacaacataaatgaggaatacagagaaaagttttatcaaataccgaaagtattttttacaaatcctaaatatatcaagttatccaatgatgcaaaaatggcatggggtattcttagagatcgtttagatttatcaattaaaaatggttgggttgattctaaaacaggtaatatttatttttattacaaaaatgaaaacccacaaaatatattaaattgtaaaaaagataaagtaattaaaataaagaaagaacttaattga

SEQ ID NO: 409378 - DNA, 618 bp, Staphylococcus aureus
atgattcaaacggttgttgctgctgctgttctttatattgctacagcagttgatttattagtaattttattaatattttttgctagagcaaagactagaaaagaatatagaaatatttatgttggtcaatatttagggtctattattttaatattagttagtttgtttttagcttttgtattaaattatgttccagaaaagtggatattaggtttattgggtttaataccaatttatcttggaattaaagtggctatttatgatgattgtgaaggagaaaagagagctaaaaaagaattgaatgaaaaaggattgtctaaattagttggtacggttgcaattgttacgatagcaagttgtggcgccgataatattggtttatttgttccgtattttgtgacattaagtgttactaatttattacttactctgtttgtctttttaattttaattttcttcttggtgtttactgcacaaaaattagctaatatcccaggaattggagaaattgttgagaaatttagtcgttggattatggctatcatttatatagctttaggtttatttattattattgaaaatgacactattcaaacaattttaggatttatattttaa

SEQ ID NO: 409379 - DNA, 348 bp, Staphylococcus aureus
atgagttatgaaaatacttgtgatgtgatctgtgtacatgaggataaagttaacaatgctttaagttttttagaagatgataaatctaagaaattacttaacattttagaaaaaatttgtgatgagaagaaattgaaaatcatattatctttgattaaagaagatgagttgtgtgtttgtgatatttctttgatattgaaaatgagtgttgcttcaacttcacatcatttaaggcttttatataaaaatgaggtacttgatttttataaagatggaaagatggcatattattttattaaagacgatgaaataagagagtttttctctaaaaatcaggagggtttttga

SEQ ID NO: 409380 - DNA, 975 bp, Staphylococcus aureus
atgagtaatactaaaattaaatatcaaatttttatttcatcaacttatttagatttaatagaagagcgtcaagcagtagtagaagcagttttaaacagtaataatattccagcaggtatggaactttttaactcaagtagtaaaagccaatgggaaataataacacaatggatcaatgaatcagatgcagtgatattattgttaggttctagttatggaacaattgatagtgaagaaaatattagctatacagaaatggagtacaattttgctaaatctttaggtaaacctatatatgtttttgagatgaataaagcatctaccgaatccgcggaaaagtctaaaaaattagatgagtttaagacaaaagttaaagaaaatagactaattagtccaaatattaatgatatttcggaattaaaaagtaaagtatctcagactttaatgcaaagtgtacctagtgaaattaaagaaaatagtggatggataagagtacaggattgtggtaaaaatgtaaaaaaattaaaaaaattggatgctatacaaagagatttagatacatatgattttttgaaagaagaactttataaaatattcatgtatgtaaaaactttttatttccagcacacaccatttgatgatagttatattgaagatatagaaaactacctgctaaattatgaaaataatccacataaatcattcatgaaaataaaagtttatgattataaaaactttttaaaacatttaaaaaacatattgattttaattaaacaaggaaaaaagccattagctcaagccggtcattttaaattaagcttttacgaagaggatttaaaattgttacaaaaaaattataagactacgctagtcgatattaaaggattgaataaacatttttataaggaatgtgataggtgcttaaaagcatataatatttttattgagggtataaataaacatttatatgaatga

SEQ ID NO: 409381 - DNA, 816 bp, Staphylococcus aureus
atgactaaaaatcaaaatttcattgaaacgaaagagtataaacgctttgctgaattttgtgatgcttgtattaaatatcagtatattggtatatgttatggtcaacctggtgtcggaaaaactttatcgtctaggtattacacaaattgggatactattgaaaaacaagttaaccatagaggttgggaagatttagctagtaaaacgaccgatgacatactatcggtggataaaatattttataatgcaccagcagaaaaacaaactaaattaaggaatgatttatatagtattactgcaatcattgatttgggtcaaaaattacatgttgtaaataagtatggacatgaacatagtaaacattatagtgatatgtttaaatatattgatttaattatagtagatgagattgatcgccttaaagtgcaacatttagagcaattaagagctatttatgatgaacataatttagcaatgatatttattggtatgccgggtatagagaaaaaactatctcgttatcctcaactatattcgcgtataggttttgcgcatgaatttgataatctaagtaaagatgagacgcatcatatattagaatataagtggcaagacttaggatttgatttaaaactcgaagactttactgattatgaggcaataacgacgattattaaaattacaaaagggaattttaggctgattcatcgtttatttgcgcagatagacagaattatggatataaatggtttagataaaataagtacagaagttgtagaaacagctagagatagtttagttataggtattcgataa

SEQ ID NO: 409382 - DNA, 831 bp, Staphylococcus aureus
atgccccccaatgctcaaaacacagcattaacactacaccaagcaatatggaataaaaatgataccaattggccagtgtgtggtatacccgaaaaattctacacagatcatggaagtgactttacttcacatcatatggaacaagtcgctattgatttgaaaattaacttgatgttttcgaaagttggtgttcctcgtggtcgtggaaaaatagaacgattctttcagacagttaatcaaactttcttagaacaactgcctggatatataaacaataatgatactcctagtaatctaataaattttcacaattttgaagaaaaattacgttactttttaattgaagattataatcaaaaagaacatagtactattcataccacgcctatcagtcattggaatagtaatcactttttccctaatatgccaagtagcttagaacaacttgatttattattgttggaaatacctaaatctagaaaagttcattcagatggcattcattttcaaggttttcgatacagtaatactaatctagaagcttatgtaggtgaatatgtactgattcgttataacccaaatgatatggctgaaatacgtgtgttttatagagatgaatttctttgtactgctatatgtccagaaatagctgattactccatagatataaaagacatacagcacgctcgtagtcagagaagaaaacacttaaaacaaaatattgctagtccaagtaccacggaattaattaaggaagaaaaaaattgtggttattcacctcaagaaacgactaaaaacgtcaaaaaattaaagagatatcgtaatgactaa

SEQ ID NO: 409383 - DNA, 381 bp, Staphylococcus aureus
atggccaataagcaagttgaaatatctatggctgaatgggatgttatgaatataatatgggataaaaaatcagtatcagctaatgaaattgtagttgaaattcaaaaatataaagaagttagtgataaaacgattagaacattaatcacaagactatataaaaaagagattataaaacgatacaaatcagaaaatatttatttttactcatcaaatattaaagaagacgatattaaaatgaaaactgctaaaacctttcttaataaactgtatggaggggatatgaaaagtttagtgttgaattttgcgaaaaatgaagaattaaataacaaagaaattgaagaattgcgagatattttaaatgatattagtaaaaagtaa

SEQ ID NO: 409384 - DNA, 480 bp, Staphylococcus aureus
atggctaaattactaataatgagtgtagtaagcttttgttttatatttctattgttagtattttttaggtacatattaaaacgctattttaattatagtttaaattataaagtttggtatctaactgtgcttgctggattaattccttttatcccaattaaattctcttttataaaatttaataatgtgaataatcaagcgcccacagttgaaagtaagtcacacgacttgaaccataacataattaccaccaaacctgttcaagagttcgcaacagatatccataagtttaattgggattcaattgataatatctgcacagttatttggatagttttagttattattttaagttttaaatttttgaaagccttattatatcttaaatatttaaagaaacagtcactttatctaaacgaaaatgaaaaaaataaaatagatacgatacttttcaaccatcaatataaaaaaatattgtga

SEQ ID NO: 409385 - DNA, 846 bp, Staphylococcus aureus
ttgaaaaagttaatatttttaattgtaatggctttagttttaagtgcatgtaattcaaacagttcacatgccaaagagttaaatgatttagaaaaaaaatataatgctcatattggtgtttatgctttagatactaaaagtggtaaggaagtaaaatttaattcagataagagatttgcctatgcttcgacttcaaaagcgataaatagtgctattttgttagaacaagtaccttataataagttaaataaaaaagtacatattaacaaagatgatatagttgcttattctcctattttagaaaaatatgtaggaaaagacatcactttaaaagaacttattgaggcttcaatgacatatagtgataatacagcaaacaataaaattataaaagaaatcggtggaatcaaaaaagttaaacaacgtctaaaagaactaggagataaagtaacaaatccagttagatatgagatagaattaaattactattcgccaaagagcaaaaaagatacttcaacgcctgctgctttcggcaagactttaaataaacttatcgcaaatggaaaattaagcaaaaaaaataaaaatttcttacttgatttaatgtttaataataaaaacggagacactttaattaaagatggtgttccaaaagactataaggttgctgataaaagtggtcaagcaataacatatgcttctagaaatgatgttgcttttgtttatcctaagggccaatctgaacctattgttttagtcatttttacgaataaagacaataaaagtgataagccaaatgataagttgataagtgaaaccgccaagagtgtaatgaaggaattttaa

SEQ ID NO: 409386 - DNA, 294 bp, Staphylococcus aureus; identical to SEQ ID NO: 408498

SEQ ID NO: 409387 - DNA, 1935 bp, Staphylococcus aureus
atgaaaaaattcaaattatttttagattttagtactttattattaatttcagggctattatttttatttttcttcaaagaaaatgaagaaattatacctgaaagttccaatattttaacaatctctaattgggataaatctaacagtaaatcaaaagtgttagatgtcattgaatcaggcgccaaaaatcaaaatatacaaataattaaatccgttaaagattttgataataaaaaagaattttttgttttcaactcaaaacgaaataattctgactttatacgtaataaaacatcacttttaactccatcagatttattaaacagagagataaaaggaaagtattatattattggtgaacatttcaatgtagaagagcttacgagtgaattaaaaaaagctggtttaacatctgaagttgaatacataaatagaaacatattattttttgaattagtcatagataatgatttattagtgcctttcatattcttaggcgtattatatcttttgtacttcttatatgacagaggatataatttgaaattttatgctattcaaaagctacatggcttttcaactacacgcattatttttcataatattcatataaaaatcatttattggctagtacttaccgctattttctttattgctaatatattaatcattcatatagccaatttagaattggatttcttaatgtttattcgtagatttatcgtgttgctttttgtttttgcttgtattactacattgctgtggctgatttcgtatagtcttcttttgaagttaagtattccattaatcttaaaagggaaaaaaggatataagttttcaatatttatgggtaccttcaccaaatgtatcatggtgctaatactatcttttttactggcacaaaatttaaatgcttatacgaagttaaagaatatatatgactctgaaaaaatctggcaaaagttagataattactatacattagagatttctcctaatattagaaattcagaagaaaaacaaattttagaaactaatatatacaatttaattaagaaaagcgaacaacttggtggattgcttttaaagaataataatatagccaatcccgataaaaacaattacattcctgaaaatggcaatgtcttttttatcaataacaattttctgaatttctataaaaatataaatcatgattttaaaatgattgacaatcattcggataaaataaacgtgtttattcctccaaggttacaatatcaaaaatctgaaattcaaaaaaatcaccaaggatggattgactttcaaaagcaacaaaacaaaaaagtagatgtgcaagtactgtcaaaaaacgtatctgttttttcttttgatcgcacaactaatttgaaatttgggtatctagattctccaatagtaatgttgttgacacttgacgatttaacaggagatttttatttagctgctgtttctcaaggtggatatctatttaaagatttagatacacttaaacagttgcttaaagataatcacctagaagaagaaattagcggtataactaattacaaggattctgtgttaaatgaattaaatgaaacgaaaacaaaaatgataataacaatagttactattattattaacgttttcattcttttgatagctactgtatttgaaacaattcaatattttagctggaataaaaagcaactattattaagaaaaattcatggttattcattattcagcagtaatgtacgttatttaacaatttctatcttactttctattatgttagcttacactacgcatattttatttggttcaaagatattactattcataataatgtctattgctattattcaacatttacttcaaattgcttatattaaatatcttgaaaaatactttaaagatttaatgagggagatttaa

SEQ ID NO: 409388 - DNA, 312 bp, Staphylococcus aureus; identical to SEQ ID NO: 408496

SEQ ID NO: 409389 - DNA, 627 bp, Staphylococcus aureus
gtgataaaacttgaaaatgtttttgtaaaaaaaggtaataaaaacattttagacggatgtaactttaattttgaaaaaggaaaatcatatgctttagttggagaaagtggcgctggaaaatctactttacttaacataatcgctgggttcgaagatgtatcacaaggaagcatatatattgaagataagttactaaaaaagaaagtcgatttttatagatatacgttagggtatttgtttcaaaattttgctttacttgaaaatcaaacaatcagtcaaaatttagatttagccctaaagttcaaaaagaataaaaaagataatatgaacttaaagaaagaagtattaaaaaaggtcggcctagatttagatatcaagagaattgttagttctctaagcggtggtgaacaacaaagagtagcattggcaagattaatattaaaagatccgaaaatcattttagctgatgaacctactgggtcactagatacgaaaaatggaaaaatagttattgatttattattgaagctacttgatgaaaataaaactatgattgtcgtaacgcatgatttagagcttgcgaaacgatttgatgtcatagtcaatatttctgagcttagaagttaa

SEQ ID NO: 409390 - DNA, 141 bp, Staphylococcus aureus
atgaaagcatatcctttaccttataatatatttgacgatagctctgattttgtaaaacaattatttactttgcttgaatatacaaaaactaatcataatgataatattaaaattgaaactaatctattcatgagttggtga

SEQ ID NO: 409391 - DNA, 984 bp, Staphylococcus aureus
atgaaaatgaaaaaattaatcaaatcatcagttgcttcatcaattgcactgcttttgctatcgaatacagttgatgcagctcaacatatcacacctgtaagcgagaaaaaagtagatgacaaaatcactttatacaaaacaacagcaacatctgataatgataaattgaatatttctcaaattttaacgtttaatttcattaaggataaaagttatgacaaagatacgttagtacttaaggcagccggaaacattaattcaggttataaaaagcctaatccaaaagattacaattactcacagttttattggggcggtaagtataatgtttcggttagttcagaatcaaatgatgctgtaaatgttgttgactatgcacctaaaaatcaaaatgaagaattccaagttcaacaaacattaggttattcttatggcggagatattaatatatctaatggcttatcaggtggattgaatggatcaaaatcattctcagaaacgataaattataaacaagaaagttacagaactacgattgatagaaaaacaaatcataaatcaattggctggggtgttgaggcgcacaaaattatgaataatggttggggaccatatggtagagatagttatgacccaacatatggtaatgaactgtttttaggtggtagacaaagtagttcaaatgctggtcaaaatttcttgccaacacatcaaatgcctttattggcgcgtggtaactttaacccagaatttataagcgtactttctcataaacaaaatgatacaaaaaaatctaaaatcaaagtaacttaccaaagagaaatggatagatatactaatcaatggaatcgactacactggattggtaataactacaaaaatcaaaatacagtaacgtttacatctacttatgaagttgattggcaaaaccatactgttaaattaatcggtacggattctaaagaaactaatcctggagtatag

SEQ ID NO: 409392 - DNA, 936 bp, Staphylococcus aureus
atgtttaagaaaaaaatgttagctgcaactttgtcagtaggactgattgcgcctttagcatctccgattcaagaatctagagctaatactaatatagagaatattggtgatggtgctgaagtaatcaaacgtacggaggatgtaagtagtaagaaatggggcgttactcaaaatgttcaattcgactttgtaaaagataaaaaatataacaaagatgctttaattgttaaaatgcaaggttttattaattccagaacttcattttcagatgtgaagggtagtggatatgaattgactaaacgaatgatttggccattccaatataatataggactgacgactaaagatccaaatgttagcttaatcaattaccttcctaaaaacaaaatagaaactactgatgttggtcaaacattaggatataacattggaggtaatttccagtcagcaccatctataggtggcaatggctcatttaattattctaaaacaattagttatacccaaaagagttatgtcagtgaagtagacaagcaaaactcaaaatcagttaaatggggtgttaaagcaaacgaatttgttacgcctgatggtaaaaaatctgcgcatgatagatatttattcgtacaaagtccaaatggtccaacaggttcagcaagagaatattttgctcctgataatcaattgccacctttagttcaaagtggctttaatccatcatttatcactacactatcacatgaaagaggttcaagtgatacgagtgaatttgaaatttcatatggtagaaacttagatattacatatgcgactttattccctagaactggtatttacgcagaaagaaagcataatgcatttgtaaatagaaactttgtagttagatatgaagttaattggaaaacacacgaaattaaagtgaaaggacataattaa

SEQ ID NO: 409393 - DNA, 741 bp, Staphylococcus aureus
atgctagtaaaaaatataactcgaattgaatatcagagatttttaaataaatacgcacaaggtcataccgatgaaacagtgagaaaggttcacggttgtttagcaagatgtatcaaagacgcattatatgatggttatttaaaaaaagaccctacctatgatgttaatatcaaaggcactgaaaaatctaaagatgagaagtttaaatatataacgattaaagactacttaaacttactagagtactttaaaaaaagagatgaagaaagttatatctttctgtatattttaggtattactggtgcaagatatagcgatgttatcaatatgacatacaaagatttaaacaaagcaaatggtatagctcatttacccggaacaaaaacaaagaattcaaaacgagacgtagaagttaatccaagagatattatgcgtataaattcaaagttggctagattgccacgtagaattaacgggaagctattttcagttagtcatacatcagtgagcaaatcatttaaaaaagcaaaagaagtaataggattaaataatgataacatcactccctattcacttagacatactcacacatcttacttactatcaaaaggcatatcgattgaatatattagcaaacgattaggtcactctataatatcgcaaacgttaaaaacctattcacacctacttgaagaacataaaaaagagcaaggtcaacgagtcagagaattattttcttga

SEQ ID NO: 409394 - DNA, 1611 bp, Staphylococcus aureus
atgagcacaaatcaaacatttttaatatttgttatagcaattattctacttacatctgtaataggaattgttggacgattcatgagtcgtcaacgtctattaaaatctatggaaacattatggcaaacgatttctccattagaggcttttatcagaccgaactcacatttcgactatgagtataagctctacaaggaaaaatttgaatcacattcactagttgatgataaaacttggtccgacttaaatatgaatgcaatctttcataagatgaattataatttaacagctattggtgaaatgaagctatatgcctgtttacgtggaatgctttcaattacgaacaaatcattacttagtttatttaatgataatgctgaatttagaaaaaacgtaacatatcatttagctttgattggtaaaactgtttatccaacatttccagaccaaatcacaccggtaaaacgtcaaaatatattgtttctatgcccgtttttaccagttatctcatttgcagttatatttattaattcacaagttggtattttattatttcttatgagttgcctatttaatatcattttatcagcaactttaaagcgtacatatgaggatgacttaaaatctatcttttatgcatccaatgttttaaaacaaggctatactatctcaaaaattaaacatgctccacaacctgaagtcaattttaagcaatttagaacagcacgtcatttaacgagtgttttagctgaagttaatgatgaagatatcggagctatggtaattaaactagttaaacttattttcatgcttgattatgttttatttcattcaattcaaaaaagctatacaacacatatgaatgagcttaaaaattgtttcgattacatagctgaattagataatcattatgcattagcaatgtatcgtagaacgctagaatgctatactgaaccacaaattgatgattcaaatgatggcatagtattctctgagttaacacatccactcatagcagatgcagtagccaatgatttctcactatcacaaaatatactgttaactgggtctaatgcttcgggtaaatcaacatttatgaaatccatagcaataaacattattcttgcatcggctatacaaacagttaccgcaagcaaatttgtatatcaacctggaattgtgttcacgtcaatggcaaatgccgatgatgtgttatcaggcgatagttattttatggctgaattaaaatctattaagcgtattgttgaaattccagataatcaaaaaatatactgctttatagatgaaatttttaaaggtaccaacacaactgaacgaattgccgcttcagaatcagtactatcatttttacatgaaaaatctaactttagagttattgcagcaacacatgatattgagttagctgaactcttaaaacaacgttatgaaaattatcatttcaatgaggtaatagaaaataataacatacattttgattacaaaattaagcttggcaaagcaaatactcgtaatgccatcgaattattaaaaatcacttcatttccagcaaaaatatatgaacgagcaaaagataatgtcccgaaaatttag

SEQ ID NO: 409395 - DNA, 609 bp, Staphylococcus aureus
gtgccacatattcacggattcaataagcacactgaaattattgaagaagatacaaacaaagacaaacctaattatcaattcggtggacacaacattgttgattttgaagaagatacacttccaaaagtaagcggccaaaatgaaggtcaacaaacgattgaagaagatacaacgccgccaacaccaccaacaccaccaacaccagaagtaccaagtgagccggaaacaccaacaccaccgacaccagaggtaccaagtgagccggaaacaccaacaccgccaacaccagaggtaccaagtgagccggaaacaccaacaccaccaacgccagaggtaccagctgaacctggtaaaccagtaccacctgccaaagaagaacctaaaaagccttctaaaccagtggaacaaggtaaggtagtaacacctgttattgaaatcaatgaaaaggttaaagcagtggcaccaactaaaaaagcacaatctaagaaatctgaactacctgaaacaggtggagaagaatcaacaaacaaaggtatgttgttcggcggattattcagcattctaggtttagcgttattacgtagaaataaaaagaataacaaagcataa

SEQ ID NO: 409396 - DNA, 390 bp, Staphylococcus aureus
atgttacatttacatatattaagttgggtattagcgattattttatttatcgctacatacttaaacatttcaaaaaatcaaggcggatcaccatttttcaaaccgttgcacatgattttacgcttatttatgctgttgacgttaatttcaggattttggatattaattcagtcatttatgaatggcggggcaaatcatatgttgcttacattgaaaatgctgtgtggtgttgcagtagttggattgatggaagtgtcgattgctaaaagaaagagacatgaacaaagtcacaaaatgttttggataacaatggcattaattatcatcacaatggtattaggtgtcattctaccattagggcctatatcaaaattattcggtattggctaa

SEQ ID NO: 409397 - DNA, 174 bp, Staphylococcus aureus
atgtataaaaatatattacttggtgtagacactcagttgaaaaatgaaaaagcactaaaagaagtgtctaaattagctggcgaaggtacagtcgtaacagttttaaacgcaatcagcgaacaagatgctcaagcatcaattaaagcaggtgttcatttaaacaaacttacttaa

SEQ ID NO: 409398 - DNA, 798 bp, Staphylococcus aureus; identical to SEQ ID NO: 407455

SEQ ID NO: 409399 - DNA, 579 bp, Staphylococcus aureus; identical to SEQ ID NO: 407604

SEQ ID NO: 409400 - DNA, 1041 bp, Staphylococcus aureus
atggataaaaatatattaaaaacaaccataaaagaaatgaataaagatgaattagtacaattgttaaataaatatgtggaaatttcaaatcaagttaaatttcaagatattttaaaaagtaaaactgattatgaaaatcttttgattaaaaatttagaagaagatacaaaaattttggaaaatgcttacattaaatttatgtttaataggttttataaatattctgcaatttttgaagtagatcaagatgtattttctgaaagatttaaacaattaaaggataagttagaagaaactcaaaaaggaactgttttttttgatgaagaaattgaaaatcaaagcattttaatgttggaagaacaaacaggtattaaattgattgatgaaaggatcgataattctaaaagattaagcggtaccttgatttcaaagataacacttgataaaaaagattacttatgtatttctactgaaaatataccgcctcaatacagagaaaatgcatctacaagcttttatataaaaaaaatagatggtataagaaagtggcttgaatctgaattattaactaacctgttagctttagattttgaatatacaattcagtgtataagaaaagatgccgaagaaactgatttaatagttagcgctcagtcaatgaatataaacggcggagccaaagcaactttagattcaacaagctctcaagtattaatacttcctattttagacgaaattaaaaatctattagaagataattctgaactatttaaggaatcacaagaaggttataaaatacttaatgattacattgatgaattggaaaaagaatctgagttaccatgggttaccttaagttttaataaaaaaactcaagtcaagtttttatttgaagtatcaacaagaaaggattatactttattaaattattacagtggagactatataaaaagacaaggaagggaagaaatgaaaaatgttacaaaaaccatattatcaagatataatacattcagtaatctcttctcaagaggtgtctaa

SEQ ID NO: 409401 - DNA, 309 bp, Staphylococcus aureus
gtgtctaataaaaaagagttagaaaaggctttgatagatagtttgaaaaagggaaaaattatttacccgagtatctataagagacggtttaatattcctttgagtgatgtaattaaaataatgaatgaactttctaaaaacgatttagtatcattgaggtttaaaatagaaaccccagaatattctagcaataggttatataaattaggtaaacttccagaaagtgtttataatgaggaaacagatgaaaatattgaagtaacaaatgaaataataagacctgtatatgaagtgatttctaatgaatga

SEQ ID NO: 409402 - DNA, 516 bp, Staphylococcus aureus
atgaaaagattattatatttaattttagctagcgcgttagtgttaggtgcatgtggtagcaacgacggcgataagaaagaggaaagtaagaaaacggaaacaaagaaagagaacaaagacaaaaagaaagaaactaaagacaaagcagaagcgaaaaaagaaaatgctaatcaaaacgataacaataatcaagtaaacaaagataacaacacaaatgttaacgatcatcaacaaactaataacgcacctaaacaaaatcaaacacaaaataatcccacttctaataaaaacaacaatgcaccagtaaaagatgagttttcaagtgacacatcttataacgcttatcaagacgctaaaagagcaacagaagaaaacaaacgtcagaatggtggacatactgccggcataggtggttcatgggcagtacaagacggacaagactataattcatggaagaaagcacaaaatgatttcgacaatttcaaacgtcaaaatagcgaagtgattcaacaataa

SEQ ID NO: 409403 - DNA, 501 bp, Staphylococcus aureus
atggcaggagataaattaacttttaaagaaattctaacagaaacaaaaatgtttagtaaattaagcaatagaaagattgacatgtataaaaaaatgacaacagatgaaaaaagaaagatattaaatgattttaaagaaggaaaagaacttgatattcaactttataaatctgaaaattttaaaaacactaacgaagaatacgaatcaaaatcagctaaaagtttaaacggacaaggtattaaagaagctaccgacgttacaacttacgcatatcaaaagcaaaatattaaccctacactattgaaagtctacaacggtttaggtacattcacaacaaacgtagataaacaagctaaattcgtattctacgatacgcaattaaaacaaaactttgtctctatagctcaacgagacgaactaataaagcaaaataatagaattatcgagcaaaacaacgaagtcatagatttattaaaacaaatagcaaataaaggagtgtaa

SEQ ID NO: 409404 - DNA, 318 bp, Staphylococcus aureus
atgcaacaagaaagagaccgcttattaaaattaacaagacttcaactcaaatactcgaatctagcggggcaaattgaagcttatgacaaaacacttaaagaaataagatacactcgagatctttacaacaaatatctaagcatgaacaactatgacgcatttgctggtttggaaatggttgaagatgaaatcactgagaagcttcgaagtgtcataaaagaattacaaaaaatagaaaaagaaatgaacaagctcaacggagttgaaagtgataacaaagttactgatttaacagagtggcggaaagtgaatcagtaa

SEQ ID NO: 409405 - DNA, 219 bp, Staphylococcus aureus
atgaaaaatagtttgcaagctaaagaacttgcggtaattttatctgtttctaaatccaaagcaggacaaataataagagaactgaataaagagcttgaagacaagggatacattgcgatacgaggcagaataccagtccaattagctagagaaaaattcccttatcacggcttatcagaccagagaataatggaggagttgaaaaaagtaaatgagtaa

SEQ ID NO: 409406 - DNA, 261 bp, Staphylococcus aureus
atgtactacaaaattggcgatgtatgtcaaaaagtaattaatgtagacggattcgattttaaattagcagttaagaaacaagattacagcattctagtgaatgtcttagatttagaagatagatttatcgacggtataaatataacagatgagaatgatctatacacagcattagacatattaaatcaatctatttatgaatggattgaagagaacacagacgaaagagacaggctaattaacttagtcatgagatggtag

SEQ ID NO: 409407 - DNA, 537 bp, Staphylococcus aureus
atgaatgaattacaagagagagagctagaaacatttgaacaagacgaccgtttcaaagtaactgatctagacagtgctaactgggtttttaagaaactggatgcaatcacaactaaggagaacgaaatcaacgagttagcaaataaagaaattgaacgcataaacgaatggaaagataaagaagtagaaaaattacagagtggcaaagaatatttacaaagccttgtaattgaatattacagaatacaaaaagaacaagacagcaaattcaagttgaacacaccttacggaaaagtgacggccagaaaaggttcaaaagtcattcaagttagcaatgagcaagaagtcattaaacaacttgagcaacgaggttttaacaactatgtgaaagtaaccaaaaaacttagccaatcagacattaagaaagacttcaatgtaactgaaaacggcacattaattgacacaaacggcgaagttttagagggtgctagcatcgttgagaaaccaacgtcatacacggtaaaggtgggagaatag

SEQ ID NO: 409408 - DNA, 651 bp, Staphylococcus aureus
atggccgaacaacttaatttgtaccaaaaaatagcagatgttaaagcgaatattgcgggcttcacaaaagatactaagggttataacttctcgtatgtttcaggatctcaaatattacacagaataagagaaaagatgattgaacataatttattgttagtccccaatacgtcaaatgaaaattggacgacacatacttttaaaaacaaaaaaggtcaagaagtgacagaattcatagttgaaatggatttgaattatacatggattaatgctgataaaccagaagaacagtatgaagtaagttatcacgcttacggtcaacaaaatgatatttcacaagcacatggcacagcgttaacttatgctgaacgctatttcttaatgaagttctttaacattccaactgatgaagatgacgcagacgcaaaacaaaaacaagataaatattcaacagtaagtcaagaatttaaagacatactaactaaagaagttaatgattttatagccatagctaaagaaagtggattcgcggaaaaataccaggaacaaattaacaaattagaaaaaatgaacgtcgaagcactgaataaaaaccaaatcaatgtaaccagacaacagataaaaaaatggcttggaggaattgaacaatga

SEQ ID NO: 409409 - DNA, 444 bp, Staphylococcus aureus
atgaatacagtaaatttaattgggaacctagtggcagatccagagttaaaaggtcaaaataacaacgtagttaactttgcaatcgcagtacagagaccattcaaaaacaaacaaactaacgaatatgaaacagacttcattcgttgtgttgcatttggtaagactgctgaaatcatcgctaataactttaataaaggtaataaaattggcgttactggttcaatacaaaccggtagttatgaaaataatcaaggacagaaagtgtttactacagacatcgcagtcaacaatataactttcgttgaacgtaaaaacaacggtcgatctaacaaccaacaacagcataattcatataacgcaccacagaatagacagcaatcaaataatccatttgctaatgctaatggtcctatagaaatctctgacgatgatttacctttctag

SEQ ID NO: 409410 - DNA, 669 bp, Staphylococcus aureus
atggctcaaatcaaaaactatatcactcaagatgacggcacaacaacagtcgttatcgagggtgccgagctaggagacaaagaaacattattacttgataacggctacgaagtcgaatgtgatttgcgaatcgaagacccattcaaaataacagacaagcaacgaagaaaaatatttgcgctctgtaacgacatagagagccacacaggccaaccacgtgactatatgaggtatttgttccaagaatatgtaacggttctgtatggctatgaaaagagtatttcgttaagtgactgtacacggatgcaagcgaatcaaattatcgaggtaacactcgattggatatttcacaacgacataccgcttagttataaaacaagcgacttgctgaaacaagataaatcattcttatactggtcaactgttaaccgcaactgtgtaatatgcggaaagcctcacgctgatttagcgcattatgaagcagtcggcagaggcatgaacagaaacaagatgaatcactatgacaaacatgtattagcgttatgtcgcgaacatcataaccagcaacatgcgattggcgttaagtcgtttgatgataaatatcacttgcatgactcgtggataaaagttgatgagaggctcaacaaaatgctgaaaggaggagaataa

SEQ ID NO: 409411 - DNA, 822 bp, Staphylococcus aureus
atgggagaagtatcgtggataaaacttaaagttggcatgtttgatgacagcaaaatcaaatatatcgaagctttacccgaaagagatacgatcataactatttgggttaagttgctaactttatcaggaaagtacaacgaacaaggttacattatgctatctgaaaacttgccgtataacgaagaaatgttagcaaatgagtttagccgacctattaactcaataaggttagcaatacaaacctttgagacattgggcatgattgaaaaagttaatggtgtcataaaagtgacaaattgggaaaagcaccaaaatattgaaggactcgagaaaatcagagagcagaacaggttgaggaaacaaaagcaacgagaaaacaacagaaaattgctaaatggtcacgtgacgtcacgtgacagtcacgcaacagaagaagataaagaattagataaagaattagaaagagataaagaaaaaaatatagataagaacttaagtgcaaataatagcgcaactgacgttacgcatgagcaatttgaggaatggtggaaactttacaacaagaagaaagataagaagatgtcttttactaaattcaaatcatgcttaaagaaacattcttttgaacaaattatgcaaggtactcgagaatatttaaaaactattacagacaagcaatatcaaaagtaccctaaaacgttcttaactaacgaaagctatatgaatgattatagcgaagagattaaagaagaagtaaacaatcaatatgtagatgcgtttcagcgtgcatcacaatccagtatagaaaatttaccgttttaa

SEQ ID NO: 409412 - DNA, 786 bp, Staphylococcus aureus
gtggagtcattccagaacttagcaaagaaaccaactttaaaaaaacaaatcattgaacaagcgtttgatttgaaatgtgagaactgtggacgtaagtacgactattacaaattcgatgacggttcagaattcaaacatggttgtgactgcgaaatgatagagtacgccaaacaatcaactgaaaactatcacaagagaaatagacgaagaaaagcagaacgcatattcaaacaatcgataatgaacgaagatctaacgaaagcaacgtttgataattacaatccgactaatgaacaactagtctatgcgaaaaacttatgcgaacgttacgcaaacaatttcacgttagacaataaacaatcgctactaattcaaggctcatttggtacaggtaaatcacacttatcaatgagtattgttaaatcagttaaagctaaaggctacacagtgctatatatgaacgtacctcaattgatatcaacaattaaaaacacttataacaaccaaactgctatgactgaacaggaattggctcaaattataagtgatgtcgatttaatggtattcgatgactacggtatcaacatgaacgaattcgctactagtaagatgtttgagcttatcgaaagtagaataggcaaacacaatatctttactaccaacttagacgagaaagaaatgacaaaaaacaaagacttacaacgtatattcagcagaatcatgagcaacacaacgcttatcaagatggacggtcaagattacaggactagaggtttaaaactatga

SEQ ID NO: 409413 - DNA, 159 bp, Staphylococcus aureus
atgattaccaaagaatttttaaaaactaaacttgagtgttcaaatgtgtacgctcagaaactcatagacgaggcacagggagacgaaaacaagttatatgacctatttatccaaaaacttgcagaacgtcacacacgccccgctatcgtcgaatattaa

SEQ ID NO: 409414 - DNA, 222 bp, Staphylococcus aureus
atgccgaaagaaaaatattacttataccgagaagatggcacagaagatattaaggttatcaaacatgaagataacgagaatgaagtttattcgctcacaggagcccatttcagcgacgaaaagaaaattatgactgatagtgacctaaaacgattcaaaggcgctcacgggcttctatatgagcaagaactaggtttacaagcaacgatatttgatatttag

SEQ ID NO: 409415 - DNA, 186 bp, Staphylococcus aureus
atgcaacaacaagcatatataaatgcaacgattgatataagggtacttacggaagttgaatatcagcattttgatgatgtggataaagaaaaagaaacgctggcagattacttatataacaatcctgacgaaatactagagtatgacaatttaaaaattagaaatgtaaatgtagaggtggaataa

SEQ ID NO: 409416 - DNA, 369 bp, Staphylococcus aureus
atggcgaaaacagcaagaattgtaaggatacacgataaaccttataggttcagtaaatttgaaatggaattaatagaaagtcacggtataaccgctggaatggtttctaaaagagtaaaagatggttgggaactacatgaagcaatggacgcaccagaaggcatgcgtttaagcgagtacagagaaaagaaaacaatagaaagactggaacaagctagactcgaacgcaaattggaaagagagcgaaagaaagaggctgagctaagaagaaagaagccacacttgtttaatgtaccacagaaacatccaagaggacgttatgcgtgctacctgatggaaaacgacatattcgtgaaagttaagaagtag

SEQ ID NO: 409417 - DNA, 243 bp, Staphylococcus aureus
atgacagataacgcacgcaaagaatacctaaatcaattctttggatctaagagatatctgtatcaggataacgaacaagttgcacatgttcacgaagtcaatggcacttattactttcacggacattataaaacgatgtttaaaggcgtgaaaaagacatttgatactgctgaagagctcgaaatatatataaagcaacatgatttggaatatgaggaacagaagcaaccaactttattttag

SEQ ID NO: 409418 - DNA, 405 bp, Staphylococcus aureus
atgatgaaaatcaaagtaaaaaaagaaatgaaactagatgaattaattaagtgggcgcgagaaaatccagggttatcaaagggcaaaaatttttttacaacaggtaacggcgatggcatcgttcgttttcaaaaggagacaaatgagtgtacgacatcagtctgtgtgccacttgatgctcttttcgaagtcgaatatgaagaggaaatcacagaagagactaagtttgataggttgcttgaagtatatgagtttcgagaaagagcctatatgtcagcgctgcacacaaataccagtatcaaagaacgtttagagaacacgtctttccctaccaaagcattctacatcttaaacgatgacctaaccatgacgttaatctggaaagatggggagttgattaaataa

SEQ ID NO: 409419 - DNA, 276 bp, Staphylococcus aureus
atggaacacggttcaaaagaatattacgaaaagcaaagtgaatactggtttgatgaagcaagcaagtttttgaagcaacgtgatgagcttattggggatataggtaagttaagagaacgtaacaaagatttagagaagaaagcgagcgcatgggatagatattgcaagagcgttgaaaaagatttaataaacgaatttggcaaagatggtgaaagagttaaatttggaatggaattaaacaataaaacttttatggaggaagacactaatgaataa

SEQ ID NO: 409420 - DNA, 531 bp, Staphylococcus aureus
atgactaacacattaacaactgatcagttacaagagttattacaaatacaaaaggactttgacgatagaataccaacactaaatttacgagatagcaagattgcgtatgtggttgaattctttgaatggtttaacacattggaaacgttcaagaattggaagaagaaaccaggtaaaccgttagacgtacagctagacgagttagcagacatgttagcgtttggattgagtattgctaatcaacaagcagataacatggaagaaattttgggttatttagatgacggagattttaacgactatatagaacgagttgaaatcgattttaacgatagtgatgtagtagatgaatttatgtcaactatagatgaaatgtatgaaagtccatatagtagcaacttatttttaccgtttgcattagcgaacaactactacactatcgaccaactcattgacgcatacaaaaagaaaatgaaaaggaaccacgaaagacaagatggaacagcagacgcagggaaaggatacgtataa

SEQ ID NO: 409421 - DNA, 207 bp, Staphylococcus aureus
gtgacacaatacttagtcacaacattcaaagattcaacaggacgtaaacatacacacataactaaagctaagagtaatcaaaggtttacagttgttgaggcagagagtaaagaagaagcgaaagagaagtacgagaaacaagttaaaagggatgcagttattaaagtgggtcagttgtttgaaaatataagggagtgtgggaaatga

SEQ ID NO: 409422 - DNA, 351 bp, Staphylococcus aureus
atggaaactaaagatttatcattaaaaatagatgcaacaaaaatagaagttgcaggaattaaaaataaattcacagctcaatgtaaacttgcatattcatttatagctacgatagcaactatatttgcaactatatattcagacgggaaacagttagttattttttctatgttacttttcgtctttccaagtttcattgaatcattcggaattgccaatgaaaataaggttataactgcaatagttaaaatctataaatatatttttttattgtttctttatttctattcattatttttgtttggtatttttacgataagcaagatgcgtataattatacaaaagttatag

SEQ ID NO: 409423 - DNA, 198 bp, Staphylococcus aureus
gtgtattctttgatttcttatttgaacttacgctacaatataaatgaacatattgctttagctgcagtagagcaaagtacgttagaaaaacaaaaagaaagattgcactttcaagataatattaaaaaagcacataaaaaagtatatcgtgaatttgttagtaaacaaaataaagataaaaaggggaaggataaatga

SEQ ID NO: 409424 - DNA, 273 bp, Staphylococcus aureus
ttgctaaaaattattttgtcagtaacttttgttagagaagaagaaaaacaaatagtaaatagccttaaagaatatgatgttgaagtagtgataatgacagaaaaaaacaatcataaattatcctatttgcaagagtttaatttagcaataattcgtaatttatctcaagatatgtgtttacaaagagcaaagttatttgaatctttaggtatcaaatgtattaatacatttgattggtatgtcaacaattttttagacagttttcatgtgtag

SEQ ID NO: 409425 - DNA, 585 bp, Staphylococcus aureus
atgatccatgaacattgtaattcaaaaccttacatttatcattacatacatcaagatagaaccgtgccactatatgccgtatttgaattattcactttaggaaatctggtgtttttcactcgttgcatgtcccaaaatttaaatatagaagctcaaaaacaactaaaattatactccccagcatttgatcaaagtaaagatatactaggtgacatcattgattgtatgaaaggcttaagaaatgctatagctcacaatggtgtactttatgactgtagatttaaaactggagagacaagtaatagattaaaagaatatttagcagtaaaaatggatatacacaatttagatttcgacagaataattgattatctcattttattaattctaatttgttctggtctctcttattctaaagcagaactccaaagaattataaggcaattcgaacaaaaccttgattttttacgatcaaagataagcgagtcgacttatgataaaattataggcgttcgagcaagacctaaattaagaagtttaaagaactttatcaataaccttgatttttatctaaaaacagattaa

SEQ ID NO: 409426 - DNA, 840 bp, Staphylococcus aureus
ttggatttttaccagctttaccccaattggggtcaatataagcgtgctgatttaattggacaatcttcttacatcaaaaataatgatgtcgtcatatttaatgaagcatttgataatggtgcatcagacaaattattaagtaatgtaaaaaaagaatatccttaccaaacacctgtactcggtcgttctcaatcaggttgggacaaaactgaaggtagctactcatcaactgttgctgaagatggcggcgtagcgattgtaagtaaatatcctattaaagaaaaaatccagcatgttttcaaaagcggttgtggattcgacaatgacagtaataaaggctttgtttatacaaagatagagaaaaacggtaagaacgttcacgttatcggtacacatacacaatctgaagattcaagatgtggcgctggacatgatcgaaaaattagagctgaacaaatgaaagaaatcagcgactttgttaaaaagaaaaacatacctaaagatgaaacggtttatatcggtggcgatttgaatgttaataaaggtactccagagttcaaagatatgcttaaaaacttaaacgtgaatgatgttctatatgcaggacacaatagcacatgggatccacagtcaaattctatcgcgaaatataattatcctaatggtaaaccagaacatttagactatatatttacagataaagatcataaacaaccaaaacaattagttaatgaagttgttactgaaaaacctaagccatgggatgtctatgccttcccttactactatgtatacaatgatttctcagatcattatccaatcaaagcctatagtaaatag

SEQ ID NO: 409427 - DNA, 3786 bp, Staphylococcus aureus
gtgatacatgttttagattttaacgacaagattatagatttcctttctactgatgacccttccttagttagagcgattcataaacgtaatgttaatgacaattcagaaatgcttgaactgctcatatcatcagaaagagctgaaaagttccgtgaacgacatcgtgttattataagggattcaaacaaacaatggcgtgaatttattattaactgggttcaagatacgatggacggctacacagagatagaatgtatagcgtcttatcttgctgatataacaacagctaaaccgtatgcaccaggaaaatttgagaaaaagacaacttcagaagcattgaaagatgtgttgagcgatacaggttgggaagtttctgaacaaaccgaatacgatggcttacgtactacgtcatggacttcttatcaaactagatatgaagttttaaagcaattatgtacaacctataaaatggttttagatttttatattgagcttagctctaataccgtcaaaggtagatatgtagtactcaaaaagaaaaacagcttattcaaaggtaaagaaattgaatatggtaaagatttagtcgggttaactaggaagattgatatgtcagaaatcaaaacagcattaattgctgtgggacctgaaaatgacaaagggaagcgtttagagctagttgtgacagatgacgaagcgcaaagtcaattcaacctacctatgcgctatatttgggggatatatgaaccacaatcagatgatcaaaatatgaatgaaacacgattaagttctttagccaaaacagagttaaataaacgtaagtcggcagttatgtcatatgagattacttctactgatttggaagttacgtatccgcacgagattatatcaattggcgatacagtcagagtaaaacatagagattttaacccgccattgtatgtagaggcagaagttattgctgaagaatataacataatttcagaaaatagcacatatacattcggtcaacctaaagagttcaaagaatcagaattacgagaagagtttaacaagcgattaaacctaatacaccaaaaattaaacgacaatattagcaatatcaatactatagtaaaagatgttgtagatggtgaattagaatactttgaacgcaaaattcataaaagtgatacaccgccagaaaatccagtcaatgatacgctttggtatgatacaagtaaccctgatgttgctgtcttgcgtagatattggaatggtcgatggattgaagcaacaccaaatgatgttgaaaaattaggtggtataacaagagagaaagcgctattcagtgaattaaacaatatttttattaatttatctatacaacacgctagtcttttgtcagaagctacagaattactgaatagcgagtacttagtagataatgatttgaaagcggacttacaagcaagtttagacgctgtgattgatgtttataatcaaattaaaaataatttagaatctatgacacccgaaactgcaacgattggtcggttggtagatacaaaaactttatttcttgagtatagaaagaaattacaagatgtttatacagatgtagaagatgtcaaaatcgccatttcagatagatttaaattattacagtcacaatacactgatgaaaaatataaagaagcgttggaaataatagcaacaaaatttggtttaacggtgaatgaagatttgcagttagtcggagaacctaatgttgttaaatcagctattgaagcagctagagaatccacaaaagaacaattacgtgactatgtaaaaacatcggactataaaacagacaaagacggtattgttgaacgtttagatactgctgaagctgagagaacgactttaaaaggtgaaatcaaagataaagttacgttaaacgaatatcgaaacggattggaagaacaaaaacaatatactgatgaccagttaagtgatttgtccaataatcctgagattaaagcaagtattgaacaagcaaatcaagaagcgcaagaagctttaaaatcatacattgatgctcaagataatcttaaagagaaggaatcgcaagcgtatgctgatggtaaaatttcggaagaagagcaacgcgctatacaagatgctcaagctaaacttgaagaggcaaaacaaaacgcagaactaaaggctagaaacgctgaaaagaaagctaatgcttatacagacaacaaggtcaaagaaagcacagatgcacagaggagaacactgactcgctatggttctcaaattatacaaaatggtaaggaaatcaaattaagaactactaaagaagagtttaatgcaaccaatcgtacactttcaaatatattaaacgagattgtccaaaacgttacagatggaacaacaatcagatatgatgataacggagtggctcaagctttaaatgtggggccacgtggtattagattaaatgctgataaaattgatattaacggtaatagagaaataaaccttcttatccaaaatatgcgagataaagtagataaaaccgatattgtcaacagccttaatttatcaagagagggtcttgatatcaatgttaatagaattggaattaaaggcggtaacaataacagatatgttcaaatacagaatgattctattgaactaggtggtattgtgcaacgaacttggaaaggcaaacgatcaaccgatgatatattcacacgtcttaaagatggacatctaaggtttagaaataataccgcaggcggttcactttatatgtcacattttggtatttcaacatatattgatggagaaggcgaagacggaggttcatccggtactattcaatggtgggataaaacttacagtgatagcggtatgaatggcataacaatcaattcctatggtggtgtcgttgcactaacgtcagataataatcgggttgttctggagtcttacgcttcatcgaatatcaaaagcaaacaggcaccggtgtatttatatccaaacacagacaaagtgcctggattaaaccgatttgcattcacgctgtctaatgcagataatgcttattcgagtgacggttatattatgtttggttctgatgagaactatgattacggtgcgggtatcaggttttctaaagaaagaaataaaggtcttgttcaaattgttaatggacgatatgcaacaggtggagatacaacaatcgaagcagggtatggcaaatttaatatgctgaaacgacgtgatggtaataggtatattcatatacagagtacagacctactgtctgtaggttcagatgatgcaggagataggatagcttctaactcaatttatagacgtacttattcggccgcagctaatttgcatattacttctgctggcacaattgggcgttcgacatcagcgcgtaaatacaagttatctatcgaaaatcaatataacgatagagatgaacaactggaacattcaaaagctattcttaacttacctattagaacgtggtttgataaagctgagtctgaaattttagctagagagctgagagaagatagaaaattatcggaagacacctataaacttgatagatacgtaggtttgattgctgaagaggtggagaatttaggattaaaagagtttgtcacgtatgatgacaaaggagaaattgaaggtatagcgtatgatcgtctatggattcatcttatccctgttatcaaagaacaacaactaagaatcaagaaattggaggagtcaaagaatgcaggataa

SEQ ID NO: 409428 - DNA, 1842 bp, Staphylococcus aureus; identical to SEQ ID NO: 407788

SEQ ID NO: 409429 - DNA, 1518 bp, Staphylococcus aureus
atgtctactcaaaaaagtaatgcaatgaatttagatattcatggcaatcaatataaacccaaaattataatgagcattatattattagctacattctctggtgcattgatgcagacttcattaggtaccgctctacctactttgatgaacgattttgatatcgattttagtactgctcaacaagcaacaacttggtttttactcgcaaatggtattatggtaccactttcggcatttttagcgacgcgtatatctactagattgttacatgtatactcttacggcgccctattattcggattaattcttactgcaatcgcaccatcaaatcaagatggctggttaatatttctagctggacgtattgttacagcaattgctgttggtttaatgatgccattgttacaaatcatcattatttatatgtttccaataaaaccacgtggtactgcaatgggtctgagtggtttagcagtaggtctcgcacctgcaatgggtccaacttttgctggttggatattaaacaaaaaccacgtggtactaggtattacaatttcagactcatggcgtaatatttttgttcttccaatcattattatagcgatagcatttatattaagcttcttcttcatgaaagatgttatacctaatcgtaaacttaaattagatctctattctctaatactttcttgtatcggtttcggattatttttatggggattttcaaacgttgcaagcgaaggatggggaaatataaattacgttatttcaccaatttttttaagtatctttattctcactttgttcgttatcaaacaattaaaatctaaagatcctttcttggatttacgcgtttttaaatctaaaggtttcatgatagcgacaattggtttaatcgttgtaactatggcaatgtatggtgttgaaatgatgttacccacttacttacagaatatacacggtttctcaccatttgaatctggtttaacacttttagctggagcgctgatgttaggatttatctctccaatttcaggaatactgtacaataaaattggcattaaaagattagcgttcgttggtttcactattttgactttagcttcagttccatttggatttttaacagttaacacatcaccaacacttattcttgttctatatgcagtaagaatgtttggtgtggcaattttaatgatgccactcacaacaaatgcgatggatgctttaccagttgaaaaaggtacacatgctacagcagtaaataatactgctagacaagtagcatcatctatagcagtagcattactgacatctgttactcaaaatattattaacaaccatatgcctgcagatagtttaaaagaaagcaatccactcaaatatgcacaccttgctcaacaagcatcaatcgatggctttaatactgcatttataattggcattttctttgcaattataggtatcattttagttccatttttaaaaatgaatattattgaaagtgaggataaataa

SEQ ID NO: 409430 - DNA, 1920 bp, Staphylococcus aureus; identical to SEQ ID NO: 407816

SEQ ID NO: 409431 - DNA, 1260 bp, Staphylococcus aureus
atgagtaatacacaaaagaaaaatgtgccagagttgagattcccagggtttgaaggcgaatgggaagagaagaaggttggcgagttattagaatttaaaaatggtttaaataaaggaaaggaatattttggctcaggatcgtcgattgttaacttcaaagatgtatttaataaccggagcataaatacaaataatctgactggaaaagttaatgtgaatagcaaagaactgaagaattattccgttgaaaagggtgatgttttttttacaaggactagtgaggtgattggtgaaataggttatccgtctgtaattttaaatgaccctgaaaatactgtgtttagtggatttgtattaagagggcggcctaaatcaggaattgatttaataaataataattttaaaagatatgtcttttttactaattcatttagaaaagaaatgattacaaaaagttctatgacaactagagctttaacatcaggtaccgcaattaataaaatgaaagtcatataccctgtttctgctaaagaacagaaaaaaataggtgacttcttcagcaaactcgatcgacaaattgaactagaagaacaaaaacttgaattacttcaacaacagaaaaaaggatatatgcagaaaatcttctcacaagaattgcgattcaaagatgagaatggaaatgattatccgaattggagaacaattgaattaaaaaatattttagaaaacattgtggataatagagggaaaacaccaggtaatgctcctagtgaaaaatatcctttattagaagtgaatgcattaggatattatcgtccagcatatataaaagtaagtaaatttgttagtgaaaacacttataataactggtttagagaacatttaaaagaaaatgatattcttttttctactgtaggaaatactggaatagttagtcttatggataattacaaagctgtaatagctcaaaatatcgtaggattaagggtaaataataataacctcccttcatttatttactatatgctatcgtataagggaaatcagaaaaaaataaaaagaattcaaatgggggctgtacaaccaagtgtgaaagtttctcaatttaagtttataaaatatttagtaccaataaaagatgaacaagagaaggtagctaaactgttgattgaaatagataaattagtgaataaacaattaataaaaatagaattacttcaacaacgaaaaaaagccttacttaaatcgatgtttatttaa

SEQ ID NO: 409432 - DNA, 696 bp, Staphylococcus aureus; identical to SEQ ID NO: 407729

SEQ ID NO: 409433 - DNA, 744 bp, Staphylococcus aureus; identical to SEQ ID NO: 409376

SEQ ID NO: 409434 - DNA, 276 bp, Staphylococcus aureus; identical to SEQ ID NO: 409377

SEQ ID NO: 409435 - DNA, 618 bp, Staphylococcus aureus; identical to SEQ ID NO: 409378

SEQ ID NO: 409436 - DNA, 348 bp, Staphylococcus aureus; identical to SEQ ID NO: 409379

SEQ ID NO: 409437 - DNA, 444 bp, Staphylococcus aureus
ttggatgctatacaaagagatttagatacatatgattttttgaaagaagaactttataaaatattcatgtatgtaaaaactttttatttccagcacacaccatttgatgatagttatattgaagatatagaaaactacctgctaaattatgaaaataatccacataaatcattcatgaaaataaaagtttatgattataaaaactttttaaaacatttaaaaaacatattgattttaattaaacaaggaaaaaagccattagctcaagccggtcattttaaattaagcttttacgaagaggatttaaaattgttacaaaaaaattataaggctacgctagtcgatattaaaggattgaataaacatttttataaggaatgtgataggtgcttaaaagcatataatatttttattgagggtataaataaacatttatatgaatga

SEQ ID NO: 409438 - DNA, 669 bp, Staphylococcus aureus
atgaaaaacaaggagaaatatctaactaatttttctgaagccaaacgtaaaaaagctactcaaaagtacaatattataaaaccttttatcctaggcgaacaatctttatcaagtatttctaaaagtaaagggattgcgttaagcaccctttataggtggaataagtcatataaagaacaaggacttaaaggactaatctatgcgacaagagctgataaaggaacacgtaaaatagaaccaaagataattgatgaaattgaacgccttgcgcttatgaataaaagaaatagtatagccacaattcataggaaaatcactaattactgtaaagaaaataattttgatataccaagttataaacaaatttatagtgttattaaagcgatgcctaagtctgttattgatttctctcatcagggtgaaaaatactatcaaaataagtacgatttaatacaaattagagaatcctcgagacccaatgaaatatggcaagcagaccatactttgctagatatctttatattagaccaaaaaggtaatatcaatagaccatggctaactattattatggatgactatagtcgtgcaattgcaggctatttcttaagttttgatgccccccaatgctcaaaacacagcattaacactacaccaagcaatatggaataa

SEQ ID NO: 409439 - DNA, 1707 bp, Staphylococcus aureus; identical to SEQ ID NO: 407819

SEQ ID NO: 409440 - DNA, 807 bp, Staphylococcus aureus; identical to SEQ ID NO: 407820

SEQ ID NO: 409441 - DNA, 255 bp, Staphylococcus aureus
ttgaaaggaaaacaaacaccgagttatacactactaaaaaatgatgaattaaataaaatgctaaatcaaaaatttggcactggacggttgattattgaaaatgaaagaaaatggaaaaataaagaaataattaattttggtcaaattataggaaaatattacatagatggaaaatttatagaaactaaatggggtactgttcattattccaaaactggtagtcatattattccaaatggaaaggaaggtaagtaa

SEQ ID NO: 409442 - DNA, 123 bp, Staphylococcus aureus
atgtcaattcaacatttagatggttacatttctatagaagatttttttaagcatatggaagaattatcgaagaaagaagaattagaaaaagaaattaatcaatcaaagtctaaatatcaatag

SEQ ID NO: 409443 - DNA, 1482 bp, Staphylococcus aureus
atgcaattttcattttcaaatgatttaggaacactttttaccatcattttagcaattgcctttatcattaatttggttctagcttttattattatttttttagaaagaaatagacatacagccagttcaacatgggcgtggttatttgtactttttgtattaccattaattggttttatcctttatctattttttggaagaacggtttctgcgcgtaaactaaataaaaataatgggaacgtgttaacagattttgatgcgcttttaaagcagcaaattgaaagctttgataaaggtaattatggtacagataataaacaagttcaaaagcaccatgatttggtacgtatgttgttaatggatcaagatggctttttaactgaaaataataaaattgaccattttattgatggaaatgatttatatgatcaagttttaaaagatattaaaaatgctaaagaatacatccatttagagtattatacattcgctctagatggcttaggccaaagaattttaaaagcgttagaagagaaattgaaacaaggtctagaagtgaaaattttatatgatgacgttggttcaaagaaagttaagatggctaactttgatcattttaaatcgttaggtggagaagttgaagcattttttgcttctaaattaccgttattgaatttcagaatgaataatagaaatcatagaaaaatcatcgtaatcgatggtcaactaggttatgtcggaggatttaacattggtgatgaatatttaggtttaggaaaattaggatattggagagatacgcatttacgtatacaaggggatgcggttgatgcactgcagttgcgatttattttagactggaattcgcaagcacatcgacctcaatttgaatatgatgaaaaatattttcctaaaaagaataaatcattcggtaatgcgccaatccagattgctgcaagtggtcccgccagtgactggcatcaaattgaatatggttatacaaaaatgattatgagcgctaagaagtcggtatatttgcaatcgccctatttcattccggataactcatatataaatgccattaaaattgcagctaaatcaggggtagatgttcatctaatgattccatgtaagccagatcatcctttagtttattgggcgacattttcaaatgcatctgacttattatccagtggtgttaaaatttatatgtatgaaaatggatttatacattctaaaatgtgcttaattgatgatgaaatcgtatcagtgggcacagcaaatatggactttagaagttttgaattaaattttgaagtaaatgcctttgtatatgatgaaaatcttgctaaagatttaagagcggcttatgaacatgatattacaaaatcaaaacaacttactgaagaatcttatgctaatagaccattgtctgttaagtttaaagaatcgttagctaaattagtttcgccaattttataa

SEQ ID NO: 409444 - DNA, 162 bp, Staphylococcus aureus
atgtttgtagaacataaggggtcattaatggataccttaaaagaaatgcaacaagatttacaaagctcaatttcatatgccggtggaaaagacttgaaatcattacgtactgtagattatgttattgttagaaactctattttcaacggtgatagagattaa

SEQ ID NO: 409445 - DNA, 864 bp, Staphylococcus aureus
ttggatacgccgaagaaacaacaatttgcctttaacaatatacaaatgaacatgtcgaaatcagatgttgagaaaacattaaataaaccaaaaagagtgacatttaatgaatatggtacgaagtggtatacgtattatgatgacgattacaataattttataatgataagttacattaaagataaagttaatgtgttatatacaaatcaaaatatcatcacttcaaaatcaaaaattaaatacaatacaccgaaatcggttgtaaggcaaagattaggcgaaccagaaacagagattgttaaaggtagagtgcgttacgaacaaaataataaagaatatgatgttttccataaaaatcacatttatacgacggtattttatgataagcatcgacgtaataatgtaacagctgttttacaagtaagtgatgctatggaaaatagattaaaagaacaatatggagcaccttcgaaatcgcttgcagatagttttgaactacaaaattttgatttagttaatgctgaaagaaaacaacatcaattacctacattgaagtattctaaacagaattctgaaactgctcgtaagcatagtaaagatatggccgaaaatcattattttgatcatacaaatttaaaaggtcaatcaccatttgatcgattgaaaaaagatggtattacatttaactcagccggagagaatttagcatatggtcaagttagtagtatctatgcacatcaaggattaatgaattctattggtcacagaaaaaatattttaaatgatacgtttaaaatattaggtgttggtgttgattttaatgatgaaaaacaacctttttggacagaaaattatactggttaa

SEQ ID NO: 409446 - DNA, 399 bp, Staphylococcus aureus
atggaaaaatcgatcaaaataatgacaataataggaattgttgttcaaggtttagcaacggtatttagtttactattgatggttttagcagcatcaggtgtaatgactacagatgtgtcaacaacagttaatggtgaggttgacccagttgatgcagaaacagcagcagcaattttcactgtattattcttattcctatttatatttggaatcatttcaattattttaggtgcaatcggtatgtttaaagcatctaaaaacaaaaaaatgagtggtatattgttgattattggagctgtaataagtggtaacataattacatttgctttatggttagtcagtggtattaaactacttactaataacaagcctaaagatcaaataagcgacttatcataa

SEQ ID NO: 409447 - DNA, 489 bp, Staphylococcus aureus
atgactttcgaagaaaaactaagtcaaatgtacaatgaaattgcaaatgagatcagtgggatgataccagtagagtgggaaaaggtatatgtaattgcctatgtagatgatgaaggtggagaggtcgtttttaattatactaaaccaggaagtgaagaattgaattattattcagatattcctaaagattgcaatgtctcaaaagatttatttaagaattcatggtttaaagtttatcgaatgtttgatgagttaagagaagtttttaaaaaagaagatttagaaccgtggacatcatgtgaatttgactttacaagagagggaaatttgaaagtatcatttgattatatagattggattaaattaggttttggtccatctggaaaagaaaactactatatgtataaaaagtttggtgttttaccagaaatggaatatgaaatggaagaaattcgagaagtagagaagtatgttaaagagcaagagtag

SEQ ID NO: 409448 - DNA, 501 bp, Staphylococcus aureus
atgactttcgaagaaaaactaagtgaaatatacaacaagattgcgaatgagattaatgggatgataccagtagagtgggaaaaagtatatacgatagcctatgtaaatgatagaggtggagaggtcgtttttaattatactaaaccaggtagcgatgaattgaattattacacgaatatatctagagattataatgtttcggaagaaatatttgatgatttatggatgaacctgtattacttgtttaagaatttaaggaatttatttaaaacagaaggacatgaaccatggacatcatgcgaatttgactttacaagcgaaggtaaattaaacgtatcttttgattatgtcgattggattaaattaagtttaggtccgttagctagagaaaattactatatgtataaaaaatttggggttataccagaaatggaatatgaaatggaagaaattaaagaaatcgtgcaatatgttaaagagcaagatgaagctgaaatatag

SEQ ID NO: 409449 - DNA, 1737 bp, Staphylococcus aureus
ttggtattaagtggttgtggtgtccctacgaaatcagaagtggctcaaaagtcatcgaaagttgaagtgaaaagcgagcgaccaacgatacatttcctaggacaagcaagttatgaaaatgatatgaatatcgtcaaagatcaattggaaaatgcaggatttaacgtgaagatgaatatccaaccagattatggtagctatcgtacacaacgtcaagccggcaattatgatatccaaatcgatgactggatgacagtattcggtgacccgaactatgctatgacggcattatttagttctacaggatcaaatagtttattgaaagataaacatgtagaccagttgttaaataaagcttctactcaaaatgaagcagatgttaaacaaacatataagcaaattgaagatgaagttgtatttgataaagggtatatggcgcctttatatggatcaaaaaagaatttagtatatgacaataaagtgttagataaaaatagtgttggattgccaaattcacgtgcattaatatggcaacaatttgattacaacaatagtagagaacgagatacgcggccacttgtgatgacacaacaagatggtgaaattcctacattggatccaatacgttcaattgcgccgtcagtatattcaattaatatgaatatgtacacaaggttattattattagatgaaaatgaccacttaacaacgaaaggttcgttaagtcgtgattatgctgtgaataaggacaataaagcgttttatttcttgttaagagatgatgattattttgcgaaagtggtcaatggacaagcacgtaatactggagagcgtgtatcggctgaagatgttaagttttctttagatagagcacgtgataaaaagtctgtgcctaacaataatacttacaatatgcacaagcatataaatgacatcaagatattaaaagatgaggacatcgatcagttgcgtaaagagaaagacaaggacgataattccatctatgataagttgattaaagcttataacgtcaaatcgttaacgacagatggtcataaagtaaataataaagacggtatttatcaaattgttaaaattacgacagatcaatcgatgcctcgagaggtaaattacttaacacactcttcggcaggcattttatctaaaaaatttgttaatcaagtaaataaagaatatccaaaaggatatggggatagcagtacaattcctgcaaattcagatggaaaaaatgcgctttatgcaagtggcgcatacattatgacacagaaaaatgcatatcaagcaacgtttcaacgtaatccaggattcaacgaaacagaaaaaggtagttatggaccagctaaaattaaaaatattacattgaagtttaatggtgatccgaataatgcattgtcagaactcagaaatcattcaattgatatgctggcagatgtgaatcaaaaacattttgatttaattaagtcggataaaaatttaagcattattcgcaaaaatggacgcaagtcagtctttttaatgctaaatattaaaaaaggtatatttaagacgcatccaaacttgagacaagcagtagttaatgcgatagatcaagatcaatttattaagttttatcgtggcgataaatttaaaattgcttcaccgattacaccacttgtcgatactggtaacgagcaacgtcaagatttagaaaaagtagaaaaagccattaatcaataa

SEQ ID NO: 409450 - DNA, 1251 bp, Staphylococcus aureus
atgaagcgattaagtacaacattgaaagtacgattaattagtaattttttacaattgattattacgacagcgtttatcccatttatagcattatatttaactgatatgttaaatcaatctatcgttggcatatatcttgttgtcttagtgattttgaagtttccgttatctattatttctggctatattatcgaaatatttccaaaaaagtctctcgtgctgatttatcagttgacgatggttgttatgttagtgttaatgggcatatttagctctaaccagctatggcaaatcatctgcttttgcattgcatacgctatattcactatcgtttggggcttgcaatttccagttatggatacattaattatggatgcaataacggaagatgttgaacattacatttacaaaatgagttattggattacgaacttatcggttgctatcggagctttgttaggtggattaatctatggtcatagtatgttgatacttttcttagtcgcggcatgtatttttttaattgtactggtgattttatatatttggttgccagaagaccaaaatcaatcagtacgaactgttgctaatgcgcaaacgcctttttatcaacaatttcatattttgaaagtgttgcgtagttataaatcagttttaaaagatcgaaactatatgttaatgatttcaggattcagtattttaatgatgggtgaattctcaacatcttcgtatattgcaattagattaaaagatcaatttgagaccatcagcataggtccttatgatattacaggggcaaagatgttagcaattttactcatgaccaatactattggtgtcattgtactcacgtattttatttcaaaagttgtattaaaaatagattttaaaatagctttagtgttcggtttactattttatattgtcggttatagtggaatcacgtatctcaatcaatttagcttgctcatcttattcatgatgattgctactataggcgaaatcgtttattcgcctatatttgaagagcaacgctttaaaattattccagaagataaaagagggacatatagtgcttttcatgcattaggtattcatatgtcggaaacattagcgaggttagggattgtcttgggtgtgttcttaacctccttacaaatggggctgtgtatgtttatcttgttagtaatgggtgctttgttacttgttacaggtgtatttagaggacgaaagaaagtaagcatagattga

SEQ ID NO: 409451 - DNA, 1389 bp, Staphylococcus aureus
atgaatgaaacgtatcgcgggggcaacaagttaatcttaggtattgtattaggtgttattacattttggttgtttgcacaatcacttgtaaatgttgtgccaaatttacaacaaagttttggtgcagacatgggaacaattagtattgcggtaagtctaaccgcactattttcaggcatgtttgttgttggagcaggcggcctagcagataaaattggacgcgtgaaaatgacgaatatcggcttattattaagtattattggttcagcattaattattattacaaatttaccagcattgttaattttaggtcgtattatacaaggcgtatcagcagcgtgtattatgccttccacattggccattatgaaaacttattatgagggtgctgaacgtcagcgtgccttaagctactggtctatcggttcttggggtggaagtggtatctgttcactcttcggtggggcagttgcgacaactatgggttggagatggattttcatcttctcaattatcgttgccgtactttcaatgttactcatcaaagggacgcctgaaacgaaatcagaagttaccaatacacataaatttgacgttgcaggtctaattgttctagtagttatgttattaagtttaaacgttgttattactaaaggtgcagcacttggttatacatcattatggttctttggtttgattgcaatcgtaattgtagcattctttattttcttaaatgttgagaaaaaagtagataatccacttattgattttaaattatttgaaaataaaccttatacaggtgcaacgatttcgaacttcttattaaacggtgttgcaggtacattaattgtagcgaatacattcgtgcaacaaggtttaggttatacagcattgcaggcaggatacttatcaattacttatttaatcatggtgttattgatgattcgagttggtgaaaaattattacaaaaaatgggttctaagcgaccaatgttattaggtacattcattgtggtcattggtattgcacttatttcattagtattcttaccaggcatattttatgttatcagttgtgtcgtaggatatttatgtttcggactaggcttaggtatttatgcaacaccttctacagatacagctatttcgaatgcaccgttagataaagttggcgttgcttcaggtatttataaaatggcttcatcacttggtggcgcattcggtgtcgcaattagtggtgcagtatatgccggtgcagttgctgcaacgagcattcatacaggtgcgatgattgcactttgggttaacgtattaatgggaatcatggcatttatcgcaattttattcgcgattcctaatgatgataaacgtgtcaaagatgcgaaataa

SEQ ID NO: 409452 - DNA, 411 bp, Staphylococcus aureus
atgtacatttttatattgacatttacacctataactgaagaacgtttaatatttgttactaacaaagagatgaaagatttcaaattaaacgatattcaaaaccatacattacttgttactgaaaaagggtgtagttacagagaacagttagaaaagattctctataaatatagcttttcaacaaaacaaatgattgaatttctaggaattgagtcattgaaaaaacacttaaaaaattcagatgggattgcgctattgccggagtttattgttgcagatgaattagaaaataaaagtttgtttcaaatagatgtcgatgtcgatattacgaatttagaaacaactttgataattaatcctgaatccagtaagcaagtactagaatcttttgtaaaagatgtctttttataa

SEQ ID NO: 409453 - DNA, 507 bp, Staphylococcus aureus
atgctatgcgaatctaaaatcatcaataaaaacccaaaatatagaattattaaatatcatgatgagtacttaatgatcgatataataagcacttggattagtttattttttccatttattaattggttcatcccaaaagaatatgtcaaaattagtagagaagagtttgaaaatttaaatattgttaaacctgctaaaaagaatgttttttggccagttgcaggtatctctgctttattcgcagttacattaagaaagtatacacatttacttgacactcaacttgatagaaaattagttattgccatatgttgcatcacatttatagggattttaacattttatgtacgcctaattaaaaaatcatctttaaatatttataatactaaaaataaaaggtcaaaaattatcttaataccaacactaaaaaatttttgtttcacattgtttatatatgtttttttattttatggacagttattttctcatatgctctattatcaatga

SEQ ID NO: 409454 - DNA, 285 bp, Staphylococcus aureus
gtgactttagatataaccgtttttatgatatcaatcatcgttcttcaaatgattattggacacctatggcatgatattggtttaagttacataagaagtattctgctgatgttatttccgctaggtataggcgtttttgttcaacaaatgatttatttcgaacgacaatatcctaaatgggatgttcctcaacatataaaaataagactaaagtatatttatatcattacatttttggaatatgtcttgctatatttcactatgtttactgacatattcagatag

SEQ ID NO: 409455 - DNA, 1221 bp, Staphylococcus aureus
atgtggttagaaaaatttaaaaataagaataaagaaactaaatatagatattacgagaagtacaaagaccctctcactgccaaatggagacgtgttagcgtggtacttaataagaatggtaagcaatcacaaaaagaagctcaaagactcttaaatgagcgtatagaagcaaaactgaatgataagacacctactacacttaagtcactaactttccatgtcgcatgtgatgagtggtttcagagttatatcaaaacgtctgggtcaaaaagaacaactattaaaactaaattgagtaagctaaacactttgaagaaatttgtagatgaagatattttaatcaataaaataacactttcatatgcgcaacaagttttcgatgaaatggataataaaggttatgtatatcaagtaaacaaagatgcgttaagcatattcaaaaatgtatttgaatacactagacgtatctataaactgcaagatttagaatttttaaaagatataacgttaaataaaagaattaagtcttatgatgaagtgaaagctaaacgtaataagtacctcgaattaaatgaaatacaatctatcatcaaagatattaatacgaaggctcagaagatgcactcaggtatccataagcggttttatttattcgttgcactcatgacagaattccaagccttaaatggtatgcgtattggtgaaatgttagccattcaaaatgaagatatagactttgataataagagtttaaatattaacggaacaatccattggtttcacgatgaatctggtggattcggtgtaaaagataccactaaaacagagtctagttatagaacaattggattgagtagcagaagttgcgagatattaaagaaagcaatactggagaacaaaaaggattcaaaatggaatgatggatatctaaatagaaattttgtatttactaatcataaaggcaacccaatgcagactgaaagattcaataaaatccttagggaagcagctaaagatgttggtattgataaagaagtttcttcacatatattaagacatagccacatatcattactctctcaacaaggcgtgtcacttaaagctattatggatcgtgtaggccattccgaccaccgtacaacactttccatttattctcacgttactgaacagatggataaggatatgatgaacaaacttgaacaggtaaaacttggataa

SEQ ID NO: 409456 - DNA, 432 bp, Staphylococcus aureus
atgagaaaattattaggtttagcattagcaagtacgttaattttaggcgcttgtggtagcaacgacggagataagaaagaagaaagcaagagctatactacaaatgatatcgttaaaggttttaaagataataaattaaatgttatcaatgaaaaagaaatgacacgtgaagactttgggcttgctccaatgaagacggacgaagctaaaatgtttgttgttcaagatgataaaaatgctagagtaatgaaatttaaaaatagtgatgatctaaaacaaactaaaaaatattacgatgaattaggtaaagaaagtgcagctttctattcacatacccattctaaaggtaagtttttaatacaaatgaacggtgatatcgatgatgctactttcaataaatacaagaattctatggataaaacattaaagtga

SEQ ID NO: 409457 - DNA, 459 bp, Staphylococcus aureus
atgtatttatacgaaaagatggttattgaaaacaaagagataccaattgatgatgggaagtctttaggtaattttgagggtctctatgacaatggagttattttaattaataaaaatttatccgaaaggcgtaaagccgaagtgttatacgaagaacttgcccaccacaagttgacgtatggcaatattttagaccaatcgaagttcaacaatcgcaagttcgaaaattacgcacgtagacacggctttatctcagcagtcccgttacgtgaaattgtagaagcttacaattatggcgtacgtaacttgtatgaattgtctgagtatctacaattaagcgaagaatacatattagaagcaatagaacaatataaaaagatatatggtattggaactcactatggcgagtattctattacatttgagccgttgagagtttttaaatataaagaaatataa

SEQ ID NO: 409458 - DNA, 333 bp, Staphylococcus aureus
atgagaactaatgatgaaataattacaataattaaaacatcaatgaaagaacaaaatatgtcactaagtgaattagctcgtcgtgtaggtgtagcaaaatcagcagtatcaagatatttaaatttaactagagagttcccattgaatcgcgctgaagattttgcgaaagtacttggaataaaaacagaatatttattaggatttgctgaacgcgaagaatctacaaaacaagatactatcgccgcgcacttagatggagattttacagaggaagaattaattgaaattagaaagtatgcggagttagttagaaaagcacatcgaaatcagtaa

SEQ ID NO: 409459 - DNA, 264 bp, Staphylococcus aureus
gtggtactaaatttaaaaagattgagagcggaaagaatagcttgtggtattacgcaagatgaaatggctcacaaaatggggtggaaaacaagaacgccttatgcaaagagagaaaatggaatagtagatattggagcgaatgaatttattaaaatggcaaaaatattaggttatgaaacaaataacctagatattttttttaccaataacgttcccagaaaagaacgtaaaaacatcttaaaaggaggtgaattaaatgtctag

SEQ ID NO: 409460 - DNA, 273 bp, Staphylococcus aureus
atgtctagaacaaaattgcatgatgtaccagctaaagaaaatacaattacagaaccaaagcaagttgtagtgaatcctttgtttgcgaaacctaatgcactagctagtatttttggaatttcatatagttcggtgaatcgcattttaaaagaatgggaaaaagattctaaaggtgttgatgatttatattactcgttatcatcaacaatgattgttataagtattccacgattcgaggagtacatgaaggcacgtcataaaaaatggatgtag

SEQ ID NO: 409461 - DNA, 363 bp, Staphylococcus aureus
atgaataaaaatcaattaaagtcagaaattttagaatatataaaggcgcatgctggtacatcatttgtagaaatagaacgtgtatttgaagaaaataactttgattataaaggtgacggcgcatatacaagtggtcaacatcccaatgttgtgttttggattgggtggaatcaagaagcgtttgatgttatcgctgaacttaaaaaagacagacgtattgagatggatatttgtgagccaattgtttatatggttgatggtaaaggtttggatttgcctattgtaaggtcgaaaaacattaaaacagatcattggctacctgtcacgtttactattagtaagaaagaaacggagtgtgtctaa

SEQ ID NO: 409462 - DNA, 342 bp, Staphylococcus aureus
atggataaaaagcaaataaaagacttcgtttgtgattatcataagcgaactagaagtgatgtgttgatagatgatgaaataaataccgatgaattcttttcaataggtgatgaaaattccaatgaatggatggcagacgataacattgatgatcatattgtaaagaatcacttagaaatgattgttgaccgagtagctaatgataaagagttttatattttcgattctttaatacaaggacgtagttttaaagatattagtaatgtcttagagtgttcagaacaatctgtaagattatggtatgaaaccttattagataaaattgtggaggtgatagaatga

SEQ ID NO: 409463 - DNA, 570 bp, Staphylococcus aureus
atgagtgagttaacggcaaaacaagcgcgttttgtgaatgagtatataagaacacttaatgtaacacaaagtgccataaaagcaggctatagcgcaaatagcgcacatgtgacagggtgtaggttattgaagaagccacacatcaagcaatatatacaagaacaaaaagataagattatagatgagaatgtattaaccgcaaaagagttactacatgtgcttacgaatgcggcagtcggtgatgaaacagaaacgaaagaagttgtagtcaagcgtggagaatataaagagaatccaaaaagtggcaaagtacaattagtctataatgaacatgttgaactgatagaggtaccaataaaacctagtgatcgtttaaaagctcgtgatatgttgggtaaataccataagttatttacagataagcatgatattaacgggaatgtgcctatattcattaacattggtgaatgggatggcgatgatgaggaattagataaggcagtgaaagatgtatctaacgctaatcctaatcatactgtgattgtggatgatattccgttagaggattga

SEQ ID NO: 409464 - DNA, 558 bp, Staphylococcus aureus
atgaataaaaaactattaacaagaacattgatagcaagtgctttagttttaacaacagtaggttcaggttttcattcttcttcaaattataatggtattaataacgttgcaaaggcttctgaaataacagatagagacttatggaaaaatgtaagagatgctttgaaagaagcaaatattatcgataaaacagcaaatgagacagttggtgttacgtacaatttaaataatggtggcgaaagtagtattacgggtacagctgatttagatgaacttagtaattttaataacaagccgattaataccgatagtgttaaaagaattgatttgtcaagaataaatccaaatggaaataggtttgacgcaaatgatgcatggaaaaaattaactgacaaattaaaagagaaacaaatcgttaaaaacggcgacacagtaactatccatagtaaagataaaaatgatcccccaatttcagctaaagttggtgaaaactataatggcaacaaggggttaatgctaaatcagagagatataacaaaaataactataactaaataa

SEQ ID NO: 409465 - DNA, 1281 bp, Staphylococcus aureus
atgcaaagtttagataagaatttccgacatttatctcgtcaacaaaagttacaacaattggtagataagcaatggttatcagaagagcaattcaacattttattgaatcatccattaattgatgaggaagtagcaaatagtttaattgaaaatgtcatcgcgcaaggtgcattacccgttggattattaccgaatatcattgtggacgataaggcatatgttgtacctatgatggtggaagagccttcagttgtcgctgcagctagttatggtgcaaagctagtgaatcagactggcggatttaaaacggtatcttctgaacgtattatgataggtcaaatcgtctttgatggcgttgacgatactgaaaaattatcagcagacattaaagctttagaaaagcaaattcataaaattgctgatgaggcatatccttctattaaagcgcgtggtggtggttaccaacgtatagctattgatacatttcctgagcaacagttactatctttaaaagtatttgttgatacgaaagatgccatgggcgctaatatgcttaatacgattttagaggccataactgcatttttaaaaaatgaatttccgcaaagcgacattttaatgagtattttatccaatcatgcaacagcgtccgttgttaaagttcaaggcgaaattgacgttaaagatttagcaaggggcgagagaactggagaagaggttgccaaacgaatggaacgtgcttctgtattggcacaagttgatattcatcgtgctgcaacacataataaaggtgttatgaatggcatacatgccgttgttttagcaacaggaaatgatacgcgtggtgcagaagcaagtgcgcatgcatacgcaagtagagatggacaatatcgtggtattgcaacatggagatacgatcaaaaacgtcaacgtttaattggtacaatagaggtgcctatgacattggcaatcgttggcggtggtacaaaagtattaccaattgctaaagcttctttagaattgctaaatgtagattcagcacaagaattaggtcatgtagttgctgccgttggtttagcgcaaaactttgcagcatgtcgcgcgctcgtttccgaaggtatccagcaaggccatatgagcttgcaatataaatctttagctattgttgtaggtgcaaaaggtgatgaaattgcgcaagtagctgaagcattgaagcaagaaccccgtgcgaatacacaagtagctgaacgcattttacaagatttaagaagccaacaataa

SEQ ID NO: 409466 - DNA, 666 bp, Staphylococcus aureus
atgaaagcgaaactatggtttttattgacaactttggcatttttgattgcagtaacgggatctattggaatagcagaagtaaaagcaaaaacaactggattgattacagaaaatagtaatgacagtttaaaagagcattatgcacaaaaatttgaagtttatacgaataaagaagtaacaggagttggggaaaattatatagacacgaaagttgacacctacaatgtacggacagtgctctacaacactgattatttgaaacagtttaaaaatcaagacaaagttaatatatggggaacattatatgaaaaccaacaatctaaagtatatcgtggcacagtagttaagtatgatcctatatcaaaagtaactaacttatcttatagaatgaacttgtttgttaacggtcatcaaactaaagtgaatccagacagtttattagaagttaagaataaacagatttctctaaaagaaacagattttagaattagaaaatatttattagaaaaagaacacctatatagtaattacaattcaggggaactaattatagaaatgaaaaatggagcaagacataaaatagatttaggcgacatattgagtgactcacaagaaaaaacgtttgattttgataatattagtcatatagatatttatatgaaatag

SEQ ID NO: 409467 - DNA, 1995 bp, Staphylococcus aureus
atggaaaattattgtattttaggaaatcctaatgttggtaaaacatctttgtttaacgctttaactggttcgtatgaatatataggcaactggagtggcgtaacggtagagaaaaaagtagggaagcttaaagaaaatgtaggacaattaattgatttaccaggtacatatgatttatcgccgatttctaaagatgaaactgtagtgacagactatttattaaacgattcattttcaggaatcattaacattgttgatgcgagtcaactaaaaagaaatatgcaattaacagtacaattgttagaacttaataaaccaatatacatcggattaaatatgattgatgtagctacaaagcgcgggataaaaatcgattatcataaattgatgaaaaagttaaaaacacctatttttccagttgtggcacgtacaggcaaaggaactaaacatttacttggcgaaataaagcatctaggggaagggtatcaaccgcattttaaaatcaattatggtgagaagattgaagagacaattaaaaatatgtgtcaaataataatgacagagacatctcatgataagtatcaagctaggtttattgcgattcaattcttattaaataacatgcaaattgcaaacgaacttaattcagaggttgtaaataaattgtcgagttttcgtgatcaagttgccgaacaagtagaagctgtatctgttcgtcgagagatggagcgtatacgcaatcattatattgagacgttattgcaagacgtggtaacgtatccagatgaagataagcaatatttcagctctagaattgacaagatattaacacataaatatatagggatgccgatctttctagcgattatgtggttaatctttcaaactacatttacatggattggcacacctttgtcggatcaactcgatgcatttataggtggtacatttacggatagtgtgaagacgattatgaattatcttggcgttataccatttttacaagatttaattacagatggcattattgctggtgtaggatcagtattagtctttgtaccacaaattgttgtgctctttttctttatatctttattagaagattcaggttatatggcacgtattgcggttttaatggatcgtattatggaatcgttcggtttaagcgggaagtcttttataccgatgattatcggatttggttgtaacgtaccgagtattatggctgcgcgcagtattgaaaatgaaaaagagcgtttaacaacgatattaattgcaccattcatgtcatgctctgctagactgccagtgtatgcattgttcgtaggtatctttttcaaagagaatcaatctttagtagtattaagcctgtatgttttaggtattattatggcatttttagtcagtacagtacttactaagacggttttaaaaaatgataatgcaatctttattgtggaattgccaacataccgtgtgccttccattaaaacgttgtggcgtagtacttgggaaaaggctaagggctttgttcgtaaagcaggtacatttatttttggcggctcagtagtcatttggctattaagttatgtagggccacatggtatcaatgtgaatatcaatcaaagttttttacatatggttggtagcttctttggtatgttagtgcaaccgctcggatttggaacatggcaagcaggtgctacgttagtgccaggatttttagcaaaagaagttatcgtaagttcgatggcgattatctattcatcaagtgatgcaggccttgtcaatgtgattcaaaatcaatttacaccgctatctgcgtatgcatttatgatatttatactattgtatattccttgtgtttctacagtggcagcaatccgtaaagagacttattcatggaaatggacggcacttgcagttgcctatcctctagtcactgcatatgtcttaacattcattttttatcaagtcggacatttatttgtttaa

SEQ ID NO: 409468 - DNA, 549 bp, Staphylococcus aureus
atgaaagagaccgatttaagagtgattaagacaaagaaagcattgtcttcaagtttgcttcaattgttagaacaacatctgttccaaacaattaccgtcaaccaaatatgtcataacgcgctcgtacaccgtacaacattttataaacatttttatgataaatatgacttacttgaatatttgttcaatcaattgaccaaagcatattttgcgactgatattagtgatcgccttaaccacccattccaaacgattaacgatacaattaataataaagaagacttacaaaaagtagcagacttccaacaagaagatgcagagtttaataaagttttaaaaaatgtttgcattaaaattatgaatgacgacatcaaaaacaatagcgacagaattgatgtcgatggagatattcctaataatttattattttatatatacggttcgttgattgaaggttttatgcattggataaaagatgaaaaaattgactggcctagcgaggaaattgataaaattttccataaggtaataaatattaagattaaatag

SEQ ID NO: 409469 - DNA, 600 bp, Staphylococcus aureus
atgactgaaaaagaaaaaatgttagcagaaaaatggtacgatgcaaactttgatcaagacttaataaatgaacgtgcacgagcgaaagatatttgctttgaattaaatcatacaagaccgagtgacacaaataaaagaaaggaattaatcgatcaattatttcaaacaacaacagacaatgtaagtatttcgattccttttgatacagattatggttggaacgttaaactaggaaaaaatgtctatgtaaacaccaattgttattttatggatggtggacagattacaattggcgataatgtttttataggacctaattgtggattctatacagcaacacatccacttaattttcatcatagaaatgaaggttttgaaaaagccggacccattcatattggcagtaatacttggtttggcggtcatgtagccgtgttaccaggggtgacgattggagaaggtagtgtgattggtgcaggtagtgttgtcacaaaagatattccgccacacagtttagcggttggaaatccttgtaaagtcgttcgtaaaattgataatgaggtaccatcagaagcattgaacgatgaaacactatattag

SEQ ID NO: 409470 - DNA, 456 bp, Staphylococcus aureus
atgtcgaccaataaaaacgattatgagcatatgttgttttattttgcatataaaacgtttattactaccgctgatgaaattatagagaagtatggtatgagtcgtcagcatcatcgttttttgttttttatcaataaattacctggtattactattaaatcattactagaaatattagaaatttctaaacaaggatcacatgcaacacttcaaaaattaaaagagcaaggtctcattattgaaaaaattttagagactgatcgacgtgtcaaaaaattatattcgacggataaaggcaatcaactcattgctgaattgaacaaggcgcaagatgaattattgcaaaatatatatcaacaagtcggttcggattggtatgatgtgatggaagcattggctaaagggcgacctggctttgattttattaagcatttgaaagatgaaaaagaaagctag

SEQ ID NO: 409471 - DNA, 873 bp, Staphylococcus aureus
gtgaagtatagaaaattaataattttagtgctgagtatcttgatcatattgcctgtaagcacactggatggtcatcatattgcaaatgcagatgacgatccacctaaaaaactgaaatataaagaaaatagtgctctggcattaaattatcaccgtgtaagaaaagcgaattttctgaataattttatttacttcttttctagtagtaaagaaattaaaaattatagtgttagtcaatcacaatttgaatctcaaataaaatggctaaaatcacatgatgctaaatttttaaccttgaaagaatttttatattacaagaaaaaaggtaagtttccaaaacgaagtgtatggattaactttgatgatatggatgaaactatttatgaaaatgcttatccaatcttaaaaaaatataaaataccggcaactgggtttattatcacaggtcatgttggggaagaaaactttcacaacctcgatatgattagtaaaaaagaactaaaagaaatgtataaaactggtttatgggaatttgaaacacatactcacgatttgcataacttatctaaaaataataagtcaaaattaatgaaagcttctgaagctacaatcataaaagatttaaacaaaagtgaaaaatatctaactaaaaactttaaaaagtcgcagaaaactatagcctatccttatggcttgatgaatgacgataaattaccggtaatcaaaaaagctgggttaaaatacggtttttcattagaggaaaaagcagtcactccgaactccaatgattattacatccctagaatattaattagtgatgatgcttttgagcatttaattaagagatgggacggattccatgaaaaagattag

SEQ ID NO: 409472 - DNA, 1053 bp, Staphylococcus aureus
atgaaaaagattagacttgaactcgtatatttacgtgctattatatgtgcaattattattatcacacatttacttacacaaattactttaaaacatgaaaatttggagggaggatccttagtattacaattttacattcgtaatattgtgatttttggtacaccttgctttattatcttgtcacagttattgacaaccttgaattaccaaaaagtcacctatagatacttaactacacgcgtaaaatatatacttattccttacatattaatgggattgttttacagttatagtgaatcattattaacagattcaagtttcaataaacaattcattgaaaatgtcctattaggtcaatggtatggctattttatcgttgttatcatgcaattctttattttgagttatatcatttttaaaattaactataacctattcaatagtaaaatattattattgttatcttttattttacagcaatcatttttatattactttacgaataacacagcgtttcacgataccgtgctacactattatccattaagtgaaaacactataatattcggatggattttttatttctttttaggtgcatatatgggttataactacgaacgtgtattaaatttcttagaacgttatttagttattatgattgtattagctgtagctacttattttgtgtttattgcgttagcaaatggagactattggaacgttaccagcttttcatattcattaacaccatataatagtattatgtttattgttatcttgggtatttgcacgcattttaaaacaatgttatttaatacgattcaaatgattagtgctttctcattctttatttatttattacatccaatcattttagactcattgtttgcatatacaaatatatttgaggataatacaatggtctttctagcgatatcactactattcattttaggattatgtataggtgtcggtatgatattgcgtgaattctatatctttaggtttattattggaaaacaaccatataaattgaacattaatgcttattaa

SEQ ID NO: 409473 - DNA, 2046 bp, Staphylococcus aureus
atgatgaaaagtcaaaataagtatagtattcgtaaatttagtgtaggtacatcttccattttaatagctacattactatttttaagtggtggacaagcacaagcagctgagaagcaagtgaatatgggaaattcacaggaggatacagttacagcacaatctattggggatcaacaaactagggaaaatgctaattatcaacgtgaaaacggtgttgacgaacagcaacatactgaaaatttaactaagaacttgcataatgataaaacaatatcagaagaaaatcatcgtaaaacagatgatttgaataaagatcaactaaaggatgataaaaaatcatcgcttaataataaaaatattcaacgtgatacaacaaaaaataacaatgctaatcctagcgatgtaaatcaagggttagaacaggctattaatgatggcaaacaaagtaaagtggcgtcacagcaacagtcaaaagaggcagataatagtcaagattcaaacgctaataacaatctaccttcacaaagtcgaacaaaggaagcaccaccattaaataagtcagatcaaacaagccaacgaaaaattgttaataagacagaaatagaaaaagtacaaccacaacaaaataatcaagcgaatgctaaaattactaaacacaattttaacaatgaacaagaagtgaaacctcaaaaagacgaaaaaacactatcagtttcagatttaaaaaacaatcaaaaatcaccagtagaaccaacaaaggacaatgacaagaaaaatggattaaatttattaaaaagtagtgcagtagcaacgttaccaaacaaagggacaaaggaacttactgcaaaagcgaaaggtgatcaaacgaataaagttgccaaacaagggcagtataaaaatcaagatcctatcgttttagtgcatggtttcaatgggtttacagatgatattaatccttcagtgttagctcattattggggcggtaataaaatgaacattcgccaagatttagaagaaaatggttacaaagcttatgaagcaagtataagtgcttttggaagtaactatgaccgcgcagttgaactttattattatatcaaaggcggtcgtgtagattatggtgcagcacatgcagcaaaatatggacatgaacgttatggaaaaacatacgaaggaatttacaaagactggaaaccaggacagaaggtacacctagttggacatagtatgggcggtcaaacgatacgtcaactagaagaattactgcgtaatggtaatcgtgaagaaatagagtatcaaaagaaacatggtggtgaaatttctccactattcaaaggtaataatgacaatatgatttcatcaattactactttaggaacaccacataatggtacacacgcatcagatttagctggtaatgaagctttagtgagacaaatcgtatttgatatcggtaaaatgtttggtaataaaaattcaagagtagacttcgggttggctcaatggggtctaaaacagaagccaaatgaatcatatattgattatgtcaaacgcgttaaacaatctaatttatggaaatcaaaagataatggattttacgatctgacgcgtgagggtgcaacagatttaaatcgtaaaacgtcgttgaaccctaacattgtgtataaaacatacactggtgaagcaacgcacaaagcattaaatagcgatagacaaaaagcagacttaaatatgtttttcccatttgtgattactggtaacttaatcggtaaagctactgaaaaagaatggcgagaaaacgatggtttagtatccgttatttcttctcaacatccatttaatcaagcttatacaaatgcgacggataaaattcaaaaaggcatttggcaagtaacgcctacaaaacatgattgggatcatgttgactttgtcggacaagatagttctgatacagtgcgcacaagagaagaattacaagatttttggcatcatttagcagacgatttagtgaaaactgaaaaggtgactgatactaagcaagcataa

SEQ ID NO: 409474 - DNA, 162 bp, Staphylococcus aureus
atgaaaaaattattcaatgaatatttttttactacgagtcaagcaactgcattaattattttttcgttaccaatgacagacttattcactaagaaccttttattatatatgcttctatttattgtaataattggaagtacacatttattgagagagagttaa

SEQ ID NO: 409475 - DNA, 1287 bp, Staphylococcus aureus
atgggaatttatcatttaaataaagataaagatgtattgacagatttaaagtcaaatgaaaaacaagagcaggttgctacatttataaataaacatctttcagcaaataatttaacgatatttatcggttcaggatgctcgacaggtgctgttcctttaatgtctactacaatgaaaaacatattagaagaaaatgagagtgtcttaaattatgtaaaaaaatttctgaattctaaagggattaaagaatttataaagtatgtagaagaacaagaacaagaaaaaatacaagagaaagaaagaaaagcgttacatacaataatggatcaattagaggctgaaaattttaaaaatttagaagaatatagtggttggttagatatgcaagatagtgaatataaagaagaaatattgaattttttagattgttattatctaaattatagtaatattgaggaattactaaattggatacaaaatggacttcattatgacaataataatggagatttgaaagacgtgtttactactttaaaaagtgagtttataaaaactattcctaaagtgggtgataaagaatacagtacagaaacttatgaaatatataaggacttttatcgttatgtatttgataaaagaactgaacaaaaatctaaagtatcaattttcactacaaattatgatttgtttaatgaatatgcacttgagaataataatattatctatagtacggggattcaaaatacaatacttaaaaaatttgacattaatcaatttaaatacagagttgtagatgatacaaacaggtataaagaaaaatggcaaccagtatctaaagaggcaaatttatataaaatacatggttcgataaattggaagtccaatgaagaaggggaattgcaacaaatcgattttaatgatgaagatgatcaggtggtcatttatccaaccatgttgaaacacaaggaaacagcacaagcaccgtattcagaattgttcagagaattctctaattgtttacagataaaagatactactttaattattatagggtatggattcccagatgaacatattaataatataatagctcagaatttaaagaatcaagattttaatttaataatatttggtgatgttaaagaagaaaacgtgaagaatttctatgataattttaagaattttaatttacatcttatcggaggtaattcaagtaaagcagagcaaaaagcacattatttccagtttatcgtagaaaattttctgaaaaatcaaaggagaagataa

SEQ ID NO: 409476 - DNA, 1689 bp, Staphylococcus aureus
atgcatagtattggaaaagtcacaagtgttacatttgaaaagttaatattcgaagttagtgattttgaaaaactaaattataatttgttaggtcaaatttacatagctaaaggtgtaatagactatgtaacaataaaaaatgaatatagtgaaaaatttatatatcaagttgtaaaagtagaagataaagaaattccattatcttctgaagagcactctaaatttaaatatcatggtaggtttgagtgtgtaccagtaggaatgattaaacatggaaaaattgagtttaatttaaagaaatatccttttttacaagataaagtttatttaacaagtcaagaagaaatggaaatggtattttcacattttcataatggaaatgatataactattggactcattgatgaccaatatccagcttattttaatactgctaaattattaacgaatcatacagctataattggaaatactggatctggcaaatctacaacagtacgtcagattatttcaaaaatcaacaatctaaacacccaaaatttacactttcacatattcgatgtccatgatgaatataaagatataaatggagtgaaaatagtagatgtaataaatgactttaaaattaatattaaaaatttagagatgcaagactggataaatttgattaaaccatcggaactagttcaattacctattttacaaatgggattaaaatatgccaatgctattgaaaataaaattatagaggaagaatggttgaagtgttatatagcgctatcattatatagaaatcagcaaacagatgctgttacaaagcgaactaagattttaagcatattagatggaacaaatattgacacagaaaaatatgattctaaatatggaaatatggacagcaatactgaaaaaaaatttatcgagagtttgaaaaatgtagtagataatggtggtaatatatttactttaagcgaagtaattgaaaaagcaaaatataatgtatcgagttttaataaattattagaaggattaaactatgtatttttacttgaagaaagtaaaggaaataatcaagcaagatcatattcagcaacacttgaaacgcgtataaaaaatgttcaaacacgattttcaaatttatttggaaataatgatactgaactggaagataaatcaattgtttattcagtttcagaattagatgatgatttgttattatttttcacaacatttattttaaaaaaagaatttgaaaaaaacaaaaaaatgaaattagaagatcgttcagtgaacgtttttatatttgaagaagctcatagatatatatcgaaatttaaagaaagtagccaatttaatgaagtagaagcattcaaaaagatagctagagaaggaaggaaattcggttgttttttaatgttatctagtcaaaggccaagtgagctgtcttctactgtcttatcacaatgcaataattatatagtccatagggtaaaaaataatgtagatttagaatatttactaaattccattccctacataaataaatttcaattaaatcgtttttcttatttacctactggaacagcttatatagtaggagaattatttccaatccctgtagaaatagaaatatttgaagagttttcgaaaaacagcacgattacacctgaaatagtatatagatcttga

SEQ ID NO: 409477 - DNA, 138 bp, Staphylococcus aureus
atggccaaattaatacatttactttcaattttatatagacttagttcagataagaaatttactgtgaaacaaatttcagacacctgtcataatggtgggaaatctttatatagtgctattacaaatttgaaaaaataa

SEQ ID NO: 409478 - DNA, 612 bp, Staphylococcus aureus
atgaaaacacctatttattatacgattgtaaataaaggcaataatattgaaaatacaatatttcagacaccaccaaatacagttagtgactttgaccatttggatgttatgcgttacttaccatcaattgttgatattagtgagatttgtttattagccgaagcaaaaaaaataccagagtttaaaaaatcgctagacttcattcttaataaatttgaaacatatacatttaatattgttaatgatttaattgaaataacactaacgaaagacgcattattaaattatcaaaagtacttgttacatcaatcaatcataataagtaaatcattagctttaaaaaatagtaacaatggtttatgtacacaagaattaaaatcccaattatatggatatgaaaagcttcattatgaaccagcctttcatatattagataacgatttaattcctaatattaatgaagagcaaagtgaattgataccccttgagcatgttgttttattatctgatgggattagttatttaatggattattttgacaaaaatcctgaagcaactttcacattatacattgtgaaagattacacaagttattacgaggtagaattataa

SEQ ID NO: 409479 - DNA, 408 bp, Staphylococcus aureus
atgacattattagaatacagtaatattggaaacacaccatttgaaaagctattaggtcataataaaaacttattaaaatactggaataatttatccgattttttaagtagcgatggggcaataagtaaagaattaaaagaggagttaagaaggttactggcccagcaaaacggatgtcaatattgcaaagcaaaaggtagtcctacaaataaatttctaaacgaaaaatctctactttgtgttggctttgttgaagtttatttaaaatctaaacaaaacatacccgaatcaagtataagtttattaaaagaaacgatgacagatgaagaaatcattgaattaattacattcgtattatttactactgcacagcaacatttaggagcaatattaaggctatctgaataa

SEQ ID NO: 409480 - DNA, 1119 bp, Staphylococcus aureus
atgccaacaataactcaaaatcgacacttagaaattaaaagagctggctttcacgaactatttttcgatttaatatttgtatatgcaattcaaaaaattgcgcatgttatacttcatgcccatcatggtacgatatcttttgaattattcttcaaatatgtcatgatgagtttaattttatggatactgtgggcccatcaaacctttttcactaaccgttttggtgatgcagtaacaaaagacgtcatttttatgatgattagtatgtttatattgattttcctttcgaacagtctttatcctgattttgaaaaaacatttaaaccattcttcttttgtgttggactaatgtatttaagtattggattacagtatcttttacacacgagtcgaaaattaagttacgcagacaaacgaacatgtcagtctttcgctattgtagcattaactgtatctgtattatcatttctagcattactattaccatctagcatccattatattccagcattcttaggtgtatttattgcaggtactggcttaattcctttcaggaaatatttagaacaatcaccagttaatatgatgcatttggtcgaacgtttttctttactaacaattattatttttggcgagctaatcgtaggtcttgcttcaatatttagtattactgattttagctatatttatattttccaatttttaattttagtatgtatgtttgggacatattggataatcactgaaaattatattaatcataaacaacgatccataggttttcgtttagtatacacacatctcttaattaacatcgcattaggtacacttaatgcagctttagtttttagtgataatgctgaattacatgcatattttgaaattaatttaatgtacttaagcattttagccttttttattggtatttggctaaatgcaccttatttccatgaaaaattcagttatgttaaacatattatttatgcattagtgatattacttatttcttatctcgtaagtattatctttatcgcgaacaaacatgtcatgattatttcgatagccattgcagttgcgataattatgttgatgtattataagaataataaacacacttaa

SEQ ID NO: 409481 - DNA, 555 bp, Staphylococcus aureus
atgaatgttggggatttacgtgttgttaaaacgagagctagtattaaaaaggcatttatgaccttactttttgaaaaagattttgatactatttcgattaaagaaattactgaatttgcgcaaattgggagaaaaacattttatctacattatattgataaatatgatttactagatcaaatagtatcggaaaaattgatagaacttgagcaaattggtaaaatgaaaaatcgtctgggtgtacaagaaggtacacaattatggtttgaattttttgaagacaatagagcttttttcatgagacttttcaatattagtagtgcttcaaattataagaaaaaattgctccattttattgaagaagaatttaaaaagaaaataccgacagaagtcgctacgaataaaggattagattatcatttgtatatcaactttattagtagtggtattatcggtttactcgatatctatctaaatcgcagtgatgacatacaagaacaagacaaaataatcttacaagtatcacgattactatctttgtatgatttaacatag

SEQ ID NO: 409482 - DNA, 639 bp, Staphylococcus aureus
atgactcgtattttaatcattggtgcaagtggtcaaatttcacaagaggccattgacttatatttacaaaatacagattttgatttaacgctattagcgagaaataaagcaaaattacctaaatatgattcaaacagagtgacagtcattgaaggtgatgcgacagataaaaacgccgttgctaatgctttaggtaatgtagatactgtgtttgttagttctaccggagaaacattaggcgagcaagctaagacaattatcgaagcaatgaatgataaaggtacgcaacgtttaatatttgtcacagcacttaatacactacatgaagtaccaggtaaattcggtgaatggaatgatgaaaatatcggtccttatctcgcaccgtttagagaagccactaaagcaattgaaagttccgatttagactacacaatattcagaccggcttggttaacgaactatgacgagattaattatgaagttacacaaagagatgaaccctttaaagggactgaagtgtctcgtaaaagtgtggcagatttagcagttaaaatctctcaagatcctaaacttcactcaaaagaaaatattggattaaacaaacctaatacagacggtaataaaccacaatggttataa

SEQ ID NO: 409483 - DNA, 903 bp, Staphylococcus aureus
atggaaaaagtgaattttaaaagtaataacttaaatgtagtagcaaatatgtatttccctgaaaactttgagaaaaatcgtaaatactcagcaatcgttgtaaatcatccagcaggtggcgttaaagaacaaacagcagggttatatgcagaaaaattagctgaattaggctatataactatggcatatgatgcaagttatcaaggtgaaagtgaagggtcgccgcacaatctagaagatccatcctcacgcgttgaagatgttcgcgcagcagttgattatttcaatactttaaactttgtagatgatgagcgtattggtgctttaggtatttgtgcaggcggtggttatacaattaaagcaactcaaacagagaaaagaattaaagctgttgttggtattagcgcagcagatattggccaaaatttccgcaaaggttggaatggagaccaaaatgaagaagatattaatgctgtcttagaccaagttgctgaacaaagaaaatccgaagcacagggtgcagaacaaaaacttgtaggatttgtaccagatgaacctacgaatgatatggatcaagaaacgaaagacggttgggaatattatcgtacaccaagagcgcaacacgaacgttctattaaccgattcccattcataagttttgaccgtatgattgaatttacggcatttgacttagtagataagttactgacacaacccgtactatttattgcaggtagtgaagcaggtacacgttggcaaagtgagaatgcctatgaacgtgctttagatccaaaagatatatttatcgtggaaggtgcaaatcattttgatatgtatgataaagaaccttatgtatcacaagcagtagataaaatgaaagatttttataatcaatatttataa

SEQ ID NO: 409484 - DNA, 2862 bp, Staphylococcus aureus
atgagtagattactaaatgatttcaatcaatctttaaaaaaaggttttatagacaaagatattcctcataaagggaattatacaccgaagcttttagtaaataataaaaatgaaaaagttctttcaacaattatagatgaacttcaaaaatgtgaaacgttctatttttctgtagcttttataacagaaagcgggttagccagcttaaaggctcagctattagatttaagcaataagggtgttaaagggaaaatattaacatcaaattacttagggtttaatagtcctaaaatgtatggagaattacttaaattaaaaaatgtagaggtaagattaactgatattgctggattccatgccaaaggatatatttttgaacataaggattatagttctatggtaataggaagctctaatttaacatcgaatgcgttaaaggttaattatgagcataatgttttactgtctactatgaaaaatggggatttggttgatagtgtaaaaaatgaatttgacttgttatggcaaaacagtaccccactgactcagcaatggattaattcatataaagaatcatttgagtaccgctccttagaaaaattggcggaggttgaacaaactcaaatgctgctagctgataaggtgaaaaaatcagtggaaattgtaccgaatttaatgcaagcagaagcattaaggtcattaaaagctattagggataaagccaaagataaggcgttaataatatctgcaactggtacaggtaaaacgattttatgtgcattagatgttagagaagtaaaccctaataaatttttatttattgttcataatgaggggattttaaatagagctaaggaagaatttaaaaaagtattacctacaaaaaatgatagtgattttggattgttgacaggcaaacatagagatgtcgatgccaaatatttatttgcaaccattcaaacattatctagagatgataattttaagcaatttgatgaaaatgaatttgattatattgtttttgatgaagcacatcgttctgctgcatctacttatcaacgagtatttaattacttcaaacctaagtttatgctgggaatgactgcaacaccagaaagatcagatgaattaagtatatttgaaatgtttgattataatattgcttatgaaataaggttacaagcagcattagaaagtgatattttatgtccatttcattattttggtgtgactgattatgtacatcaaggtattaaagaagatgatgtaactaaactgagatatttaacttctgatgaaagagttaattatattattcaaaagacagattactatggatattcaggtgaaattttacaaggattaatttttgtaagtagcaaaaaagaagcttatgatttagcggataaactaagttcaaaagggattaaaagtgttgctttaacaggagacgatagtgttaattatcgccaaattgtaatagaaaaattaagagaaggtaagattaactatattataactgtagatctatttaacgaaggtattgatattccagaagtcaatcaagttgtaatgctgagaccaactgagtctagtattatattcattcagcaacttggtagagggttaagaaaaagtgcaaataaagagtatgttactgtaattgattttattggtaattataagaccaattatttaattccgattgcgctttctggagatcaatcgcaaaataaagataattataagaagtttttaacgaataacgattcgattaatggagtatctacaattaattttgaagaagttgctaaaaaacagatttacaattcattggatgcagtatcattgaatcaaaataaattattattaaaagcttatgaagaagttgaaaatagattgggacacatgccgttactaatggattttatacaacaacattctatagatccaagcgttatattttctaaatttagtaattattacgagtttttagtatggtataaaaaaatagatgctttattgacggaaaatgaatctaaaaatctggttttcttttcaaggcaaatagcacctggattgaaaagaatcgatagtttagttttagaagaacttttaaaaaatgaattaacatatgatgaattaaaaaataaaatgttgaacgaagttaaggatataacagaagatgatatagatacttcattaagaattttagatttttcattttacaacgcaggaattgaaaaaatctatggaagtcccattatagaacgtaatgaaagaatgataagactaagcgatgcatttactaatgctctaagtaatcaaacatttaaaatatttttagaagatcttattgaattatcaaagtataacaatgaaaaataccaaaaaggtaaaaatggactgattttatataataaatattcaagagaagattttagtaaaatatttaattggagtaaaaatggttcgtctgtaatcatgggatacatgataagaagccaagaaatgccaatatttatcacttatgataagcatgaggatataagtgatagcacaaaatatgaagatgaatttttaagtcaagatgaattaaaatggtttactaaatctaatagaacgctaaaatcaaaagaagttcagaaaattttgtcccatagagcaaaaggaattaaaatgtatatttttgtacagaaaaaagatgatgatggtatatatttttattatttaggaactgctggatatatagaaggttcagagaagcaagataaaatgccgaatggttcaaacgtagtaactatggatttagcactcgataaagctgtaagagatgatatatatcgctatataacaaattaa

SEQ ID NO: 409485 - DNA, 762 bp, Staphylococcus aureus
atgatgattcattcaaaaaggttgaggctctggctgtatttagtattattagctgtttttattagcgcgtgtggtatgaaagaagagaaacaaatcaaagaaagtttcaataaaacattaagtttgtatccaaccaaaaaccttgaagacttttatgataaagaaggctttagagatcaagaatttgaaaagggtgataaaggtacttggattgttgattccgagatggtaattgagctaaagggtaaaaaaatggaatctagaagtatggtgctctatataaattgtaatactagaacaacgaaaggtaattttattgttagagaattgtgggaagatagtaaagggtatgcacaaagtaaagaaaaaaaatatccagtcaaaatggaacataatcaaattatcccaacgaagcctatacaagatgacaagttgaaaaaagaaattgaaaactttaaattttttgtacaatatggcaattttaaagatattaatgattataaaaatggtgatatttcatataatcctaatgtgccaagttattccgaaaaatatcaattgaggaatgatgattataatgtgcaacagttaagaaaaagatatgacataccaacgaaacaagcaccgaaactgttattaaaaggcgatggtgatttaaaaggctcatctgtagggtctaaagagttagaatttacttttgtcgaaaataaaaaagaaaacatctatttttctgatagtattaatttcaaacctactgaatag

SEQ ID NO: 409486 - DNA, 1302 bp, Staphylococcus aureus
atgtctaaattattaatgataggcactggtccggtcgcaatccaattagcgaatatttgctatttaaaatcagattatgagattgatatggttggacgtgcctcaacatcagaaaaatcaaaacgcttatatcaagcgtataaaaaagagaaacaatttgaagtcaaaatacaaaacgaggcgcatcaacatctggaaggtaagtttgaaattaatcgtttgtataaagatgtaaaaaacgttaagggtgaatacgaaacggttgtcatggcatgcacagcagatgcttattatgacacactacagcaattgtcgttagaaactttgcaaagtgtcaaacatgtcattttaatttcaccgacatttggatcgcaaatgattgtggaacaatttatgtctaagttcagtcaggatatcgaagtgatttcattttcaacttatcttggcgatacacgtattgttgataaagaagcacctaatcatgtgttgacaacaggtgtaaaaaagaaattgtacatgggatcgacacattcaaactcaacaatgtgtcaacgaatctctgctttagctgagcagttgaagattcaattagaagtcgttgaatcgccactgcatgctgaaacacgtaacagttcgctttatgtgcacccaccactatttatgaatgacttttcattgaaagccattttcgaaggaacggatgtaccggtttatgtgtataagttatttcctgaaggaccgataacgatgacattaatccgtgaaatgcgtttaatgtggaaggaaatgatggctattttacaagcatttagagtgccgtcagtcaacctgcttcaatttatggtgaaggaaaattatccagtacgtcctgaaactttggatgaaggtgatattgagcatttcgaaatcttgccagatatcttacaagaatatctgctttatgtaagatataccgcaatccttattgatccattttcacagccagacgaaaacggacattactttgatttttcagctgtaccatttaagcaagtctataaaaatgaacaggatgttgttcaaattccaagaatgccaagtgaggattattacagaacagcgatgattcagcatattgggaaaatgctaggtatccaaacgccaatgattgatcagttcctaactcgctatgaagcaagttgccaggcatacaaggatatgcatcaagatcaacacttatcttctcaatttaatacaaatttatttgaagaagataaagcactcgtcacaaaatttttggaaatcaatagaacgctttcataa

SEQ ID NO: 409487 - DNA, 183 bp, Staphylococcus aureus
ttgaaagattctatattttggaagaaagcttttattcctgtttattttatcgttgcgatgttggcgtttctactttttaagttttatattaaaacagataacttttctatatacttaatgattattttcttaatttgtttaggaactgcatctatcatttataactataaaaacaatcgataa

SEQ ID NO: 409488 - DNA, 2424 bp, Staphylococcus aureus
atgacatatagaatgaagaaatggcaaaaattatccaccattacgttattaatggccggtgtgattactttgaatggtggtgaattcagaagtattgataaacatcaaatcgctgtggctgatacgaatgttcaaacgctagattatgaaaagttgaggaacacatggctagatgttaactacggttataatcagtatgatgagaagaatgacgcaatgaagaagaagtttgatgctacggagaatgaggcaaaaaagttacttgaagatatgaaaactgaaaatgataggaaatacttgtgggatagtgcaaaagatttagatacaaagtctgcggatatgactcgtacctatcgtaatattgagaaaatcgcagaagcgatgaagcataaaaatactaaattaaaaacagatgaaaacaagaagaaagtgaaagatgcccttgagtggctgcataaaaatgcctatggaaaagaaccaactgaaaaagtaaaagaattaagtgagaattttaaaataactgattcatcaaagaaaaaagctttaaattggtgggattatgaaattggaacacctagagcattaacaaatacccttatactcttaaaagaagattttactgatgaagaaaagaaaaaatacactgcccctatcaaaactttcgctccagatagtgagaaaatattatcttctgtaggaaaacctgaacaagctaaaggcggaaatttagtagacattgctaaagtaaaacttttagaaagtattatcgaagaagatacaactatgatgaaagaatcaatagatgcatttaataaagtgttcacttacgttcaaagtaatgcaactggtaaagaacgtaatggattctataaagacggctcttacattgatcatcaagacgtcccatacactggtgcttatggcgttgtactcttagagggtatttctcaaatgatgccgatgataaaagcaacaccttttaaagatagtaatcaaaatgatacaacattaaagtcgtggattgatgaaggatttatgccactcatttataaaagtgaaatgatggacttatcacgtggtagagctattagccgagaaaatgaaacgagtcactcagcatctgcaacagtaatgaaatcattgttgagattaagtgatgccatggatgattcaacaaaagctaaatataaaaaaattgtcaaaacttcagtagagtcagattcaagttataaacaaaccgattatttaaattcatattcagacatagataaaatgaagtctttaatgacagatagcactatttctactaatggtttaacacaacaacttaaaatatataatgacatggatcgtgtcacctatcataacaaagacttagactttgcatttggtttaagtatgacgtcgaaaaacgtagcacgttacgaaagtatcaataatgaaaatctaaaaggttggcatactggtgctggaatgtcttatttatacaatagcgatgtcaaacactaccgtgataacttctgggcaacagctgatatgaaacgattagcaggtactacaactttagataatgaagaacctaaagaaaataagaactccgataaaacttttgtaggcggaacaaaatttgatgaccaacatgctagtattggaatggattttgaaaatcaggacaaaactttaactgccaaaaaatcatatttcatattaaacgataaaattttcttcttaggaactggcattaaaagtactgattcatcaaagaatccagtgacaacgattgaaaatcgcaaagcgaatgggtatacgttatatacagacgataaacaaataaccgcttccgataatcaggaaaccaattcagtctttttagaatcaacgaatagcactcaaaacaatataggctttcaatttttaaacaaatcgaaaataactgtaaaaaaagaaagtcatactggtaagtggagtgatataaataaaagtcaaaaggatacacaaaaaactgatgagtattatgaagtaactcaaaagcattctgataaagacgataaatatggatatgtgttgtatcctggaatatctaaaaatgtctttaataccaaaaaagatttagtaactatcgttaaacaagatgatgacttccacgttgtgaaagataatgaatcggtttgggctggtgtcaattatagtaatagcactcaaacttttgacattaacaacactaaagtcgaagttaaagccaaaggaatgtttattcttaaaaagaaagatgataacacttatgaatgtagcttctataatcccgaatctacaaataccgcttcagatattgtatctaaaatttcaatgactggatactctattacaaacaaaaatacatcgactacaaatgaatccggcgtacgctttgaattaactaaataa

SEQ ID NO: 409489 - DNA, 1467 bp, Staphylococcus aureus
atgtataaatttttccaaaatttagggcgttcgttaatgttaccagttgccattttaccggctgcagcaattattgccggaattggtaatacgttaaatgcacttcatgcggcgccgaaaatcgcaatgttctttactacggtaggtactacgattttagagcaattaggtattttatttgcaattggtgtagctataggaatggcaaagaaaaatgatggtgcagtcgcgcttgcagctgcgttaggatattttttagttacagttgtattatcaccaatgaaattagcgcctttattaggaatgaaagcttcggaaataaattcagcttttgaaaagatgaataatggcaatgtctttgttggtattgtaataggtttaatagcagcttatgcatacaataagtttagtgaaacagaattaccattagcattatcattttttagtggtaaacgtctagttccaattatgactgcattttactgtacatttttagttgtcattttgttattcttatggccactactttattcatggattgtaaaatttggtgaatctatagttggtttaggatcatttggtgctttcgtatatggtgttgccaacagattattaattcctacaggattacatcatgcactgaatagtgtgttctggtttgatacgattggtattaatgatattggtaaattccaaagtggcaaagatgctataaaaggtattacaggacgctatcaagcgggattcttcccaatcatgatgttcggtattccagcggctgcgttagcaatgtatcatacagctaaaactactcagaaaaagcaagtttacggttggttcctagcgagttcagttgcagcatttttcgttggtgttacagagccgattgagtttgcatttatgtttgttgcgccaatcttatatgttgttcatgcgttattaacaggattatctttatttatcgcagctacattccattggacagctggattttcatttagtgcaggtttgatagattatgtgttatcactaattaatccggtatcaaatcatccattgatgttgcttgttcaaggtgttgtattcttcatcttatactatgtgattttccgtgtagtaatccaagtatttaacttaaatacgattggtagaggtgaaaatgaattagttgatccaacagttgtaaaagataatattgctcctggtgaaaatgatattaaacaaagtaaatatcataatcatgctatacaaatattagaaggtttaggtggtcaagagaatattgttaatttaactaattgtgcaacaaggttgcgtctagagttaaaagacacatctattattgatcaacagaagattaaaaacgccggtgcagttggtgttactgttaatggtaaacattcaactcaagttattgtcggtacacacgtacagcagattgctgatgaaattgaaaaacatttataa

SEQ ID NO: 409490 - DNA, 222 bp, Staphylococcus aureus
atgaattatactctacaatgttatattgactgcggggccccaacacagagaatttcgaaaagagattctacaagcaatgcgagttggggagtgggccccaacacagagaatttcgaaaagaaattctacaagcaatgcaagttggacgcggagccccaattggatttccaatttctacaagcaatacaagtttatgttagctcacaccaagtgcaatcttag

SEQ ID NO: 409491 - DNA, 144 bp, Staphylococcus aureus
atggcacttaatataaggaaaatagcagctcaacgagctgtacattataaaatacatatcaaaaaagctgatttctatcaaataattaatagaaatcagctttttacattgcctaagaacttaatgtctcaagctccttcataa

SEQ ID NO: 409492 - DNA, 351 bp, Staphylococcus aureus
atgaaatttaaaaaatatatattaacaggaacattagcattacttttatcatcaacagcgatagcaactttagaagggaataaagttgaggcaagtagtaagaaggattatataattcaaagtgagtatcatgataaacaaattgcagatgagctaagatcattacttaataaatctaatgtatatgatttagctgcaggtagcttaaatcgctattataagcaaacgattatgatgaatgaacatagagctaaagcggcattaaggagcaataatttcgataaaatggctgaagctaaagttgcgttagaaaaaatatacaaagaaatttatgaaattataaatagataa

SEQ ID NO: 409493 - DNA, 1965 bp, Staphylococcus aureus
atgaaatggttcaaattaatacttgatgttacaatcttcattctgattgctatattgttatttgtttatacatataaagaaaaccaagaaatattgactgatactaaataccctatagcggtaactgactggaataaaaaatatagtaaaaatgagatttataaacgtatagatcagttcgctaaaaaagagaacgtagcaatctataaatcaacttcaaattatacaaacaaaaatgtagataaagatatatatgtatttaataaatcaaaagcaacaactatcactccttttaatgctaaatataacattcattatttaagtgatgacgaattattaaaaaaagatatcaaagggagttattttgtaaaagacaaaaattttgacgtgtctaaattcataaattttttaaaagaatatggtgttactgctgaatcattcaaaatagatcatatgatgattgccgttggtgtcattaaacaaatgaatatagtagttccgttatcctcacttttaatcgtttattttatttattatattttcgaaaagaacattaatttcaaagcgtatgcgattaagtatttaaatggttttacattaagaaaaataatttttgaaaatttttcaaagaaatgcacgtattgggtaacgttaatcataactcaaattcttttaactacaagtgtactttggatattaaattacacgggtaatttagatttattcatattaagattagttctgctttcatgtctttttattttaacgattagtgttattaatttatggactttcttaatgttactaaatttaaatattgccaatatgattaaaggtaagcagcactttaaaacgattcgttttattaatacagtttgtaaaagtattctcttagtactaatagctagtgtaatgatagaaaatactagtgttattaaagatttgaataaaataaaggaaactgagaagtattggaatgtattagatgattattacacgattgaatttgcaccttatcatgaaacgaaacaaagtttgattgataatatgctgcgatcagaacaattagtaaaggctagtgaagcagaaaataatgcgattttattcaaaccaaagggtgactccgttgacaatgacaacttttcgcctgatgaggggaatgtaatattagtaaataatcagttctggtcgatttatcacaagcagtttcaacctgatattccgataaaaaatcaaaaaaataatgtcgaagtaattattccacaaaagtttcatgcaatgcgtaatgaaatcaatcaagcatatcattcatggtttgaatttgtacaaaataaaaataataaagagaataagttatctatacagtttatcaacaaaaatgattatcgaattttttcatttgatgcacgagatagtcgccatttgtcatttatagaggcgccaatcattgtgaatgttcaggcatcagatttatcgaatgatttttattatgccatgatcagtcaaggcgggtatttattcaaaaattatgacgcgctagtaaaaagtattgaaaagtatcatcttgatggggaaatcagtggaataaccaattataaagatagcgtgatggaaatgtatcatgaaaacaatttgaaattaacagtactcaacttttcacaaatcattatcgcaatcattttaataattattattttatttgatgtgaaatattattttgaacaacatcgaaaattactcgtaatcaaaaagctatatggttattcaacattaagagccaattaccgatacttattaataaataatatagttgttgtttttattggaatattgacgaatgtaattttacattctcactatataatgatgatatttgcaacgatccttgtcgttcaaatattattgcagatttgcagcctatactatcatggccgacgttttaatgaagttatcaaggagttttaa

SEQ ID NO: 409494 - DNA, 321 bp, Staphylococcus aureus
atgaaatttatcattgcaatattattaggattaatcgtatccattactattgcttttacaatcatacatcatcctatactagatcgttttaatcctttcttaaaaacggagtatagttatgccaaagtgccaaaaggtacgcaacaatatgttaatattacggcttatagtgaaagaggggaaaagcttgattataaattaacatttaatggattttcacctagtagaacgtatgtcgaaataaagcataaagggcaatatgttatatccatcacatatgttgaaaaagaggatacaccaaaagaggtaagacaagaatga

SEQ ID NO: 409495 - DNA, 642 bp, Staphylococcus aureus
atgatagaattaaaagatttaaccatacaaaaaggtaatacacatattttgaagaaacttaatttgaaatttcaatgtggaaaatcatatgcacttattggtaaaagtggatgcggtaaatctacactattaaatactattgctggacttgaaaaaacagggaaacaatatgtctattttaatggtcaattagaacaatttaaatctaatttttacagagataaattaggctatttatttcaaaattatggattaatcgataatctgacagtaaatgaaaatttagatattggattagcatataaaaaaataagtaagaaagaaaaagaacaattaaagatacgttatatagaacagtttggtctgtcaaacagtttaaaaagaaaagttcatacgctaagtggaggtgaacaacaacgtgtcgctttaattagaatgatgttaaaagatccgattgttatgttagctgatgaaccaacgggtgcgttagatcctaaaacaggacagatgattattcaatcattatttgatttggtcaatgaaaataaagtgctaattttagcaacacatgatatggctattgcaaatcaatgtgatgaaataatagatttagaacagtatagaaaagtagcatctatgtaa

SEQ ID NO: 409496 - DNA, 810 bp, Staphylococcus aureus
atgaaatggtatggaaagctgtatatcgggatacttttagcgattttatacatcccaatattctttttaatgttctattcattcaattcggctggtaatatgattcactttgaacattttacattagagcattatcaatcattatttcaaaatgatcatttaatgtcggtcatttttaatacgatagctgtagcacttttagcagcctcaatttctacagttattggtacatttggtgccattgctatttattatttaagaaataaaaagtttaaagtaactttactaacattgaataatgtcttgatggtatcatccgatgttgtcataggtgcatcattcttaattatgtttacaacgattggccattttactggtcttggtttaggattttggacagttctaatatctcatattgcattttgcatacctatagttgtgattatcgtcttaccacaactgtatgaaatgaataataatatgttaaatgctgcaagagatttaggagcgactgaaccacaattattaagcaacattattattcctaatattttaccttctattataggaggattctttatggctttaacttattcactagacgatttcacagtaagtttcttcgttactggtaatggctttagtgtgttatcagttgaagtttatgctatggcgagaaaaggaattagtatggaaattaatgcgatttcaacattattgtttgctgttattgtattaggaatactaggatattatttgattcaatacgtgataaataagaaaaaactaatcaagcgaggtgtaaaataa

SEQ ID NO: 409497 - DNA, 378 bp, Staphylococcus aureus
gtgagcgtaaatgcacgtgatttattagtattacacactaatgtaaatagattggttggagaagagatatttgctaataaatgtcttgctaataatgattttgaaattataaattcaataaaaaaattaattgaagctaagttattatcaacgactaatgattttgaagttagtatatacaaaaagacaagacctgaattacaaagtattttaaaaagttttggtataaaaacaacaggtaataaacctgaattaattaaacgtattgacgataattatcatattattgataacttagatttaccatatgtatatataccaactaagaaaggagaagaaattttaaagaaaacagagtacttaacctcttttatctaa

SEQ ID NO: 409498 - DNA, 186 bp, Staphylococcus aureus
atgttatatccgatttttatatttatattagctggcttatgtgaaataggtgggggatacctgatttggctgtggcttagggaaggacagtcttcacttgttgggctaataggcggtgtgatactcatgttatatggtgtcattgcgacattcaatcatttccatcattcggaagagtatatgtag

SEQ ID NO: 409499 - DNA, 183 bp, Staphylococcus aureus; identical to SEQ ID NO: 409487

SEQ ID NO: 409500 - DNA, 636 bp, Staphylococcus aureus
atgaagaatgtatatttttatattatagatggtttagcagactgggaaataagtaatattttagccgagttaaactctaagcgattctttaaaaaagatgctcaaacaataaacatagaaatggttagtaactcaaaaacacctattactacaatgggaggtattaatattaagcccgaatgtttaattgaggaaattagtatttctaaagacacttttctaatactacctggctcagacacatggaatgattcaaaacatttacctgtaataaaaattgctaaagaagttttatcaaatggtggctatgttgcggctatatgcggagcaacaatttcgctagctgatattggtatattaaatgcatattatcatacgagtaatgacttattatatctagaaagtttttcttcaaattaccatggacaaaaattatatattgatcaaccatctgtatctcataaaaatttaattactgcaagttcaactggcgcactaatgtggacaaaagatatactacatcatctagatgtatttaaacattctactttagatgcatggtttaactattttagtaccggcaattcaaagtattactttgaattacaacaaacattaaataaagatgataattaa

SEQ ID NO: 409501 - DNA, 930 bp, Staphylococcus aureus
atgaaaattagtcggttaattagtattattttgattttgaatgagagaaaacgtgtaagtgctcatgagttgtcagaattaatggaagtatcacaacgtacaatttatcgagatatagaagcgataaatatagctggaatacctgtttattctattccaggtgtcggtggtggctttgaaattatggaaaattttaaaatagataaaaatacatttactgaaaatgaattagcaagtcttttaattagtaactctaattttccggaaaaactaaagaataatgatttttttaatacaaatctaaaaattaaaagtttaataccgaaagaaaagttaaattcaatagaaacacaagtagaacaatttcaattagattctaatcattggaatgaattaagaaatatagatgaacaactgattaaatttaaaaacgctatacaaaacaatcaggtattaaaaattaaatatattaatcatttaggaaataaaacagaaagagaagtcgaaccatatcaacttattttaaaagcaggacattggtattgttatgtttattgttatttaagagatgattttagattacttaaattaaatcgagttatacatttgcaagaattagaaagcaaatttattaaaaaaatgtatatagacccattattatctacaaatagaatttttgaaaaattaaaaatgacaattacacttcgcgtacacgaatcaattgttgaacgtttattagatttctgtgattacgatagctttaggcaacaaaataatcgatattatgtagttgacttcccattcatcgacaactcatattattttggattaattttaagttttggagataagtgtgaagttttagaaccaactgaaattagaaataaaatgaaacaaacaattaaaaaaatggcggataattataagtag

SEQ ID NO: 409502 - DNA, 2424 bp, Staphylococcus aureus; identical to SEQ ID NO: 409488

SEQ ID NO: 409503 - DNA, 741 bp, Staphylococcus aureus
gtgtttaatttggaaaatgatttagagacactaaaacatattatagatagttcgaatcgtattacatttttcacaggtgctggtgtatctgtcgctagtggtgttccagatttccgttcaatgggtggcttatttgatgaaatttcaaaagatgggctttcgccagaatacttgttaagccgtgattatttagaagatgatcctgaaggttttatcaatttctgccataagcgcttactatttgtcgatacgattcccaatatcgttcatgattggatagcaaaattagaacgtaatcaacaatctttaggtgtcatcacgcaaaatatcgatggtttgcactcagacgctggaagtcaacatgtcgatgaattacatggcacgtttaatcgtttttattgtaatgcatgtcataaatcttatacgaagtcagatgtcattgatagaactttgaaacattgtgataattgtggtggtgccattcgaccggacatcgtattatacggtgaaatgttagatcaacctaccatcatacgggcattaaataaaattgaacatgctgacacccttgttgtactaggttcatcactcgttgtacaacctgctgcaggattaatatcaaattttaaaggcgacaatttaattattatcaataaagatcgaacaccttatgataacgacgctactttggtcatacatgacgatatggtttccgttgtaaaatcattaatgacagagtaa

SEQ ID NO: 409504 - DNA, 756 bp, Staphylococcus aureus
ttgaataaacatgaacgtttggacgaaattgctaaactagtgaataaaaagggcacgataagaacgaatgaaatcgtcgaaggtttaaatgtgtctgatatgacagttcgaagagatttaattgaattggaaaataaagggattttaacgaagattcatggtggtgcacgcagtaattcaacatttcagtataaagaaatgtcgcataaagaaaaacatacccgtcaaattgcagaaaaacgatttatagctagaaaagctgcatcattaattgaagatggggatactttgtttttcggaccgggaacaacagtggaactattagcagaagaagtcaatcatcatacgctcacaattattacgaattgtttgccggtgtataaaattttgttggaaaaacaaacagcacattttcgtgtctatttaattggtggtgaaatgcgccatattacagaagcgtttgtaggtgaaatggcgaatgccatgttagaaaaactaagatttagcaagatgttctttagtagtaacgcagtaaataaaggtgctgtgatgacatctacattagatgaagcctatacgcaacaattggcactaagtaattcaattgaaaaatacttgctaattgatcatacgaaagttggcaaagaagattttacatcattttgtcagttaaacgaattaactgcagtggttatggattatgaagatgaagaaaaagtagaaacgattaaaacatatattgaagtagtcgactaa

SEQ ID NO: 409505 - DNA, 516 bp, Staphylococcus aureus
atgaagattgcattaggatgcgaccatattgttacagatacaaaaatgcgtgtatctgaatttttaaaatcaaaaggacatgaagtcattgacgtaggaacatacgatttcacaagaacacattatccaatttttggtaaaaaagttggagaacaagttgttagcggtaatgcagacttaggtgtttgtatttgtggaacaggtgttggtattaacaatgctgtaaataaagtacctggcgttcgttcagcgctagtacgtgatatgacatcagcgttatatgctaaagaagaattaaatgcgaacgttattggctttggtggacgtattattggtgagttattaatgtgcgatattattgatgcatttattaatgctgaatataaaccaactgaagagaacaaaaaattaatcgctaaaattaaacatttagaaacaagcaatgcagatcaagctgatccacatttctttgatgaattcttagaaaaatgggacagaggcgaataccacgattaa

SEQ ID NO: 409506 - DNA, 981 bp, Staphylococcus aureus
atgtcaaaatcgaatcaaaaaatcgcatcaattgaacaattaagtaataacgaaggtatcatttctgcattagcatttgatcaacgtggtgctttaaagcgcatgatggcaaaacatcaaactgaagagccaactgtagctcaaattgaacaattaaaagtattagttgcggaagagttaacacaatatgcatcttcaattttattagatcctgaatatggtttaccagcttcagatgcacgtaacaaagattgtggattattacttgcttatgaaaaaactggatatgacgtaaacgctaaaggtcgtttacctgactgtttagtagagtggtctgcaaaacgtttaaaagaacaaggtgcaaatgctgttaaattcttactttactatgatgttgatgatactgaagaaattaacattcaaaagaaagcatacattgaaagaatcggttcagaatgtgttgcagaagatattccattctttttagaagtattaacatacgatgacaacattcctgataacggtagtgttgaattcgcaaaagttaagcctagaaaggttaacgaagcaatgaaattattctcagaaccacgctttaatgttgatgtattgaaagttgaagtaccagtaaacatgaaatatgtagaaggctttgctgaaggtgaagtggtttatacaaaagaggaagcggcacaacactttaaagatcaagatgcagcaactcatttaccatacatttacttaagtgctggtgtttctgcggaattattccaagaaactttaaaatttgctcacgaagctggtgctaaattcaacggtgtactttgtggccgtgctacatggtctggtgctgttcaagtatacattgaacaaggtgaagatgctgctcgtgaatggttacgtacaactggtttcaaaaatattgatgacttaaataaagtattaaaagatactgcgacatcttggaaacaaagaaaataa

SEQ ID NO: 409507 - DNA, 870 bp, Staphylococcus aureus
gtgaagaaaatttttgtaattattacgacattgttagcggtcgctattattataggctctattattacggtggtgtttagtcaacgacaggcacaaacatttaaaatacaacaacagcaatttgttaaaaagccaattccgacattgtttttacatggatttggtggtagtgccaactctgaaaaatttatggtgaagcaagcagaaaaaagaggggtaactaaagatatcatcactgcttacgtttcaaaggatggtgcagtgacatttaaagggaaactaagtaaagatgcagtgaatcctattgtgaaaattgaacttgaaaataacagacaaggctatttggataagaatgctgcgtggtttaaaaatgtactgactaagttacaatctgaatacaatttcgataaattcaactttgtcggtcactcaatggggaacttaacatttgcacaatatatgatgacatatggtaacgacaagtcactgccacagttaaacaaacaagtgaatattgcagggacatttaatggtgttttaaatatgaatgaagatgtcaatgaaatcacagttgataaagatggtaaaccaagtcgaatgaatcaaccttatcagcaattacgcgtgctaaaagatatttataaaggtaaaggtatcgaagtgctaaatatttatggagatttgaaagatggtacacattcagacggcagagtgtctaatagttcttcgaaatcattaaaatatttactgggaaatagtccgaaaagttatcgagaatctaaatatgaaggtgagtctgcacagcatagtcagcttcatgagaatgaaaatgttgctaatgagttgatcgacttcttatggaaaaaataa

SEQ ID NO: 409508 - DNA, 1008 bp, Staphylococcus aureus
atgaaaatgataggatttgaaaagccctttaaattggaagaaggaaatttatttaaagtatacgaacaaagaaagccaacgccagaaaacgatgatatcttagtcaaagtaaatagcattagtgtaaatcctgtagatacaaaacaacgacaaatggaagtcactcaagcacctcgtgtacttgggtttgatgctattggtactgttgaagctatcggaccagacgttacattatttagtccgggtgacgttgtattttatgctggatcgccagatagacaaggatcaaatgcgacatatcaattggtgtcagaagctatagttgcaaaagcgccacacaacataagtgctaatgaagcggttagtctaccgctaactggtattacggcatatgaaacgttttttgatacatttaaaatttcacataatccttctgaaaatataggtaaatccgtgttaatcgttaatggcgctgggggtgtaggaagtattgccactcaaattgctaaaaggtatggtttaactgtcattacaacagcatcacgacaagaaacaacagagtggtgtgaaaaaatgggcgcagatatcgtattgaatcataaagaggatttagtgcgtcaatttaaagaaaaagaaattccattagtagattatatattttgcacctataatacagacttgtattacaatactatgattgaactgataaaaccattagggcatattacaactatcgtagcttttaatgaagatcaagatttaaatgcattaaaattaaaaagtataacatttacacatgaatttatgtttgcgcgtccaattcatcgaacgcctgatatgattaaacaacatgagtatttagaagatattacgaaaaatatagaatcaggacattaccaaccaacaacgacacaagtttttgaaggtttaacgcctgaaaacttatatcaagcacatcaattgttggaaaaacagtcaatgattgggaaattagtaattaatatatag

SEQ ID NO: 409509 - DNA, 1563 bp, Staphylococcus aureus
atgaaaaataaatcagtaagtctagtgttttgggtatcgttagtgatttgtacgatatttgttgcttttggtgccatatttccgaaacagttagaaaaactcacgcaaaacattactacatttattgcgctacatttttcttggtattatttattgctcgttttagttattttatttgtctgtgtgtatattttattttcaagatacgcaaacattacattaggtgaagaaggtgaagacccagaattttcattgccatcatggtttgccatgttatttagtgctggtatgggaataggacttgtgttctggacaacggcagaaccaatcagtcatgccttcaaattaacgcctattcataaagctggcacgcaatctgcaattaatgatgcaatgcagttttcatttttccattggggtattcatgcatgggcagtctatggtattgtcgcgcttgtgtttgcatattttagctttcataaaggatatcctggcttagtcagcgctacattgacgcctttattaggtgaaaaagcaatgcgtggccctttaggtggtgccattgatgtattggcagtcatagctacagtaacaggcgttgctgcaacattaggtttcggtgcattgcaaataaacgaaggtttacattttttatttaatgtaccgagtaacttcacgatgcaagtaatcttgattgtcactgcaaccatattatttacttggtcagcatggtcaggtatcgataaaggtatcaaaacgttgagtaatatcaacatgttacttgcttttgtagtacttattggtctttttattgttgggccaacgctttacattttaaatacatttacgaatggtctaggtaattatattgcaaatttctttagtatgagtttacgcattccgtctggtggtcaaaaattccaatggttacaaaattggacaatcttttactgggcatggtggatatcttgggcaccatttgtaggtatatttattgcacgtgtgtcaaaaggacgtacgattaaagaatttattctaggtgtactttttgtcccggcgttagtttgctttatattctttgcggtattcggcgcgtcagcaatttacttacaagataatcatattgccgatattgctaaagctgcgacagaaacggcaacttttgcaacgctacaacattatccgctaggttttgtattaagcttaattactttacttgttattatgattttctttgttacatcagcggattcggcaacttatgttttaggtatgttgagttcaagtggtgatattaatccgaagtcatttgtcaaagtgagttggggtatcattatggcattatttgcaatcatcatgatttacacaggtggtactcaagcgattcaaaatttattaatcattgctgcgttaccattttccgtggtcattatagcgatgatatggtcgcttttaaaatctttgagtgaggagaaaccgagaaatagtaataaggttttaattaaacatcgtgacccagatattttagaatatcgttcttcaaaacatattgacgaaaattaa

SEQ ID NO: 409510 - DNA, 240 bp, Staphylococcus aureus
atggctaacaatcataaccaaaacggacaagactctacacaacaagtgattaattttttaaaagtgtttaaatggagaatcgttggtttcctagcgtttctattaatcgcgatattattcttaacgttaggtttttggaaaacaatacttatcatcgttttatgtttaattggtgtgggtattgggtatataaaagaccgtaagcaagattttatgaattttttaaatagatggagttaa

SEQ ID NO: 409511 - DNA, 1071 bp, Staphylococcus aureus
atggcacacgttaacataaatatatcgaagattaaatataacgccaaagtacttcaaacagtttttcaaagtaaaaatatgcaattcacaccagtaattaagtgcatagctggtgaccgtacaattgtagaaagcttaaaagcgttaggtatcaatcatgttgcagaatccagattggataacataattagtattgcagatcaggatttaacatatacgttattgcgtacgcctgccaaaaaagagatttcagatatgatagaaaaagttgatatgagtatccaaacagaattatctaccatacatcaaataaatgaagtagcagaagttttaggaaaaaaacataagattttattaatggtagattggaaagatggccgtgaaggtgttctgacttatgatgttttagattatattaaagagattattcacttgaaaaatattcattttgttggtttagcattcaattttatgtgttttaaatctgatgcgccaagtgatgatgatatctttatgattaatcgattcgtctcagctgttgaaagagaaataggatatcgattgaaaattatttcaggcggtaattcgagcatgttaccacaacttttatataatgatttgggtaaaataaatgaattgcgaataggtgaaacgttgtttagaggtgttgatacaacgacaaatcaagcgatagctatgttatatcaagatgcgattacattggaggctgagattttagaaattaaacctcgagttaatacacaaacgcatgaatcattcatacaagctattgtagatattggttatttagatacaaaagtcgataatatttcacctatggatcagcatatcaatattttaggcgcttcgagtgatcatttaatgcttgatttaaatggtcaaggacactatcaagttggagatcatatatctttttcattaaattatgaagcactttctcattcgatgtatatgaaaaatttacataaggtatatattgatgattcaaagattgatacgctacttcaaaattttgatgtgaaatctcctgctatggtaaaccaatattaa

SEQ ID NO: 409512 - DNA, 984 bp, Staphylococcus aureus
atgagaggtctaaaaacttttggtatattgggattaatagttgccttatttttagttgcagcttgtggtaatacggataattcaagtaaaaaagaatcatcaactaaagatactatttcggtaaaagatgaaaatggtacagtaaaagtacctaaagatgcaaaacgtatcgttgtattagagtactcatttgcagatgcattagcagcattagacgttaaaccagttggtattgctgatgatggtaagaaaaaacgtatcattaaaccagttagagaaaaaattggggattatacttctgtaggtacacgtaaacagccaaacttagaggaaattagtaaattaaaaccggatttaattatcgctgatagcagtagacataaaggtattaataaagaattaaacaaaattgcaccaacattatcattaaagagttttgatggagactacaaacaaaacattaattcgttcaaaacaattgctaaagctttaaataaagaaaaagaaggcgaaaagcgtcttgctgaacatgataaattaatcaaaaagtataaagatgaaattaagtttgatagaaatcaaaaagtgcttccagcagttgttgctaaagctgggttattagcacatccaaactattcatatgttggacaatttttaaacgaacttggatttaaaaatgcattaagtgatgatgtaacaaaaggtttaagtaaatacttgaaaggaccttacttacaattagatactgaacatttagctgacttaaatcctgaacgcatgattattatgacagataatgctaaaaaagattctgctgaattcaagaagttacaagaagatccaacttggaaaaagttgaatgcagttaaaaataatcgcgtggatattgttgaccgtgatgtttgggcaagatctcgtggcttaatttcttctgaagaaatggctaaagaacttgttgaattatcaaaaaaagaacaaaagtaa

SEQ ID NO: 409513 - DNA, 1032 bp, Staphylococcus aureus
atggctataaaagaaataagtagccaatctgccatagattataaaagaaaaagacgcacaacactcacgtatatagtgagtttgtgctttctttttatttgtatatatttaaatatggcgattggttcttcgaaaattaattttagcgatatcgttcactatgttactggtcatacagatacgaaagcaacgtttttattgcataacgtacgtatgccaaggatgattgcaggattatttattggcggtgcattagcggtatctggtttgttaatgcaagcaatgacacgcaatccgctcgcatcacctaaaatttttggtgtcagttctggtgcatcgtttttcattgtatttgtgacgattatcattccatcattagaatattatgcattatatttaggtgtaataggtgcatttataggtggtttaactgtttatacactttcaggtgctacgaaaggtatgacaccaattaaattagcattggctggtatggccatccatttgttttttagtagtatgactgaaggtattattattttgaatgagaattcaaacgaacaagtgatgttttggcttgtcggttcattatccagtatgaagtgggatgaaattttaaccattttaccatggattattggtgctttaattgtaacgatttttattggacgtcaactaacgataatggaactaggcgatgacattgctaaaggattgggtcaaaatataaataaagttagaattatcattggactattagtcattattcttacaggtatgtcggtgtcagtggcaggaccaattggatttgttggcttaatcgtaccgcatatagtcaaacgctatgtgagtaagaattatttagtcatgattccattaacatttattataggtgcagatttgttactactatcagatgtattaagtcgtttaattacatatccttatgaatcacctgtagggattgttacatcattcgtaggtgcactttacttcttatttataacgattagaggggtgaaaagaatatga

SEQ ID NO: 409514 - DNA, 261 bp, Staphylococcus aureus
atggcaatgacagtaaaaaaggataataatgaagtgcgtattcaatggagagttgctgatatcaaaattcctacaagtgaaattaaaaatataacacaagaccaagatattcatgcagttcctaaattagacagcaaagatgtatctagaatcggctcaacatttggtaaaacgaatcgcgttattatcgatactgaagaccacgaatacattatttatactcaaaatgatcaaaaagtttacaatgaattaactaaataa

SEQ ID NO: 409515 - DNA, 516 bp, Staphylococcus aureus
atgacaggtaaaacacatgcttcatgcggcatgctcgttggagcgctaacaacacaatattttcaaacggatattttttcgtcggttacggttatcattctagcaactctagctagcttatcacccgatatatgtcacactcaaagtaagattggcagaaggtttaaggtaattagtttttttgtgagattgatctttggacatcgaacctttacgcattcaatattatttatcgtaatcatagcatttttattgcaaattattcagacgcctaattattatatggtagcaattataattggattagtgtcacatgttatactagatatgataacaccaaaaggcgtgaaattattttatccgttaccgtttaatgtgaagacaccaatccaatttaaaacaggtggacttgtagacttatctttagctactgcgttaatggtcggaacagtttatgttttatttcagcctttcatcaatgatataataagcaactggaatactaagtttttatag

SEQ ID NO: 409516 - DNA, 1188 bp, Staphylococcus aureus
atgctagataaaaatcaattagctaaatataaacaagatcatttatgtgaatatgaaaaaataatgagtaacaatgaaaaagaagcgcttgaagagaaggtagcgtcattagatttagattttattgccaaattatataacgatttatacatcaataagaaaacaatagatgatgtatctgcagtttctgaagtgaaatatggtattaaatcacaaatgagtgatgatgagattaagcgtttagaggaacaaggacttcaagctattaaagaaggacaatttgcagtacttttgatggcaggtggtcaaggaacaagacttggttacaagggacctaaaggttcgtttgaaattgaaggtgtaagtttatttgaacttcaagctaaccaattaaaaacattgaatcatcaatctggacatacgattcaatggtatattatgacaagtgatatcaatcatgaagaaactttagcttatttcgaagcacatagttattttggatatgatcaagaagcaatccatttctttaaacaagataatattgtggcgcttagtgaagaaggaaagttaattttaaatcaacagggtcgtattatggaaacgccgaatggtaatggtggcgtgtttaaatctttagacaaggcaggatacttagaagaaatgtctaataatggcgttaagtatattttcttgaataatatcgataatgttttagtaaaagtgttggatccactatttgcaggatttacggtagaacataattacgatattacttctaaaacgattcaaccaaaaccaggagaaagtgttggacgattagttaatgtcgattgtaaagatacagtattggagtattcagaattagatccagaagttgcaaatcaatttaacaatgctaatatcggtattcatgcatttaaacttggctttattttaaatgctgtaaatcgtgaattaccttatcatttagctattaagaatttgaagcaattagatgagaactttggggttattgaacaaccaactttaaaattcgaattgttctattttgacatatttacttatggaactagttttgtcacgttacaagttcctagagaagaagagttttcaccccttaaaaataaagaaggtaaagatagtgttgcaacagcaactgaagatttacgtagaatgggtttaatttaa

SEQ ID NO: 409517 - DNA, 687 bp, Staphylococcus aureus
atgatgtccaaatcaagtaaaaaaagtaatgacacaattgcagaaacatttaaggatatcattccattgtcatttggagaagaaataggcaatgctgcatctcatgggctggcagcgctgttaacactattagtcttaccttatgcggctgtacatagttatattgcaaatggcacacttgcatcagttagtatgtcaatttatgttatttctatctttatgatgtttatttcatcaacaatttatcactctatgcaaaatgaaacaccccataaatatattttaaggattattgatcacagtatgatttacgtagcaatttcaggtacatacactcctattttgttaacaattgtaggtggttggataggttggacagtatttattttattatggggaacgactctttggggaattttatataaatccatagctgtcaaagttaatcaaaagttaagtttaattgtctatttagtgatgggctgggtaggtattatcttgttgccaattatttttattcgcacatcatggatattcatattattcattttcttaggcggtgtgtcatatacaattggtgcatggttttatgcacaaaagaatagaccatattttcatatgatttggcatatttttattgttatagcatcactattgcatttaattgcaatcttatattttatgtag

SEQ ID NO: 409518 - DNA, 1344 bp, Staphylococcus aureus
atgcgattaaagtcaatcataactgttatagctttaatattaattatgtttatgtctgcgattgaatcatctattatttcgcttgcattacctacaattaaacaagatttaaatgcaggaaatttaatttcattaatttttaccgcgtattttatcgcattagtaattgcaaatcctatagtgggcgaattactttcgagatttaaaattatttatgtggcaattgcaggattacttttatttagtataggtagtttaatgtgtggtttaagtactaattttactatgctaattatatcacgcgtgatacaaggttttggatcaggtgtattgatgtcattatcgcaaattgttccaaagttagcatttgaaattccgttacgatataaaattatgggcatagttggcagtgtttggggtatttctagtatcattgggccacttctaggtggcggtatattagaatttgcaacatggcattggttattctacataaatataccgattgcgatcattgccattatattagttatatggacatttcattttccagaggaagaaacagttgctaaatcaaaatttgatactaaagggctcacgctattttatgtatttattggattgattatgtttgctttattaaaccaacagctattacttttaaatttcttaagttttatcttagctatcgttgtggcaatacgtttatttaaagtagaaaaacatgtttcttcaccatttttacctgtggttgaatttaatcgttcgattactttagtttttataactgaccttctaacagctatttgtttaatgggattcaatttatatattccagtctaccttcaagaacaactaggattatctccattacaaagtggattggttatttttcctttatctgtagcttggattacattgaattttaatttacatcgaattgaagcaaaactatcaaggaaagttatttacttactatcatttacgttgctactagtaagtagtattatcatttcatttggtattaaactgccgttacttattgcatttgtattaattttggcaggattaagttttggatatatttatacgaaagatagtgtaattgtccaagaagaaactagcccattacaaatgaaaaaaatgatgtcattttatggattaactaaaaatcttggggcatcaataggttcaacaataatgggatatctttatgcgatacaatcagcaatctttggtccaaacttacacaatgtgttaagtgctgttgctgtaattagcactgggcttattgttttatgggtcgtattttttaaagaacagttatctcaatcaaaagaatag

SEQ ID NO: 409519 - DNA, 468 bp, Staphylococcus aureus
gtgaattatcttaaacataagttttataacttgttaactacaatgattgttctctttatttttgtactttctggtgcgatttttttaacatttctaggctttggtttatatggattaagtagaatacttatttattttaggttgggtgactttacatataatagaagtatgtacgataacctattgtattatggcagttatataatctttgggtacttcatcatatttgcagtcgagcatttaatggattattttagaaaaatgttgcctgaaaatgcatattttagaggcgcgacttttcatttgatttcttacacagttgcaacaacgttattttatttcatcattcatttaaattatgtttatatcaatatcgatttttgggtaatcatggttattatagggttcttatatgtttgtaagcttcaattttaccctgaaagtaaaaatttaaataatagaaaatag

SEQ ID NO: 409520 - DNA, 816 bp, Staphylococcus aureus
atgatggagtatataaaaaaaattgctttgtacatgagtgtattacttttaatcatttttattgggggatgtggaaatatgaaagatgaacagaaaaaagaagcacaaacaaataaaacaaattcaaaagaagagcaaatcaaaaagagttttgcgaaaacgttagatatgtatccaattaagaatctcgaggatttatatgacaaagaaggatatcgtgatggcgagtttaaaaaggacgacaagggtacatggacgatatattcagactttgctaaaagtaaaaaagtaggtgaattggatagtgaaggcatggtactacatttgaatagaaatacacggacagctaaaggatattattttgtaagaaaaacttacgatgaagaggataagatgccgcaaaggaaagattatcgtgttgagcttaaaaataataaaatagtccttttagataaagtagaagatgaagagcttaaacataaaatagaaaattttaaattttttggacaatatgcagattttaaagacttgaaaaattatcaaaatgggaaaatatcgagcaatgaaaatgtgccattttatgaagcagagtacaaaatggaaaatagtgatagtaatgtaaaaaaacttagagatgtttatcctattacaaccagtgaatcgccaactttaaaatttcatatagatggggatataaaaggtagctcggtaggatataaaaaagtggaatatatcttttcaaggcaaaaagataaccaaatttctgtcagtgactttttaaattataacccttcgaagggggaaaacaatgagtaa

SEQ ID NO: 409521 - DNA, 1326 bp, Staphylococcus aureus
atgagtaataaatttcgcttagaccatagtcttataaataataagactgagacaactagtgcagtttctaaattatcatatgaaattgaaaatgctaatcttaatggattgccaaaaaataatttacaaatgcagtttgatagattaaaagtaactaatgaattcccttcaaatcttgaatatatagatagtcacacagataaaaagtacggtgtgacagcatcagctttcctaaacaaagatactgggaaagtaattattggcatgactggtacaaatttcaaaaaggatgcccttgcgaagcgatattcgggaaacggagacaaacaagataaaatagactcagatgagactgaaaaggatttaatttccgatttcgaaattggaatatctcctccgtctgataaaagcaaacattatgaagaaacacaagagttcatcaaaaaaataaaaaataagtatgacattgattttattactgggcattcactaggtggtagagaagcggtaatattaggaatgagtaatggtattccgaatattgttgtttataatccagctcctatttctatatttaatttgaaccctaattccccggaaggaaaacgtttattagaattatataagaattataaaggtaatattactaggtttgttgcagaaaatgatgaattgacagaaaatctgaagaaatataagcattttatgttttttggtaatgatatagttcttaagaatggtaaaggtcattcaatggatggattcttaactgaacaagaacaaaaagccattaaaaaagaacttaaaaaagtacaaggttatgtagaagaaaataataagtcgttcgtaaaaaattccaataatgctatgtctaaattagctagtatagaattacttagagccaatatgatgactacaaatggtggttggttatcttcttcacaacagaaagttttagaaagtttaacagctttaacaattgcacagtcattcaatcaactgatagaggatgaaattaatcaaatcaaaaaaatgtataatgaaaagaaaaagaaatttgaaaaaaattgggaagacgcgcaaaaagctgggaacgctgtaggtaaagatttaaccgtgagtgaagtgctagaagctttaaatgaaggtcaagtgaatgaaagtagtatggtaggagatcctgaacaaatgatatctctaaatgaaaggcaactttcaacgatagggtcttctatatcaaattatattctaagagttagatttagtattaatgaaatcgttgataaagatcaagtgcttgcatctcaaataggtggattactatga

SEQ ID NO: 409522 - DNA, 180 bp, Staphylococcus aureus
atgagtccaatgataggaccagttataggaccggatatagtaccggacatagaaccgactatagtaccagacataggaccggatatttcgttaaggaaaaaagatgctcaaaaaaaaacattcgcacagttattgcacctgaacataagcataaatacaaagatattgaaaacggattaa

SEQ ID NO: 409523 - DNA, 690 bp, Staphylococcus aureus
atggaattttcacaaaaattgtaccaagctgcaaagccaatcattaatgatatttatgaggatgactttattcaaaaaatgctattaggcaatatacaagctgatgcattacgtcactatttacaagctgatgcagcttatttaaaagaattcacaaacttatatgctttgttaattccaaaaatgaatagcatgaatgacgtaaaatttttagtagagcaaatagaatttatggttgaaggtgaagtacttgcgcatgatattttagcgcaaattgttggtgaatcatacgaagaaatcattaaaacaaaagtttggcctccaagtggcgaccattacataaaacatatgtatttccaagcgcatagtcgtgaaaatgctatttatacaattgctgcaatggcaccttgtccatacatttatgcagaattagctaagcgctctcaaagtgatcataagcttaatagagaaaaagatacggcaaaatggtttgatttttatagtactgaaatggatgacataattaacgtatttgaggcattaatgaataaattagccgaatcaatgtctgacaaggaattggaacaagtgaaacaagtatttttagaaagttgcatacatgagcgtcgatttttcaatatggctatgacactagaacaatgggaatttggaggaaaagtaaatgattaa

SEQ ID NO: 409524 - DNA, 792 bp, Staphylococcus aureus
atgaattatctaaataaaatacgtattgaaaacccattaacaatttgttatacaaacgatgtagttaaaaattttacagcgaatggtttattaagtattggtgcgagccctgcaatgagtgaagctcccgaagaagctgaagaattttacaaagttgcacaagcgctattaatcaatatcggtactttaacagcacaaaatgaacaagatattattgcgattgctcaaacggcaaatgaggcaggcttacctattgtatttgaccctgtagctgttggtgcttctacatatcgaaagcaattttgtaaattattattgaaatcagcgaaagtatcagtaattaaaggcaatgcatctgaaatattagcgttgattgatgatacagcaactatgaaaggtacagatagtgatgctaatcttgatgcggttgcaatagcgaaaaaggcttacgcaatatataaaactgcaatagtaatcacaggtaaagaggacgttattgttcaaggtgataaagcaatcgtattagctaatggatctccattattagcacgagtaactggagccggttgtttattaggaggcgttattgctggatttttatttagagaaacagaaccagacatagaagcgttaattgaagcggtaagcgtatttaatattgctgctgaggtagctgctgaaaatgaaaattgtggtggtcctggtacgttttcaccattgttgcttgatacgttatatcatttaaatgaaacaacctatcaacaacggattcgcattcaagaggtggaataa

SEQ ID NO: 409525 - DNA, 789 bp, Staphylococcus aureus
atgactacgtttgatgctaaaaaattaaaaaaagaatatcttgattggtataaccagatcttagagttttctaatttatcaaacaatgttgtaaaaatagataccccttttaaagataattctttagataatttaaaaatatacgctttatacgatcagtccagagacatgattacactgactgatgacggctatactacatttggtttagaaaataacggtgtttctttaaataaattcaaaaaacgtaaaaagatttttgaagagcatctttcagcctacggtactaaatacaacgataagacccacgaaatttatgttcaaactaactttaaaaattttaataaatctaaacataatttattacagtgccttatatttgttagtgatatgtacttactttctaatcctaagtcacaaaacatattttcagaagatgttgcaaacaaatttgatgaacataacatttattacggaagagatttacctattataggaagcagtggtgttgttcataattttgacttttttattagcgctaagaaaaaccaaaaagaaaaatttatcaatgctatttctaatcctaataattctatgattattaagtcgaaaataacagatgctatgcaagcaaaaaaaataaaaagacacaggcaaaatgagtttatttttattttaaatgactcaaaaaaagaaaaaaatgaacataataaaaaccttcttcatgaaaactatataagtactatagattatagtgaattagacgaaaagataggtttattgatttaa

SEQ ID NO: 409526 - DNA, 756 bp, Staphylococcus aureus
gtgtcagatcatgtatataatcttgtgaaaaagcatcattctgttagaaaatttaagaataaacctttaagtgaagacgttgttaagaaattggtagaagctggacaaagcgcttcgacgtcaagtttcctacaagcatactcaattattggtatcgacgatgagaagattaaagaaaatttacgagaagtttctggtcaaccttatgttgtagaaaatggctatttattcgtctttgttattgattattatcgtcatcatttagttgatcaacatgctgaaactgatatggaaaatgcatatggttcaacggaaggtttgctagtaggtgcaatcgatgcagcattagttgccgaaaatattgcggtaactgctgaagatatggggtatggcattgtctttttaggatcattaagaaatgatgttgaacgcgttcgagaaattttagacttacctgactatgtcttcccggtatttggtatggcagtaggggaacccgcagatgacgaaaatggtgcagccaagccacgcttaccatttgaccatgtcttccatcataataagtatcatgctgataaggaaacacagtatgcacaaatggcagattacgatcagacaatcagcgagtactatgatcaacgtacaaacgggaatcgcaaagaaacatggtcgcagcaaattgagatgttcctaggaaacaaagcaagattagatatgttagaacaattgcaaaaatcaggcttaatacagcgatag

SEQ ID NO: 409527 - DNA, 579 bp, Staphylococcus aureus
gtggagttactaggacaaaaagtaaaggaagacggcgttgtcattgatgagaagattttaaaagtcgatggatttttaaatcatcaaattgatgcaaagttaatgaatgaagttggtcgcactttttacgagcaatttaaagataaagggattactaaaatcttaaccattgaagcttccggtatcgcaccagcaatcatggctgcactgcattttgatgtgccatgtttatttgcgaaaaaagcaaaacctagcactttgacggatggttattatgaaacatctattcattcatttactaaaaataaaacaagtacgatcattgtttcaaaagaatttttatcagaagaagatactgtactcatcatcgatgactttttagcaaatggtgatgcgtcattagggttatacgatatcgcacagcaagcaaatgctaagacagctggtattggtattgttgttgaaaagagtttccaaaatgggcatcaacgtttagaagaagcaggtttaacagtttcttctctctgcaaggttgcttcactagaaggaaataaagtgacattggtgggagaagaataa

SEQ ID NO: 409528 - DNA, 393 bp, Staphylococcus aureus
atgcttgaagataacggcgatatcagattgctatatcaatcaatagaagaacttgcttcagttttgggtcaaagtcaattcgaaactaaaactgtcagcttaatatttgtacaaatggacttaagatatagcgttttcgaaaaagtgcaaactgattttatgaagtatttagcacataaaaattctgatgaaataaaatatatagacttaatcaaaataatagaaaatgcattacctgaaaataaagaacttagtatcaatgtgattaattccattattattggtttcgctaataactattacccaatattgcaaagtttagttccggaaatacaaagtagttatggcataaccataaataaaaatttcaatataaatagtatagatttttaa

SEQ ID NO: 409529 - DNA, 222 bp, Staphylococcus aureus
gtggctccaccggttagacctccaccgacagctgcaactatttttgataaagggtattcaggtattgtaaaagaattgaaaccattgctaaaatggtcagaagtaccagctaacgctgtcgatgatgcggttaaacgaggcacaataaatgccggtctaagtaaaggtgatgctggaatagtctcaactgtagtcaaagaagccattgcatggttattctaa

SEQ ID NO: 409530 - DNA, 423 bp, Staphylococcus aureus
atgaaaagcgttaacattctattaaatttattaccaactgaattaaaaaatatgttagagaataaagatatggagaatattctaacatactttatgtcgaacgaaatttctgatgaaaaattagtatcatatttatcaaatcttgcgaatcaaataaatacaattgaatatcatgaaatggtcgcaagcatctatcactttcatttcaattacatagataatgcctatgatttagcatactatcattattggcaatcgttagagatttcgcaatttaataatcctaatttattatacgaatttttagaaatccttggagaaccagactttgatatgatttcacatgagaatattcaattggtcgcaaataaaattcttgaaagagaccctaataataagttagcaattaaatatattaactaa

SEQ ID NO: 409531 - DNA, 228 bp, Staphylococcus aureus
atgcaattaaaacatatgaaaaaagcaactcaaaccgctatcaaaacaaagagttttggtaaagttttaccttctgtagccaatctaggagttaataaaagaaaacatattcttgctagtaaacataattggaataaagttactaaaaacaattggaaagatgtttctaaagtaatgtcgcatgttatgaggtatggaaagcaaagccgatacaaaaagtccgcataa

SEQ ID NO: 409532 - DNA, 339 bp, Staphylococcus aureus
gtggaaaaacgaaaagaagatattgatttagataaaaatattcaatatgatttaaatactaactccatggatgttaagggcagatacgtcgatgaaaatggaaaactaataaataagaattatgacgttttcgtagaacaatttgaaaatgcagaatatgaagctacatttatcgacaaagaaactggcgtaataataaaattcaactcaattgaagctaaatcttctgcattgccattagtaatattagctgctgtagctagatacggaataaactatgcaattaaaacatatgaaaaaagcaactcaaaccgctatcaaaacaaagagttttggtaa

SEQ ID NO: 409533 - DNA, 1455 bp, Staphylococcus aureus
atgaataaagaagattatttaaaaaatattgtttccgaaaaaataagtaacggcgctgaagattcaactactgaatttaaagtaaataacgatgaccctaaaacaattggagaatatatctcagctctaggaaattcagcaactttagaagacaaagactatgcttatatgatatggggaattgaggatgaatcaaaaaaggtggtcggtaccaaattccatcctaataatgctaaaaaaggacaagaagacttacaaaattggcttcataggatgattaaaccttccatagattttacttttgatactatagattatgatggaaaaaatataacaatattgagaattcctaaagccattcaccaaccaatttcatttaacggtgaagaatttataagagtaggatcctataagaaaaagctgagggattatcctgaaaaagaaaaacaactatggaagaaattccaagagttaccttttgaatcactttctgcatatttagtaaaaaactatgatgaaatttttgaattactagactacgaatcgtattacaaactattaaaacaacctcttccaattcaaaaagatttaattattgatcatttcaaacatgaggaaatcataaaagaaaatgaaggtaatgtttatattacaaatttaggagcgattttattggctaaaaatttagataattttaaaccacttaaaagaaaagctcctcgcgttattaaatataaaggtaataacaaaatcgaaactattagtgaacaagtcggtattaaaggatatgcttgtggatttgaaggacttattaagtatattaataacttattaccaagcaatgaagttattggtgaagtttttagagaaacagttcaaatgtatccagaattagccataagagaattagtagctaattctcttatacatcaagatttacttattagtggcgctggacctgtgatagaaatatttgataatagaattgaaatagttaatccaggcactccattaattaaagttgaaagatttttagattcgccaccaaaatctagaaatgaaagtctagcttccttattaagaagaatgggcatttgtgaagaacgcggaacaggaattgacaaagtaatttcagaaactgaaaaatatcagctccccgctccattaataactttatatgacgaatttattaaagttactctacacgcctacaaagatattaatgacatgactagagaggaaaaaattcgtgcaacatatatgcatgcttgcttgaaatatgttgagagtgaaagtattacaaatcaatcactgcgaaaaagatttggattggaagataaaaaaatctcagttatttcaagaattataaaagacacagttgctgaagaatatatcaaacctgtagatccggagacttcacccagacacatgagatatataccatactgggcatga

SEQ ID NO: 409534 - DNA, 198 bp, Staphylococcus aureus
atgagatttttaaagagagtcgtattgtacataagcattatggctttgagcatttttataataggttgtgatagttcaagcgatacttcggaaaaagcaaaagaagattcaaaagaaacacaaatcaaaaagagctttgcgaaaacgttagatatgtatccaattaaaaatcttgaagatttatatgacaaagtgtaa

SEQ ID NO: 409535 - DNA, 792 bp, Staphylococcus aureus
atgaggaattcaaaaagagtagtattgtacataagcattatggtgttgagcatttttataattggttgtaatagttcaagcgagaatgcaaaaaaatcaaaagaagactcaaaggaagaacaaatcaaaaagagctttgcgaaaacgttagatatgtatccaatcaaaaatcttgaagatttatatgacaaagaaggatatcgagatggcgaatttaaaaagggagacaaagggacgtgggttgttagatctgaaatgataattcaaccaaaaggtaaaagtttaacttcaagaggcatgatattatacatgaatagaaatactaggaccacaactggttatttttcaatagaagagatagattcaagaaaaagtcttgatgaaagagaaacagaaaaaaagtatcctgtgaaaatgaaaaacaataagattattccaaatgaggagataaaagatgaaaagttgaaaaaggaaattgaaaactttaagttttttgtgcaatatggcagttttaaaggaatagagaattatgaaaatggtgacatttcctacaattctgaagctcctatttattcagcgaaatatcaactgaaaaatgatgattataatgttaaagaattacgaaaaagatatgatattccaacagaaaaggcgcccaaattgttgttgaaaggttcgggggatttgaaagggtcttcagttggatataaggaaattgaatttatattcctagaaaataaaaaagaaaatatatatttttcagatggattaaacttaattccaagtgactaa

SEQ ID NO: 409536 - DNA, 780 bp, Staphylococcus aureus
atgggatatttaaaaaggattggaatgtgtataagcctgttgattgtaatcatttttgtaacatcttgcggtggtggtaataaaatcactggagattcaaaagaagcacaaattaaaaagagttttgctaaaacgttagatatgtatccaattaagaatctcgaggatttatatgataaagaaggatatagagatggtgagtttaaaaaaggcgataaagggacgtgggttgttagatctgaaatgataattcaaccaaaaggtaaaagtttaacttcaagaggcatgatattatacatgaatagaaatactaggaccacaactggttatttttcaatagaagagatagattcaagaaaaagtcttgatgaaagagaaacagaaaaaaagtatcctgtgaaaatgaaaaacaataagattattccaaatgaggagataaaagatgaaaagttgaaaaaggaaattgaaaactttaagttttttgtgcaatatggcagttttaaaggaatagagaattatgaaaatggtgacatttcctacaattctgaagctcctatttattcagcgaaatatcaactgaaaaatgatgattataatgttaaagaattacgaaaaagatatgatattccaacagaaaaggcgcccaaattgttgttgaaaggttcgggggatttgaaagggtcttcagttggatataaggaaattgaatttatattcctagaaaataaaaaagaaaatatatatttttcagatggattaaacttaattccaagtgactaa

SEQ ID NO: 409537 - DNA, 1506 bp, Staphylococcus aureus
atgagggaaaattttaaattacgtaaaatgaaagtcggtttagtatctgttgcaattactatgttatatatcatgacatatggcgaagcagaagcatcagaaactagtgatgctattggaaatcacaatgtgaataaaacagaagaatctgaaactgcgtcacaacttgttcaaaataataaagaaataaatgcggatcaaacaaaaaagaatactgtcaaattggatcctatcaagccaggagatcaaaaagtcacaggtactacattaccaaatcaattaattttattaagcatagacaaaaaagatgtgagttcatttgatagtggaaatagtgagctagtgatgtcaaaggaagatggaaaatttgagtatgacttaaacggaagaaaaattgtccataaccaagagattgaagtaacttcatcttcaacggaaggtttatttgacgatgaagaggatgaagaagtggaagaagctacaactgaaaaagctggtactgaggaagaaagtacagaagctaaagctacatatactacgcctcgatatgaaaatgcctataaagtgcctgaaaagcaattagataagaaaaatggacatcatcaagttttcatcgaaccaattactgaaggttcaggtattattaaaggtcatacttctgtaaaaggtaaagttgcactttctattaataataaatttattaattttgaagagagcgttaagggcggtgttagtaaagaagatactaaagctagttcagatggtatctggatgcctattgatgaaaaaggctactttaactttgatttcaaaacgaaacgtttcgataatttagagttaaaagaaggtaatgatatctcattaacatttgcgccggaagatgatgaagatgcattaaaacctttaattttcaaaactaaagtaacaagtttggaagatattgataaagcagaaactagatatgaccatactaaagtcaacaaagtgaaagttttagataatgttaaagaagatttacatgttgatgaaatatatggaagcttatatcatacagacaaaggtaaaggtattcttgataaagaaggtactaaagtaattaaaggaaagactaaattcgcgaatgcagtagtgaaggtagactctgaactaggtgaagcacaattattccctgatttacaagtaaatgaaaaaggtgaatttagctttgactcacatggtgctggttttagattacaaaatggagaaaaattaaacttcacagtggttgatcctattacaggtgacttgttaagtaatgagtttgtttctaaagagattgatattgaagaaacacctgaacaaaaagcggatcgtgagtttgacgaaaaacttgaaaatacacctgcatactacaagttatacggcgataaaatagttggtttcgatactaatgatttcccaatcacttggttctatccattaggtgaaaagaaagttgaacgtaaggcaccaaaattagaaaaataa

SEQ ID NO: 409538 - DNA, 702 bp, Staphylococcus aureus
atgaaattaaaaaatattgctaaagcaagtttagcactagggattttaacaacagggatgattacaactactgctcagccagtaaaagcaagcgagtacagcgatttaagagcagtatcaaatgatacatttaatttaaaaacatattatactggtcctaactttaattataaaaatttaaaaggttataaagaagggaacaaagttgaatttgtagatgagattactcaccaattaaatgtaattgatttgaaaggttcagataaagaaaaattaaaagatatgatagatggtactctgtttgatgtgtttgtagttagagaaggaacaactaaagacgctactaattattcaataggtggaattagtaatccgaatagtgaaagctatatagatacactcaaaaatgtaaatctaaaagtttcaaaaaaagtaagctcaaattcagctacagtagcatcatcgcattttgaaattaataaagaagaaatttcattaaaagaattagattttaaattaagaaaacaattaattgataatcatgatctttataaaacagaacctaaagacagcaaaattacagttactatgaataatggagactattacacatttgaattaaataaaaagttacaagaacaccgcatgggtgatgtaatcgatggtactaaaataaaagaaattaatgttgaattaaactaa

SEQ ID NO: 409539 - DNA, 1110 bp, Staphylococcus aureus
atgagtaatacacaaaagaaaaatgtgccagagttgaggttcccagagtttgaaggcgagtgggaagaaaggaagttaggggatcttataaaagttaattctggaaaagattataaacatttggataaaggcgatataccagtctatggtactggcggttatatgacaagtgtttcagaaccactaagtgaaattgatgctgttggtattgggagaaaagggactataaacaaaccatatttgcttgaggcgccgttttggacggtggatacattgttttattgtacacctgaaaaagaagcagacatactatttatattaagtttatttagaaaaataaattggaaattatacgatgaatcaacaggtgtgccaagcttaagcaagcaaaccattaataaaataaatagacttgtccctacaaataaagaacaacaaaaaataggcgagttcttcagcaaactcgaccgacaaattgaattagaagaacaaaaacttgaattacttcaacaacagaaaaaaggctatatgcagaaaattttctcacaggaactgcgattcaaagatgagaatggtgaagattattcggagtgggaagagagaagatttgctgatatatttaaatttcataataaactaagaaagccaattaaagaaaatttaagagtaaagggttcttatccatattatggtgctacaggtattattgattacgttgacgactttatatttgacgggaattatttacttattggagaagatggtgcaaatattattactagaagtgcacccctagtgtacttagtaaatggaaagttttgggtaaataatcatgctcatatattatctcctttaaatggaaatatacagtacttgtatcaagttgcagaattagttaattatgaaaaatacaatactggaactgctcagcctaaattaaacattcaaaatttaaaaattattaatgttgtaatttcaacgaatttagaagaacaacaaaaaatcggaagctttttaagtaaacttgatcgtcaaatcgatttagaagaacaaaaactcgaattacttcaacaacgaaaaaaagccttacttaaatcgatgtttgtttaa

SEQ ID NO: 409540 - DNA, 849 bp, Staphylococcus aureus
atgatatatgaaacggcaccagccaaaattaattttacgctcgatacactttttaaaagaaatgatggctatcatgagattgaaatgataatgacaacagttgatttaaatgatcgtttaacttttcataaaagaaaagatcgaaagatagttgttgagattgaacataattatgtgccttctaatcataaaaatctcgcatatcgtgcagcgcaactatttattgagcaatatcaactaaagcaaggtgtaacaatttctatcgataaagaaatacctgtttctgctggcttagctggaggttcggctgatgcagcagcaacgttaagaggattgaatcgactttttaatataggggcgagtttggaagaattggctctactaggcagtaaaatcgggacagatattccgttttgtatttataataaaactgcactatgtactggaagaggagagaaaatcgagtttttaaataaaccaccttcagcttgggtgattcttgctaaaccaaacttaggcatatcatcaccagatatatttaagttgattaatttagataagcgttacgacgtacatacgaaaatgtgttatgaggccttagaaaatcgagattatcaacaattatgtcaaagtttgtctaatcgattagagccaatttctgtttcaaaacacccacaaatcgataaattaaaaaataatatgttgaaaagtggtgcagatggtgcgttaatgagtggaagcggaccgactgtgtatgggctagcacgaaaagaaagccaagcaaaaaatatttataatgcagttaacggttgttgtaatgaagtgtacttagttagactattaggatag

SEQ ID NO: 409541 - DNA, 381 bp, Staphylococcus aureus
atgaaaatcattaacacaacaagattaccggaagcacttggaccatattcgcatgcaacagttgtaaatggtatggtttatacttctggtcagattccattgaatgttgatgggaaaatcgtaagcgctgatgttcaagcacagacaaaacaagttttagaaaatttaaaggttgttttggaagaagcaggatttgatttgaattctgttgcgaaagcgaccattttcattaaagatatgaatgatttccaaaagataaatgaagtgtatggtcaatattttaatgaacacaagccagcgcgtagttgtgtagaggttgcgcgtttgccaaaagatgtgaaagtagaaattgaattagtaagtaaaattaaggaattataa

SEQ ID NO: 409542 - DNA, 360 bp, Staphylococcus aureus
ttgtatccaggcttatctaaagatgactttaagacaaaaaaagatgaagtaactgtcgttaagcaaggagatgacttccacgttgtgaaagataatgaatcggtttgggctggtgttaattacagcgatagcactaaaacttttgaaattaatggtactaaagttgaagttaaagccaaaggtatgtttatacttaaaaagaaagatgataaaacttatgaatgtagcttctttaatcccgaatctacaaattccgtttcagatatagaatcaaaaatttttattaaaggttacaccataactaataaaagtgtcacaaactctaatgatgcaggtttaaactttgaattaactaaataa

SEQ ID NO: 409543 - DNA, 1065 bp, Staphylococcus aureus
ttgttaacggtagatcaagttaaagaactaataggagaaattaaagatcctattatagatgtacctttaaaagaaacagaaggtattgtagaagtttctattaaggaagaaaaagaacatgtaagtgttaaattggcaatggcacaattaggtggtgcaccgcaattagatttacagatggcagttgttaatgttttaaaagaaaatggtgcaaaaactgtgggtatacgatttgaaacgttaccagaagaaaaagtaaatcaatttaaaccaaaagaagaaaataaacctaaaacgatagaagggctgttatctcaaaataatccagttgaatttattgctattgcttcaggtaaaggtggcgtcggtaaatctactgttgcagtaaatttagccgttgccttagcccgtgaaggtaaaaaagttggattagtagatgccgatatatatggatttagtgtaccagatatgatgggtattgatgaaaagcctggaattaaagggaaggaagtaattccagttgaacgtcatggcgttaaagttatatcaatggccttttttgtggaagaaaatgcgccagttatatggagagggccaatgttaggtaaaatgttgacgaatttctttacagaagttaaatggggaaacattgaatatttaatactcgatcttccacctggaacaggagatgtagctttagatgttcatacgatgttaccttcaagtaaggaaattattgtaacgacacctcatcctacagcagcatttgttgcagctcgcgcaggtgcgatggcaaaacatacggatcattctattcttggcgtaattgaaaacatgagttattttgaaagtaaagagacgggtaataaagaatatgtctttggcaaaggtggcggtactaagttagctgatgaacttaatactcaattacttggggaattacctttagagcaaccatcttggaatccaaaagattttgcaccgtcaatatatcaatcagatgatcgtctaggtaaaatttatagctcgattgcacaaaaagttatagctgctacaaataaatag

SEQ ID NO: 409544 - DNA, 1443 bp, Staphylococcus aureus
atggctaaagttgaattaacaacccggagacgaaacttcatagttgctgttatgttgattagtgcgtttgtagctattttaaatcaaacattattaaatacagcgttacctagtataatgagagaattaaatattaatgaaagtacatcgcaatggctagttactgggtttatgcttgttaatggcgtcatgatacctctgacggcatatctaatggataggattaaaactagacctttatacttagcagcgatggggacatttttattaggttctattgttgcagccttagctccgaattttggagttttaatgttagcacgtgtaattcaagcgatgggtgcaggggtacttatgcccttaatgcaatttacgttatttacattgttcagtaaagaacatcgaggttttgcaatggggctggcaggtttagttattcaatttgcaccagcaataggacctacagttacaggattaatcattgatcaagcgagttggcgagtaccatttattataattgtaggaattgctttagttgcctttgttttcggtttggtttcaatctcgagttacaatgaagtgaaatatactaaattagataagcgctcagtaatgtattcaactattgggttcgggttaatgctatatgcatttagtagtgcaggagatttaggatttacaagtccaatagtaataggtgcattgataataagtatggttattatctatttatttatacgtagacaatttaatattagtaatgcacttttaaatttaagggtttttaaaaatagaacatttgcattatgtacgataagttcaatgattattatgatgtcaatggttggacccgcgctgcttataccgctatatgttcaaaacagtttatctttatctgccttgttatcaggactagttatcatgcctggtgcaataataaatggatttatgtcggtttttacaggtaaattttatgataagtatggtcctagaccattgatttatactggttttacgattttaacaattactactattatgttgtgtttcttgcatacagatacatcttatacgtatttaatagtcgtatatgcaattagaatgttttcagtttctttactcatgatgccgataaatactacaggaattaattctttgagaaatgaagaaatctcacatggcacggctattatgaactttggtcgtgtaatggctggttcactaggcacagctttaatggttacattaatgagttttggtgcaaaaatatttttatcaacttcaccatcacacttaacttcaactgagataaaacaacaatcgattgctattggagtagatatctcatttggatttgtaacagttctagttatgattgcttatgtgatagcaatttttatcagagaacctgaagagattgaaagtaatagaaggaaattttaa

SEQ ID NO: 409545 - DNA, 1293 bp, Staphylococcus aureus
atgaaattatctttagacataaatactgattttgaagttactactcttacagatttaccaaaattaaaaattgttatggagaacttaaacatgaaaataaacaaaagtgaaatagcgagacacatggatgttgatagaagaacagttgataaatatttaaatggctttgagccaaccaaaaagagaaatcgtcagtctattattgacaagtattaccctatcatagaaaaattactttcagacactagtgaacaaaagttctactataagcgtattctttggcaatatttgaaggataaacatgggttaacgtgtgcgtattctacatttagagcttatatccttaaacatgatgagtttaatcgttattttatgaaaggttatcaacggatgtcgcctaaaggcacaacgagattcgaaacaaaagccggtcatcaagcacagtttgactggaaagaaggcattaactttaaaacgaaggataatcaaatcgtttcactaaatataggcgtactactacttccttattcccgttttgtaatcatgcaagtgacaatgaataaatcaagtgatgtcttatttaatttattgacacaagcgtttgagctaatgggaggtgtgcctaatgaacttgtaacggataacatgaaaacggtcatggatcaacccagaacagaacgtacaaatggtcaaataaatcgtagatttaaacaattcgctgatgattttaattttaaagtaaaaccttgtattgccggccgtcctagaacaaagggtaaagtagaatcgataatgaaaatattagatgaaattcatgcttatcaaggcgaattatatttggaagagattcctaagtttatttctaatcttaatgagcgactgaactactcagttcatacgagtacaggtaaaatacctattattgctttagaaaaagaaaaaagtttcttacaaccactaccgaatgtgaatgtaagaaactcatataaagtgaaacataaatatttgaaagtcaaccactctaatatgattacatataagtccaatcaatattcagtaccagctgaatattgtgggaaaatagttgaagttcaagtttatgatcaaaaactacacgtttattataacactaaatcgatttgtgaacatctcatcacacaacgtaaattaaattatcaaaaagaacattatttagaaacactgtcatcttcttttggaaatagagaaatggatgatattaatcagattgcgatagataatttgaatgcgattggagagttgtatgatgaataa

SEQ ID NO: 409546 - DNA, 765 bp, Staphylococcus aureus
atgatgaataattcgacgaattataagcgcttaaaagcgaatttagaatatttgaaaatgaatcaaatgattaatcatcttgatgatgttatcgattttagtattaaaaacaacctgtcatttatagatacactaattaaattaagtgactacgaaatcgaaattaaagagaaaaatttgattgaatcgatggtaaaggtggcggcatttccgtttaaaaaagaaatatcagattttgactttaattttcaaccgagcatcaatcaacaagaaatttgggattttacagatttgcgttttatagaaaaatatcaaaacattgtctttttaggctcaagtggcgttggtaaaacacatttagctacaggcattggtatggctgcagctaaaaatagagtaagtacttactttattaaatgtcatcatttgatagagaatttaagaaaagcaaaactagagaacagattagaaaatagattgaagcactatagcaagtataagttattaatcatagatgagattgggtacttacctattggaagtgaagatgccaaactattctttcaattaatagatttaagatatgagaagaaaagtacaatatttaccacaaatatcaatttcaacttatggaatgaaatatttgatgatcccaaaatcgcaaatgcgattttggataggatattgcatcattcaagtgtagttaaaatcactggcaaatcgtatagattaaaagatcattcacctaagaaggaaattacttag

SEQ ID NO: 409547 - DNA, 753 bp, Staphylococcus aureus
ttgggggagtttgaagttaaatatttaacaggatttattttaatattattgttagaaggaattttgacaaattcagcaagtgcaatcgcatattcagacttacatcataaaagtaagtttaattcaaagcgtctaagtaatgctaagatgtcatttgctaatccaactgatcttgaaaataaaaaaacaaacgatagactgttgactcatgatttgttatttcatgacatgttcttaaatgatgcttggaaaaaggattttaaagttgaattcgaaaatgaggcactttcaaatgaatttataaataaaaatatcgatatatatactggaagctatagctatgaatgtcatgggggagcaaccaataaaacgcaatgtagttatggtggtgttactttaagtgacaataataagtacgatgattataagaatataccttgtaatttatggattgacggacatcaaacagaaaaagaactaactgcagtaaaaacgaaaaagaaaattgttaccattcaagaattagatgttcaattaagaaattatttgaatgagaagtataagttgtacgaaaaaggtggcgacattgttaaagggtatgttaaatatcataatgatgatgaaaaaaatgtagaatatgatttttataatttaaatggtgagtatggtcatgaggtattaaaaatgtatgctgataataaaactatcaatagtgacaaattgcatttagatatctatttattcaaatcataa

SEQ ID NO: 409548 - DNA, 210 bp, Staphylococcus aureus
atgttatttgctttgattatgacgattggtagtgactttatgagttttctacatgttgatacattacagaatgccatagcaggcaaattaaaagcgtctgaaggctttatgacatttgtttggtatattgcttatggtttaccttatgtattagcgataggtctatttattggcttgtacgaatggattagagcaaagttccatgattaa

SEQ ID NO: 409549 - DNA, 1113 bp, Staphylococcus aureus
atggtagtagataatttttcaaaagatgataacttaatcgagttacaaacaacatcacaatataatccggttattgacacaaacatcagtttctatgaatcagatagaggaactggtgttttaaattttgcagtaactaagaataataagccgttatcaatcagcaaacataatgcgatgactagtattgtgcttaagacggataacttcgacgatgaacacggcgcttatattagtgatgaacttacaattgttgatgcaattaatggacgaatgcaatacgttatcccaaacgagttcttaaaatacactggtcgagtacatgcgcaagcatattttactcaaaacggtagcaataacgtaattgtagagcgtcaatttagcttcaatatccagaatgatctaattagtaattttgacggtaaaacaaagctagtttatatcaaatcaattcaggacttaacagaaagtgttaaagaagaagttgaggacttaaagaaaagtttgagtgatacaaaatcgttggttactgaaattgatagtcgtattaatcaaggtattcaaagattagaaatcaaacaaaatgaagcggtacagatgattacaacaacacaagacaaagccgttcaatatataaatagcgagttccagaaaattattgataaagagcaagcgatttttgaacgtgttaacgaagttgaacaacaaatcaatggtgcagacctaatcaaaggtaattcaacaacaaattggcaaaagtctaaaattactgatgattacggtaaagcaatcgaatcgtctgagcagtccatagatagcgttttaagcgcagttaacacatctaggattattcatatcactagcgcgacagatgcgccctcatttaaagatataggtactgtcgatacacctaaagaagatggcgttgacgatggttcagatattccggtagctcctaacactttaggaaaatcaggcgtgttagttgtctatgttgttgatgatagtacggcacgtgcaacatggtatccagatgattcaaacgacgaatatacaaaatataaaattagtggcacatggtacccgttttacaaaaaaatgacggcgatttaa

SEQ ID NO: 409550 - DNA, 162 bp, Staphylococcus aureus
atgagtaaaacttataaaagctacttaatagcagtactgtgctttacagtcttagcgattgtactcatgccgtttctatacttcactacagcgtggtcaattgcaggattcgcaagtatcgcaacattcatattctataaagaatacttttatgaagaataa

SEQ ID NO: 409551 - DNA, 609 bp, Staphylococcus aureus
atgtttaaatttcatgatgagacatatattagaagaacaataaaatttttagttacaatattaataattttcttagttacctttattttagccattatatttagcccttctactgaaaccataaaaaatctatcaaaagggatacccagtaatgttgcaaatgcagtaggtttagaaaaagtgtggggatatatactaaataatggatttatagttcctgttcaaatgctaatattagcatttattccaatcccttttttatattatttaaatgttatagttacagcgattcttcctgctatagctttaggttttgtaattaattttgatgtttataaagggagtatgatgactttatcttcaatacctcactttttcatagaaatattagctttttgctttgttgctagcggactctttaaagttaaccaagcaataactagaaaaagcatcaacttatttagaaaaaataaaaaagataatttatctttaaaattagctatactcaacttattgaaaatatatgtatttattgctttacctctatttgtaatagcagcttttctcgagaattatttatctaaatttatatttgagttacttacttaa

SEQ ID NO: 409552 - DNA, 393 bp, Staphylococcus aureus
gtgaaagaaaatgacttagcgcatggggaatggtcgaattggttaaaatcagtgaattttaacgactcacaagcaagaaaatttataaaagtatttaacgaatttcaaaatcgttcgacgtcgaacactttaggagtagaagctctttatcaaatagcaactctccctgaaccagaacgcacgaaagaacacataacgtcaaatggtgaaactaaaacgccagatgaaatgacggttcgagaattacgagagttaaagaaacaactcaaacaacgagatgaagaaaacgcccgactccaatcacaaatgaaaaaagtacaactttctgaggagatagagagaaaccaatataaatatgggttaaataattatatttttactataaaattttag

SEQ ID NO: 409553 - DNA, 765 bp, Staphylococcus aureus
atgaataatgttggaataataataactataatagggactattttaactgtgtttaatactatttctgcaattaggtggagaagaaggaattataattatcgtaaacaaatagattattataaaaatgaactcgaagaagcaaatcagaaatatatcaaaaatttaaacaataaaaaagaactgacagaatttattaataattttgttaaattaagttattctacaataatgtcgtgtatcagttttttatatacactagattttattactaaaagtcttaccaaaaataacgaatatataagtcatgaaaaactagaaaaattattacaaagacattttaatataaagaaagatattaatattttaaaaactgaaacaacacaattgtatttacattcatctgacaaaaatgaaattgcattagtaggtggtacttttaatgaaatttattttttaaatgagtttattgaagttcaattaatgaaacattataaaaaagaaaaaataaataatagaaagattagtaaagatatacaaagagcactattatctagtgaagatgttttgaaaataatgaatagattagattctatgttagttaataaaataaacatactatactcggaaaatgaaggtgatggaacaatgacatttgttactggcacagaatattttaaatggtattttcctgaatacccagatgaaataaaaaccttgaaaataaaagatgtaaaaaaacatgattttacagataaatatatataa

SEQ ID NO: 409554 - DNA, 408 bp, Staphylococcus aureus
ttgattaaggtaaaagatgttattagattaaaaatgcctcatccaaatataagtagtaatttagctctatattctcatatgtatatttgttatgaattaggtcaatccaataagcttataaaagcacaaacatataagccgttattggaaaatgttgttgataactttattgactcagatgaatttataaatcaccatccatttagaagacgtacattaatagatttagacaagtacttttttataaatgatgttgtatttcctatacaacttagagctaatgataataatggaaatgtatcagatagtttgtttaacgaaattaataataaaactaacaatttgtgtatctgtgcaaaagaagttatagataaagaaattttaaagtctattaatcctgctatttaa

SEQ ID NO: 409555 - DNA, 648 bp, Staphylococcus aureus
atgacaatatattctgaagaaattaaattaaaaaagttgaaatggttaaaaattaatggatatttagaaagcatgtccccactgcaaattcaaaaatttttattttttagtgagatgtttaatttagttacaaatgaagactacacacttcacaaattaagagcatataaaaatggtccggtatatagcgatgtatatggagatataacttatagaaaaacagaacttttaaaagaattagataccgttgaaattaattacaactcaactcaagaagaaaatctaaacaaagcgttgtttattactaatacccaaacaaacgaagatttatctgaaatcactcataacctagatttatggtctagtaaaatagatttaataaatcaaaatgtacaaaatatacctatagaagataaagatattaccgataaagatagaaattctatttctaatttttattcgtatgctaaacatttaagtgattatcaaaatattaaaattaaagataaaatatttttaattagtaataatgatataaataaattggaagataatatgcttcaaactttagaaatggtaagtgatgatagcaacttaattaatccagtgtatatagatatagaggatggtgtgttgttaattgattaa

SEQ ID NO: 409556 - DNA, 492 bp, Staphylococcus aureus
ttgaatcgcgctattaatatagaacaaccaatggagacattagtaagtgatttgacatatgtaaaaggcgcagaaacatggcattacatatgtttatttatagatctatttaatagagaaattgttggttacagtgcaggtaaaaataaggacgtaaatttagtatcaaaagcaatcagcaaaataaatcataatcttgaacaaatcgaacaattccacaccgatagaggcaaagaatttgataatcatttgatagatgcagtcctagaaacctttaaaatcaaacgttcattaattaccaaaggttgtccttttgataacgcagttgcggaagcaacgatgaaagcaatgaaaactcaatttgaaaatttagaacagttagaaacagaattatttgattatgtaaattggtacaacaattttagaccacattcttcattacagtatttgacgccagtggcatttaaaaatctacacatgaaaaatgtctaa

SEQ ID NO: 409557 - DNA, 1191 bp, Staphylococcus aureus
atgagcgagaaaaagtatcgaagtcatagaaaaaagcttgaattattaagacagagaagaatgaacatacctattgattcaagcagagaaagaaatattatcaaaaaatacaattattacacattgattaatggatataaagatccatttttagtaaagaaaaatgattatccaacaaactatcctaaagatgaagatttatatataagaggtacaaaaccttctcatttagaagctctattaaactttgataataatttaagaaatgcatttttaaagcgactattatttattgaagaagaaattaaaaacgctttagtagaatcgttttatgatttttattcaaatagtttgattacaaaacataagaaagataatttacatagagaaaatgaatatttaagaagagattactatgaattaagtaatagtgaaaagaaaataataacgtataaaagtgggaaagttaagatttatgatactaattatagtactattccttcagataaacctataaaatatattaagaaaaagaatcttaaaagggttaatcaatatgaggaatttgtttccaatgtttacgggactataagtagacaaagaaataaaaaagaatcattaaaatattatttagataatcatagatatatacctatgtgggtactaattcaagtgttaacatttggaaatatttcgaagatgtttgatatacaaaagtttgatgtgcaacaaaaaattataaatatgcttaatttaaatagtaaagttttgaatgagtatgagaatgtacatacaatttctaatatatttaatattttaaatatatatagaaatgtatgtgctcatggtgaaagattattttgcacttctacaaagatagaaattgatgatgattatcaaattttttataaattattacctaagtatcagagggtagaaaattatcatttaaataataatgaaatatttacacgagaatttataacattacaaagaagaaaaaatggtatattcaaacttttattttgtatcagtctatttttgaataaaacagaattaaaaaagcttgttaaagaagttcaaatgcattttagtattttaaaaaatgttttaaactcaagtagttataataatgttgtatttatgatgggactagatttctcttgggaagagaatattttaaataagtaa

SEQ ID NO: 409558 - DNA, 609 bp, Staphylococcus aureus
atgaaaaaaagtaactttaatccaaaattcttaaaatttattacgatgattaaaggtgtacctaaatactttgttcaaaacagtcgtttgatttatgcaatattattagtaattttattgccattcgtagttttaacaatactcttatttttatctagtttaaacattaaaaacactacacttgcaattttcatagtaattataattacaagtgctttattaacatggatttatcaagtggactttaaaaaagacgatggtgtatttaaaaaatttaataacaatattgtccaattttttataacaatagtccccataacattaacattattaaacactggatatactttggatcaaataagcgaacaaaataaatcagagaatgaaacaactataaattgtgtaaaaaagcactttgaaaaaaataaatattcttgcgagataagtaatcctaattctaaaatgaaacaatctaattttctaattatcaatttgttgttaacttcatcgtttggaacattaatagttattcacaacatatacaaaggaaagcatcaaaagaaaaattcaattattaaataccaaaagaagagaaattcaaacagataa

SEQ ID NO: 409559 - DNA, 378 bp, Staphylococcus aureus
atgaacaaattaacgcctaaacaagagcattttgcgaatgagtatcttaagacactcaatgatactcaaagcgctataaatgctggttatagctcaaatagtgcacacgtaacagggagtagactattgcgcaatgagaaagtaaaagaatatctacaaagcaagaaagatgagattatagacgatactattttaactgcaaaagaaacattatatttacttacgaaatcagctgttggtgataagacagaaacaaaagagtttgtagttaagaaaagttcgtttgagcgaaatccagatataggtagactgaacctcgtatacaatgagcatgtggaaacggtagaagtatctatagtatatttactgataaagtag

SEQ ID NO: 409560 - DNA, 273 bp, Staphylococcus aureus
gtggatgatgattataaggatgtatcagctaatgatttttttacgttaaatgatgatgtagaagaatattcatatcaaacaattaatgcagatgaacatatatttatgaatgagctatattcattagttgaccaaatagctactgataaagagtattttattttagatatgttattaagtgggcgtagttataaagagataagccaagtgttgaaatgttcaatagaatcaataagaaaatggtttgataatttattagataataaggtgtga

SEQ ID NO: 409561 - DNA, 309 bp, Staphylococcus aureus
atgtggtgtgtatataatttaacattctatattattgggggtattatcgtgcaggaaaatattaacaaaccgtatcaacacacaaagatatctgaatatgagttattaactaaatatattaattctaaaatccaaacggcacaatcgcatattgatgagatgtatcatttaagcacctcaataactacatgtgacctgattatgagtgatgtttctgtatcttatcccgtcgataagctcgtgattgggattagtgaaacaaaagaaaaattgaaacgctttaaagatgattcagctatgcgtttataa

SEQ ID NO: 409562 - DNA, 1878 bp, Staphylococcus aureus
atggaagcatataaaattgaacatttaaataaatcttatgccgataagactatattcgataacctagatttatcaatttcagaaggtgaaaaaataggtttggtgggcataaatggtacagggaaaagtacgttgttaaaagtaattggtggtattgatgatgattttacagccaatgttatgcatccaaatcaatatcgaattcgatattcgtctcagaaacaggaccttaatgaagatatgacagtttttgatgcagtattaagttctgatacaacaattttacgcatcatcaagcaatatgagcaggcagtacaagcttatgcggatgaccaaagtgataaattgttcaagcgaatgatggatgcgcaagatgctatggatcaacatgatgcttgggactataacgctgaaattaaaacaatcctctcaaaactaggtatacatgatactactaaatacattaaagaattatccggcggacaacaaaaacgtgttgtacttgctaaaacattaatagaacaaccagatttattgttattagatgaacctacgaaccatttagacttcgaatcaatcagctggttgatcaattatgtgaagcaatatcctcatacagttttattcgtaacccatgatcgatattttttaaatgaagtttccactagaattattgaactaaacagaggtaagttagcgtcatatcctggtaactatgaatcttatattgaaatgcgcgctgaaagagaagtaacacttcaaaagcaacaacaaaagcaacgagctttatataaggaagaacttgcttggatgagggctggagctaaggctcgtactacaaagcaacaagctagaattaatcgatttaatgacctagaaaatgaagttaaccagcaatataaagacgataaaggtgaattgaatcttgcttattcaagattaggtaagcaagtgttcgaattagaagacttatcaaaggctattaatgataaagtattatttgaacatctgacggaaattattcaaaaaggtgagcgtattggtgttgttgggccaaatggagctggtaaaacaacactcttaaatattttgagtggagaagaccaacaattcgaaggtaaattgaagactgggcagacggttaaagtagcttattttaagcaaacagatgagaccctggatagagatattcgtatgattgattatttaagagaagaaagtgagatcgcaaaagaaaaagatggaacctcggtatctattacacaacttcttgaacgatttttatttccaagtgcaactcatggtaaaaaagtttataaattatctggtggagagcaaaagcgtttgtatttattacgtctactcgtacaccagccaaatgttctgttgttagatgaaccgacaaatgatttagatactgagactttaacaatacttgaagattatattcatactttcggtggtacagtgattaccgtaagccatgatcgctacttcttaaataaagttgcacagtcatattggtttattcatgatggtcagatggaaaagattatcggaacttttgaagattatgaaagttataaaaaatcattagataaaaataaatccacattgaagcaacactctaaatcttctacaactgtacgtaagaaaaatggtttatcatataaagaaaaattagaatatgaacaattgatgaaacgcatagaacaagcggaagtaagaatggaagaaattgatgtgctcatgattgaggcaagtgcagattatgggaaaattaaagaactaaacgaagaaaaagaacaacttgaaattcaatatgatttagacatcacaagatggagtgagttagaagaaattaaagaacaacaataa

SEQ ID NO: 409563 - DNA, 1005 bp, Staphylococcus aureus
atgtcaatcataattgaaaaaagtggcttattcagtagctttcaggactttggcagaaggggatatgaacatgatggtgtaattccatgtggtgcacttgatactttagcacatgaaattgctaatcgattagttgcaaatgacaagaatgaagcaactttggaaatgactaataaaatggcaacgattcgttttacagaacctacgctgattgcattagcagggggtaatgtcaaagcttacactgagcatatgactatatctccatataaattgtatttgttagataaaggcgatgttttaaagtttagagaaacaagttatacatcgcgagtgtatttagctgtgggaggcggatttgaattagatgcatggttaggatctaactcaaccgactttaatgtaaaaattggtggttttaaaggtagaacattacaagatggcgatgaaataaagcttaagagagattatacagctcgtcatcataagttatttgaaaaccttgctcacacgaaacaaacagattggggtattgatggatacgccttgtcatttaattatatgtctgatgtatttcatgtcgttaaaaataaaggtacggaagattttaaagaagatgctattcaaagatttgtgaaacatgattataaagtaacgagcaaagcaaatcgcatggggatgatgcttgaaggtgaaaaaatcaaagccttttatgaagatatgccaccgtatcagactgtcaaaaaaggaacgatacaaattaagcgtgatggcacacctattatcttattaaatgatcattatacgctaggtagctacccgcaaatcggtacaatcgcaagttatcatttaacgaaattagcacaaaaaccgcaaggatcacgtttgaaatttcaatttatagatattttaacggctgaaaagaaccttgttaagtatagtaactggttaaaccaattattccatggaatagaatatagaatgcaattagaaatgatgaaataa

SEQ ID NO: 409564 - DNA, 207 bp, Staphylococcus aureus
atgattattgtttatattgtgctgttgttaattcttgtatacgtaaattatcgattagtgaatcgattgctatctgaaaatagaatatatgttgttcgtttgatagcaacaattactactgttataagctttatccttgtatacgcattaattcacgaactcatgccttttgttgtgcgggcaatggatttaatgtatcaccagtaa

SEQ ID NO: 409565 - DNA, 558 bp, Staphylococcus aureus
atgcgaaaagatgcaaaagagaataggcaacgaattgaagaaatagcgcacaaactttttgatgaagaaggcgttgaaaacattagtatgaatcgtattgctaaagaactaggtatcggtatggggacattgtatcgacatttcaaagataaaagcgatttatgctactacgtcatacaaagagaccttgatatttttatcactcattttaagcaaattaaagatgactatcattctaattatgaggttatgcaagtgtcgttagattatcttttacaatttaaaatcgataataaggcactactgcaatgtattgaagcaggcaacaataaattacgtttttaccaaagcgcattttatcaagaattatttgatttttattatgacttatttaaaagcgatgacgacacttacacgaagttcaaaacagatatgctgttgcaatcattatcaactagtgtatttgccttccaaatagagcatcgccatatttcaattgaagcgtacagaaattatttattaaacatttatttagatgaggtggaacgtaatgactaa

SEQ ID NO: 409566 - DNA, 891 bp, Staphylococcus aureus
atgaaaatagttattataggtgggtttttaggtggcggtaaaacgactgtcttaaatcatttgctcgctgaatcattaaaggaatcgctgaaaccagcagtcatcatgaatgaatttgggaaaatgagtgttgatggtgccttagtatctgaagacatacctttaagtgaactgacagaggggtgtatctgttgcgcaatgaaagcagatgtatcagaacagttacatcaattatatttaaaagagcaaccagacattgtatttattgaatgtagtgggattgcagaaccagtctctgtcttagatgcttgtttaacgcctattttagctccgtttacaacaattacacatatgattggtgtaatagacgcaagcatgtataaacacattaaatcattccctaaagacatccaaggcttattttatgagcaattagcatattgttctgtcttatttgttaataaaatagattcagcagatgttgaaacaacgagcaaactattgaaagatttagaagttattaacccagaggccgatatacaagtcggtatgcatggcagcgtcactttgccaatatcagttagacaaatgacagcaacttctgacaataaacataagtcgttacatcaaatgattaatcatcaatttgtgcaatcaccagtcaaatgtactaaagcagagtttataaaacgtttagcatgccttccgtctcatatttataggttgaaagggtttatgacatttgaagacaccgcacatacgtatctcattcaatttacacaaggacaatatgaattaacacctgtagcattttcaaaaaaagtgccagaatatttggtgcttatcggaaagggtatttcaaaagaagactatcaatgtttggaacagtag

SEQ ID NO: 409567 - DNA, 1341 bp, Staphylococcus aureus
atgttagaagtgaaatatgatatgagaacggggcattatacgcccatacctaatgaacctcattatttggttattagtcatgcggataaacttaccgcaacagaaaaagcgaaattaagattattaatcataaaacagaaattagatatttcattggcagaaagtgtagtttcttcgcctatagcgagcgaacatgtgatagaacaattgacactatttcaacatgagcgacgacatttaagacctaaaataagtgcgacatttttagcctggttgttgatatttttaatgtttgcattgccaatcggtatcgcttatcaattttcagattggtttcaaaatcagtatgtatcagcatggatagaatatttaactcaaacaacattgctcaatcacgatatattacaacatatattatttggtgattatggtgtgctatcacttggaacatattcgctcgtatgggcattgccggtcgtaatattgattagtttatcaactgctataattgatcaaacaggacttaaatcatggatgatatgggcaattgaaccttcaatgttacggataggattacaaggtaatgatatcgtgccactattagaaggatttggatgtaatgcagcagctatttcacaagcagcacaccaatgccatacctgcacgaagacacagtgtatgagtttaataagctttggtagttcttgtagttatcaaataggtgcgacattatctatttttagtgtagctggaaagtcatggctatttatgccgtacttaatattagtacttttaggtggcatcttacataataggatatggttgaaaaagaatgatcaacaacttagcgttccgctaccttatgataggcaattacatatgccaaatatacgtcaaatgttgctacaaatgtggcaaaatatacaaatgtttatcgttcaagcgctacctatttttatcacaatctgtcttattgttagtattttatcactaacgccaattttgaatgttttatcacaaatatttacacctatattatcgttattaggcatctcgtcagaattgtcaccagggattttattttcaatgattcgaaaagacggcatgctcttgtttaatttgcatcagggcgccttattacaaggaatgacagcaacacagttactactacttgtgttttttagttcaacttttacagcgtgctcggtcacaatgacgatgcttttgaaacatttaggtggtcagtcagcactaaaattaattggaaagcaaatggtgacatcattgtctttagttattggtgtaggcatcattgttaaaatagtaatgctgattatttaa

SEQ ID NO: 409568 - DNA, 618 bp, Staphylococcus aureus
atggaaaccgtatatagtatccataaaaatccaagatacaaagttatagaaattgataatagataccttatggttgatttgacacaaaattggtattcatatatgtgtccaatgcttaattggtttataccaatgaaatatatagaaataagttctgaagagtttagtaatataaatacatttaaaaatggtaatcagaataataagtctatggttctaggaggcattggtgtaactatcggcatattcttaaaaggttttgtagatgcaataaatataagtattagtactacactattgttgatattgtttattatagctatgttagcatctattttattaaaaattaatttatctaaaaagttaaaaataaacattgataatcatcattattttggaagcgttatattaatcccaactgtgaagaatttcttactagttatttgtatttatattgttaatataatgttggtaataggtttattcgtaggtaatattttttacaataagcaaaatgttctaatgtatatcatttggatacttatgttctttatatttatgtgtttaaatattacctccatttcggataaaaaaattcatattaaaataaagaattga

SEQ ID NO: 409569 - DNA, 366 bp, Staphylococcus aureus
atgatgtcgaataaactggatgaaatcaataaaataatcacagcgaaacataagcaaatggatgacttatatgatgaaaagcgagaggttaaagcattgatagatgaaagtgatgcgcttaatcattcgatagatcaattatatcaacatttaggtgagcgttattatagtagcaatatggctagtcgtatggaacagttccgtgatgaatttcattttgcgaaacgacgttcaacggaagcgttatacgagcagcaacagcaaattcaacatggcattcgtaaagcggaagaagagatgattgacttggaaatgcgaaggaatgttgaaattgagacggtgacttgcaatggaaaccgtatatag

SEQ ID NO: 409570 - DNA, 492 bp, Staphylococcus aureus
atgactttcgaagagaaaataagcaaattatataatgaggttgcgaatgaaattagtgggatgataccagtagagtgggaaaaggtatatacaattgcctacctaaatgatgaaggtggagaggtcgtttttaattatactaaaccaggtagcgatgaattgaattattacacatatatccctagagagtataatgtctctgaaaaagtattttatgatttgtggacgaatttatatagattgtttaagaagttaagaaatgcatttaaagaagaaggtcttgaaccatggacatcatgtgaatttgattttacaagagagggtaatttgaaagtatcgtttgattatatagattggattaaattaggttttggtccatcaggaaaggaaaactactatatgtataaaaaatttggaattttaccagaaacggaatatgaaattaataaagttaaagaagtagagaagtgtattaaagagcaagaagaatag

SEQ ID NO: 409571 - DNA, 840 bp, Staphylococcus aureus
atgacaaagaagaaaaacattataaaagcaatcggtatttacagttttatagcgatgatgtttgtcatcattttatatccactactgtggacatttggcatttcccttaatccaggtacgaacttgtatggtgccaaaatgataccggatgatgcgacatttaaaaattatgcctttttattatttgatgaaagtagtcaatacctgacttggtataaaaatacgcttatcgtagcatctgcaaatgcactgtttagcgtgatatttgtcacgttaacagcatatgctttttctagatatcgctttgttggtcgtaaatacgggctgattacatttttgattttacaaatgttccctgtattaatggcaatggtcgcaatctatattttgctaaatacaattggattattagattctttatttggactaacactggtatatattggtggatcaataccgatgaatgcctttttagtgaaaggttacttcgatacgattccaaaagaacttgatgaatctgccaaaattgatggtgcagggcatatgcgtattttcttacaaattatgcttccattagctaagccgattttagcagttgttgctttgttcaattttatggggccatttatggactttatattacctaaaatactattaagaagtcctgaaaaattcacattagcagttggattgttcaactttattaatgataagtatgcaaataatttcacagtgtttgcagcaggggcaattatgattgcagtacctatagcaatcgtattcttgttcttgcaacgctatttagtatcaggtttaacaacaggtgcgacaaaaggttag

SEQ ID NO: 409572 - DNA, 180 bp, Staphylococcus aureus
atggataaaaatgataaagttaaaaaatctaaaattgctaaaaaatcagtagctaatcaagagaaaaaacgagcagaattaccaaaaacaggtgcagaaagcacacaaaaaggattgatctttagtagtataattggaattgctggattaatgttattggcacgtagaagaaaaaattaa

SEQ ID NO: 409573 - DNA, 1194 bp, Staphylococcus aureus
atgttgtacttagaagttttgaaaaatagaaactttacatatttattgattggtaatttcttacgtcggagttgctttgtgctgttttcgttacaaataatttggtttactgttgaattgacaaaccaatcatctttaaaattatcaatgatggttatgagtcaaacactaccatttattatatttggtattttcggtggcgcatattctgataaacataataaaaagaaaatactttatctatctgatcttatactaagtttgattataataattattcctttacttgcaataacatcaaatttaaattatctgacgcttctaaccatatctacagctatcaccattattaactgctatacggatcctgcgtttagggcaattcttcctgaaattattgatgaggagcatttagcaacaagtaatgcgttaatcgatagtttgcaaagaggctcaaatattattttacctgctttaattggtgtcattgtaatactagttggtaatgttggcgtcttttttatttgcagtatattgctatttttaggatttatttttaatgcacttttaaaatatacaaataacaacatgattgatagacactcaaaagaagatttttctgaaacttgggaattcttgaaaaaatctaaagaaattccatttattataatcattcaatttgcctgcatattgattaatactggcctttggcgtgttgcattaccattgtttatttccaatatattaaaagagggcgttggtgtatatggactagctacatcatgtttaggtatagcgtctttattaatgtcattgattatgggtttactgtcagaaaaacgattaatctttaaatttagtattggtgttttagtttggggaattggtttatcgattattaatgtgtttccaagtgtggcgatattgtatataggtgcaacattagtgggacttggacaatctatagagggactaacaagatcagttgccattcaaataaaaacgccaaatcatttgatggggaaagtatttagtatctcatctacatcgaattacgcagcggatacattatctttaggactgataagtttaattatacctttactaagcttaagtaatatatttatatcaggaggtgcaattatttcaatgcttagcttatcggggttaaagttttttaagaagtctatgtaa

SEQ ID NO: 409574 - DNA, 171 bp, Staphylococcus aureus
atgaaatataaaattagtttggcttataatttagcaattataatagggtcgctaattatattatgtatactaatatctagaggttatgatatatatgtaatcttgattccaattttgactattttagctagtttaatcaatttaatttgtgatattaaaaagcataaatga

SEQ ID NO: 409575 - DNA, 321 bp, Staphylococcus aureus
atgactactaaaaaactgtattttctatccatttctattatcattttagtcgccatttcaattgctatatatataacattaaatagcaatacgaagacacggttaaccaatgattcgcaacaacaaatagataaaattatcgagcatgatttacaaaagggacacattcctggagcatcaattttaatagtaaaaaatggcaaagtttttttaaataaaggttatggttatcaagatgttgataaaaagtcaaagcttctcccacaacaaagtatgaaattgcttctaatactaaagctttcacaggtcttgcaattttaa

SEQ ID NO: 409576 - DNA, 1308 bp, Staphylococcus aureus
ttgaaaaaacaagttattatttcgggcctcatgttattttcactattttttggagccggaaatttaatattcccgcccatgcttggccatacagcgggtcaaaatatgtggattggtatgctaggctttgcccttacaggcatattactcccctttattactgttattgttgttgcattttatgatgaaggtgttgaaagtgtaggcaatcgtatacatccatggttcgggtttatttttgctgtcgtgatttacatgtctatcggagcattttacggtattccacgtgctgcaaatgtcgcgtacgaaattggtacaagacacattttacctgtgcacaaccaatggactttaattatattcgcagcaatcttttttgccatcgtttactggattagtttaaatccatcgaaaatcgttgataatttaggtaaattattaacaccgttattactattaatggtcgctctattaagtattgctgtcattttcaaccctgaatctgcactaagtgcacctaaggataaatatataacacatcctttcatttcaggaagtttggaaggctattttacaatggatcttgttgctgcgttagctttttccgttgtcattgtcaatggctataagtttaaaggcctcacagatcgcatgaaaattttaaaatatgtctgcttttcaggtcttattgcagccatattacttggaatgatttactttgcacttgcatacgttggggcatcaacagctccaggaaactttaaagatggtacagatatattgacgtacaactcattacgcgtatttggttcgttcggtaacctcgtatttggaatgacggttattcttgcatgcctaacaacatgtataggactcgtcaacgcttgtgcaacatttactaagaaacacgtacctaagttttcttataaaatatttgcacttattttctctatcatagggttcttatttacaacacttggtttagaaatgattttaaaaattgctgtaccattattgactttaatttatcccgtgtctattgcacttgtactgatatcatttgctaacatgtttagcacattcagattcagttgggcctatcgactcgcaactgttattacattgattatttcaattttacaaatactaaatagttttaacttattacacggtgttattttgaaatcgtttatgatgttacctttagcagatatcgatttagcttggcttgtaccattcatgctctttgctattatcggtttcataatcgatgtatttatacgccgtccgaaacaagctacaacttaa

SEQ ID NO: 409577 - DNA, 798 bp, Staphylococcus aureus
ttgaagcaaacaggggaaattgtgtctaatggccatcaaaaagacaatgttttagtgttcggtgttgaaaagtcatcatttttagttccgagtttaatagaagggcataaagcgactaaagataatgaagtgttagctgatgaaacgcttaaaaataaaggatttaaaattggtgacacattatcactatctcaatcagatgaaaaattgcatatcgtaggttttacagaaagtgcaaaatataatgcgtcaccagtcattttcacgaatgacgctaccattgccaaaatcaatcctagattgactggagataaaattaatgcagttgttgtacgtgatacaaattggaaagacaaaaaattaaaccaagagcttgaagcggtaagtattaatgactttattgaaaatttaccaggttataaaccacagaacttaacattaaactttatgatttcattcttatttgtcatttcagctacagttataggtatattcttatatgtcatgacattacaaaaaacaagtttatttggcatattaaaggctcaaggatttacgaatggctatttagcgaacgtagttatttcgcagacgctcatattagcattatttggtacggcatttggcttactgttaacaggcgttacaggtgcatttttacctgatgcagtacctgtcaaattcgatgtactaacattgctcgtatttgcaattgtgttaatgattgtctctgtattaggaagtttattctccattttaacaattagaaaaatagatccgttaaaggcgattgggtag

SEQ ID NO: 409578 - DNA, 210 bp, Staphylococcus aureus
atgaatgcttttcttacactgattaatattattgtattggtgattttcatcgtaatattgcacatgatggctcgcaaacatatatcttttgcgaaacgtgtgtttacagctttaggtatcggcattgtatttggcgtgttattacatcttgtctatggaacacattcgaatgttattacatcaacaagtgactggttcaacattgtctga

SEQ ID NO: 409579 - DNA, 663 bp, Staphylococcus aureus
atggaatttaaaaccattcaatctgtcaaagatccacattacaacgaagcacttaaactttacgatactaagttaaatttatctttaactgaagataaacgtatcatcaaacgctcattagaaaacaacaaaactgaaaacgattatgtctttatcgtaggcttagaaaacgatgttgttgtcagtctagcaactgcacattatgaagccacaaccaattcagcatttttaatttatttattcgcaaaagacctacccaaccatgatgagttaatgacgcaaacattacatcaaattgaacatgaactaaacttattatcaaaccttgttcattctagaagtattaactttttaatgatggaagtccctaaagaacctgcagatttaacacaagataatggactcattattgaacaccgtagacagtttttatacgaacatcaatttgaaagacaaactgaaatggattacattcatccaactaatgatggtcacactaaaaaagtcgacctatttttaaagaaaaatattaaactgacaaaggatatctacggtacaagtgttaaatcaaattatattttgaagtatgtatttgccaatggtatcgcacgtgaaattatttatgctttattagaagaaatggatttacgtaaaccattttaa

SEQ ID NO: 409580 - DNA, 441 bp, Staphylococcus aureus
atgctatcacaagaatttttcaatagttttataacaatatatcgcccctatttaaaattagcagagccgattttggaaaaacacaatatatattatggtcaatggttaatcttacgcgatatcgctaaacatcagcccactactctcattgaaatttcacatagacgtgcaattgaaaagcctactgcaagaaaaactttaaaagctctaatagaaaatgaccttataacagtagaaaacagtttagaggataaacgacaaaagtttttaactttaacacctaaagggcatgaattatatgagattgtttgtcttgatgtacaaaagctccaacaagcagtagttgccaaaacaaacatttcgcaagatcaaatgcaagaaaccataaatgtgatgaatcaaattcatgaaatattattaaaggaggcacacaatgactaa

SEQ ID NO: 409581 - DNA, 162 bp, Staphylococcus aureus
atgagcaacatttataaaagctacctagtagcagtactgtgctttacagtcttagcaattgtacttatgccgtttctatacttcactactgcatggtcgattgcgggattcgcaagtatcgcaacattcatattttataaggaatacttttatgaagaataa

SEQ ID NO: 409582 - DNA, 228 bp, Staphylococcus aureus
atgaaaaactactatcaccttttgtctttcgatgacgatttagctaatgatgcagccaacgatctgttaaaagaaggttgggatatcgttcatgttggtacaaaattagttaaaattttggataatggacaagcgtactacaatactgaatacgttctgggcggaactaaaaatcagtatgaaaaatatttagaagattgccagcagtccgagttagattatttttaa

SEQ ID NO: 409583 - DNA, 192 bp, Staphylococcus aureus
atggaagatatgaaagaactttattctttaaaaatccaaaagaagaatttaaataataaacaaaagaatttaatgtctgtaattaatcaatgtattgaactagaaaagttttcttacactgaaattaaaaaagttctctacctaattgatagagaacaaaagtatttagctaataaccgcagaaaaacataa

SEQ ID NO: 409584 - DNA, 753 bp, Staphylococcus aureus
atgcaagcattacaaacaaattcgaacatcggagaaatgttcaatattcaagaaaaagaaaatggagaaatcgcaatcagcggtcgagaacttcatcaagcattagaagttaagacagcatataaagattggtttccaagaatgcttaaatacggatttgaagaaaatacagattacacagctattgctcaaaaaagagcaacagctcaaggcaatatgactcactatattgaccacgcactcacactagacactgcaaaagaaatcgcaatgattcaacgcagtgaacctggtaaacgtgcaagacaatacttcatccaagttgaaaaagcatggaatagcccagaaatgattatgcaacgtgctttaaaaattgctaacaacacaatcaatcaattagaaacaaagattgaacgtgataaaccaaaaattgtatttgcagatgcagtagctactactaagacatcaattttagttggagagttagcaaagattattaaacaaaacggtataaacatcgggcaacgcagattgtttgagtggttacgtcaaaacggattccttattaaacgcaagggtgtggattataacatgcctacacagtattcaatggaacgtgagttattcgaaattaaagaaacatcaatcacacattcggacggtcacacatcaattagtaagacgccaaaagtaacaggcaaaggacaacaatactttgttaataagtttttaggagaaaaacaaacatcttaa

SEQ ID NO: 409585 - DNA, 309 bp, Staphylococcus aureus
atgcaagaccaatcattaaaattagtaaaactacaactaaaatatcataacctttcaggacaaattgaagcttatgataaatcacttaaagaaataagatacactcgagatcttttcaacaaacatctaagcatgaataaagaagacgcatttgctggtttggaaatggtagaagatgaaattactaaaaagctacgaagtgctatcaaagagttccaaaaagtagtgaaagcgttagacaagcttaacggtgttgaaagcgataacaaagttactgatttaacagagtggcggaaagtgaatcagtaa

SEQ ID NO: 409586 - DNA, 693 bp, Staphylococcus aureus
atgaaattaaaaaatattgctaaagcaagtttagcactagggattttaacaacagggatgattacaactactgctcagccagtaaaagcagacgaaactagtagcagattagcagttacttcaaaagatacacaagaattaaaaaaatactacagtggaacaggatataattttcaaaatgtaagtggctatagtgaaaacgacaaaatgaatgtatttttcggaccacaacttaatgtaatatcattgcttggttcagataaagagagatttaaagatggtgattataatggactagatgtatttgtcgtacgtgaaggatctggtagacaagcagataataattcaataggtggaattacaaagacaaataaaaatggttatacagatttcgtaaaaaatgttggtttagaaataacaaaaccaacaggacataatacagcaacaagacaagcagaaacttatagtattaataaagaagaaatttcattaaaagaattagatttcaaattaagaaagcacttaattgacaataacggtttatataacactgagcctaaagatagcaaaataaaagtgactatgcaaaatggtgatttttatacttttgaattgaataaaaagttacaaactcatcgtatgggtgatgtgattgatggtagaaatatagagaaaattgaagtgaatttataa

SEQ ID NO: 409587 - DNA, 1503 bp, Staphylococcus aureus
atgagggaaaattttaaattacgtaaagtgaaagtcggtttagtatctgttgcaattactatgttatatatcatgtcaaacggacaagcagaagcatctgaaactaaagtaacaaatacaaatcaaggtataaatactgtttcagaaactgtacataattcaaaagaatcaaaaaatgaagaagctaataagaactttgtaaaattagatacaattaatccgggagatcaaaaggtgacaggtactactttaccgcatcacttaatattattgaatgtcgataaacgtagtgtagattcagtagaagatagtggactcggaattgttacggctggagaagatggtagatttgaatataacttaaaagatcataaaattgttcataatcaagagatagaagtaacatcgtctagtcctgatttaggagaagatgatgaagaagttgaagagaaagcttctaatcaaaaagaggaaacagcaaataaaaaagatgaagacgaatctaatgatgtcaaaactactgtcacaacaccaaggtatgaaaaagcatataaagttccaaatcaacaattaaaacaagaaaatggacatcatcaagtattagttgaaccaattaccgcaggatctggtatcattaaaggtcatacttcggtaaaaggaaaagttgctctttcaattaataataaatttattaatcttggtgatagtactgatgttgaaaatcgtttaactgaagaccaaggaaaaactaggtatcaaggtatttggaaacatatagatgataaaggttattttgaatttgatttcaaacgtaaaccatatgataacttaaaattgaatccagatgataatgtgtcattaacattcttgccaaacgatgaagaagaggctttaaagccaattatatttaaaacaaaagtaacaagttttgataatattgaatctgctataactagctataatcctaaaaatatcaataaagtaacaactcttactaatgtaaaagaagacttagtagttgaagatatttatggctttgaatataaaagtgaacaaggaagaggaattcctcaaaataatagccatagtactaaagaaattaaaggtaaaacaaaatttgcgaatgcagttgtaaaagttgattctgaattaggtgaaggtcaagaattcccagatttacaagttaatgaaaaaggtgaattcacattcaattcatatgatgctggttatagattatacaatggagaaactttaaactttgttattgtagatcctattactggtgttcagttgagtcaaggatttgtgagcaaatatatagatgtttatgaatcgcctgagcaaaagaaagagcgcgaatttgatgaaaaacttgaaagtactccagcttattaccaattacatggggataaaataataggttttgatactgaggggggtgtatcaacttggtttgatgcacttgataagaaagaactggaaaaggttcttcgtcaatattaa

SEQ ID NO: 409588 - DNA, 810 bp, Staphylococcus aureus
atgaagtataaaacagagagacgtgaaacgatgggatatttaaaaaggctttcatggtacataagcatcttgtttttaatagttgttatagcaggttgtggcaaaggtgatgatacaaaagaagattcaaaagaacaacaaatcaaaaagagttttgcgaaaacgttagatatgtatcctaatgaaaatctggaagacttttatgataaagagggatatcgagatggagaatttaaaaaagatgataaaggtacttggctaattagatctgaaatagttaaacagccaaagggcaaagtaatgaaaacaagaggtatgcaattatatattaatagaaataccaaaacagccaaaggtttctttgttttgaaagaaataagtgaaaataataatcgtgtaaataaagataaggaagaaaaatatgaagtgaaaatggtaggaaataaaattattcctactgaacaaattaatgacgagaaaataaaaaaagaaattgaaaacttcaagttttttgttcaatatgggaactttaaaaattttgaaaaatacaaaaatggtgagttttcatataatcctgaagcaccaatttattcggctaaatatcaattacaaaacgacgattataatgtaaggcaactacgtaaaatatatgacatttcaacaaaagaagcgcctaagttacttttaaaaagtggtggggatttaaaaggttcctcagttggtcaaaaagatattgaatttacatttgttgaaagaaaaggtgagaatatttattttaacgatagtgttgaattcataccaagtaagtaa

SEQ ID NO: 409589 - DNA, 1323 bp, Staphylococcus aureus
atgagtaataaatttcgcttagatcatagttttataaataataagactgagacaactagtgcagtttctaaattatcatatgaaattgaaaatgctaatctcaatggattgccaaaaactaatttgcaattgcagtttgatagattaaaagtaactaatgaattcccttctaatcttgaatatatagatagtcacacagataaaaagtacggtgtgacagcatcagctttcttaaacaaagatactgggaaagtgattattggcatgactggaacaaacttcaaaaaagaagctcttgcgaagcaacttttgctaccagggtttgcaacaacaaaacaagataaaattgactcagctgagactagaaaggatttaatttccgatgtccaaattggaacatttcctccgtctgataaaagcaaacattatgaagaaacacaagagttcatcaaaaaaataaaaaataagtatgatattgattttattactgggcattcattaggcggtagagaagcggtaatattaggtatgagtaatggtattcctaatatcgttgtttataatccagctcccatatcagctattggcttagaccctaattctcgattatttaaattatataaaggatataaaggtaacattactagagttgtatctaataaagatgagttaactaattttattcagggatatacgaaatatgtttattttggacatgagatagtgattgaaaatggtaaaggtcattcaatggatggattcttaactgaacaagaacaaaaagctataaaaaaagaacttaaaaaactacaaggttatgtagaagaaaataataagtcatttgtaaagcattctaataatgccatatctaaattagctagtatagaattacttagaacaaatatgatgactacaaatggaggttggttatcttcttcgcaacaaaaagctttagaaagtttatcagctttaacaattgcgcagtcattcagtcaactgatagatgatgaaattaatcaaattaaaaaaatgtataatgaaaaggaaaagaaatttgaaaaaaattgggaagacgcgcaaaaagctggaaacgctgtaggtaaagatataactgtgagtgaagtgctagaagctttagatgaaggtcatgtgaatgaaagtagtatggtaggagatcctgaacaaatgatatctgcaaaagaaagacaactttcaacgatagggtcttctgtatcaaattatattctaagagttagatctagtattaatgaaatcgttgataaagatcaagtgcttgcatcacaaataggtggattactatga

SEQ ID NO: 409590 - DNA, 1731 bp, Staphylococcus aureus
atggatttacattctaacttagatataattgttagtaatggataccgagagaatgtctataatattgtattcagagaatcaataaaagatataaattttgaaaaagatgtattatcctttaaagagtatcactctatgaaatttcgtcataaatctactgattataatgaaaaattatatttcaatggtttcgacactattgtggacgatatattaaaaattgataaaaagggaaatagttatctttcaaacgctacactagatataattaattacactagtaataatgatcaaaatgtactagttcctggttattatttattaacattggtcaatgaaaaaactaagtatgccattataaaaatagttcctaaggattttactgaggaagagtggaaatcattatatgaagacgttaatagttacttaaatggtttagcaaattcatttgtaaatagaaataatgttacggtaattcaaaacaaaaaagacaataatttgtataataaaatcaatttcattgataaatattttataaaaataattaattctgtaaatcaattaatagtgaaccctaggttaacaattcaaaaaaattataaatgggttcctaaacacacacaaccacatgtcgataaaaaaactattaaatattcatctaaatatccaaataaaacacaatatttgtatacttacaaaagagttattaattataatatctcagaaaatatgtggttgaaatttgtagttgagtttttattaaaagaactaaactcaattggtaaagaaattattttgaaaattgaaaatgaaaattataaatataattcgaaatatagtagtgagataaaaaaagctaaaattactaagaataatttaaaccaagctaaaaaaaatattattatccttaaaaatttaataataaaattaagaaatagtgaatggtatagtcaagtttcctataaaaataatatggtgccaactaaatcttcacttatgaatcaaaactataatttattatatacatggtatgtagaatttaataaaagtaattttgatttcatcttttctgaacaggtactaaattcatggaaaaaaacagatgaactatatgagatttggtgttatatcaatataattgaaataataagaagtagtggttttatgcctgtaaaaggatgggtttttaatggggatattcaaaatgatctcgatgaaggtacttatgtaacaatgaaaaaagcagaaaccactttaaatatacactataatacacttcttaagtataaaagttctgaaactaatttagtaaatccactttatactggaaacaaaaaaaataaacccgacattagaattgatatttttgtaggcggtatatatttaaaaagtataccgatagaagctaagtacagaaaactgaaaaatataaccggagaaaaaatgggatctcttaaacaattacttgcttacagagattctccaaaatctttattacatttagcaggcgctaaacacattagaaaaaataaccatacggttattacaaaggttattattttataccctaaagatactagttctaactctaaagctgatattttatctgttgagcatggtttgttattctatgaatttggacctaattatatagatacatcattgaaaaccacattgattgaagaaattaatgaagcatttgaaatttataatgatatttataaaaactaa

SEQ ID NO: 409591 - DNA, 1905 bp, Staphylococcus aureus
atgaaaaacaattgggaaaaagtagatctaattggtattcttgccacagaagaagaaattagcaaagtgtataataaagaaaatattttcataaactctaatgattttattcaattttacataaaactaatatcaacaacaccctatgattatccaaatttagataataaaactaagtatatagcttgcttttcaactagcttatatgatttatataaagatgatacaagtaaatctcaagctgaaagaataaatgacttttataattttatacatgataagtttgtttgcttaaatgtagaacaaaaagaagattatacaattcttaacaaatatttttataatggtcatattaaacaagtattacctcgaccatcaaaaattgagtatacggatgtattgcacccagtaccaatattcaataaaagtaatgcatcaaaagatatagatagttttttaaatgatttgtctgaaaattttatatttagaaataatccttatgtgtccaaagaattagatgatactcctgaagtgattttttatgaaaaggataatggcgacatatatgcgattggagaaattaaatcatttgattttaatgaagacagtggtatttcatttaattttgacgaaaaaatatgttttaccaaattagaggatgaagattacaaacatttaattacaaataaaaataacgtagcatttataacaactactttaattcaaaaaattgaaagcataattttaagagagaccgaaaatattattgaacttgatactgataaaaaagctaaaaaagataagctagaagaaaaattcttaaatcattttatagataaacttactaatgaaaatttagtttatagtataaaagacatattgaattttcacaccgctatgaagacatcaaaattagttatattatcaggaatgagcggtacaggaaaatcaaaattgattaaagcatatgcaaacgctttaggtttaaaagataattttaaatttataccagttagtcctagctggacagaagattcagacattattgggtatgccgatacattaaatatgatatatagacctgatgatcatggtttaatagaaaccctcatccaagcaaaacttaatcctgataaattatttatagtttgctttgatgaaatgaacctagctcgtatagaacattacttttctcagtttttatctttgttagaatcagatgtagaaaatcgtaaattgcaattatataataaggaattaggtggtaaactttataattcttctaaatataatcatgaaattactattggaaaaaatgtgagatttgtaggtactgtcaatatagatgaatctacacaccatttttcaaacaaagtattggatagagctgatctaataactctcgaagtaatgccgtttaaacaattaattaaaattgctaacactgaaaaaatcaaaactacagaaggtatttctttcgaacaagagtatattgaaagtttctttaaaaatagcaaaactattgatttaaataatgacactattgaatttttacaagaaatgcacaacactctgttaactataaacaatcaatctggtatagggcctagggttataaaacatattgattactacttaaaaaatattcctaattataatgacatcttaagttatggagaaggtttagactttcaagttatccagagaattttatcaaaaatcagaggttcaagagaagagcttgaatttttaataggttcatataaccctgataacaattcagtaacttcttctaatttattatcattaatggataagtaccaaagtatttctgatttcacaaattctagaaaggtaattttaaacaaatctaaggagttatatataaatggatttacattctaa

SEQ ID NO: 409592 - DNA, 918 bp, Staphylococcus aureus
atgcaaaaatcaaaggctataaaagaattatttaaaattcaagataatgaaaataaatttaaaataattaaaaattatgatttgaaaattaaagggttttcaaatataacgcttgattttattgaacaaaatgagaaatatatttctaatcaaattgctactacacaaaatattaaaaaaattactaatattattaaaaacaataaaaaaaatgagcaaaacttggattatttattgtccattgataagatttctgaaaaatataacaaagattttgatggcttaatcactatatttgaaaatgacaaatacggagaattaactgaaaaaattataagtaatttcatgatagataattcaccaattaaatatgaaaatacgaataaaaacgagaataaagaatcaattttaaggaatatcatacagtccctagaatcaaaaatccaaattaaagatcaaaaaattaatgaactactcaatttgaataaagaactagaaaaaaaaaacagaaattgggaagacttaactgtaaaactaaatgaaacaattaaagttaaaaattacgaattaaaggaaattaaggaagttttacaaaacaacataaatgaattagaacaattaaaagaaaaatccaactcaaaagaaagtgattcacttcctattaaaaataataatgaaactgcaatcaatataattggtgctccaggtttatggaaattagaaagtactgaaaatatatacttttataacgaagacgaaatcgataactttataagtaattataataatgaaaattcaagattttatgttgtaaatttcggtgtcacttcatactcagctcgaaagctaaaaaagcaaacacatgcaatttttataaataataaagatgaatatataaaaataataaaaggagaataa

SEQ ID NO: 409593 - DNA, 165 bp, Staphylococcus aureus
gtggcacatattcatgtagtaaacggcacttattactttcatgggcatatcgtaccaggttggcaaggcgtgaaaaagacatttgatacagcagaagagctcgaaacatatataaagcaacatggtttggaatacgaggagcagaagcaactaactttattttag

SEQ ID NO: 409594 - DNA, 252 bp, Staphylococcus aureus
atgaataaccgcgaacaaattgaacaatcaattatcagtgctagtgcctataacggtaatgacacagagggattactaaaagaggttgaagacgtgtataagaaagcgcaagcgtttgatgaaatacttgagggtttacctaatgctatgcaagatgcactcaaagaagatattggtcttgatgaagcagtagggattatgacggggcaagtggtctataaatatgaggaggagcaggaaaatgagtattag

SEQ ID NO: 409595 - DNA, 534 bp, Staphylococcus aureus
atgaataatttaacagtagatcaattaaaagaacttttacaaatacaaaaggagttcgacgatagaataccgacgctaaacttacgagatagcaagattgcgtatgtagttgaattctttgaatggtttaatacattggaaacgtttaagaactggaagaagaaaccaggtaagccgttagatgttcagttagatgaactagcggacatgttggcgtttggtttgagtattgcgaatcaagtaggagtgtcatcagaagagataaaagaagcgattgaatcaagttttaaaaataaagaatttcacaacatgtttaattttaaagataaagaatttgctcaagatgccgttgttagtacaccacagataatatttaaagaattttatcccgaccaattggcaattgttatagcgatagacatagcttacaacttatattcaatcaaccaactcattgacgcatacaaaaagaaaatgaaaaggaaccacgaaagacaagatggaacagcagacgcaggaaaaggatacgtgtaa

SEQ ID NO: 409596 - DNA, 207 bp, Staphylococcus aureus
atgacacaatacttagtcacaacattcaaagattcaacaggacgtaaacatacacacataactaaagctaagagtaatcaaaggtttacagttgttgaggcagagagtaaagaagaagcgaaagagaagtacgagaaacaagttaaaagggatgcagttattaaagtgggtcagttgtttgaaaatataagggagtgtgggaaatga

SEQ ID NO: 409597 - DNA, 387 bp, Staphylococcus aureus
atgattaaaaaacttaaaaatatggatgggttcgacatctttattgttggaatactgcgattattcggcgtaatcgcactgatgcttgttgtcatatcgcctatatacacagtggctagttaccaacacaaagaagtacatcaaggaactattacagataaatataacaagagacaagataaagaagacaagttctatattgtattagacaacaaacaagtcattgaaaattctgatttattattcaaaaagaagtttgatagcgcagacatacaagctaggttaaaagtaggcgacaaagtagaagttaagacgattggatatagaatacactttttaaatttatatccggtcttatacgaagtaaagaaggtagataaaaaatga

SEQ ID NO: 409598 - DNA, 651 bp, Staphylococcus aureus
atgaacgagcaaataataggaagcatatatactttagcaggaggtgttgtgctttattcagttaaagagatttttaggtattttacagattctaacttacaacgtaaaaaaatcaatttagaacaaatatatccgatatatttagattgttttaaaaaggctaaaaagatgattggagcttatattattccaacagaacagcatgaatttttagatttttttgatattgaagtctttaataatttagataagcaaagtaaaaaagcgtatgaaaatgttattggatttagacaaatgattaatttatcaaatagagttaaggcaatggaagattttaagatgagtttcaacaatgaatttagtacaaatcagattttttttaatccttcttttgttatggaaacaattgctattataaatgaatatcaaaaagatatatcttatttaaaaaatataattaataaaatgaatgaaaatagagcttataatcatattgatagttttatcacttcagagtaccgacgaaaaataaacgattataatctttatcttgataaatttgaagaacagtttagtcaaaagtttaaaataaacagaacttcgataaaagaaagaattattattaatttaaacaagaggagatttaaatga

SEQ ID NO: 409599 - DNA, 987 bp, Staphylococcus aureus
atgaacgatcaatggtataaacatttaattggtgccagaacaattaaaactggtattgccatttttttaacagctgtcttttgtatggcactagatttaacacccatctatgccattttaacagctgtagtcacaattgaaccaactgccaaggcatcacttattaaaggttatcgtagattacctgctacggtaattggtgcaggctttgcagtattatttacatatttattcggcgatcaatcaccttttacatatgcattgagtgcaacgttcacgattttattctgtacaaaactcaaattgcaagttggtacgaatgtcgctgtactaacatcattagctatgattccaggtattcatgatgcctacatattcaactttttgtctcgaacattgacagcaattattggactcgtgacatcaggtttaattaacttcatggtgtttccacctaagtattatggtcaggtcgaagaaaaattaagtaagacagatgccttgatgtataaattattttacaatcgctgccaagaacttatcttatcaagactgcaatctgataaaagcgaaaaagcatataaaaatattttcaatttaaacaatcaagttgaaacgttaataagttatcaacgtgatgaattaagctatcataagaaaaaagaatgtgattggaaattactcaatcaattaactaaacgtgcatatacgaatcgtttgtttatcactcatttatcaaatatcatttacttgcctaaaaatactcgtgttaacttttcaggtgacgaaaaaatggcattgctaaaaattagtagtagcatcaaagatatattttatgatggttcttttaagagagaagatgattctgtagaaactttacgttcgacaataaaagcacttgaaattagtggtgaaaatcaaattaaaagtcatatactatacgaagttctaatgatttatcgactgctagacagcagatatgcttaa

SEQ ID NO: 409600 - DNA, 1077 bp, Staphylococcus aureus
atgagaactttgaatttagtagtttcaaacttcaagttaattattaataaaatgcaagatgagattaaatataaatcaaaagattttaaaatcaccttgtacatttcattattcatttcattatttattctgtataatgaatttcgaagcggaaatttaaatgaatctgaaattaaggatcttcaatttacatataatgattttaacaatttaaatacgaaaacatctattgctttgtttaaatacttatacaaaaataatgaactagcaaattatgtcttttttgatatagagctaaagaacttattattatatggtatttttgatgaatcaatttttttgaaaaatataacgaataacttcaaagaagaagatgctaaagctgatttattaaatgtattaaaagaattctttaaattaagtgaaattgaactacttgaaaaagaaattcaagctatagaaataataaaagataaaaataatgaaaattttaattataaagtaaaagcttatttatctttattaaatttaaaaggaaaaaacttatatttaatagatgacattaaaattagcgaattagaagatgaattagtggataattacgatttgcatcagaataatttaatagttggagatacgataaatagactagatttagttagtttttcaaacgagcaactatatgaagaaatcaaaagtttaaaagaccgtttaataaataaaagaacaactttaatgacttctatatataaccaatacttagaaactattttaaatggtgattttacaaatagaactaaattaaaagaagcgtatattggaacgaaagatatagatactatagaaataatctataataatttaaacaaagtatcaaatgagcttaaaagtagtaatgagaaaattattaatttaagtgcattcattaaagataatcattgtaattataatgataatattcaattagaatatattataggtgagatgaaaaaattaaaagatggtactaaagatagagttacacaaatgtgttttagcttgttgatcgatacactgaaagatataatagatgaataa

SEQ ID NO: 409601 - DNA, 1611 bp, Staphylococcus aureus
atgaaatatacagacaaaatctatcataaagtatctgacttttcttattcaaagttaaaaaaagataacacttataaaattttaggccaagattacaaagtcatcgaaaaacgcgacgacacccagaatgggtttagagcatatgttttcgctccagtaatcaaaggtaaagttgataagagtcaacttttaataggttacgctggcactgacccatatagtctaaatgatattcgtactgatttacaacttcccattcatcataacacaaataatctaaaaattaataatcattataaagatttaaaaaactcaactattcacaaaaaatacaatacaataaaagataaaaatgacctttttagtttttcttctaatttaaataataaagcacttttcggtgatctatgggcagctaagtttgcaccgactcaaatggacgaaagtgatgcttttactgaatcagttaaaaagaaatatccagatagtgaaattcacccattaggacatagtttaggtgcgtttttagctcaatataatttaataaaacataatctggataacggtacaacgtttgcagcacctaacgtataccattcatttactggagactttaaaaaagacattgataatggtgtctatgattcaaaaatacgcaatattggccattttgatgatcctattaataatttgaatttttttaatcctcgtattggcaaaaatattacatcaatgccacattatgatggatttataactaaccttcctttgattggtcaacacacacttaaatcttacaatgatttcgatgcagatggtaatgtgaaggaaatgccagaacttgaacaatttaatgatgaccaatctcttaataatagatttcaattatttgacccatttgatataaaaagcagatttttcaactctattaaaatcgatagttctatattaaatagaacaagtgaaaatgattttgatccttttgctattctcaataaaaaagataaattattcgaatcgaatgatcttgatatagaaggttttaataataaacaaaaagaagatttaagcattgatttaaatccttttgatgatgaattaaatgatgaggacgaaccattaattcccaaaagaggcgatagtaaaaaattaaaagcagaaaagaaaatctctgttaaaaaaaacaaaagtagttccaaaaattcaggcaaaaaagtaaaaattcagtctgatgaagtgcgtaatatcgctagcacaattcgtgatagactatttttgtatacacaaataattactgcattggatgaatatagagaagaaacaatatcaggggctaatcgcattttagataaatatcaatcagagcttctaagcggttcacatgaatttataacaccttacgatcttgaacaatatatggagattttagcagttgagggaagttcaggaaatttcaagttttataatagtcgtttaatggatgacttaattcaggaattagatcaaaacaaaaaagacttgctacaatttgctgaaaaactagaatttgctgcaaataaattcgaagaaaaagatttagaagaaagcgatgtttttggactatttagttaa

SEQ ID NO: 409602 - DNA, 444 bp, Staphylococcus aureus
atggaaagaaaaaaaataatatttataatttccttaattatagcactcttaataagtactggctatttaatcaataaaaacaaaaaagaccattacattgaaatacaagaaaagagaatagatttatattttaaatataaccttaataattatcattcaatgaaaattactagttttaaaaagacgcctatgggtggctatattgtggatggatatgttaatcacaacaaaaattatgattttaaagttctcatctctgcaactgacaatcatcaatttgaagatagcataggatacgatgataagacatttggtaaattatttaaagaaaaagaccataaaaatgaattaaaatctacagacattataaaaaaagaacacttggacaaaagtgattatgaagccgatccaccgttattcttcttttctgggagattagagtga

SEQ ID NO: 409603 - DNA, 423 bp, Staphylococcus aureus
atgtgtttatttatagatctatttaatagagaaattgttggttacagtgcaggtaaaaataaggacgcaaatttagtatcaaaagcaatcagcagaataaatcataatcttgaacaaatcaaactattccacactgatagaggcaaagaatttgaaaatcatttgatagatgaagtactagaaacatttaaaatcaaacgttcattaagtaccaaaggttgtccttatgataacgcagttgcggaagcaacgatgaaagcaatgaaaatcgaatttgtaaaacaaatgcaatttgaaaatttagaacagttagaaacagaattatttgattatgtaaattggtacaacaattttagactaaattcttcattacagtatttgacggcagtggcatttaaaaatctacacatgaaaactgtctaa

SEQ ID NO: 409604 - DNA, 459 bp, Staphylococcus aureus
atgataaaaaaattagataatatagactctgagacaatagaaaaaatatcaaatatatggcttaattctaatttagatgcacatgactttataaaacgtaattattggattaatagtttagataaagtgaaaaaaatgttatcagattcaacaatttacgtgtattatgctgatagtcaaattgttggatttgctggcttatatgagcaatatattgctggtatttttattgcggataattaccgtaataaaggtataggaaggttattattggaaagattaaaacgtgattataatggacttaatttacatgtttatgagaagaatgagggagccattcgtttttattcaaaacatcaatttgaaataagatacaaggaatttgaagaagaaactcatgaatatgaataccttatggaatgggatagtagaaaaaattataaaagcaataataaataa

SEQ ID NO: 409605 - DNA, 987 bp, Staphylococcus aureus
atgaaagaaaatttttggagtgaattaccacgtccattttttattttggcgccaatggaagacgttacagatatcgtatttcgacacgttgtaagtgaagcagctagaccggatgtgtttttcactgaatttacaaatactgaaagcttttgccaccctgaaggcatacatagtgtgcgtggacgcttaacttttagcgaagatgaacagccgatggtcgctcatatatggggagataagccagaacagttccgtgaaacgagtattcaactagctaaaatgggctttaaaggcatagacttaaatatgggatgtcctgtagcaaatgttgctaaaaagggtaagggttccggcttaatcttaagacctgacgttgctgccgaaattattcaagcgactaaagcaggtgggcttccggtaagtgttaaaacacgccttggctactatgaaatcgatgaatggaaagattggttgaagcacgtcttcgaacaagacattgccaatttatctattcatcttcgtacacgtaaagaaatgagtaaagtagatgcacattgggaattaatcgaagctattaaaaatttacgtgacgaaattgcaccaaatacattgttaacaattaacggtgatattcccgatagaaaaacaggacttgaactggcagaaaaatatggcattgatggcgtcatgattggtagaggcattttccacaatccattcgcttttgaaaaagaaccacgtgaacacacaagcaaagaactattagatctgttgagattgcatctatcattgtttaacaaatatgagaaagatgaaatacgacaattcaagagcttgcgtagattctttaaaatctatgtgcgtggcataagaggcgctagcgaacttcgtcatcaattgatgaacacacaatcaattgcagaagcaagagcacttctagatgaatttgaagcccaaatggacgaagacgttaaaatagaattgtag

SEQ ID NO: 409606 - DNA, 1179 bp, Staphylococcus aureus
atgaatcaacaattaattgaagctttaaaatctaaagaagacaaaatgattgagatcagacgttatttacatcagcatccagaattatcttttcatgaagatgaaacggcgaaatacatcgctgaattttacaaaggtaaagatgtggaagtagaaacgaatgtcggaccacgtggaattaaagtaacgattgattcagggaaacctggtaaaacattagcaatccgtgcagactttgacgcattacccattactgaagatacaggattatcttttgcatcacaaaataaaggtgttatgcacgcatgtggtcacgatgcacatacagcatacatgcttgtattagcagagacgcttgctgaaatgaaagatagttttacaggaaaagtcgttgtgatacatcaaccagctgaagaagtaccaccaggtggtgctaaagcaatgattgaaaatggtgtattaaacggtgttgatcatgtattaggtgtacacgtcatgagcacaatgaaaacaggtaatgtgtattacagacctggttatgttcaaacaggacgcgcattcttcaaattgaaagttcaaggtaaaggtggtcatggttcatcaccacatatggccaatgatgccattgttgcaggtagctacttcgtcacagcgttacaaacagttgtatctagacgactaagtccatttgaaaccggtgttgtcacaatcggttcatttgacggtaaaggtcaattcaatgtcattaaagatgttgttgaaattgaaggtgatgtacgtggattaacagatgctacaaaagcaacaattgaaacagaaattaaacgtttatcaaaaggattagaagcattgtatggtgtaacttgcacattagaatataacgatgattatcctgcattatataatgatccagagtttactgagtacgtggctaagacgttaaaagaagcagaccttgaatttggtgtcgaaatatgtgaaccacaaccaccttcagaagactttgcatattatgctaaggaacgaccaagtgcctttatttatacaggtgcagctgtggaagatggtgaaatttacccacatcatcatcctaaatttaacatttcagaaaaatcattacttatttcggcagaagctgtagggacagttgttttagattaccttaaaggagataactaa

SEQ ID NO: 409607 - DNA, 222 bp, Staphylococcus aureus
gtgaaagtagaattatttagaagcttccaaaataaaaaaatggaaccacgtcttaatcggcgtggttctttttgtagatatagcatctatgattgtatgacggtgaaagttcattacaaacttggtattggtaaatttatcattttaagtatcggtgatttaattgaaatagaaactattatcgaagaaacactatataacacgataattataggttactaa

SEQ ID NO: 409608 - DNA, 264 bp, Staphylococcus aureus
atgagagatacagaaagaaatatattgaatatttttaaaacgttattcgacgaatatactttgtcaaaccaacgagcattattggaaattgaacgtaatcatcacggatacttatcaattaatttcttgcactatcacgacagttacaaaacgaacaataagcttgtacagatacatgaaatcaatccggacagccacgaacgaataaaaaatttaattatcgaggtgttaagaggtcaccgaaagattaaaaaaggagcatga

SEQ ID NO: 409609 - DNA, 444 bp, Staphylococcus aureus; identical to SEQ ID NO: 409409

SEQ ID NO: 409610 - DNA, 261 bp, Staphylococcus aureus
atggaacgagcaagaaaagaagtgaattacgctgcaaatacagatgctgttgctacacttttttctactaagaaaaactttactaaagacaatacagtagatgatgtaatcgaactaagtgataaattatataatttaaaaaataaaccagataaatctacaatcacaatacaaatagggaaacccactattaatactaagaaagccttttatgatgataatcgtccaatagaatatggggtgcacagtaaagatgaataa

SEQ ID NO: 409611 - DNA, 2163 bp, Staphylococcus aureus
atgaataaaattaatgatagggatttaacagaattaagtagttactgggtttatcaaaatattgatataaaaaaagaatttaaagttaatggaaaaaggtttaaacaagtagacagttataatgatgataagaatagtaatttgaatggtgctgctgatattaaaatatatgagttattagatgataaaagtaaaccaactggtcaacagacaataatttatcaaggaacatctaatgaggcaattaatccaaataatccattaaaatcatcggggtttggagatgattggctccaaaatgctaaattaatgaataatgataatgaaagcacagattatttaaagcaaacagatcaattatcaaatcaatataaaaaaaagttagaagatgcagatagattatcaaatagtgattttttaaaaaaatatagaatggaatcaagtaacttcaaaaacaaaaccattgtggcggatggcggtaattcggaaggcggtgcaggagcaaaatatcaaggagcgaaacatccaaatgaaaaagttgttgctactgacccagcaatggtaccttatgctgcttggcagaaatttgctagaccacgctttgataatatgattagttttaatagtaccaacgatctattaacatggttacaagatccattcatcaaagatatgccaggaaaacgcgttaacattagtgatggtgtgcccaggttagatgctttaatagacagccatgtaggttataaaaggaagttaaatagaaaagataacacatacgatactgtaccactaatcaaaattaagtcggtaaaagatacagaaattaaaaatggaaaaaaagtaaaaaagactattaacataacattagatatggatgggcgaattccaataaatgtttggacaggagattcgattgtacgttctggaagaggaactttaattaaacttaatttagaaaatcttgatgcgttgagtaaactgattactggtgaaactagtggtatgttagcagaatgcgtaatctttttaaatgaaagttttaacatctcagaaaatgaaaataaaaattttgcagatagaaagaaacaattatcagaaggatttaaggataagattaacttatttcaattagaagaaatggaaagaactttaattagtaaaataaactcacttgaagaagttgcagatgaaacaatagaaagtattagtgctgttaaacacttattacctgattttgcattggatgcattaaaagaaagaattaatgagttgtttaaaggtataaaatcttttatagaaaaagtgtatgatagtatagataatgaaattttagaaattttcaaaaatattgatcatgacttcaaggatggagtatctgaagaaatgatgaaacatttgaaagtagtaaaacagaatattcagcaaataaaaaatcaaaatgatatttatggtaggcaaattgcagatattagaagtattatgaagcaacaagatgcaacaattttagatggaaattatcaaattaattatagcggtgaaaatatggtgcagggtctagctttaccttctaattatttaggaagaaaaatgaaaatattaaaagaccatatcgatgatggtattaaaaaaatagcagactatgttcaaggtatatatgatgaatatgcatcgaaaattgtcgatgtaataaaatatttgattaatacaattcccaaaatacgtaagaatttaagacatgcaattgaaatgttaaatgtaaaaaagaaagaatttttgtccctgattcctaatgtaacttgtaattatattaaaactaaattagaagaattagataatactttaggcaaatgggagccttttcttaatgatttaaaagcagtgtcaccaattttagataaccatttagatgatattgttaagaacatgaagcctttgattgtacaaatgatatttgaaccatcacattatgacgatatgtttattttaaacacacaagctcatgcgcgtcttgatcaaatggcacaacagtttgaagttgtttgtaatggcttgaacgaaaatgaaggacaagcaattcaaacgatggatcaatctgcctctctaatacggtcaaacttaattcaagttaaagaacaattagaaaaactagctgtatactaa

SEQ ID NO: 409612 - DNA, 303 bp, Staphylococcus aureus
atggttgcacatgcaattaccatattgttagaaattattttttactttattttattgaaaaactatcaatatgatcgaagtaatattgaattagctaatagagtgaaagttacaaaagtactgtcgattttgtatatcattccaggattatatgcgattccattctattttagatttttacatattcgctcatttagagaaaataaaaaatctggacagcctgcttaccacttttgggaattttttataaaacctaatcgaaaacccatagagttgaaagacttttttattaaaaatagataa

SEQ ID NO: 409613 - DNA, 375 bp, Staphylococcus aureus
atgaaaagattatgcataggattgttaattataatgatgagtataatcaattatggttgtggcaatgatcaaaatgaaaataaatatcaaagtcaaattaataaagtaatgaaaattcaacaagaaactcataaagagatggttaaaaagagtaatgaagttaatcctgaatttaataaggataaggtaaatacttatgtatttaatgatggcaaattaattatcatcagctataagttatttaaagataaagatcaaatgttttacgcgacttacgagtttaaaaacgacaaaatttattataagagagatattaatcctaaaacatacgtgaaagaacaccaatcagattataaagatattaaagtaaaataa

SEQ ID NO: 409614 - DNA, 501 bp, Staphylococcus aureus
atgacttttgaagaaaaactaagtgaaatgtacaatgaaattgcgaataaaattagcggcatgataccagtagagtgggagaaggtgtatgcaatggcttatgtaaatgaaagaagcggagaagtgttctacaattatactgaaccaagaagtgatgaattagtttactatacgagcgtgttaaataaatataatatatcaagatcagaatttatggactcagtatatgaattatataagcaatttgataaactaagagatttatttaaagaagaagatttagaaccatggacatcatgcgaatttgattttacaagagacgaaaaattgaatgtatcttttgattatatagattggataaatacagattttgatcaattgggccgtgaaaattactatatgtacaaaaagtttggtgttttaccagaaatggaatacgagatggaagaaattaaagaaatcgagcaatacattaaagagcaagatgaagctgaactatag

SEQ ID NO: 409615 - DNA, 684 bp, Staphylococcus aureus
atgactactaaggaaaatatagacattcttcgaaagccaggtgcacaagccttaagtttagcatcattatttatgatacttttttcatgtctaactttcttttttggtttagattatgaaaggtttccaaattatttaaagataacgacaattatagaattaataattatcataattagtttacttcaatggattagatttatagatttcgaaaaggaaagcgcacagaaatataaaaaaatatatgcccgatttttagttgttataaatgtgctaactactatcactgcagtatttgcaacatgtaatctttactattttgttgctgtgcaaaatcattatgacctattcaattattggttgatgggcacgatttcaatcataattagttatttgttattagtaattggcggaatgttcacgttattaaaattacctaaagtaacaaaacgttggggtggtaaaactaaaacccattttggtttattattaactgcgttgagcgcatttatatatattgaaagaattatcgaatatatattggtgcccaatgtcgtagaatccaagtttgtcataatggtaagtatcattattattgcttgtacacaatttgtagcctttcaatttattatgcaatacagtagattctatatttttgaattaaacactgaagatgatgactaa

SEQ ID NO: 409616 - DNA, 258 bp, Staphylococcus aureus
atgcaacgagctagaaaagagctaaactatactgctaatacaaatactgtagcaacgttgtttagcacgaatgatgaaaggaatagaaaagaaaagataaataatgtaatagatttatccgagaaaattgaaagaacaaaagatatgccaatcaagaatactataactactcaattaggaaataaacttattggcacaaaaaaagctcgttttgatgataagaaagtagtgtcgtttggagcatttgaagatgaataa

SEQ ID NO: 409617 - DNA, 147 bp, Staphylococcus aureus
atgaataaaataaatgatagagatttaacagaattgagtagttatagggtttatcaagacatcaataaagataatgactttacagttaacgaaaaacgatttaagcaggcagatgtatttgaagatttatatagagagaaactataa

SEQ ID NO: 409618 - DNA, 297 bp, Staphylococcus aureus
ttgattcataaaaatgataaagaatttaaagaaggaatggaacaagccagaaaagaagtgaattacgctgctaatacagatacagtaacaacattgtttagtacaaaggaaaattttactaaagacaatacagttgatgatgtaattgaactgagtgataaactatataattttaaaaataagccagaaaaatctacaattacaattcaaataggaaagcctactattaatactaaaaaagccttttatgatgataatgatccaatagaatatggagtgtatcgtaaagatgaataa

SEQ ID NO: 409619 - DNA, 261 bp, Staphylococcus aureus; identical to SEQ ID NO: 409406

SEQ ID NO: 409620 - DNA, 468 bp, Staphylococcus aureus
atgacgattaaagttgaagataataaaattattttttcaagaacgatagaagcaccgattgaaaaggtgtttgatgactatacgacaaaggcattatttgaaaaatggtttcatccaaaagacgctagtaccaaagtgtttcgctttaatgctgtttcaggtggtgatgcattttacgcgattaaaacacctacaatgacaagctatacattagcagaatataaaacggttaagcgtccatatttaattgaatatattgactcatttgcgacacctcaaggtgcaaaagatacaaaaatgccaagcatgaagattactttgtcattttccgagttcgatacaacgaaaacgacagtgacatcaacatcggtatttccaacaaaagaagccgctcaacaagtcataaacatgggtgttgagcaagggatgaatcaaacattagatcaacttgatgctttattgaaataa

SEQ ID NO: 409621 - DNA, 711 bp, Staphylococcus aureus
atgaactttgtaacgttgacttcggatgagttcaatgcgtttacaacaaagcatttttcacattacacacaatcagctattcattacaatcataaagttgatttaaaaggcgatgtgcatcttgtaggggttaaagatgacaatggtcaagtgattgcaggatgcttattgacagaagcacgcacacttaaatttttcaaatatttttatacacatcgcgggccagtgatggattatacaaatcaatcattagtagcatttttctttaaagcattaacgtcatatttaaagaaacaaaattgtttatatgtccttgtagatccatatttaattgaaaatttacgcaatgcagacggtgaaattgttaagtcttatgacaaccgagcatttgttagaacaatggacacattaggttataagcatcaaggttttccagtcggttatgattcaatgagtcaaatccgttggttatctgtattagatttaaaggataaaacagaagaccagttattaaaagaaatggattatcaaacgagacgtaatattaaaaaaacatatgatattggtgtcaaaactaaaacgttaacgattgatgaaacgcaaaccttttcgacttattccatatggccgaagaaaagcatggtttcaaattccgtgagttaccatactttgaagaaatgcaaaagttatacgatgaccacgccatgttaa

SEQ ID NO: 409622 - DNA, 1440 bp, Staphylococcus aureus
atgtcgaagaaacaaaaattaacgatgattattactatgctgatgggtggattttttggattattaaatgaaacactattagtgacggctttaccaagtattatgaaagattttgaaatttcatatacacaagttcaatggctgacaacagcttttttattgactaatgggattgttattcctttgtccgcgcttgttatacaacgttatacaacaagacaagtgtttttagtgggtattactatctttttcttaggtacattactcggcggtttgagtccgcactttgcaacattattagttgctagaattattcaggcgttaggtgcaggtattatgatgccattgatgatgacaacgattttggatgtgttccaaccgcacgaacgcggtaaatatatggggatatttggtttggtaattggtttagcaccagctattggacctactctttcaggttaccttgttgaatattttaactggagatcgcttttccatgttgtcgctccaattgcagctgtaacatttttaattggatttaaaacgataaaaaatgttggaactacaattaaagtacctattgattttatttctgtcattttttctgtactaggtttcggtgggttattgtatggaacgagttcaatttcagaaaaaggttttgataatcctatcgtattggtatctatgattggtggtattgctttagtcgcattatttgtattacgtcaatatcgactatcaacaccattattaaattttgctgtatttaaaaataaacaatttacagttggtatcattattatgggtgtcacaatggtatcgatgattggttcggaaacgattttacctatctttgtgcaaaatttattgcatcgttcagctttagattctgggttaactttattaccaggagcaattgttatggcatttatgtcgatgacttcgggtgctttatatgaaaagtttggtcctagaaagcttgctttagtaggtatggcgattgttgttattactacggcttattttgttgtaatggatgaacaaacatcaacaatcatgttggcaacagtttatgcgattcgaatggttggtatcgcgttaggattaattccagtaatgacccatacgatgaatcaattaaagccagaaatgaatgcacacggttcatctatgacaaacacagtacaacaaattgctggttctatcggaacagctgcattaattactattttatcccatgcaagcaaaaacttttctccaactatgtcagactataatggcatgaacaaaattgatatgatgaatcaaattaaagttgatacgatgttgcatggttatcacgctggatttttatttgcattattgattacagttgttagtttcttttgttcatttatgttacaagggaagaaaaaagaagttgattctcgtcaataa

SEQ ID NO: 409623 - DNA, 1539 bp, Staphylococcus aureus
atgacatcaaaacatcaacaaaaggggtctatcgtcaatcgtttcttgaatagtgttgaaaaaattggaaataaattgccagatcctagcgtcttattctttttaatgtgtgtgggcttagccattatgacgtgggttatctcattatttaatgtatctgttaagcatccaggtacgcatcaaaccatttatattaaaaatataattagccatgatggatttacgatgataatgaatgatacgattaaaaatttctcagagttcccagcattaggcttagtactagcagtgatgattggtataggtgttgcagagaaaacaggatacttcgacaagttaatgatttctgttgtgaatcgcgcaccacgtttcttaattttaccgactattatattaattggtattttaggtagtacagccggcgatgctgctacaattatcttgccgccgctcgcagcgatgctttttattaaaattggctatcaccctatcgctggactaacaatggcatatgcttccgctgtaggtggctttgccgcaaatatagttgttggtatgcaagatgctttggtctattcatttacagaaccatcaacacgtatcgtttcagattctattaaaacaaacgttgctatgaactggtactttatcgcagcgagtgtcgttgtattacttcctacgatattgctagttacaactaaactgattattcctaggttaggtcaatatgataatcgtttaatgcatgatgatcatgaagaaacgtcttcacatattactgacaaagaagcacatgctttaaaatgggcaaatatcagtttcatagtcacaattattttattaattattacagccattcctgaacatagctttttaagaaatgctaaaacaggcagcttactagacgatgcgccattaattaacggtgtcggattaattattcttgtcgtatttttagtacctggattagtttatgggattttaagcaaagaaattaaaaatacaaaagacttaggtaaaatgtttggcgatgctgtaggatcaatgggaacatttatcgttattgtgttttttgcagcacagctacttgcatatttaaagtggagtaatttaggaattatcgctgctgttaaaggtgccaaattattagaacatcaaaacggtattgtattgatactaggtattattgtactgagtgcaatggtcaacatgttaatcggaagcgcatcggctaaatggggtattttaggaccgatattcgtaccaatgttaatccttatcggctttcatcccgcatttacacaagtcatttaccgtgtaggagattcaattaccaatccaattacaccgatgatgccgtacttacctttattattaacttatgcacaaaaatacgataaacgcatgaaactcggagccttactttctagtttaatgccgtattcaatcgcgctaagtattatgtggacagtatttgtcattatttggttcttattaggtatccctgttggaccaggtggtccgatattcgttaaataa

SEQ ID NO: 409624 - DNA, 423 bp, Staphylococcus aureus
atgccgtataattacaagaaacaaaatggagagttaatgtctgtaatgagccaaggtgaaaagtttattcatcaatcacccgttaatgatgaacttagtgcattgattaagttattaatttcaaaaatcaacggttgtcattattgtgttgatatccataaaaaagaattaaaggaattgggtgtaacacaaatgaaaattgatgaagtcttgagttttagacatttagatttatttactgatcaagaaaaagtgacgcttgaatttggagaaatgttaaattcaatcaaagactttaagaagtttgaaattattgaccggctaaaatcattttatgatgaagagcaaattattgatcttgtctttgttgtaaaccaaattaacggttggaacagactaaatattattagtgataaactataa

SEQ ID NO: 409625 - DNA, 1239 bp, Staphylococcus aureus
atgaataaaattaaagtagtagaattgtttgcgggtgtaggcgggtttcgtttaggtttagaaaatacgaaaaatggtatatttgacataacttgggcaaatcaatgggagccctcacgaaaaatccaacatgcatttgattgttatagtaaaagatttcagaacggcatccatagcaataaggatattgctgaggtatccgatgaagaaatggcaaatactgaagctgatatgattgtaggaggatttccttgtcaagattattcagttgcaaggagtttaaatggagaattaggaatacaagggaaaaagggcgttctattttggcaaattattagatatattcaaaatacatttcccaaatacttgttgcttgaaaatgtcgatagattattgaaatctccttcaagtcagagagggagagactttgctgtcatgttatcaactttaaatgagttaggctataatgttgaatggcgtgtgattaatgctgctgattatggtaatgctcaaagacgtagaagggtatttatatttggatataagcaagatttaaactatagtaaagctatggaagaaagtccgttggataaaataatatatcataatggtttgtttgccgaagcttttccgattgaagattatgcgaataaaaatagagttaatagcactcacatttctcatgatatagttgatatttcagataattttagttttcaatttcataatagtggaatcatgaaaaatggagaaattttaactattgacacaataccaaaatatgaaaaatcagtgaccttaggagaaatcatcgaaagtaatgtagatgatagtttttcattaaatcaagatcaaattgataaatttaaatatttaagaggaccaaaaaagattaaacgaactactaaagatggtcatgaatattatttttcagagggtggtatgtctgaaacagattcattagagttacctgcaagaacaatgcttacaagcgaatcgtctattaatagaagtactcattttttaaacgtaggtggtgtttatagaactttgacacctattgaagcagaaagattgaatggttttccagatgattggacagtaggtatgccaattaagatgagatacttttgtatgggcaatgctcttgttgtgccattgattactagaattggtaatcaaattgaaaaaattgatagtatgacaaatgatgaattcagtcaactacgtttattttaa

SEQ ID NO: 409626 - DNA, 1470 bp, Staphylococcus aureus
ttggaaagttatttgacaaaacaagccgtacataatcgcgcaaaagaagcagttggtaaaagcatattagaattaaatggtggtgaatcgattaaacaaagtaagagctcagttggtgatgcgtttgaaaattggtttggtaagaaaaaagacagtgatagtaaaccagatatggcagaagctggggtggaacttaaggcaacgccatttaaaaagttgaaaaacggaaagtatagctccaaagaaagattagtattaaatattataaactatgagaaagtggcaaatgaaaattttgaaactagtagttttttatctaagaataatactatagaattagctttctatgaatatatcaagggaacacctagtgataattgggttattaaagaagcggtgctttatgaaatgcataaaaacccgattgattatgaaataattaaacaagattgggaaataataaatcaatatattaatgaaggaaaggcacatgaattgagtgaaggtttgacaagttatttagcgccatgtacaaagggtgcgaatgctagctctttaagagtacagccttattcagacataaaagcaaagcaaagagcattttctttgaagtctgggtatatgacatctattttacgcaaatatgttctaggtgatgaaaaaatagattcgatagtcaaagatccatttgaaataaaagaaaaatcaatagaggacatagtctttgaaaaatttcagccatatataaattggtcaatcgataaattatgcgaacatttttctatcaataaaggtgagaaaggtttaaattatagaatagcatcagccattttaaatctaaaaggtaaaactagtaaaagtaaacctttcccggaagttgaagagtttgaaaaatcatctatagtagtcaaaacagttcattttaataaaaagaatgtgaataaagaaagtatgtcatttggagcttttaaatttgaagaactagctaatgaggagtgggaagatagtgaaggatatcctagtgcacaatggcgaaactttttgttagaaacaaggtttttattttttgttgttaaagaaaatgaagatggtgtagacatattcaaaggaataaaattttttagtatgcctgaagaagacataaacggacctgtcaaaagaatgtgggatgatacggtgaagaaattaaatgagggtgtcacattagaagctgtaccggacaaaagtacaaaggatggttggcgaattaaaaataattttgtagataaaagtgatgatttaatatgccacgttagaccacacactaataacagagactatcgagggggaagtaatgcagataagcttcctaaaaagattaactggattaatagacctgactcagatgattattcggatgagtggatgactaagcaaagtttttggataaataatgactacattaaaatgcaagttgaagatttattgtag

SEQ ID NO: 409627 - DNA, 1638 bp, Staphylococcus aureus
atggataaagaattatggatagaaagagctaatgatagtttagttaaacatttttatgagcagcaatctgacattgaacagcgagaaggttttgaaagtaaattaacgttcggtactgcgggtatacgcggaaaattcggtcttggtgaaggtcgacttaataagtttactattgaaaaattggcattaggtttagcgcgttatttaaatgcccaaacaaacagtccaacaatagtcattcattatgatattagacatctttcaactgaattcgcccaaattattgctaatgtattagcaaaccatcaaataacagtttatttacctgatacatataaaacgacaccggaattatcgttctcggtgcgcaatcttaatactactgctggcattatgattacagcaagtcataatccgaaagactataatggcattaaagtatatggttctgatggcgcgcaactatcgactgatgcatctgagcttgcaagtcgttatatcgaagaagttggcgatccattacagattgatatacctatttcaaaacaaaatacatcttatatcaagccatttccgaaatctgtaactgatgactatatgaaacacattcaaaatatgattggctatattcctaaatctgatttacaagttgtgttcactagtttgcatggtacaagtgttccgattgtacctaagttattaaaatctttgaatttcaatcaatttaatcttgtagaagcacaatgtaaacctgatccgaatttcagctcagttcaaagtgctaatcctgaagatcatcgcgcttttgatcaagcagtcgaacttgcaaataaaagtcatgcagacttattaatatcaactgaccctgatgcggatcgacttggtattgctgaacgtgatgcacatggtcatatcacgtattttaatggcaaccaaattggtgcgctgttacttaattatcgtattcaacaaacgtctcaattacgtcaccgcttaatgattcaatctattgtaagtagtgagttaacaaagtcattagcacgctataataatgttgaatacaaagaggtgctgactggctttaaatttattgctcaggaaataagacaactggacgatcatcaaaatatgattttcgcctttgaagagagttacggttttttatcagagccttttgtacgtgataaagatgccgtacaaattgtgccacttattataaaatacgcttctgagttaaaattatatggcaaaacattgaaagatgaattagaacagatttatcaaactgttggtagacatgaggatacattattctcgcatacgctagaaggattagaaggtaagaaaaaaattgaatcaattatgacacatttccgttcaaatccaccgcaagagattcaaggactgaaagtgaaagcaattgaagattatttaactagcgaggtttatcagttggacaaagatacaacgtcgcagattaattctcctaaatcaaatgttattcgtgtcttatttgacgaaggatttatcgctttacgtccttctggtactgaacctaaaattaaattatatgtgtcgttaaaatgtccgaattttgatgatgtagctcaaaaaattaatgcgatgatttttagctaa

SEQ ID NO: 409628 - DNA, 660 bp, Staphylococcus aureus
atgttagttgtacaatatgcttatatggcatctattaatacaggtaatgctgcgattgcaacattactacaatacattgcgcctgtttatattattatttggtttgtcataagaggcgttgcaaaactaacattatttgatgtgcttgctattatcatgacactattaggaacatttttattattaacgaatggttcattttctaatttagtcgtcaatcctgcaagtttattctggggtattttagctggtgtagcactcgctttttacacaatttatccttcagacctacttaaccgcttcggttcgattctaattgtcgggtgggcaatgcttatttctggtgttgcgatgaatttacgccatccaatttggcacattgatatcactaaatgggacatatcaattatattatttttaatctttggtattatcggtggtaccgcactcgcattttatttctttatcgacagtttacaatacatatcagcgaaagaaacaacattattcggaactgttgaacctgtcgtagccgttatcgcaagcagtctatggttacatgtggcattcaaaccatttcaaatcgtaggcatcattcttattatggttttaattttattactatcacttaaaagacaacctgaagcattagatgaataa

SEQ ID NO: 409629 - DNA, 345 bp, Staphylococcus aureus
atggttaagcaattaaatagtgtcgaagcattccgtgaatttattcatcaatatccgttagcagttgtacatgtcatgcgcgatcagtgtagcgtgtgtcatgccgttttaccacaaattgaagacttgatgcaatcatatcccaatgtgccattagctgtgattaatcaaagtcaggtggaagctattgctggagaattaaatattttcactgtacctgtggatttaatttttatgaatggaaaagaaatgcatcgtcaagggcgttttatcgatatgcaacgttttgaacatcatcttaagcaaatgaatgatagtgtgaataacgatgtcgatgagcattaa

SEQ ID NO: 409630 - DNA, 2100 bp, Staphylococcus aureus
atggaagcggaaattgagataggggatgtttatatgtttaagaaattgtttggacaattgcaacgtatcggtaaagcattaatgttacctgttgcgattttaccagcagctggtattttattagcgtttggtaacgcaatgcacaacgaacaattagtagaaattgcaccatggttaaaaaacgatatcattgtaatgatttcgtcggtcatggaagcagcaggacaagttgtatttgataacttgccattattatttgcagttggtacagcacttggattagcaggaggagacggtgttgcagcattagcagcgctagtaggttacttaattatgaatgcaacaatggggaaagtgttgcacattacaattgatgacattttctcatatgccaaaggggcaaaagaattaagtcaagcagcaaaagaaccagcacatgccttagtattaggtattccaacgttacaaacgggtgtgtttggtggtattatcatgggtgctttagcagcatggtgctacaacaaattttataacattacactaccaccatttttaggattctttgcaggtaaacgatttgtaccgattgtgacatcggtcgtagcgattgcaacaggtgtggttttaagctttgcgtggccaccaattcaagacggattaaatagtttatcgaatttcttattaaataaaaatttaacattaacaacgtttatattcggtattattgaacgctcattaattccatttggtttacatcatattttctattcaccgttctggtttgaattcggaagttatacaaatcacgcaggtgagttagttcgtggtgaccaacgtatttggatggcacaattgaaagatggcgtaccatttactgctggtgcatttactactggtaaatatccattcatgatgtttggtttaccagcggcagcatttgctatttataaaaatgcacgaccagaacgtaaaaaagtcgtgggtggtttgatgttatcagcaggattaactgcatttttaactggtatcactgagccattagaattttcattcttatttgtagcaccagtactttatggaattcacgtattattagctggtacatcattcttagtaatgcatttattaggcgttaaaattggtatgacattctcaggtggtttcatagattatattttatatggtttattaaactgggatcgttcacacgcattattagttattccagtcggtattgtatacgctatcgtgtattacttcttattcgactttgcaattcgtaagtttaaattgaaaacaccaggtcgtgaagatgaagaaactgaaattcgtaactctagtgtcgcaaaattaccatttgatgtcttagatgcaatgggtggaaaagaaaacattaaacatttagatgcatgtattacacgtctgcgcgtagaagtggttgataaatcaaaagtagatgtagcaggtattaaagctttaggcgcatcaggtgtattagaagttggaaacaatatgcaagctatctttggtccaaaatcagatcaaattaaacatgatatggccaagattatgagtggcgaaattacgaaaccaagtgaaacgacagtgactgaagaaatgtcagatgaaccagttcacgtagaagcacttggaacaacagacatctatgcaccaggtgtcggtcaaatcattccattatcagaagtacctgatcaagtattcgctggtaaaatgatgggtgatggtgttggttttatccctgaaaaaggtgaaattgtagcaccgtttgatggtacagtgaaaacaatcttccctacgaaacatgcgataggattagaatctgaaagtggtgtcgaagtacttattcatattggtatcgatacagtgaaactgaatggtgaaggattcgaaagtctgattaacgttgatgaaaaagtaacacaaggtcaaccattaatgaaagtgaatttagcatacttgaaagcgcacgcaccaagcatcgttacaccaatgattattacaaatcttgaaaataaagaacttgtcattgaagatgtacaagatgctgatccaggtaagctaattatgacagtcaaataa

SEQ ID NO: 409631 - DNA, 1740 bp, Staphylococcus aureus
atggcaaaaataaaagcaaatgaagcattagttaaagcattacaagcatgggatatagatcacttgtatggtattccaggagactcaatcgatgcagttgtcgatagtttacgtacagtgagagatcaatttaaattttatcatgtacgtcatgaagaagtagcaagcttagcggctgctggttacacaaaattaactggtaaaatcggtgtggcattaagtatcggtggccctggtttaattcatttattaaatggtatgtacgatgccaaaatggataatgtaccgcaattaatattatctggacaaacgaatagtacagcacttggaacgaaagcattccaagaaacaaatttacaaaaattatgtgaagatgtagccgtttataatcaccaaattgaaaaaggtgacaatgtgtttgaaatcgttaacgaagcaattcgtacggcatatgaacaaaaaggtgtcgctgttgttatttgtcctaacgacttattaactgaaaaaattaaagatacaacgaataaaccagtagatacatcaagaccaacagttgtatcaccaaaatataaagacatcaaaaaagcggttaaactaattaataaaagtaaaaagcctgtcatgttaattggtgtaggtgcgaaacatgcgaaagatgagctacgtgaatttattgaaatggctaaaattcctgtcattcattcattaccagctaaaacaatcttaccggatgatcatccatatagtatcggtaacttaggtaaaatcggtaccaaaacatcttatcaaacaatgcaggaagcggatttattaattatggttggtacaaactatccatatgtggattacttacctaagaaaaatattaaagccattcaaattgacacaaatcctaaaaatatcggacatcgtttcaatattaatgtgggaattgttggagatagtaaaattgcgttgcatcagttaactgaaaatattaaacatgttgctgaaagaccattcttaatcaaaacgttagaacgtaaagcggtttgggataaatggatggaacaagataaaaataataatagtaaaccattacgtccagaacgattaatgacatcaatcaataaatttattaaagatgatgcagtgatttcagcagatgtaggtacagcaacagtttggtcaactcgttacttaaaccttggtgtaaataacaagttcatcatttcaagttggttaggtacaatgggttgcggtcttccaggtgcaatggcatcaaaaattgcatatccaaatagacaagccatcgcaattgctggtgacggtgcattccaaatggtgatgcaggactttgcaacagctgtacaatatgatttacctttaacagtgtttgttctaaataataagcaattagcgtttattaaatatgaacaacaagctgctggtgaattagaatatgcggttgatttctctgatatggatcatgccaaatttgctgaagcagcaggtggtaaaggttatacaattaaaagtgctagcgaagtaaatgctattgtagaagaggcactagcacaagatgtaccaacaattgtagatgtttatgttgatcctaatgctgcgccattaccaggtaaaattgtaaatgaagaagcgcttggttatggtaaatgggcatttagatctattactgaagataaacatttagatttagatcaaattccacctatttcagttgcagcaaaacgtttcttataa

SEQ ID NO: 409632 - DNA, 954 bp, Staphylococcus aureus
ttgaaagttattgatcaagctcaaattattaaggcgatggaaaaaggcgatattgatgttacgaatgatgctaccggtgcaatggcaaaagatgctaagtcatctaatgctggtctcaaggtattatctgcgccaagcttagactacggtttaataggattcgtatctcatgattacgataaaaaagctaataaaactggtaaagtgagaccaaaatatgaagacaaagaattacgtaaagcaatgctttatgcaattgatagagaaaaatggatcaaagcatttttcaatggttacgctagtgaaataaatagttttgtaccatcaatgcattggatagcagctgatcctaaggaactaaacgattataaatatgatcctgaaaaagctaaaaaaatcttagataagttaggttataaagatagagatggtgacggatttagagaagatcctaaaggtaataaatttgagattaactttaaacattattcaggttcaaatcctacttttgaaccaagaactgctgcgataaaatatttctgggaaaaagttggcttgaaaacaaatgtgaagttagtagaattcggtaaatataatgaagacttagcaaatgcatctaaagatatggaagtgtacttcagatcatgggcaggcggtacagatccagatccatcagatttataccatactgatagacctcaaaatgaaatgagaacagttttaccaaaatcagatcaatatttagatgatgcattagacttcgaaaaagtaggcattgatgaaaagaaacgtaaagatatttatgttaaatggcaaaaatatatgaatgatgagttacctggattaccaatgttccaaggtaaatcgataactattgttaacgataaagtacgaaacttagacattgaaattggaactgatcaaagtttatataatttaactaaagaagcttag

SEQ ID NO: 409633 - DNA, 987 bp, Staphylococcus aureus
atgaataatgtattgttagaggttaaagatttagaaacatcattaaaaataaataatgaatggttagcaactgttgaaaatatttcttttgaattatctaaaggagaagttttgggtatagtaggggaatctggttgcggtaagtccatattaagtaagtcaattattaaattattaccagaaaagatatctaaactaagtaatggagaagttatatttgatggtaaacgaatcgatacactcaatgagaagcaattgctagatattcgaggaaatgatattgctatgatttttcaagaacctatgactgctttaaatccggtatttaccataaaaaatcaactagtggaatctataaaatcacataaaaaaatttctaaaaaagaagcaaataacttagcaaaagatttactaaaaaaagttggaattgcaagacaagatgaaatattaaatagctatcctcatcaattatctggtggtatgcggcaaagagtaatgattgcaatggccatttcatgttctcccaaattattaattgctgatgaacctacaactgctttggatgtcacgattcaagcgcaaatattagacttattaaaagaattgcaaaaggaaacgcaaatggcaattatgatgattacacatgatttgagtgtggttgctgaattttgcgataaagttttggttatgtatgcaggtcaaattgtagaatttggaggcataaaagaaatactacacaatccgaaacatccttatactcaaaaattattatctacaattccaaaacttaaagaagagcagaaacgacttgaaacgatagaaggaattgtgccatcaatccaagcatttcacgttaataagtgcagatttgcaaatagatgtaacaaaaaactggatatttgtaataatcaatctcctaaaatgcatgtttgtgaagacgtcattgtacgttgtcatttgtaccaaaatgaatataaggagatataa

SEQ ID NO: 409634 - DNA, 288 bp, Staphylococcus aureus
atggaaaaaaggattgttaactatgatgatgccaacattttaaaattagatatgaaccaagtaaggtgtaataaattagtagtcgacgatatatttaaagattatgagcaaataaagccaacgatagaaatagaaaagggaaatgcaattttaaaattgaatggttattttgttgcatctattttagaaacgttgaatttgaatagagttaaaaagttatatgttgatgaagattattattatacatataacgaattaattgttaaatatactgaggtaaaggaataa

SEQ ID NO: 409635 - DNA, 273 bp, Staphylococcus aureus
ttgggatataaaaatattttgatagactttgatgatacaattgttgatttttatgatgcggaagaatgggcgtttcattatatggcgaatgtttttaatcataaagcaacaaaggatgattttttaacatttaaaaaaatcaatcaccaacattgggaagcttttcaacaaaataaattaacgaagtctgaagtattatcagaacgatttgtgaattactttaaacatcatcaaatggaagttgatgggcatcggtgcagatgtgttatttag

SEQ ID NO: 409636 - DNA, 255 bp, Staphylococcus aureus
atgacaagagaaaaaggatcatttagttcagagtttaagttacaaatggttagattatatgaaaatggtaagcctaggaatgaaattatacacgagtatgatttaacaccttcggcattaggaaaatggataaagcaacatcaaaacacgggtacattcaatcaacaagataacttatcagatgaagaaaaagagctgattaaattacgtaaagaagttcaacatttaaaaatggagaacgatattttaaagtaa

SEQ ID NO: 409637 - DNA, 1341 bp, Staphylococcus aureus
atgaataattcaaaatattggctagaacgagctcaaaatgttatacagagtgaaatacaagcggatgcacaagcaacaactgagatagaacgaattattttacagatgtatgcagaaattgctaaagaattattggcattttatgccaaatatgcaaccactgctggattaacaatgttagaagttaagaaaaatgctgatgcgtttgacgtaaaggcatttagacataaagctaaaatgtatgttcgacgtaaagactttagtgaagaagcaaatcgtgtattaaagttatataacttaacaatgaagatttcacgagagcaattattaaagcaacagcttgacttaattgtcagagatactggattgaatcttcaaagtaaactagaagatgacttagttgaagctgtggatagagaagtagaaagacaagcgcatattttaggtgaacatgtaaagatagatgatgctgaagtaaaagcagtggttaatagtaactttaaaggtgtgacatggtcacagagattatggaaagatatggcattggtacaaaaagaggtagaacaggtaactagtcatgtactgattcgtggtcgacatccaaatgaatttgtaccactgtttaaaaagaaaacacaatcaacgacttataacgccagtagattgttagtcactgaatcggcaagggttcaagcagaatcacaaaagttaacatatttaaaagaacttggtgaagatggcgaatataaatatgttgccaaaatagatagtaaaacatctaaattatgtcattcactcaacggaaaaatatttaaagttaaagatatgataccaggtgtgaatgcgccacctatgcatctttggtgtagaagtaccacagtgccagatgtcggcaattggcgagacaagttctttaaagagcgtgaaggtaaatatcaagtagaagtaaaagaagcaaaattacaggaaaaagctaaaaatcagatgaaagaaatgattgaaagtggtaaaataaaaatagaaataaattgcgaaaaacaaaatagacatatgttaggtcatcatctatataatgaaaataaaaaaagagccattttaaataataagaaattgcctagctatacaatactttctatagatttattgaatgaattgttaagagaaaaaatgtcaacaggcaatctaatattaagtgatgagctatttgatatgaaagagattattaattttaatcaaattattggaaaagtacatatcgataatgtgtatattgaaaccagaaaaggaaaagtgcattattcgaagacaggtgctcatatagtaccttatattgataagtag

SEQ ID NO: 409638 - DNA, 210 bp, Staphylococcus aureus
atgaatgattttaaagaagtatacgttactataaaaaaattgcttgattcagatataaccgcttatcagattgaaaaaggaacaggggttagtagagcgaaaataggtagactgaaaaatgataaaaattcattaaaaaatttaactttagaaacagcggaaaaactctataattatcaaaaacaattagaaataatgaatgaagattaa

SEQ ID NO: 409639 - DNA, 429 bp, Staphylococcus aureus
atggcaggaataagttttattaattatatagtggacactatgtattacaaaacaaatcctaattttgatgcagaaaatactatagaaatttcaataaatgaagaagtttttgcggacattgatattagtaaagaagaagatgtggcgattataacgttacaagctaaacttaaagaaacaagtgatgtgcctttttcatttgatgcaagtatagtggggtattttgaatataattctgaagaatcagatggtattcaatttaaagaatttttaaaaactaatgcaatagcgatattatttccttatttaagatctattgtaagtgagttaactggcaaatctaatagatttcctagttataatatgcctgtaagaaacattgcacatgaaatcgccgagaaaggtaatataaatattacagagggttaa

SEQ ID NO: 409640 - DNA, 315 bp, Staphylococcus aureus
atgtttgatattaataaagtaaaaagaattgctaaagaagtaggtgtggaagtaaatcccttagaagcaatgggcagaaaaggtttgttttttagaaatgaaaatggtcagctagaaaaatgggacgctatcactgaattaggtttaaaagataataatactcaacactcaaattattatagtaacttttttgacaaaagtttttatactaataaagtacatggatttaataaatcaccatatcgtaatacacaaagtaattattcgatgaatgaaaaaattaataaacaaacacttatctcggaggcagcataa

SEQ ID NO: 409641 - DNA, 504 bp, Staphylococcus aureus
ttgaatatcgaaataaaaggctatcacggtactacaaaaagtgcggctaatctaataattaaaaactctaccttcaacaaatcgtctaaagtaaatgaatggttaggacatggtgtttatttttatgagttaattgaaaaagcccagtggtggagtaaaaataaaaatgaaccagttatcattgaagctcctatatcggttcaagaagataaattagtgaatttagataagccttctgaagaagataaatttggaagcttcatacaatccatagaaaagcaaggaggttttgtttttagtagtgataaaataattagaagatgtcaaattactactatgtatatgcaatatgtagaagctaaagttattatggcaactcttccatctactaacaaaaaatataaagaagagtttagtagaattggatatgagagaacagaaaaacaaatttgtgtgcatgatacaacatgtatagtgtataataaattaagagtcgttgagtaa

SEQ ID NO: 409642 - DNA, 921 bp, Staphylococcus aureus
atggcaaagtcatatttaggtaattggaatggtgttgacgtttatacggattttattccatttggaacaagacgaactgggcaagctttggatacaggtaagccaatttttgcggtatatcatgatacggggaatccgggaagtactgcacaacaaaatgtgaattattacaaaagtacctacttacaagattgggcatcaacagcatctgcgcatttctttgtagatgataaagaatgtattatttgtgtaccattagatgaaaaggcatggcatgtgttatatgatacaccgacagataattattactttggtgacgatgcaaatgatgcagcatttggtggcgaattatgttatttcgaagatgatagagagcgttcattaaaagcattagataatttcgcaagagtatttgctactttagtagattcatggggtattgatcattggcataaatgtccaggtcatcaggacattcaagctgataagcgtgacccaggtaacgcattacaggcatgtggttatgctcgagatgatatcgaggtaattgataacttagtgcaacgttatattgatggtctaaatgaggttgatacaaatgaagttgtaaatcaaccaagtgatgatgatatcattgaaaagaaaccagtaggatgtcaacgcattaaagtttggtcagaagaaccatattacagaggtacaattaagtacgatgcttcattacgtcaacgtgcaggcaatagctttgataattatagctttgcatacgaaaaagatgtgcttgaagcgggttcaattgtatatatttatgaagaaattcaagacccacaaggcaatatttggtgtagaacttattcaccaagtaataatgggtgggtacataaacatacgattgaagtagatgaagaatataaagattaa

SEQ ID NO: 409643 - DNA, 384 bp, Staphylococcus aureus
atggaacaaatcaataatatagaaattgaaagtttttcaagtttattctatacaggttcttggacaattattgatatattaattcttttaatcgctttggatattttaagtggtgtaataaaagcaatgcgaaatcatagcttaaaaagttcaattgcaaatttaggattagcaaaaaagatttcgatttttattgtaattattgttgcgaatattgcagatttattttttaaggcagacggtgtgattgtaaatggaacagtctcattttatttatttggtgaggcgattagtgttgtcgaaaattgtgcaattattggtgtaccaattccagatgttttaaaaaagcgtttaggtgtaattgaaaatcaaaatgaaaagtaa

SEQ ID NO: 409644 - DNA, 315 bp, Staphylococcus aureus
atgaaagaaacaagattttatttagtaagagtgtatgttggacaaaatggggaaagggaaagtcaaaaattaagatatagtgcttacgcctttacttttaacggtataccagaaggcgaaacaccaacattttacgacacagaagcagatgcaacggcaattgcaaattcgttaaatttaatttatcgactatcaaatgtgagcagttttgtagatgtgtacaaagaagaagttaaagttacaaaagttacagataatgacccagttgctaataatcaagttgatggaggtgtagaacatggaacaaatcaataa

SEQ ID NO: 409645 - DNA, 411 bp, Staphylococcus aureus
atgattgagattaagaattcggacttagtgaaaactaggtcttttttatatggattaaaacttaaaccgaaattatcaagacacagaacaaaatttattagattgctagacaataaaattgaagatttgaccaatgcatctaatgaattaattcaacaatttgctaagaaggataatcaaggtaatccaatagttaaagataatttagttgaatttgatgatataaataaacgtatacaattcgaaaaagaagatagaatactattcaatgaaatttcaaaaattgatttgagtgaatatccactagtaaaagatgcgttaaaacaatcattaaacgaattagatattgttttagagaaagaagaagctgaaacctatgaactattatgcaatttgtttgatgttgattaa

SEQ ID NO: 409646 - DNA, 1809 bp, Staphylococcus aureus
atgagtgctaattttgatgatcaatttaattctcttaatagtacgcttgaaacgaactcaaataatacaacgttagctctaaatcaattacaacaaaatgtgagtacacaatttagtcaaatgcagtctacaaataacgcaaagttattagaagtgaaaagtgaattacttcaatatactaattctaattacaatcaagctaatgatagaattaatcaaattaatcaaaaagttgatgattttaaagttggtgcagttaatttactaaaaggaacagcaaattatacgacgccttttaatcattctattatagaaaattcagggagaattgtagacggttacttatattcttctgattttagtagtagcgccggccgtttatggcaaacgaatcaagttgttaaattactgccgaataccgattatgtacttagctatgatgctttttcaaaatcaaatatcgggacagcgtatacacctattgaaattttaagtgaggatggcagggatttagtaccaaaacagtatcttcatacgatagatacgtataaacatgttactaatactaaacaacgaatgacatttaaattcaacacaggtaataatatatatttccgctttcatttcacgtctgaaagtgttaattctgttgtatatattggtaaaatccaattggaaaaaggtacaattgcaactgattggtcaccgaatataaaagatgttgaggcggaaataaaggttgttgcggatagtattactacaaaagcacttgaagcggttcgcggagatatccaatatttaagaacaaatattcttgatacgaatacaattgaggctaatatgctaaaggttgataatgcttttgttaacaagctattgtcaaataatattttagttaatcgattaacagctaattcgatattatcaaatgtgattaaaacaaaaactttggaatcagtttatcaaaatgtgggtgagttgaggtctcgattaattactacaaatagtattagtgcaaatgcgattaacgttgatagtgcattaatccataaactagtgtctgatgatcaatttgttaatattttgacagcaagaagcgcatttgtagattggattaaagcaattgacattgatgcaggacgtattcgaggtggtttgattagatctagaaacgaacgtatgttttgggatttagagcataataattttgatttttatgatggctcagttactaactattacggctcttctagaatagtgtttcatactacggataacagtatttatcaaggttacaatggcacgtgtgcatttttgaattttactaaatcagctggggataattacccatctgtagtaatgggaactagtggggatttaattgctagttcaactacagggcatttttcaggtataaaatgtcacacagcaaaagcggataaggtttataatttatcaaaagttgatgtcatagctgaccaagtattattcgacagtcatgggggtagtgctgacactggcggttggactttagaaaatttcagagtaccttctgtgcatagtaatgtcagagcgttttatggtaacaatcctgctaattataaatatgaattaggacaaagagaatataaattcagaactttatggactgaaggtataaatgacacgttaagagtggtaacttatcccggtacaataacagggataatgagtgataacgagagatatggtattcaaatagctaattatgatgtctacgttttaattaatgggcgtagagtatcattaaaacaattagttgatcgttaa

SEQ ID NO: 409647 - DNA, 1530 bp, Staphylococcus aureus
gtgatttacttacaaagtaatgatttaaactggaatggtttacccttatcacaaagttatgatgatgttattgaacatgagttgaatggtatttataaattaacttttaaaattccaattaatgaatctggccaacataaacttatcgaaaaaaataatttaatcaaagcgagcgaacatttcagggaaaatggttttaatattttcagagttaaatatatagataaagaagaggattatgtacaatatacggcatatcaactattgtttgatttgtctaaaaagtacattaatcctcttgttgttgaaaatacattaccattagacgccttaaggttatgggttcaatcattcaaaacgccaccaaatttatcagttaaatattggagtaatgtaactaataaacaagtacgttatcaatcgtttactaaagaaaatgacaaagatcgttatgctttaaatgtattatttgaaatggcgaagcaatcaaatttagatttagactttaatgttgatagaatttcttttggaagattaggcactgacacacagtttatttatacgacaaataaaaatatcacttcattttctcaagaagaaaattatgatgacgttattacacgtgttacagttacttctaaatttaaaccagatgttgatagagaaaaaataaaacaacaacaaactaatgaattgaatgcattaaaagaacaacaacaggtatataataaacaaattgcaagtgaaaagcgtagacaacgtatggaacgtgaaattgagtctaaaattcgtaaacaagaacttaaaaagatgaattttgaagctcaaaaacataagaagtacaaatcaatggttcatgaagaatttaagagtgctgagcaaatacgacaagaaattcaagctaaatatgataaccaacaagctaaaattgaacatgaaaagctgattgcaaaacaacatgcggatatgcaaaaagctgaaatccaaaaattgaaagcaaaacacaaagatgatttatctgcaattaatgaggatattattttatcagttacggtagatagtccatttattaatgattaccctgaaatttatgaagagattattgaaaataatgaacttaaaacaattgatgaattaactaattacgcagaaggttattttagtaagcaacatgttgattttcctaaaatatcaataaaagtcgggttggatgtgttgcaaaatgagcaggtgcaattaggcgataccgttattgttagatatctaacacatgatgttgaccaacgccaaagagtaattgcaacaaaatatagtcccatgaaaaaagaattcattgaagtaacttttggagataaaactgaaagttatgtatatcaaagtaatacagttagttcaaatacgacacaatcgattttgcaaaattataaaacttcagatgacattgaagatgttaagaacgaaatgaactattattatgtagagttaataaataaagaaaaagaaaattttaacaatcatttggaatactaa

SEQ ID NO: 409648 - DNA, 759 bp, Staphylococcus aureus
ttgattgaattaaatgctctagaatacaatggcagaaaaacgagtgaatttccatttaaagtatttgttgaagtgaatgatggtataaatatccctcaacgaaaaacaaaaattattactacggatcaaatgcatggtgcatatgtaaagacgagtgataattacagtacgatagagaaaaagtataaattttatgtattagctgattctttaattgaaattgcacctcttttcaaatggctaaattctagaatgagtgaaagtgattcaagtagtaaagtgaattatctaaagccatttgacaaccctgaacggtattaccgtgttttaaaagtagatgttggtcgtgcagaagttgatgattttggtggatatgaatttgatgttgtttttacatgtcaaccatttagttttattgatgaagacacgaatgaaacagcccaaattattttcccaaatcaaaaagtaatagataatcaaagtggcattcatatgtaccctcgcttaattattgaaactaccgataatgaacgtgcaattattagtattggtgatgaaaacataacgattaaagcaccgaatttatatctagaagttgaatgttttccggggagacagaatgtaagcgatagattcggattacaaaacgagtgtatgattggagaattttttaaaatcccaccaggacgttcgggcattagcgcgacaccaaatgtcagaagtataattataaattgtagatggggtgaattaatgtga

SEQ ID NO: 409649 - DNA, 4182 bp, Staphylococcus aureus
atgccagaattaaaaagagcaggtgttaaattaacagctgatggcacagcgcaatataaagctgatttaaaaagtgctactgctgcattgagacaaatggctgaagaatcaaaaaggaatgttgtggcattaggtaacaatgcatcagcatctaaaaaatatggtttagctattaaagatttaggaaatacagcaaagctagcacaagctaaattaaatgtattgcaagataggcaaaaacaattatcagaatcatctcgtatttttgctagtgaaattaataagttagaaaataaaatgaaaactgctaagggagatactacagaactaagtaatgctttagccgaattacgttcaaaagaatcactgaataatgcagaacttcataaattaaatgcaacaatcgctagaactgaaacacaaatgattaaagctaaaaatgcagcaagtcaaatgatagatgaatatcgtaatgcgggtggtcgttttgcagatgtatctgaaaaattaaaaactgtaggtaataaatttgatgatgctggaaataaagcgacaaatttaggcaagactatgacgacaagagtaacgacgccaatcgttgcaggtttcggttatgcgacaaaggcatatattgattttgacaatcaaatgaaccagatgaaagtacaacttgatgatggttcgcaatctgctagtcaattgaaatctcaagttgaggaattagggaaatcatctcaaaatatggctaaagaatatggtgtggctggtgcgtctatacgtaatggtatgaatgaattgataaagaaaggttttacttttaatcaagtttcaggagcaatgcctagtattttaaaagctacagttgcatctggagatgattttaatactgtaatgaatgtatcttcaaatgtgctcgagcaatttggtttgaaagtagatgacacaaatcaaatgttaacaaatacggatagagttacatcagtattaacatttgcagcaaataaaacatcagccggattcagtgatttaggtgaagcaatgcaaaatgtaggtcctatggcagcaaataataatcagtcactagaagatatggcatcaacattaggtattttggccaaccgcggtattgagggtggcgaagcgggtacctacttgatgaatgcacttcaaaatttagctacaccaactaaagaacaatctaaaggattaaaagaattaggtgtttctgcttttgatgctaacggtaaaatgcgtgcattccctgacatactaagtgacattgaaaaagcaactgcgggtatgagtgatgaacagaaaaatgctgcgctcaatacaatttttaatacacaagcaatgaaaggtattaaccccctcattcaagccggttctaaatctattaaagatttatcttcaagtacaaaagatgcatctaaatatcaagatgaattagctaaaaagatgggtgagtctgcttcgaaaaatgtcgataaaatgaaagagtcatttaaagtattggccgaaacaattggcgctaaagttttaccacatatcatacctttaattaataaagctacagaattagcgaataaatttggtgatttagatggtaaaacaaaagatacgattgttaaaattgcagcattagcggctgcagtaggacctctatctttaggatttgggggcatacttagaagtattggtggtgtggttcgaggtgttggtagtcttgcacaaggttttggaaagctgacttctagtactgctaaaatcactaaaggtgcagggaaagcaacaactggtgtgagtaaaataggttcaatggctaaaaaagttggcgcattggcaccattattaagtaatccatatggattagcttttggagcaattgtaggtgcatctgcaggagtaggatatttaatttataaagaattacataaagatgatgaaaatcataaaacagctgtcaatcaaactaaaggtaaatatgaagattggtataaaacgataactagtggagcaaaagatgcgtcaggttcacaaaaacaaatacaagatgcgacaaagaaaactggagaaacctataaagaagtaactgagcgtctgaaaaaacaaaatactgacgtgcaagaaacaatgaaaaaaggttgggatggatacgagaaaaagattgaaggatctagcaaaatatttatgggcattgctaaagatactactaaacatatcgaaggtcttaaagaaaaattaaaagatttaggtttagataaaaaagatattgacaatgcaaaacaaaattatgaaaattacgccacaatgttaggcaatacatttacagaatttgctaaaacggctgaaaaaagtaaagtagttactagagaaacagcatccgcaactattgaagctacaaaaagagttactgatgaagtagtcaatagtttgaataaagagaaagaagagaaattaaacaagcttaagcaggaccaagaatatggaattttaacacaagaacagtatcaatcagaaacacaaaaaatcaatgatgagtatggaaaacgtgttaaagctttacaagataatcaagagaaaataagaaatattatggctaatgctgcgcaagaacatagaaaattaacatcagatgaagtagctagtgttacacaagcttatttaaaattatcagaatcaacaggtcaggctattaccgataacacagaagcacaaaaattctttagtgagaatttacaacaaatgttaacggatagtggtttagcagcactcaaacatgctgatattatcagtagtagtactgaggacagtattaaaaaggctaaaagtacagaagaagccatgaagattttaaagaaagctttagaggattatgataataaagatgttaaagagaaaaaaatcaaagctaaagatgaaactagtgaggaagttaaaaaggctagtgaagctgttgataaacataatgaaaaagaagttaaagaaaaagagctaaaagcaaaagataaaacgacagaagaagcgaataaagcaaataaatctttagatgaatatattaataaaaaagttgatgaaaaagtattaaaacttaaagatgaaacgaaagaagctaaagacaaagccaaaaaagctattgaagattataacaatattaaagcagacattaagaaacttaaagccaaagacgaagcgtcagaaaagacgattaaagcaaaagaaaaaattatagactacaataaaaaacaagcagataaaaaaatactaaaagctgaagataaagtaagtgatttaacaaaaaaagtaaagaaagctttagaacaaatagataaacttgagatacaagtgaaagaattaaaagctaaagatgaagcgtcagcaaaagcgtttgaagctaaaggtaagctagatgacttcaataacacaaaaatggccacgaaaaatttagaagcatccggaaacgctagtcctttcacagatgaagcgcaggataaacttaacatttttaattcgactggaattccaacaaaagtattatcagcaaccggaaatgctacaccttttactggtatagcacaaagtgccattaatttatttaatagtacaggtataccaaccaaacatttaccagctacaggtaatgcgaaagcatttactgatgatgcaaagcatgctgtagatcgttataactggactgatattccagaaaaaagcatccatgtttcatcaaatgcagttgagcaatctaattcagcaataggtgctttgaattccatccctcgttttattagatctacaattaacgttgtgcgtaatttctttaataatgaacatgcgcaaggtggacatatagatgcgtatgctgaaggtggtaatattcaatctcattctgtaccaggtacttatacaggaattgttggagaagcaggacccgaaatatttagtgttaacagagggaatgttacgatcacgccattaaacagtagggaaaaaatgcgaggtattgaaggtgtacttcaagattacacgggcggtaaaaattcaaacgctggcgttgttgttaatattaatttgaatgacatggttgttaaagaagaagcggatgaaaacagattaattaataagatggaacaacatttaaaacgaacccttgcagaacagcaaatgataggaggtgcataa

SEQ ID NO: 409650 - DNA, 225 bp, Staphylococcus aureus
atgacaaaagaagagtttttatatgagtatgatttagcgactatttatatgctgataaaccagcataatgaacaacaatataaaaataaattggtcggaagagtcttcttatcagatgaatcatttgaagagtttgaaagaaatctgagggaagcaaaacaagaaaatgacaatatagaatctaattcagaatacaaggaagtgagggctgtagaatttttatag

SEQ ID NO: 409651 - DNA, 351 bp, Staphylococcus aureus
atgagtatctttaaaacaaaactaaaaacttttgaatctagtattactggaacaaaaacatcatacaacgttaacactgcattttggttatatcttgaagaagattttggaattaagcaaggcgatctatcgaatttgtatgaaactgaaaacaatcttactactgctaaagttgttgtatgtattcttaaagcaaacaaatttgaaacaacattagaagaagtattagagaatacaaatgagattgaactagctcaatttattattgatttccaaacagcattatatgatgttgatgataatcaaacaaaagaagcaaaaaacaaaagtgagggaaagtcagaccaataa

SEQ ID NO: 409652 - DNA, 684 bp, Staphylococcus aureus
atgactacaacttttgaaaagaaagcattattaactggtattggaaatgggttttttcaaattatgacaactgaagaaacaccaactactgcaccagtgtatgatagtagagtttttgaggttccctcattagataagttgaaaacaaaacttgaatataaatctaaagacatttatttatctagtgcgttacatagtgttttaggaaaagcatctaaagcgacgattacgttggacgcaggatatttacctgatggatttgaagaagaagtatcaggagcaacaaagttagctgatggtgtatatggtatgggcggtaaaggcactaaaaaatactttcgcttcgcatttccaatgattgatgaaaatggcgaaaaaattattattaacttccctaaatgtcaaattcaacctaccgatttaaacgttgaatctcaagctgaagacaaaaaagaacaaatgcaacaatttgacattattgctatgccattagcaacaggaaaagaagaagagtctaacatctattacaaagctgatttacgtaaaaacaaaacattagatgaacgtaagttgttagaaaaaggattctataacaaagcaggtttaacagaattgaataaaaatactgatacctcatcaacaacatctgcatcaacgacaacatcaacaaatagagtttcttaa

SEQ ID NO: 409653 - DNA, 438 bp, Staphylococcus aureus
atgagtaatacatttggttttgaagatgcaattatagatttagaacgtttgtctactagagtagattcaattcaaaagaaaatatatgaagaagctatagaaattcgagatgacgcacggaatattgctactggattaggattgcataaaagtggtaaaggtgtgtcaggtattgaaatagaaaaagtaagtaacggtgttgaaattggatggatgaatcgtccaaatttccatctttattttcatgaatttggatttcatgcaacaggaagaaagagtggcaaacgatattcttcacgtagcagtaaaggtaagcgtaaaagaaattataaaaaaggtacaacatatattccacctaaaccgcatttaaggccggcatttgatagaggcaaagaaaaatttgaaaataacattaaaaaatttgtagaaggagaatga

SEQ ID NO: 409654 - DNA, 339 bp, Staphylococcus aureus
atgagcgtaaaaagtagaatttttgaagcattagaaccactaaatattaatattgctcatggctattcggatgacatgacattacccaaaatcattacaaatgtcatcagtcatagagcaattcgtttatcagatagaaaacattatagacatgttaaatatcagattagttattttgacaaggtacctagagatgttgaagatgatgaaatattaatttctataatgaatgcacttgagaatgctaatcttgttacgaatgaatggactgaaattgttgaaccagatgaagatacagaagaaactattttccattacattttagaggtatgtatttaa

SEQ ID NO: 409655 - DNA, 345 bp, Staphylococcus aureus
atgaagaaacaaaatcagacgtataatgatggaattttagaacttttagtacaacaaacactgtatgaccgttatcatacaaaaattggaagtgactattcaacatttaaaagattttggttcagaaaactaggtattacttctgaagagcaatattttgctatgcaagtagatacagttgtgataatgcgtgtagcgatttctaaaactacagatattaatagtcatatgaaagtgaaaattaatgggaaagtttatggcatctctcgtgtttatcataattataataaaaatgaaactgaattaagtttgtttgaggtggttaaagatgagcgtaaaaagtag

SEQ ID NO: 409656 - DNA, 306 bp, Staphylococcus aureus
atggagatttcaaatgacatattagaaaagctaaaaaatcgattgcatattttggatgaagaatcagatgaaaatttaattgagatgattgtttcctcaatagttaaattaaaaaatacatgtggtgaatttgatattaattcaaatgaacaagcgagagagttagtgtttgagcgtgtgagatacatttataatgacgttcttgaacattttgaaagaaactttgcgcgtgaaattactgatttacaaatgcgattgttttttgaaagtagtgaagagaatgaagaaacaaaatcagacgtataa

SEQ ID NO: 409657 - DNA, 1170 bp, Staphylococcus aureus
atgactattaaatttaataagtctgaaaaatttattaatgctaaaaaagcatttgttgcgtcattaacgaatagcgagttaaaagaagaagagagagaggaaattgtttctaattacgtgcaagctttgtcggatgatgtagctaaaacgattcaaaatgatgttaatacacaaatagcagataatgcaattttagcagcacgtggacaatcaactttaacatctgaagaagtaagatactttaatcaagttgctcaagaaggtttatttaaagaagaaagagctttaccggtaacatttattgataaagtatttgaaggattaattaaagaacatccgtttttaaatgcattaggtattacaaacatgggcgctgttactgaaattattactgtagatccaaaaggcgcgtcagtatggggtgatttatttggtgacattaaaggtcaagtaaatgcagcattcggtaaaaaacgttttaatattctaaagttaacagcgtttggtgctattccaaaagacatgttagttttaggtcctaattacattgcaaactatatggaaaaacttttggcagaggtaatggctacaggtttagaatggggctacattaatggtaacggttctgcacaacatcagccagttggtttacttaaagatgttgctgaaaatggtggcgtaactgataaggtttctaaagggacgttaacatttgcacctggacaaacagttgttaatgaaattaaggatgtaaagaaagtactttctaaaaatgctaatgatgttaatcgaaaaattgatggtaaggtagttctagttttaaatccatcagataaagcagatgttgatgctacttcaacagttttaacagcaaatggtacatatgtaacagtaatcccaggtggattagatattgttgagagtgaagtattagctgaaaataaagctttattctttgttaaaggacaatatattgctggtgcaggtggaaaagcaagtttacaagcttatgatgaggtattagcaatggaagatgcacgactttatatcattaaacagtatgcgaacggtttacctttagataacaatgcagccgctgtatatgatttgaacattaatacaactggcgcaagcacaacaacttcgagaagaagtaattcagcatcataa

SEQ ID NO: 409658 - DNA, 687 bp, Staphylococcus aureus
atggaatttggtaaatttgagcatgctttttttaatcaaactaatgaaagcaaggatgaacatatattagtcatttctggtgccattggagaaagtaattatttctatgatgcgacaagtgcaaaagatgtaagaaatgcgcttaagaatgtagaagctaagacaattcgaattaaattgaattcaccaggtggtgatgcattccaaggtttagaaatttacaactacattaaggatttagatgcacatgttatcgtagaggttactgcattagcagcaagtgcaggatctatcattgcaatgggggctgatgaaattatcatgaggactggttcaacaatgatgattcacaatgcttcaacgttttgctatggagataaagaagaaatgcaaactacttatgataggttagagaaaatagattcatcaattgttgatgtctatgtttctagaacaggattaagtaaagaagaagttaaggagttgttagataatgaaacatggtttacagcatctgaagcagttgaaaaaggctttgcaaactcttatgagactaaagagaaagataatggcatgaaggtaaaacaagatttaaacacaaatattaataatgaattagtaaatcaagaagtgaaagatgagtctaatgtgaatacaaaagactatcttaaaacacttcttttttaa

SEQ ID NO: 409659 - DNA, 1137 bp, Staphylococcus aureus
atgggattgttaagtgatttatttaaatccaatcgtaaaactgcagagcaattaggtttatcgatagtttcagcaagtaaaaaaacgcatattaaacgtttagcaataaatagttgtattgaattaattgctaaaactgttagtcaagtagaatttaaaattaaagataataataaatacactaaagattcgatgtactataagttaaacgtaaagccgaatattaatgaatctgctactcaattttggcaaaaagcaatatataaattactttatgataatgaattattaattattcaaaatgattcagaagacttattagttgcagattcttatcaagttactgagtatgcgcatgtcccaaacatttatagtcaagtacgaattggtgactttgaatatactagaacatttaattctaatgatgtaattcatattaaatataataatgaaaattcagagtcgattttgaatgaactatatggtgattatggtgatttatttgctagatttatagagttccaaatgaggaaatctcaagtacgttcaattgttaagattgatagtaaatgggggaacgataaagaacgaagagcgaaagtaaataaattcattcaagatatctatcagaattttaaagataaatcatttgcaattgttcctgagcaagaaggtattcaatataaagaacaaactttgtcacaggcagctaatagtgttgatgatgttgataaagttggtaaacagtttttaaataactgtgctattaaatttggtataccagtccaattattaacaggagatattgcagaagtagatcagaacatgaagcgatttattaaaatgactataaagccactactgcaactaatagttacagaattaaatgctaaattatttgatgaaaaacaatacttaaatgattcgaaaattatagcaaatacgttaccaataacgtttgacagtatttttgatatggctaatcaaattgataaattagtcgctagtagtgtatttgttggtaatgaaataagacgtgaattaggatatgaagaaagtaaagatgaattaatgaatgaacatctagtaactaaaaactatcaaactttaaaacaattgagagaaggtgtgagttaa

SEQ ID NO: 409660 - DNA, 1662 bp, Staphylococcus aureus
ttgctggaagtaaataaatacgtaaagcactacattgatttattcaaagagggcaaagtattatttaataaagaacgtattcaacttatagattatttagagaaatatatttttcctagagatgatatttactttgacgatgaagcaattgaaaatttgtgtaatttcgcaagagaattctattttgaattagacgattttcaaaaatttattagtgcttttttatttctatactacaaggaagataatgaaaatttttacgaccaattttttataatgggtggtcgtggtgttggtaagaatggccttgtatctgtatgggcacactattttttaagtgactataatccaattaatgagtatgatatttctattgtagctaacactgaaaagcaagctaacactgaaaagcaagctaaaacctcatttatggagatatacaattgtatagaacgtaataatctagatgaatattttagaaaaaatttaaaagaaataacaggaagagcaaccaacagtaaactgcaataccatacttctgcgccaaaaagtaaagatggattaaaagatggtatggttgtttatgatgaaattcatagaatggaaggctattacgttataaacgtttttggttctggattaggtaaaaaagataatgctcgagaaatctttataggttctaatggacatgttagaggtggcgtcattgatgatatgttagaaagagctagtaaaattttaagtggggaagtactagatgataacatgttttgtttcttgtgtaagatagatgatgctaaagaagcagatgatccaaatgcatgggaaaaagctaacccacaattttctgaaccgatgacaccatatgctaaaagattatttaaacgagtgaagaaagaacatcaaaagctttctaacaatttaaaatatcgagctgaattcatggcgaaacgaatgaattttccagaaacagacttgactgaatctgtagcaactgcagatgaaatatatcatgcaaatgaagatatacctgacctcttacataaaacatgtgtaggaggtttagattttgggtctgtccgtgactttactgctgtcggtttattatttagaaaaggtgatgattatttttggttaacacattcatttgctagaaaagaatacttagataaagcaaacttgaaaccacctatacaagaatgggctgaaaaaggattattaacaattgttgatgaacctactatagatccaaggcatgttgttaactggtttgttaagatgcgagaattatataacattgaaataattgttgctgatatgtataagttggatattcttcgtccgttattagaagcggaaggatttgaagtgtatggaataagaagaccatcgtctattcatggtttgcttgcgccacgtgttgaatcactatttgctaataataatctttattggggaatcaatccattaatgaattggtatacgtttaatgtatttaagaaagttactaaagatggctcgattcaatatttgaaaaaagatgagcatcgtagaaaaactgatggttttcaagcattaattcatgccttatataaagcgtcagaaatactcacggatgacattgatttctttttagatgaaattgaatttacaaattattag

SEQ ID NO: 409661 - DNA, 333 bp, Staphylococcus aureus
ttgaaggtaagtctaaaaactttaaaagaaagtatgctgaaagacgttgatgaaactgacttgtttacaattgaaaagattgaccgatatataaccttaattcaaaaatatcgccaattaataactgcaattaacaaggaaggcataacaattactgttaataatgcttctcaaaaatttactaaaacacatcctggaatttctgacctaattaatttaaataaaaacttgattatgttagaggagtcaataagaacacgttccattaataaagtttctaatgctaagccacaaattaaatcattgagggatagaattgctggaagtaaataa

SEQ ID NO: 409662 - DNA, 291 bp, Staphylococcus aureus
atgaaggtctatgatactaaagataaacgaaataagttctatcatagtacaagttggaatcaattaagaatgaaagcttacttacgagataatcgtgaatgtcaacattgtaaacgtgagggcaaggtagtgaagggacagaacgttcatcatatcaagcctatagaccaaagacctgatttagcattggatattaataacttaataactttatgtattgattgtcataataaggttcatggtcgtgtatatggtggaacacgtaagcaatggaatgatgaacaatggtaa

SEQ ID NO: 409663 - DNA, 492 bp, Staphylococcus aureus
atgttaaatttgttgatgtcgtatcttttaagtaagaataacgtgttaaaacgaatacgaaatttaatgcagcacaatgttatagacattaatgaacttgcattaaatagacaaatgttaagtgatataaattatgtgatcgaatggataagagaaggtcatgaaccaaataaatatagtgctatagacaaacgacaatgctatttagttaatcatgaaactatagaaaaaatgatagatgtatcaatgtatcagaaaaatggaacagaagaatatcatgactatattcaagatgtaaatcataaagcatattatgcattgatgaaactgactaaacaagaattagaaatatttttaatgcacaaatgtgagaatttaagtttaagtgaaatagcggatctattaaatattagtaaaagttctactcaaagttatttaaagagagctttaaataaaattgaaggtgaaaaaggacaaaatttatttttataa

SEQ ID NO: 409664 - DNA, 1875 bp, Staphylococcus aureus
atgtataaaggttatttaaaatcaaaaggaaaacgtacgattactaaatttaaaaagaatacagatgtattactaaattataagcaagcacgatcattaaaaagtttcgttggtgtattagatgatgactatatcatgattgatgtcgatgataaaaatgaagcagaaattttattaaatattattgaagatgaacaaattcattgtaatattttagacactgataacggtatgcatttttattttaaaggttataacatgactaccaataaaactaaaaattatactgccattggaatcctgtgtgattttaaattaggttgtagaaatagttgcgaccctttaaaaatagatggccaatttagaaaatggataaaaagagttgaagatgaccaattagatgaattgccaaaatggttagaggcttcgtttaaaacagatccaggattttcagaacttggagaaggtgatggacgtaatcaaacactgttcaactatattctgaaactccaacaaatcgcttttagtaaagaagaaattagaaatacaattcgcattattaataaacatgttttatacgaaccgatttcagataaagaattagatattgtgttaagagatgatgcattcttaaaagaatcattcttcataaaaggtaaatttcaacatgacttattcgctaaatatttaatatcggagtatcacattattagaatatctgatattttacatatttatttagatggcgtttattctgataaacaagctgatttagaaagagtgatgattaaacatattccaggacttaaaaagatgcaacgtcaagaaacgttagcctatttacaattgcaagctgaaacaaaagagttatcatcagtaaactatatcactgtcgcaaatggcatttatgatttatacacagacacagtacaacctttcacacctgaaattattgttaaaaataaaatacctgtgccatttataccaaatagttattctcaagtaactgataaaacatttaataagttggcagtgaatgatactgaactaagagatttgtttgaagaaatattaggatatgctttatttagaaggaatgaatacggtaaattttttattcttacaggtggggggagtaatggtaaatcctcatttttgaaaattttacgtgcgttagttggagaaaataacacatcaagtgtagcacttaaagatttaaatggtcgttttaagactgcagaattatttggtaagttggttaacttaggtgatgacattggtaaaggtttcatcaaagatagtgcagaactcaaaaatttagcgactggtgaaacgttagtagttgaacgtaaaggtaaagatccatttgatttacgtaattatgcaaagctaatatttagtgcgaatgaagtacctagaattgatgataaaactgatggattgaacagacgactaatgattgtacctttcaaagcaagatttacgaatacagatattgattatgatccattcatcatagataagctattgtctcaagaatcattacaatattgtttggttatggctattaatggactaaaaagattaattaaaaataaccgcttcaccaagcctaaatcagtaacagcagaaatagaagcatataaagagagaaataatcctgttttagcatttttaaataatgaagaacctaagttagaaaatgaatcaactagagatatatttgcacaatatagtgagtattgtgtcgaatatggctataaacctgtaagtagaatagtttttgcaagagaagtttgtagtttaaaaaagatgactactaagagaataagggtagatggtgaacgtaattatatatttgtcccatttatctag

SEQ ID NO: 409665 - DNA, 192 bp, Staphylococcus aureus
atgatcattaagaattttaatgaagcaacaataacggcagatgctgttgataaattaaaagaatttcataaagaaatagataataaattaacagttcatgaatttaatgagctattaaaattttaccaaaatgttttattacgaattgagaatgaaacaattacagaagtagatcatagaatgagtgaataa

SEQ ID NO: 409666 - DNA, 378 bp, Staphylococcus aureus
atgactgcttcaaatcatttgaattgtggtgatttgacggaatttattgacgcaatgcttgagttattgatagcaggacaagaaagaatacttgatgagttaataccaaaaatggatgcgactgaaaaattaacgctttatttaactagtcattataaacagatagattatgaatttttgtatctcctttcaatggataaattgtttggaaataaaagaaatagattaacattaattgatttagaaaacatattgggagtaggaagagtaaaaattaataatacaattaaaaaatttggtaactacttagttaaaattaaaagtagaccaacaatttatgagatgagtgatgaatttctaaattcgattataaaataa

SEQ ID NO: 409667 - DNA, 450 bp, Staphylococcus aureus
gtgaaagcaccaatcgctggtcgtcgtattttacttaaagaagtaagagattcaatttttagagagaaaatggtaggcgaaggcttggcaatcaaagctcatgaagaatccaaagtaatcgcaccgttcaatggcttagtatctatgattgtaccaactaagcatgcagttggtattcaatcagaagacggtgtggacatagtcattcatattggtgtgaatacagttgacttggaaggtaaaggattcaagtgctttgtaaagcaaaatgatcgtgttgaagcagggcaaacgttgttacaattcgaccagcaatatatacaacaacaaggctacaatgctgacgttattgtcgttattagcaactctgccgatttaggaaaagtagaactgacaatgaatgaaatcattacgactgaagatgttatttttaaaatatttaaaaactag

SEQ ID NO: 409668 - DNA, 882 bp, Staphylococcus aureus
atgagcattgttgcattacttatcgggttaggccccttaattggctggggcttcttcccaacagtcgcttcaaagtttggtggtaaacctgtacatcaaattatcggtgctactgtaggtacgttaatcttcgctattattttagccgtaatcacatcaagtagcttccctactggaacaaatttactattcgccttattatcaggtgcaggatggggattcggacaaatcattacatttaaagcgttcgaattagtcggttcatctcgtgcaatgcctgtcacaacagcattccaattattaggcgcatctttatggggtgtctttgcattaggaaattggccgggcattggtcataaaatcattggttttacagcattaatcgttattttaattggtgcgcgtatgacagtttggagtgaacgcaaagaagcaagtaacgccaaaaatttacgtcgtgcagtgattcttctgttaattggtgaatttggatactggttatattcagccgcaccacaagcaacttctattgatggcctaactgcctttttacctcaagcaatgggtatggtaattgttgcagtcatttatggctttatgaatatgaaagcagagaatccatttcgtaataaaattacgtggttacaaattatttcaggtttcttctttgcatttggtgccttaacatatcttatttcagcacaacctaatatgaatggtttagcaactggatttattctttctcaaacatccgttgtgcttgctacattaactggtatttatttcttaaaacaacataaaacatcaaaagaaatggttattacaatcatcggcttagtactcattttagtagccgcttctgttacagtatttataaaataa

SEQ ID NO: 409669 - DNA, 501 bp, Staphylococcus aureus
atgactttcgaagaaaaactaagtcaaatgtacaacgagattgcgaataagattagtagcatgataccggtagaatgggaaaaggtatatgcaatggcttatgtaaatgaaagaagcggagaagtgttctacaattatactgaaccaagaagtgatgaattagtttactatacgagcgtgttaaataattataatatatcaagatcagaatttatggactcagtatatgaattatataagcaatttgataaactaagagatttatttaaagaagagggacatgaaccatggacatcatgtgaatttgactttacaagagacggcaaattgaatgtttcatttgattatattgattgggcgaattcagagtttggacaaatgggaagagaacattattacatgtataaaaaatttggaatttggcctgaaaaagaatatgccataaattgggttgaaaaaataaaaaattatgttaaagagcaagatgaagctgaactatag

SEQ ID NO: 409670 - DNA, 390 bp, Staphylococcus aureus
atgtgtttttttgttcaagaaaaaagagacaaacacgacatattttatactgttagtggcgtaatacagacgaataaaacatctggagttgtcagtgccccaatattaaatgttacaaaagaaaagggtgaagatgcttttgtgaaaggatacccttattatattaaaaaagaaaaaataacattaaaagagttagattttaagttgagaaagcatctaatcgaaaaatatggactttataaaacaatctcaaaagatggtagggttaaaattagcttgaaagatggcagtttttataaccttgatttaagatctaaattaaaatttaaatatatgggggaagtcatagaaagcaaacaaattaaagatattgaagttaacttaaagtaa

SEQ ID NO: 409671 - DNA, 1191 bp, Staphylococcus aureus
atgttcgaagatataatcaataaagaacatttgatttttaagactaagcaaattgctcttaataaactttcaaaagatgaaatatataatttaatgaaaaactattatgaaggtatgaaaataaaagatcttttagaaaaatatagattagatttaaagaccaataatattgtatcttattttccaggttatttaaccaatatagaatgtccctattgtcaggggtatatgtctgctgttttcgtctcacgagctaatgaagaaatactaaaaattaagaattgtaatatatgtagtcatacattagataaaaattgtagatgtgagacttgtagagaaatggaaattagacaaaaagaacaattgtatattttaaaaaataatatactaggagaattgctaatagacgagtctgagaaagaagtcaaagaagaaagtgatcttaacatgaggcaacgcttatatttagcttcggtattgcattgtggattgacagaagatattaagaaattaaacccaatagaagaaattattgattttataggtccaagttttaatttcactattggtatttttaaatatttgtataatacgaatgttatttcaatagatgagcaatcagctttagaagcgttcacttttaatttagatgatgagataattacaagttttatggttgataaagttatgtatcggctaaatataaaaccttatgacaatgattatggtaatatgattaatagattactttacccagatgaatctttatttaataacgagttttgctatgaattatggaaggaaataaatcttgatgagtctatccaatattttaaatatcatatgaataaagttaaatttgatacagtgattggtgagaagacaagaagaacctttgaaaggatagtagataatttttctctttcagaaatattttacattatacatagatcaatagctaatggtaccaaattgtatcaatcgggtgaatataccaagacacatgctattaatatagtaaaaagagaaatatttaattatagtgaacgagttttggcaaacaattggagtttgacaggatacaatagagattataattttcctgaatcaatgttaagcaaaattttatttaataatataatgagaattgattatttaggatttagaaatccacctactaaagaattataa

SEQ ID NO: 409672 - DNA, 660 bp, Staphylococcus aureus
atgaacagaaatcttttaaccattttattgttgatagggtatacgtatttaatatttaactttctaacaactgaatactccttggcgccaagaatattttatacattgaactttattagtttgtccttaatattattagcaaaggctaaaagtaagaaattaaataaacacacacacttccttgacgaagtacaactagttttagaaaaaagatattccactataatgtatatattgaatatcgcgttagtagtttcctttatttcattcttaactggttttatatatttaagagaagaatacccacaatttatcctttattcaagtgtattgctagtaatgtctttctattatattaaactattctatgaagataaaaataatattatttatatgaatagaaaaattgtggattttaataactcagaagtagaatgtcagttacagttagatgatggagaaaaaaatgtattattgaaacaacttgataatttttataaatcgaccattattttaatgtttattaccgaaataacgttgatgttttactccataatatcatctaactatcaaacagtgagtatggttttaattgctatagttattttcatttcatcttcactactaattacaacgaatgtatatacaaatcgcaactaa

SEQ ID NO: 409673 - DNA, 432 bp, Staphylococcus aureus
atgaatgaattaagaacgacgaatcaacctttatataataagtttaaaagatatgcgaaattactattaaaacctggagaagatttagaggcatttgaatatcgtaaagtagctttatttaaggaatggaagacgcaaaagggtatcattaagtatttattagatcaagatgactcactaaatgacgcctaccaatatatcaatcaactacgattcaaacttaaacataatgattatgaaggctttattcacgaattaaaacatatgccattgtctcaagcgcattcatttgtccaacgagcaactaagacacttaacaaacatgcgtactttataaaaaatacatttgattattacaatttatcaaatggtcctttagaaggtataaataacaaaataaaattaattaaacgtacatcttttggttactga

SEQ ID NO: 409674 - DNA, 780 bp, Staphylococcus aureus
atgagaaaagtatttatactaatcactttgttatttggttacagtagctattctttgttggaagctagagcagagacacaaaatgatccaaatataagtgaattaaacaaatctagtcaatatacgggttcttggcataatatatggtatttatataatagcgatccagttaatgctaaaaaaataaagctaagtgacaaatttttgagtcatgacttcattgttccaataaataaccctggtcattatgactatgttaaaactgagttaaaagacagtacaatggctagttcatttgatgggaaagaagtcgatatttttggcgtcaattattttgatcaatgctatttttcaaatgaaaatatacagtgtgatagtaatcaaggaggtggaagtaaaaaaacttgtatgtatggtggtataacattaaatgagaacaataccaataatagaattcagcctattgttgtaaaagtttacgagaatgacagtgttactctttcttttgatatcaatattgataaagagactgtaactattcaagagttagattataaagtgagaaataaattaatttctaaaatcaatttataccatttaggtggcacttcatatgaaacgggatacattaaatttatagaaaatggtaatcgatattattggtatgatatgatgccagaccctggctttactcagtctaaatatttgatgatatatcgaggtaatgaaacagttgaatcagccaaaacggaaatagaagtgcacttaactaaaaagtag

SEQ ID NO: 409675 - DNA, 438 bp, Staphylococcus aureus
atgaaattctacagacaatggaagttggggttggacgacgaaataaattttgagaaaatatcatttctgtcccactcccatattcccgatagaaaaacaggacttgaacttgcagaaaaatatggcattgatggcgtcatgattggtagaggcatttttcacaatccattcgcttttgaaaaagaaccacgtgaacacacaagcaaagaactattagatctgttgagattacatttatcattgtttaacaaatatgaaaaagatgaaatacgacaattcaagagcttgcgtagattctttaaaatctatgtgcgtggcataagaggcgctagcgaacttcgacatcaattgatgaacacacaatcaattgcagaagcacgagcactactagatgaatttgaagcccaaatggacgaagacgttaaaatagaattatag

SEQ ID NO: 409676 - DNA, 771 bp, Staphylococcus aureus
atgatgaaacgattaaataaattagtgctaggtattagttttctgtttttagtcattagtatcactgctggttgtggcatgggtaaagaagcggaaattaaaaaaagttttgaaaaaacgttgagtatgtatccgattaaaaacctagaggatttatatgataaagaaggatatcgtgatgatcaatttgataaaaaagataagggaacatggattattggttctgaaatggcaactcaaaataagggtgaagctctgaaagttaaaggtatggtcttatatataaatagaaatacaagaagtgcaaaaggattttactatgttaatgcgataaagaaggatgaaaatggcagacctcaggataatcaaatagaatatcccgttaaaatgattgacaataaaatcattccaactaaagatatcaaagacgaaaaaataaaaaaagaaatcgaaaactttaagttcttcgcgcaatacggcaactttaaagatttgtcgaagtaccaagatggagatatttcatataatccagaagctccgatttattcagcaaaatatcaactaacgaatgatgattataatgtaaaacaattacgtaaaagatataatataccaacgaataaagcacctgagttattattgaaaggttcaggaaatttagatgattcatcagttggatacaaaaaaattgaatttactttcgtagagaaaaaaggagaaaacacttactatacggctaacctacattttaaaccgagtgaggataaataa

SEQ ID NO: 409677 - DNA, 537 bp, Staphylococcus aureus
atgttagtgattatgctgatattactttgttttaccttttataatatcaactactatttattccaattaagcgaccttgatgccttaccgtcattagatcgaatggcttctatttttgaagaggggtttgcatcattaaatgatagtggatctgagcgaagtgttgtatggataaatgccatttcagtaattaaatatacactaggttttggtgttggcttagtggattatgtacatattggctcgcaaattaatggtattttacttgttgcccataatacatatttgcagatttttgcggaatggggcattttattcggtgcattatttatcatatttatgctttatttactgtttgaattatttagatttaacatttctgggaaaaatgtaacagcaattgttgtaatgttgacgatgctgatttactttttaacagtatcgtttaataactcaagatatgtcgcatttattttaggaattatcgtctttattgttcaatatgaaaagatggaaagggatcgtaatgaagagtga

SEQ ID NO: 409678 - DNA, 327 bp, Staphylococcus aureus
atgtttatggcagaaaatagattacaattacaaaaaggcagtgcggaagaaacgattgaacgtttttacaatagacaaggtattgaaactattgaaggcttccaacaaatgtttgtcactaaaacattaaataccaaggatacagatgaagttaaaatcttaactatttgggaatctgaagatagctttaataattggttgaattccgatgtatttaaagaagctcataaaaatgtacgtttaaaaagtgatgacgatgaacagcaaagtccaatattatcaaataaagtattcaaatatgatattggctaccactatcaaaaataa

SEQ ID NO: 409679 - DNA, 132 bp, Staphylococcus aureus
atgactaaaataatagcagtaggatggtttttaattgcaaatcatcatactgctgtttttaattatgctaatttgcgagcggctattataaagacagagttgtttattaattgtggtgatttagaaatgtga

SEQ ID NO: 409680 - DNA, 2280 bp, Staphylococcus aureus
atgttagaaacaaataaaaatcatgcaacagcttggcaaggatttaaaaatggaagatggaacagacacgtagatgtaagagagtttatccaattaaactacactctttatgaaggtaatgattcatttttagcaggaccaacagaagcaacttctaaactttgggaacaagtaatgcagttatcgaaagaagaacgtgaacgtggcggcatgtgggatatggacacgaaagtagcttcaacaatcacatctcatgatgctggttatttagacaaagatttagaaacaattgtaggtgtacaaactgaaaagccattcaaacgttcaatgcaaccattcggtggtattcgtatggcgaaagcagcttgtgaagcttacggttacgaattagacgaagaaactgaaaaaatctttacagattatcgtaaaacacataaccaaggtgtattcgatgcatattctagagaaatgttgaactgccgtaaagcaggtgtaatcactggtttacctgatgcatacggacgtggacgtattatcggtgactatcgtcgtgtagctttatatggtgtagatttcttaatggaagaaaaaatgcacgacttcaacacgatgtctacagaaatgtcagaagatgtaattcgtttacgtgaagaattatcagaacaatatcgtgcattaaaagaattaaaagaacttggacaaaaatatggtttcgatttaagccgtccagcagaaaacttcaaagaagcagttcaatggttatacttagcataccttgctgcaattaaagaacaaaacggtgcagcaatgagtttaggtcgtacatcaacattcttagatatctatgctgaacgtgaccttaaagcaggtgttattactgaaagcgaagttcaagaaattattgaccacttcatcatgaaattacgtattgttaaatttgctcgtacacctgattacaatgaattattctctggagacccaacttgggtaactgaatctatcggtggtgtaggtattgacggacgtccacttgttacgaaaaactcattccgtttcttacactcattagataacttaggtccagcaccagaaccaaacttaacagtattatggtcagtacgtttacctgacaacttcaaaacatactgtgcaaaaatgagtattaaaacaagttctatccaatatgaaaatgatgacattatgcgtgaaagctatggcgatgactatggtatcgcatgttgtgtatcagcgatgacaattggtaaacaaatgcaattcttcggtgcacgtgcgaacttagctaaaacattactttacgctatcaatggtggtaaagatgaaaaatctggtgcacaagttggtccaaacttcgaaggtattaacagcgaagtattagaatatgacgaagtattcaagaaatttgatcaaatgatggattggctagcaggtgtttacattaactcattaaatgttattcactacatgcacgataaatacagctatgaacgtattgaaatggcattacatgatacagaaattgtacgtacaatggcaacaggtatcgctggtttatcagtagcagctgactcattatctgcaattaaatatgcacaagttaaaccaattcgtaacgaagaaggtcttgtagtagactttgaaatcgaaggcgacttccctaaatacggtaacaatgacgaccgtgtagatgatatcgcagttgatttagtagaacgctttatgactaaattacgtagtcataaaacatatcgtgattcagaacatacaatgagtgtattaacaattacttcaaacgttgtatacggtaagaaaactggtaacacaccagacggacgtaaagctggcgaaccatttgcaccaggtgcaaacccaatgcatggccgtgaccaaaaaggtgcattatcttcattaagttctgtagctaagatcccttacgattgctgtaaagatggtatttcaaatacattcagtatcgtaccaaaatcattaggtaaagaaccagaagatcaaaaccgtaacttaactagtatgttagatggttacgcaatgcaatgtggtcaccacttaaatattaacgtatttaaccgtgaaacattaatagatgcaatggaacatccagaagaatatccacagttaacaatccgtgtatctggttacgctgttaacttcattaaattaacacgtgaacaacaattagatgtaatttctcgtacattccatgaaagtatgtaccaaaatttaaggtgggagcactatgcttaa

SEQ ID NO: 409681 - DNA, 147 bp, Staphylococcus aureus
atggtagaatcaatgctaacttttatgcttgggccattgagacaaatcactgatttttatatggaacatttactcgtaagtaattccatcgtcattgtaggttattttgcgacaggtatttttaaaaagaaaaaagttgtgaattaa

SEQ ID NO: 409682 - DNA, 540 bp, Staphylococcus aureus
ttgaatttaacaagagcaacgcttagaccagatttagcgatattaacaatgtcaggttttttagaagcgcgtccccgagttggatattattattcaggtaaatcaaaaggtaaattttttaatgaaaaacttcgacaatttgaggttaaggactatatgtctcaacctgttgtgctaagagagaatacaacagtttatgacgctatttgtacaatttttttagaagatgtaagtacattatttattattaatgaagataacgattttgttggtgtgtgttcaagaaaagatttattaagagcttcaatgattggagcagatattcatacagtacctatcagtgtaaatatgacacgtatgcctaatgtcacttatttagaggaaagcgaattagtcatatacgcagcagatagaatgattgaaaaagaaattgattcgattccaattgtaagaaaaaaagataatcaaaagtatgaagtaattggaagaatttccaaaacaacaatagctaagttattagtagcattatataaagaatag

SEQ ID NO: 409683 - DNA, 201 bp, Staphylococcus aureus
atgatagaagttcaaattacctctattacaggtagagattattacgcaacaacaaatctaacttttagtaaatatgtcgaaaatatttcgagtagtaaagcccgttatattcgcgcaaaagatacgctagataagacatcatgggttaaaatagatgcaattgaagcaataacgctttttagggggtcggtatatgattaa

SEQ ID NO: 409684 - DNA, 411 bp, Staphylococcus aureus
atgatgaaaatcaaagttgaaaaaataatgaaaatagacgaattaattaagtgggcgcgagaaaatccggagctatcatttggcagaaaatattatacaacagacaaaaatgatgaaaactttatttacttcggtgtttttaaaaattgttttaaaataagcgattttatattagttaatgctacttttagtgtcaaagttgaagaagaagtaaccgaagaaactaagtttgataggttgtttgaagtgtacgagattcaagaaggagtctataaatctgcatcatatgagaatgctagtataaacgaacgtttaaaaaatgacagaatttttcttgctaaagcattctacatcttaaacgacgacctaactatgacgttaatttggaaagaaggagagttgattaaataa

SEQ ID NO: 409685 - DNA, 249 bp, Staphylococcus aureus
atgcctaaaaccgatagcgcatgtaaagaatacttaaaccaatttttcggatctaagagatatctgtatcaggataacgaacgagtggcacatatccatgtagtgaatggcacttattactttcacgggcatatcgtaccaggctggcaaggcgtgaaaaagacatttgatacagcggaagagctcgaaacatatataaagcaacatggtttggaatacgaggaacagaagcaactaactttattttaa

SEQ ID NO: 409686 - DNA, 363 bp, Staphylococcus aureus
atgggcagtgttgtaatcattaataataaaccatataaatttaacaatttcgaaaaagaactaatggcaaagcgtgggataaatgccggaattgtttctaaacgtgttagaggttgttgggagttttcagaagctttagacgcgccttatggcatgcacctaaaagaatatagagaaatgaaacaaatggaaaagattaaacaagcgagactcgaacgtgaattggaaagagagcgaaagaaagaggctgagctaagaagaaagaaaccacatttgtttaatgttcctcaaaaacattcacgtgatccgtactggtttgatactacttataaccaaatgtttaagaaatggcaggaagcataa

SEQ ID NO: 409687 - DNA, 822 bp, Staphylococcus aureus
atgggagaagtatcgtggataaaacttaaagttggcatgtttgatgacagcaaaatcaaatatatcgaagccttacccgaaagagatacgatcataactatttgggttaagttgctaactttatcaggaaagtacaacgaacaaggttatattatgttatccgaaaacttgccttataacgaagaaatgttagcaaatgagtttagtcgacctatcaactcaataaggttagcaatacaaacttttgagacattgggcatgattgaaaaagttaatggtgtcataaaggtgacaaattgggaaaagcaccaaaacattgaaggactcgagaaaatcagggcgcagaacaggttgaggaaacaaaagcaacgagaaaacaacagaaaattgctaaatggtcacgtgacgtcacgtgacagtcacgcaacagaagaagataaagaattagataaagaattagaaagagataaagaaaaagatatagataagaacttaagttcaaataatagcgcaactgacgttacgcatgagcaatttgaggaatggtggaaactttacgacaagaagaaagataagaagatgtcttttactaaattcaaatcatgcttaaagaaacattcttttgaacaaattatgcaaggtactcgagaatatttaaaaactattacagacaagcaatatcaaaagtaccctaaaacgttcttaactaacgaaagctatatgaatgattatatcgaagagattaaagaagaagtaaacaatcaatatgtagatgcgtttcagcgtgcatcacaatccagtatagaaaatttaccgttttaa

SEQ ID NO: 409688 - DNA, 774 bp, Staphylococcus aureus
atgagtgaggaacaagacattttacaagaactaggtattgaagaaattaacgaagatactcagaactattattcaattatggtatatggcaaatcaggaaccggaaagacgactttagccactagagaaaacaacgcttttattattgatattcacgaagatggcactcaagtaacgcggcaagtttttgtgaagagggtcgacaattacattgcttttagaaacacaattgcgagtattgaatcgattgtaaatacagctagacaaagaggaaagttacttgatgtggttgtaattgaaacagcacaaaagttaagagatataacgctgactcatgtgatgaacacgcaccaagtcaaaaaagcaagaattcaagattatggggaaacatctaaattaattgttaactcgattaggcacctattaaaggttaaagataagctcggatttcacgttgtgcttacaggacatgaagggcttaactcagaagataaagatgagaacggaaaaattattaaccctagaatatcaattgaagtacaaccggcaatacacaataacttagtaactcagttcgacattataggacatacatttatagaagatcatacagatgagaacggaaatgcgacacacgactatgtattttctgtagagccttctaatttatatacaactaaagttaggcataatccgcaaataacaatcaataatccaggtattaaaaatgcttcaatttcaaaaattatagatatggcacaaaacggaaactaa

SEQ ID NO: 409689 - DNA, 480 bp, Staphylococcus aureus
atggctaatctatatgagctatcagaagcatttaaagagatgtctaatcaagatgaattagatccaacattactaaaagatacattagattctatcaaagcagaaatgaacgtcaaagtagacaacattgtcaattggagacgtgaaactttaggtgacatagatgtcatagataaagaaattaagagacttcaaaatttaaaaaaacaaaaacaaaatttaactgatcgtttaagagattacttaaaagagatgttagaaacacaggaagtagatagttaccgcacagctactaatcatatttacaagcgcaaaaacggggctagtaaaaatattatcgatgaaaaacttattccaaaggattattggctatcacaagcgccaaagcttaattctaagcaactaatcgatgatttgaaagctggcaaagatattccgggtgctgaattaaaggtaacggaaagtttggtgattaagtga

SEQ ID NO: 409690 - DNA, 162 bp, Staphylococcus aureus
atgagcaacatttataaaagctacctagtagcagtactgtgctttacagtcttagcaattgtacttatgccgtttctatacttcactactgcatggtcaattgcgggattcgcaagtatcgcaacattcatattctataaggaatatttttatgaagaataa

SEQ ID NO: 409691 - DNA, 126 bp, Staphylococcus aureus; identical to SEQ ID NO: 409030

SEQ ID NO: 409692 - DNA, 615 bp, Staphylococcus aureus; identical to SEQ ID NO: 409029

SEQ ID NO: 409693 - DNA, 141 bp, Staphylococcus aureus
atgaatacattattaaacatcttttttgattttataactggtgttttaaaaaacattggtaacgttgcttcttatagtacatgttatttcataatggacgaagttgaaatacctaaagaattaactcaattacacgaataa

SEQ ID NO: 409694 - DNA, 1128 bp, Staphylococcus aureus
atggcatcatttgaaaaaagaggcaataaatggcggtataaagttcaatataaagattcattgggaacaaaaaaaattataagtaaatctgggtttagaacaaaagcggaagcaaaaaaagcagctttagaagttgagttaaatattaaaaatggttataaggaaaacatgaattatacacttgaaaaatggctcgactattacttagagacttggcgaaaagataaggttaacgatagcacctataatattgaattatattcaaaaaaacgattattagacatctatgaccctaatataaacattaaaaatattacaccatcgatgcaccaaaaattcataaacactttaattcaacgtggctacagtaaatcaacgctctcaaaaacacatcatttgatgaaacgtgcaatggaacgtgctaaatatgatagaatcatttattttaatccatgtgatggtatttcattacaacataaaaatttaaaagaaaaggttaaagctaaatatttacctagcgataaaattaatctttttttagaaatggttaaaaagcgggatatttatcaatatttcttatttagaacacttatagaaacaggtatacgaatcggtgaggcaaacgcactcaattggaatgattatgacaaaaagcttaaaacattatcaattacaaagtcgtatgatcaaaaaagaaaaaaatttggcactaccaaaaataaggaaaatagaatcatatttataagtgacaaattagcaaaggaactattcaagttgagaacacttcaaaatgcaaacaaaatagcaaatagtgaattatattatactgattatgattttatgttttgtaatgaatttggagacccacttccacgttctaccacccacaatacaatgaaatatgtaacaggtaaaatattaggaaagggcaatgaactaagtatacataaattaagacatacgcatgcaacattgttactagaaagtaatgtgcctatgaaagtaattcaggagcgattaggtcataaaagtgaattcataacaagcaacatttatagtcatgtcactgagaaaatgaataatactgcaaaagaaaatttcgagaaatatatacgtgatattttttga

SEQ ID NO: 409695 - DNA, 2607 bp, Staphylococcus aureus
gtgttaaaaaaatggttaaactcaaacgtcaaacaattcttggtcataactttcatgagcgtaatattaacgcttattttattttctactcatatctatgattatattgtgaatggtactgtttttagtggagctggagatggattccgtcaaatgatgccatttcaaatgtatttgtatgaacatctaagtagtttttctagtttatatgatgcatcgtttggattaggtggcgattatatgaaaggactatcatattattattcgctgtcaccattaatgtggctaaattttctatttattaaaataggagaaacgattggtatatttaatccgacaacaatacatttttggccgacaaaccaacttattatggctatgatacgagctatcataacgtttgtcgtgaccttctacttatttaaaatattacactttaaacgctcaacaaatatgatcgctacgattttatacggcatgtcaactgtcgttatatactttaattttacttggtcattttatggaaatttattatatttattgccattatcgattcttggtttggaaagatattttcaacaacgcaaaatcggtattttcattgttgcgatagccctaacactattcagcaatttttatttcagttattatcaagctattattataggttgctactatttatatcgactcattttcacttacaaatatgacattgtctctagaacacaaaaattaatttgcgtcatatctgctacagttttgagtgtattatcaagtgtatttggtttattcactggcatttctgcgtttttggaaaatgacagaaaacaaaatcccaatgttgatataccgtttttgacaccacttgattatcattattttttctttagcgatggatttttcattacgatttcaattcttactatcgttgcattattgtcattcaaactgtatcgtttttacttttatagacttttcgcaatagtaacatggatattatttattggttcattatcacagtatttcgacagtgcttttaatggtttttcatttccagaaaggcgttgggtttatatcttagcactatcatcaagtgctctttgcggattgtttattcaacatttatcaacattaaatatgaaatattatttaatcagaacaataccagtaagcatcatcgcattactttatgtattactatcaccgacacacccactcgcacttatagtaggtattatactgctaatggtgcttgccgttattttaaaatttagtttatggcgttataaaaaattaaccgttgcaatattagtattaatcgttatgattcaacaaatcgtcattttagataacaacaaaaatatggcaatcaaaccttatcaacaatcattatcaacgttgaaacaacacgattaccatagtaactatgtaaaccagcttataaaaaagataaatcaaaatgcaacaggcccatttaatcgcattgattatatgtcagactatgcattaaattcaccatttatatatcattataatggcatttcattatattctagtatttttaatggagacattttaaaatattatgacaagacactccaaattaatatgccaattgataaaaacagcacttatagactacttggcaatcgtcaaaatttactatcactttggaatgttaatgatcgaattagagtgaatcatgatgacaacttaccatatggatttaaaattaactctgaacacaaagacaataaagttcgttggattcattctaaaaataccatccattatccaagtgcacatattacaaataaggtcttttccaataaagaattaaaatctccattagataaagaacaagcaatgttgcaagggattgtttctaacaatactaaagatgttaatacacattttaaagccaataaaaatttactatcagattcaacaattaaattaaatagtgcagcctggcaatctcctacaaaacatttattacaagttaaacaaaataatggtggtctaactgtacagttgccaaaatcagtttctaatcaatttaaagatttgtattttgaaatggatttagaattactttcgccgtataaagctcatgatgttaaagtgaatgaatatacacaagaaagaaataaactcacttataaatatcgacgctttgtaaaacccgtaacgatacgcattaaagcttcagataggattagattatcattgcctaaaggtaagtatcgtgtaaatttaaaagggatatacggcgaagattataccacgcttaaagacgcttcaaattcattagaggctgtcaaagttagtaagacaaagcaaggttatactattactaaaaataaaaattcatctgggtatattgttttgccaacagcatataatcaaggtatgcaagcgacatcaggtgatcaaagtcttaaagttgaacaagtaaatggtgttatgaccggcattaaagcacctaaaaatataacaaagattcaattgagctataccccaccatactattatttacttataacaattactatatttggcattatatgtagtattattttcacgagatgggcaagacaaaaataa

SEQ ID NO: 409696 - DNA, 795 bp, Staphylococcus aureus
atgataattcaaagccagtttttaatggggcaatccttaactgattataattataaaaagcccttacaaagcgattaccaaattttagatgaaagtaaaaattttggttcaaatagtggatctttcgttatgtacagcatgaagaaagacaaatactatatttataatgaaaaagaaagtagaaaaagatattctcctgattcaacttacaaaatttatttagcactgtttggacttgaccgtcatattataagtgataaaaattcacgtatgtcatggaatcataatcattatcctttcgattcttggaataaggatcaagatttaaatacggcaatacaaaactcagttaattggtacttcgaacgtattagtaatcaattatcaaagaactatacttctgatcaactcaagcaattaaattatggtaataaaaatttgggaagttataaagcctattggttggaagatagtttgaaaatatctaatcttgaacaagtaatagttttaaaaaatatgatggaacaaaataaccattttagtaaaaatgaaaagaaacaattatcttcttcgttattgattagaaaaaatgaaaattatgaattgtatgggaaaacaggtacaggtatagtaaacgggaaatataataatgggtggtttgtaggttacgtaattacaaatcatgataagtattatttttctacacatttatcagatgaaaaagcctctggtgaaaatgctaaattcataaatgaaaaaatattaaaagaaatgggtgttttaaatggccaataa

SEQ ID NO: 409697 - DNA, 960 bp, Staphylococcus aureus
atggaaaatagagtttctaaaattttaaatatagagaaaccgattattcaaggaccaatgaatggattaaccaatgcaaattttgtagcatcagttagtgaagcaggtggtttaggcattttaggtccaaatgcaggcgaagcaagaattacgaattcaccatttgaaaccgcagaaaaaatgagattggaggtaaagaaagttaaaaaattaacgagtaaaccattcgcctcaacaattatggtaagcgaagatttatcatatacttcttatcttatcgacatgcttatagaagaaaatatatctgccgtcttaattaacggcatattagatcaaactatctttaataaacttaaagaaaataatattaaaataatattcagaccactaacacctacaattgaaaatgccattaaatctgaagagttaggagcagatgtttttgttgctacaggttttgatgaaggctgtacagttccagaaaaaattatcggtactttttcgattattcccatgattgctgatgcaataaaaattcctgtaatcgctgcgggaggtatcggtgacgtacgaggagttagagctgctttttgtctaggagctgagggcgtattcgttggaagtgttttaatcccaacttttgaaaacccagctgcggaaaatgttaaacaatatattgtcgattcaaatgctgaagatttaatcttatttcgaactattccatcctattatcgttcactacctggaaaactagctagagaattagaagaaatggataaaaatggagcaactaatgaagaattagcaaaacatatgggtggtggtcgaaatatgcgtcttggaatgttaaacggagatacagaaaatgggtatgtttctgtaggtactggtatcagtccaataaattctataagaagcactaaatcagtaattgatgacttgatgcaagatttcaactag

SEQ ID NO: 409698 - DNA, 354 bp, Staphylococcus aureus
atggttaaaatatgtaacgatggatttgatgaaaattttattgaagaacatagaaatctatatagcattgcatacacacaaaatgtgttatctggaagatataaaaatctaattatttggtacttaaaaacagagggaaaacgatttggtgaaattaagaaatttttcgcaaatatatctcaaggatcactaacaaaacagcttaaagaattagaatcagatggtattttaaatagagaagtatatgcagaagttccgcctaaagttatttatagtttgactgacaaaggtaaagatatcttgcccttaattgatttgatggagaaatacggtcggatgtatggtgataaatag

SEQ ID NO: 409699 - DNA, 1539 bp, Staphylococcus aureus
atgcttacaatggggacagcattaagtcaacaagtagatgccaattggcaaacttatattatgattgccgtctacttcttgatactaatcgttattggcttttacggttacaagcaagcaactggtaacttaagcgagtacatgttaggtggacgtagtattggaccgtatattactgcattatcagctggagcttcagatatgagtggatggatgattatgggtctacctggttctgtctatagcactggtctatcagctatgtggattacaatcggtttaacattaggtgcttatataaattactttgttgttgctcctagacttcgtgtttataccgaattagctggagatgcaattacattaccagatttctttaaaaatcgtttaaacgataaaaataatgtgttaaagattatttctggattgattatcgtagtattctttacattatatacacattctggtttcgtatctggtggtaaattatttgaaagtgcttttggattagattatcatttcggtttaatattagttgctttcattgtcattttctatactttctttggtggatatttagctgtatcaattacagatttcttccaaggtgtcattatgttaattgcgatggttatggtccctattgttgctatgatgaatttaaacggctggggaacgtttcatgatgtagcagctatgaaacctacaaatttaaatttatttaaagggttatcatttataggaattatctctctattttcatggggattaggttatttcggtcaacctcatatcattgtaaggtttatgtctattaaatcacacaagatgctacctaaagctagacgtttaggtattagctggatggcagttggtttattaggcgctgtggctgttggtttaacaggtattgcattcgtacctgcttatcatattaaactagaagatcctgagacattattcatcgtgatgagtcaagtactcttccatcctcttgtaggtggtttcttacttgctgcgattctagctgcaattatgagcacgatttcttcacaattacttgtaacatctagttcattaacggaagacttttataaattaattcgtggtgaagaaaaagctaaaacgcaccaaaaagaatttgttatgattggaagattatctgtattagttgtagcaattgttgccatcgcgattgcatggaatccaaacgacacaattctaaacttagtcggtaatgcttgggccggatttggtgcatcgttcagtccacttgtgctatttgcactttactggaaaggtttgacacgtgccggtgctgtaagtggaatggtttcaggtgccttagtcgttatcgtttggattgcgtggattaaaccattggcacatatcaacgaaatattcggcttatatgaaattattcctggatttattgtaagtgtaatcgttacatatgttgtaagtaaacttactaaaaaacctggtgcatttgttgaaactgacttaaacaaagttcgtgacatcgttagagaaaaataa

SEQ ID NO: 409700 - DNA, 945 bp, Staphylococcus aureus
atgagaaaactgataggcttcatattatgcacatcaatcatagtaagcggttgctctttcataccaaagaaccaaacaaaagatattccaaagacggttagcgtcaaagattatgatggtcaatatattggtgaacataaaaaaagaaatgaagtatttctgaaaaaacataaagatgaagcaatcaaaaaatataaaaactatgtgaaagatacttttggttatgattgtaaaattaatttagttaagccatatactaatgcttctgggtttagtgagaaaagcaaaacagatggtttagtagtcgtcggtactgtcaattatgacgttccttttcaattacgattactctttgttgaatctgataatagtgtaaccatcactacatttactccaggtcatgaaaataaaacatcagcggcaatttcagccatgatgtataaacggtatgaacatgaaatcgaacaagctcgattaaagtttaaatccgaagttgaaaaaaatggttactttgccatgaatgaaaaacttcaaataaaacaagaatataacggagttgtaaggcaatatttaaattttaaaactcctggaattgaaggtatggataaattcaaaaaagaattcaaaccgcttatgaatacatcaaatagtgattttaatcagaaatttgacgcgttgttaatgaagcaccctgaaattaaagatcaagctaaaactaattttattgcatattatagtaaaaacaaaactcgtgatatcgttggtgactatgtagtaaccctacaaaaacctactaacaaagtaatgaaaaattacccaggcattaaatttatgaaattttataaggatagtgtttccccatcacaacttgataagaatggtagattaaaacctgaagttgaagaagtttctacaattggaggggagtataatgaaaacaaataa

SEQ ID NO: 409701 - DNA, 2391 bp, Staphylococcus aureus
atgaaacataaactagatgttacgataaacgaattaagactaaagtcgattagaaaaatagtgaaacgcatcaatacatggagcgatgaagttaaatcatattctgatgatgcgttaaaacaaaagacaatagaatttaaagaacgtttagtatcaggagttgatacactagacacattgttacctgaagcttatgcagtggcgcgtgaagcgagctggagagtattaggtatgtatcctaaagaagttcagttaatcggagcgattgtattgcatgaaggtaacattgcggagatgcaaacaggcgaaggtaaaacattaacagcaacgatgcctttatatttaaatgcactttcgggaaaaggaacatatttaattacaacgaatgattatttagcgaagcgtgattttgaagagatgcaaccattatatgaatggttaggtttaactgcttcattaggttttgttgatattgtggattatgagtatcaaaaaggggaaaaacgtaatatatatgaacatgatattatatatacaactaatggacgtctcggttttgattatttaattgataatttggcagatagtgcggaaggaaaatttttaccacaattaaattacggtattattgatgaagtggactcaatcattttagatgctgcgcaaacaccattagttatttcgggcgcaccaagattacaatcaaatctatttcatattgtgaaagagtttgtggatacattgattgaagacgtgcattttaaaatgaagaagaccaaaaaagaaatatggctgttaaatcaaggtattgaagcggcacaatcatactttaatgttgaagatttatatagcgaaaaagcgatggtcctagtgcgtaatattaatctagcactgcgcgcgcaatatttgtttgaatctaatgtcgattatttcgtatataatggtgatattgttttaattgaccgtattacagggcgtatgttaccgggaactaagttgcaagctggacttcaccaagctattgaagcgaaagaaggtatggaggtttcaacagataaaagtgttatggcaacaattaccttccagaatttatttaaactttttggatcattttcaggtatgacagctacaggaaaattaggcgaatcagagttctttgatttgtattcaaaaatagtcgtacaagtaccaactgataaagcgattcaacgtatcgatgaaccagataaagtgtttcgttcagttgatgagaaaaacatcgcgatgattcatgatatagttgaacttcatgaaacggggcgaccggttttactcataacgagaactgctgaagcggctgaatacttttcgaaagtattattccaaatggatattcctaataatttactcattgcgcaaaatgttgcaaaagaagcgcagatgatagctgaagcagggcaaattggttccatgactgttgcgactagtatggcaggtcgaggcacagatattaaacttggtgaaggtgtcgaagcattaggtggattagctgttattattcatgagcatatggaaaatagccgtgtagacaggcaattacgtggtcgttctggtagacaaggggatccaggatcatcttgtatatatatttcactagatgattatttagttaagcgatggagcgatagtaatttagcggaaaataatcaattatattcattagatgcacaacgattatcgcaaagtagtttgtttaatcgcaaagttaagcaaattgtagttaaagcgcagcgtatctcggaagaacaaggggttaaagctcgtgaaatggctaatgaatttgaaaaaagcattagtatacagcgagatcttgtatacgaggaacgcaatcgagttttagaaatagatgatgctgagaatcgagattttaaagcgttagctaaagatgtatttgaaatgtttgtaaatgaggaaaaggtgctaacaaaatcgcgtgttgtcgagtatatttatcaaaatttaagtttccaatttaataaagatgtggcttgtgttaattttaaagataagcaagcagtagtgacatttttattagagcaatttgaaaagcaagtagctttgaatcgtaaaaacatgcaaagtgcatattattataatatttttgttcaaaaagtctttttgaaagcaattgattcatgttggttagaacaagtcgactatttacaacaattaaaagcaagcgttaatcaacgacaaaatgggcaacgtaacgctatttttgaataccatagagttgcattagattcatttgaagttatgacacgaaatatcaaaaaaagaatggtgaaaaatatttgtcaaagcatgattacatttgataaagagggtatgccagttatacattttccataa

SEQ ID NO: 409702 - DNA, 1509 bp, Staphylococcus aureus
atgacaatatataatataaactttggtataggctgggcaagtagcggtgttgaatatgcacaagcttaccgtgctaaattattgagacgtacaaatcaagacactaaatttgtgtttttagattttatacagtcagagaacatacagacattaacgcaaaacattgggtttgaagatcaagaagttatttggttgtatcagtattttagtgatatttctatagcaccaacaacgtacacgttagatgacattgaacgtgagcttggtcatgatattagttttagagaaagaaatggtaagatagtccgcctatattttaatgggaaatcatcatttgtaacatgttatctgcaaaatgagcaaaaagacattgtggatcgtgcagaatttgtaattaatagtatgttagtacgtaaagatttttatagttatacacgcatattttctgagtattatgcaccagctgataataaagcgaaattatatatgcgacaattctataatgaagatggttccatcgcttataacgaatatattgatggagacagctctatatatgtgtttgaagatgcggtgttgtataacaaaacggaatttattgcatactttttacaacgattgaatttaacccgagacgatattgtcatattagaccgcgcttctgatattggtcaggctgttttgcagcataaaggtgatagtaaagttggtgttgtgattcatgctgatcattatagtaataatatgatgagtgagcagcatatactatggaacaattattatgaatatcaattttcaaaagctaaatacattgatttctttattacagcaacagatattcaaaatcatatggtttgtcgacaatttgagcaatatcaaggttatcgcccacgtgtttatactattcctgtgggaagcattgatgtattatcatatccaacattatcaagaaagccatatgcgatgattagtgcatctcgtttagcaaatgagaaacatattgattggcttgtcaaagcagttatcgtggctaaacgacaagtgccagaattaacatttgatatttatggagaaggtagcgagaagacgcgactgcgtaaaattattgatacacaccgcgcgcaagattatattcgtttactagggcatgttaaacttgatgaaatttatactgattatgagttatttctttctgcatcaactagcgaaggttttggattaacactaatggaagcggtaggctcaggactaggtatgattggattaaatgtgaattatggtaacccaacctttattcgagatggggaaaatggctacttggtaccttttgataccgatgaagatagtgtggatgatgttgtcgcaaaactagctcatgccattgtaatgtattttaacaatggtcctcagacaccacatgacatctcttatgaagtggcacagcaatttatgactcaagatattattttaaaatgggaaacattagttcaagaggtgctgcatgattaa

SEQ ID NO: 409703 - DNA, 1359 bp, Staphylococcus aureus
atgattaaattatttgattactttaacaatcattcacgaaagttatatgagtcttttaaagccagtaagttagaggaagatttaacaattgtactcaatgacaatggctttttaccggacgatgttatatcaccgtatcaattttttgcagataatcataattcagaaaatatgaaaccacgattttttaatcaggttactgtaccagctttttgggaaattaaaggtaacaacaattcggctacaattaatgatatgggacgtctacgaggcaaaatattttatcaaagtggagagcgccctagaattgttagtcgtgtcgaatggtttgatgaccaacaacgtgtccgatttgtcgattattattctaagaatggtattaaatttgcacaaactgtttacgatttaaatcgtaaagcgatcttgaagaaatatatgacagcagaaggtaaagaagtgatttatgaaaattttgtaacatctgatgtcatattggattggcaagggaagtcttactttttcccttcaaagctcgcattcgtattattttttatcaagcaacttgaaattacggaacatcatttcgttattaactcactagccctaccattttcagtgttatataatttgccatcaaatggtagtgatgttttggtatggcaagaacagtgcgatggtaatgtcccaggaaatatgcaattgatgtgtaaaggtgatatgaaacgacattgtaatattattattccagataaaaacgaatatgaaacgatgctcaatatagcagacgcaaaggttcaatctcgtattttacaaggcggatatctatataattatcgtagtcgtaatagatatactaaagaaattgtaatattaactaactcggatcaacttcgtaacatcaaggtattggttgaaactttaccagattttaagttttacatcgctgctattacagagatgtctgataagctaatgcaacttgatcaatatgctaatgtgcacttatacccatctattaatatagacagggtaaatgaactataccagttatgtgatatttatcttgatatcaatgagggtaatgaaattttaaatgcggtggaacaagcgtttgactatgagttgttgattttaggttatcgtcaaacagcacaccatgctaaagtaacactatcagagcacttatttgagcataatgatgagataacaatggaaagtaaagaccaattaatacaaatgttagaaagtttgaaagatcaacaacagtttcgagatgctttattagcacaaaaagcacatgcacacgaaatctcgcgtgaacaattcgagcaagtttttaaacaggcgcttgaaagctaa

SEQ ID NO: 409704 - DNA, 156 bp, Staphylococcus aureus
ttgcgatatatagcaacttgggaaatgaaagaaatagaatatttacatttagagaatgaagataaagaagatatactttattttgaaaaagaggatgataaagtaatagcagttacaaatattttatggactggctctggtttcaacgatatttga

SEQ ID NO: 409705 - DNA, 315 bp, Staphylococcus aureus
atgatattcgatagatatagtattgaatgtttgcaaactgaggttgaaggacagctttcgagtaaagaggaggattttcgagtagtattatttaataagaattacaagttaaataaaatacctactaatcagaagttgtcagagattgtagaatttttatcagatggtaagttagcaagtaggctagaaattcaagaaacaatgggacttcaaaaaagttatacatctgagttaattgctgaactgaagaagttagagattatcggatctgaaggtagaggtccgggaactagatattatttaattagagactaa

SEQ ID NO: 409706 - DNA, 684 bp, Staphylococcus aureus
atgaaattaaaaaatattgctaaagcaagtttagcactagggattttaacaacagggatgattacaactactgctcagccagtaaaagcaagtacattagaggctagatcacaagcgactcaagatttaaaagattattataaaggacaaagttttgatttgaaaaatataggaggatataaggaagggaacaaggttactttcatatatcacaatcaacaaattgatgtgacactaacaggtaaagaaaagctagaatttaatgacgatgaagaaatatctaatattgatgtatttgtggtcagagaaaattccgacagatcaggtatcacaaattctaatggaggaataacgtattctaataagcaagataacatagataatgtcaaaagtgtgaacatgcaaataactaaaaaaactagtagtaatactgaaactgtaacttcatcttattacagtatagataaagagaatatctcattaaaagaacttgattttaaattaagaaagcacttaatcgacaataacggtctgtataatacagaacctaaagacagtaaaattaaagttactatgaaagatggtggattctacacgtttgaattaaataaaaagttacaaactcaccgtatgggtgatgtgattgatggtagaaatatagagaaaattgaagtgaatttataa

SEQ ID NO: 409707 - DNA, 624 bp, Staphylococcus aureus
atggataatgaaaaaggattgttaatcgttttatcaggaccatctggagtaggtaaaggtactgttagaaaacgaatatttgaagatccaagtacatcatataagtattctatttcaatgacaacacgtcaaatgcgtgaaggtgaagttgatggcgtagattacttttttaaaactagggatgcgtttgaagctttaattaaagatgaccaatttatagaatatgctgaatatgtaggcaactattatggtacaccagttcaatatgttaaagatacaatggacgaaggtcatgatgtatttttagaaattgaagtagaaggtgcaaagcaagttagaaagaaatttccagatgcgttatttattttcttagcacctccaagtttagatcacttgagagagcgattagtaggtagaggaacagaatctgatgagaaaatacaaagtcgtattaacgaagcacgtaaagaagtcgaaatgatgaatttatacgattacgttgtagttaatgatgaagtagaacttgcgaagaatagaattcaatgtattgtagaagctgagcacttaaaaagagagcgcgtagaagctaagtatagaaaaatgattttggaggctaaaaaataa

SEQ ID NO: 409708 - DNA, 219 bp, Staphylococcus aureus
atgttaaatccaccattaaaccaattaacgtcacaaattaaatcaaagtatttaattgcaacaactgcagcgaaaagagcgcgtgaaattgatgaacaacctgaaactgaattattaagtgaatatcattcatttaaaccagttggtagagcgttagaagaaattgctgacggtaaaattcgccctgttatttcaagcgattattatggtaaagaatag

SEQ ID NO: 409709 - DNA, 1128 bp, Staphylococcus aureus
gtgagcgtaaatgcacgtgatttattagtattacacaataatgtaaatagattggttggagaagagatatttgctaataagtgccttgctaataatgatgttcaaattatgaattcaataaaaaaattaattgaagctgagttattaacaacgactaatgattttgaagttagtatatataaaaagacaagacctgaattacaaagtattttaaaaagttttggtataaaaacaacaggtaataaacctgacttaattaaacgtattgacgacaattttcatattattaataacttagatttaccatatgtatatataccaactaagaaaggagaagaaattttaaagaaaacagagtacttaacatcttttatatacagttataaaatttctcttgagcgtgcttattatatggttgaaaattatatagatgaaaattgcgatgataaagttgcagaaatatacaaattcgaatttcaaagaaaatatgacaatggcgagtttgattttaatcatggatataatttcgaattgaatatgttgatagatcactataaaagagatgtaaaagactacgataatgccagaaagtattcaaatatttatctttactttggtttgagagatttcttaaaaaaattaatgagtaattattcatattacgatagtaaagggaatatagatttgaacgaaatacaaaacgatctgaatagatttatcaactctagcgcttctggtatgtacgagcgattaatatataatgaaaatttatccaataatattatgtttgaattatttaaaaaggacacacaagattatagtgatttggaagaacaattgattgaaaagttcattaactatgtagtgtcttatgttaaaaaagaaagtaggagtaatacgcttatagagttatcaaaaatgttggagaaaggatatacaattgataaagaaaaatttaaaaaagaagacgaatatctttctaggtatataattactgacataaattatttgaaaaatctagaatcaaaaataggtgttgccattgatagtcgaaatggagaaattcatttggtattagatgatgatagccttgataaattaataaaaaatcaaaaaaatcgacaatga

SEQ ID NO: 409710 - DNA, 1545 bp, Staphylococcus aureus
atgaaaaaaatatataagtcattaactgtctctgcaattgttgcaacggtatcattaagtgctttaccgcaatctttagctataacgcatgaatcgcaacctacaaagcaacagcgaacggtattattcgatcgttctcatggtcaaacagctggtgctgcagattgggttagtgatggtgcattttcagattatgcggattcaatacaaaaacaaggttatgacgttaaagctattgatggtcattcgaacataacagaagcaagtttgaaaagttccaaaatatttgtaattcctgaggctaacattcctttcaaagaatcagaacaggcagcaattgttaactatatgaaacaagggggaaatgttgtctttatttcagatcattacaatgctgaccgaaatttaaatcgtattgattcatcagaggcaatgaatggttatcgacgtggagcgtatgaagatatgtcgaaaggtatgaatgcagaagaaaaaagttctactgcaatgcaaggtgtgaaaagttcagattggttatctacaaactttggcgtacgttttcgatataatgcactaggtgatttaaatacgagcaatattgtttcttcaaaagaaagtttcggtattactgaaggtgtgaaatctgtatctatgcatgccggatcgacattagcaattactaatccagagaaagcaaaaggtattgtgtatacaccagaacaattgccagcgaaaagtaaatggtcacatgctgtagatcaaggtatttataatgggggcggtaaagcagaaggtccctatgtagcaatttctaaagttggaaaaggtaaagcagcatttatcggtgattcatcacttgtggaagatagttcgcccaaatatgtaagagaagataatggagaaaagaagaaaacatatgatggttttaaagaacaagacaacggtaagctattaaataatataacggcttggatgtctaaagataatgatgggaaatcacttaaggcgagtggcctaacattagatacaaagactaagttgcttgattttgaacgaccagagctttcaactgagcctgaaaaagagccatggtcacaaccgccgagtggttataaatggtatgacccaacaacatttaaagcaggtagttatggcagtgaaaaaggcacggatcctcagccaaacacaccagatgatcatacgccaccaaatcagaccgaaaaagtatcatttgatatcccgcaaaatgtttctgtaaatgagccatttgaagtgacaatacatttaaaaggatttgaagcaaatcaaacacttgaaaatcttagagttggtatttacaaagaaggcggacgtcaaatcggacaattttcaagtaaagataacgattataacccgccaggttacagtactttgccaacagttaaagcagatgaaaacggaaatgccacaattaaggtcaatgctaaagtacttgaaagtatggaaggttcaaagatccgtttaaaactcggtgacaaaaccttgattacaacagacttcaaataa

SEQ ID NO: 409711 - DNA, 540 bp, Staphylococcus aureus
atgaataaaatcaacaaaattttattgccttttttcattttagtattaaccattagtgttacaactttaccaattagtcaaacaagaatagcaaatgctcaaaattcaaaccttccgagtaaagaagaaattaacaaaacagcgtctataataaagttcatatatgaagaagcatctacaaaagatgggaatggcaatataatagatattgatgttcaaaaaatagaaaaaaaatatcataattcaaaagaacttgaatccttgaaagaagaaatcaacacaattaaatccactttaacacctagatcttttagcgataaaaaattcatgagttgcattaaaagtgcggtggccgaccaatttggcgtcggtgttgtaaaatctattatggaaggcgggttttatacatatatgaaaaagaaagcatataaagaagctgcgaagttaatattaaagtttgctataggttctaatatcgtaggactttcagcttttgtagcatattatggtggtaaatgtgccgctcatgcaaatagttaa

SEQ ID NO: 409712 - DNA, 225 bp, Staphylococcus aureus
atgaatttaacaaaatccatttttattctagtttatttaataagccctatttcgtatctaataatatacagtatttttactttaataagaaaaaacgatattcttatatctatataccaaatattaccaatgttggctatatattatttagtcgctagtgtaatagcttcaattttttttgaaaaaatcattaaaaagattcaagatgtcaatgaaaaagagtaa

SEQ ID NO: 409713 - DNA, 477 bp, Staphylococcus aureus
atgtctggggtatttaattatcaattccgtttaaatgttgttttaatatttaaaattgattttttgatatattactatgtctggtacacaaatcaatgttttatgctttacaaagttatatcggcagtagtatactgcgggcctcaacatagaagcttcggtatgtcagcttacaataacgtgcaagttggggaaacggaccacaacatagtgaaatcggatttccaatttctacagacattgcaagttggggaaacggccccaacactgaaactggctgaaagtcatcttagaataacgtgcaagttggcgggcccaaacatagtggaattggatcctcaatttctacagacattgcaagttggcggggcctcaaactcagaagctggcgaaaagtcagcttctatgaatataataaaaaagctaggtaacaaaatgctacctaacttcatattcaagattatcaatcctatttga

SEQ ID NO: 409714 - DNA, 366 bp, Staphylococcus aureus
atgaaagcatcacgcattctattcggtatcggtgttggcgtagcagctggttttgtagttgcacttcaaggacgagacgacaaaagtgtcaagaacaacacaatcgatcgtactgcccctactggttcaaaatcagaactacaacgtgaatttgaaacgattaaacaaagttttaatgacattttaaactatggtgttcaaattaaaaacgaaagtgcggaatttggtagttcaattggtggtgaaattaagtcattacttggaaacttcaaatctgacatcaatcctaatattgaacgtttacagtcacacatcgaaaatttacaaaatcgtggcgaggatattggaaacgaaatttctaagtag

SEQ ID NO: 409715 - DNA, 423 bp, Staphylococcus aureus
atgtcagaaacaattttcggcaaaattttaactggagaaattcctagctttaaagtatatgaagacgattatgtctatgcctttttagatatatcacaagttactaaaggacatacgttattaattcctaaaaaagcttctgctaatatctttgaaactgatgaagaaacaatgaaacatatcggtgcagctttacctaaagtagcaaatgctattaagcgtgcatttaatcctgatggtttaaacattattcaaaataatggtgagtttgcagatcaatctgtatttcatattcatttccacttaattcctcgatatgaaaatgacattgatggatttggttataagtgggaaacacatgaagatattttagataacgatgcaaaacaacaaattgctgaacaaattcaagcacaattttaa

SEQ ID NO: 409716 - DNA, 741 bp, Staphylococcus aureus
atgacagttaaagtagaacagcttacaggtggatatggaaaacgccctgtaattaaagatataaattttgaattaaacaaaggcgaaatcgttggacttattggccttaatggcgctggtaagagtacaacgattaaacatatgctaggattgcttacacctatggaaggatctctatcaatttcagatatcaacattaatgatgacatagaggcttatagaagaaagttatcttatattccggaatcaccggttatttatgaagaactcacattagaggaacacattgagatgacagcaatggcatatgatattgatcgtgatgaagcgatgaatcgagcaatgccattattaaagacattccgtttagaaaatgaattgaaagtttttccgagtcatttttctaaggggatgaaacaaaaagtcatgattatttgtgcgtttatcgttaatcccgaattgtatattatagacgaaccattccttggtctagatccattaggaattcaatccatgttagatttaatggttgaaaagaaaaatgaaggtagaaccgttctaatgagtacacatattttagcaacagctgaacgttattgtgatcgttttatcatactagacgaaggtgaagtcgttgcatttggagatttagaagcattgagacaacaaactggcttacataatcaaacgttagacgatatatatattcatgtgacgcaaggtggagatgtacatgcgtaa

SEQ ID NO: 409717 - DNA, 1224 bp, Staphylococcus aureus
atgcgtaaccaagcgaccacattatttaataaaagattacatgcccttcgtaaagagaaaaattattataataagtttatatttaatggtcatttcatggtctttttacttattttgctgggtgcatttatttttggatatggtgaatggttaaaacatattccaacgaatatcaattttgcattaatagcagcagtgattgttgcgttgacatccatttttccaatgcgaccactcctaaaagaagcggataaaatctttttattaccatttgaaaaacacatgtctcaatttatgcgccatgcgattttatatagttactttgcgcgcatattaatccaactcattattgttattgtaatgttcccgttgttttacaatattaatcaacataatgtgacattttatatttgttttggagtcagtgcgttaatttttccatatgttggtttacgcttaagatggcaatggtatcaatcgggacttaaaacatggcaagttaatttaatatcattcatcatctttgctctaacatattacttactattagctccaaaatggtacatcgtatttgtgatggttgctttgcctgtgttaatagaatttttagttaaaaaatataaacctggctttttgtatccttgggagaaaatgattgcaatcgaacatcgacatcatatgaattattataaatttgttaatatgttcaccgatgtaaaacatttgaaggaatctgcagtcagaagaagttttctagatatacttttaccagttccaaagggtagtaaatttaactctaatgcgatgtatttattcttatttattagaagctttataagagggagagacgcatttaatattatctttagattagtaattattgcagttttacttatggtttggttatcatatccattagtgacagcaattattgggtgtttatttgtatatattatattgttacaaatggcacaattttattctcaacaagcatatggcttatggcctcaagtgtggcctgtacctgaagagaaggtaatcaaagggtatgaacagtttttatatagattgatgtttgttatttgtactgtgttttcagtgacatttattataaaacatatgacgttattctatgttgtactcattttctatattgtaggtttattaacgattagaagtattattaaaaagttaaaatatcaggaaacattattacgagactaa

SEQ ID NO: 409718 - DNA, 1125 bp, Staphylococcus aureus
atgaagatagcaattataggtgcaggcatcggtggattaacagctgctgcattattacaagaacaaggtcatactattaaagtcttcgaaaaaaatgagtcagttaaagaaattggcgctgggattggtatcggagataatgtgctaaaaaaactaggtaatcatgacttagctaaaggtattaaaaatgctgggcaaatcttatctacaatgacagtgttagatgacaaagatcgcccgttaactactgttaaattaaaaagtaatacattgaatgtgacgttaccacgccaaacattaattgacattattaaatcttatgtaaaagatgattcaatatttacaaattatgaagtcacgcatatagataatgagacagataaagttaccatacatttcgcggaacatgagagtgaagcatttgatttatgtattggtgctgatggaattcattctaaagtgagacaatctgtaaatgctgacagtaaagtattatatcaagggtatacatgctttagaggtttaattgatgatattgatttaaagcatccagattgtgcaaaagaatactggggaagaaaaggaagagtaggtattgttccgttattaaataatcaagcatattggttcattacaattaactcgaaggaaaacaatcataaatatagttcgtttggtaaacctcatttgcaagcatactttaatcactatccaaatgaagttagagagatcttagacaaacaaagtgaaacaggtatcatattgcataatatttatgatttgaaaccactcaaatcttttgtttatggtcgtactattttactaggagatgcagcacatgcgacaacgcctaatatggggcaaggtgctggacaagcaatggaagatgctatcgtattagtaaattgttttaacgcatacgactttgaaaaagcattacagcgttatgataaaatacgtgtcaaacatactgcaaaagtaattaagcgttctagaaaaatcggtaaaattgcccaatatcgtagtcgtttagttgttgcagttagaaaccgtattatgaaaatgatgccaaatgcattagcagctggacagactaaattcttatataaatcgaaagaaaagtaa

SEQ ID NO: 409719 - DNA, 741 bp, Staphylococcus aureus
atgagaattttaaatttagttaagtatgatctttatagtatttttaaaagtcctttaacatatttagcgatactagtcgtatctagtttgattgcaactcaaagtatacttatggcaaattcgatggataacccgaaacatattattgtctatggatctgtatttgctgcagcaaaatggttattgttaataattggattaatgtttgttgttaagacaattacgcgtgatttttcacaaggtacaattcaactatatatgagtaaagttaaaacacgcgttggatacattatttcgaaaacaatttcaattattttaatttcaatattatttgcattaattcattatgtgattttgattgttgtgcaggcatctagcaatggaaaaaatttggcgttttctaaatatgtagataatttatggttcttcctaatctttttactattctttggcttgtttttattcttaatcacacttgcatcacaaaaaacagcaatgatattttcattaggtgtatttttagtactcattgtaccgtttattaaaccttttattacatttatcccaagatacggtgataaagttttagatgcttttgattatatcccttttgcttacttaactgataaaatgattagctctaactttgattttagcaattggcaatgggtaatttcattaggttctatagtgatattcttcattttgaatatcttatatgtcgctaaaaaagacatttaa

SEQ ID NO: 409720 - DNA, 843 bp, Staphylococcus aureus
atgaagaaattcttttttattgggcttttagtgtttgttgtcttttttacagcagcaaccattatttggttcagctatgataaaaacaaatatggtactaaacaatatgataaaacattcaaagacgatgcttttgacaatgtatctataaatttggatagtacagaacttcgtataaaacgggggaatcaatttagagttaaatatgatggtgacaatgatatattaattaatatagtagataagacgttgaaggttagtgataaaaggtctaagacaagaggatatgcaattgatatgaatccttttcatgagaataagaaaacgttaacgattgaaatgcctgataaaatgatcaaacgtttaaatatatcgtctggagcaggaagtgttagaatcagtgatgttgatttagagaacacaagtattcaaagcattaacggtgaagtagttattaaaaactcaaatcttgacgcactagattcaaagacaaataatagtcctacttatattagtaaaagtaacattaaaaatagtaatattaaagttgttattggtacgctacaaatcgacaagagtcaaattaaacaatccatatttttaaacgatcatggtgacattgaatttaaaaacatgccatcaaaagtagatgcaaaagcttctactaaacaaggagatattcgttttaagtatgatagtaaacctgaagatactatactaaagctaaatccgggaacgggtgatagcgtagttaaaaataaaacatttactaatggtaaagttgggaaaagcgacaatgttttagaattttatacgattgatggtaatatcaaagttgaataa

SEQ ID NO: 409721 - DNA, 300 bp, Staphylococcus aureus
gtgtataagagacagatttcaattactggtatttttatcaatgaagttttatgtgatacagatgaaaaaattataattaaaataaatgatgaaccaacccttaaaactcaatcaattccatttctaattgagagttatggcgctaaaaacttttattgttattttaaaaaacatgaaaatatttatttttataaaaatctaaacttagagattagaacttctcgtggaatagtaactgctaaaattgatacttcaaatcaatttctatttccaattacagatttattaaataagtattaa

SEQ ID NO: 409722 - DNA, 306 bp, Staphylococcus aureus
atgaagaatttaatacataaagtagaggaatggagtattgaaaaaaatttacatttagctaaaccagatcgacaagcacttaagtttttcgaagaagcgggagaaattgctgctgctttatcgagaagtgacaaagaagctctaaaagacgggataggcgatactgtagtaactctaattatactagctcaacagcaaggatggacattagaagaatgcttacagtatgcctatgatgaaattaaaaatcgaaaaggtaaaacaattaacggtacttttgtaaaagaaacagatttatataagtaa

SEQ ID NO: 409723 - DNA, 390 bp, Staphylococcus aureus
atggaatttaaatttttagataaaaatggaaaagaaacattaattgtaaaacgcttaacttacaatacatataccttaaaaggtaaagaaaacacacagttaagcaatataagtttgcaaacagatgcaattggtgtaatggaatataagaaaaatttcaacttatatactcaattagaatacgaaagagaattaagtactaatacaagaattgaatatacagttttggatttgttaatcagtgcaaattttaatctaaataaagttaatacaggaaatttaaatgaagataacaaaagggattcaattggcaaacatcaattgtctatggcagttgaatttatttcaaaaggtttagatttaagttcaccaatcaaagtagataaataa

SEQ ID NO: 409724 - DNA, 1719 bp, Staphylococcus aureus
gtgattgcgatacttttttatgattttgaagtttttaaatatgattggttagttgtcattgttgattcagatactaaacaaactcatacaattataaatgacacagaagaattaacggatttttataagaaacataaaacagatttttgggttggatataacagtcgagattatgatcaatggattttaaaaggaatactgtcaggatttaatcctaaagaaattaatgattttattgtgaaagataaaaataagggttggcaattttcaagagtattacacaaaatacagttgtttaactacgatgttcaaacagggttccattcattaaagcaattagaagctttcatgggtaacgatataagagaaacaagtgtaaattttgatgtagatagaaaattgactgaaagtgaaatacatgaatcagttatatattgtaaacatgatgtagaacaaacaattcaagtgtttatgaagaggtttgaagaatttgaatcacagattgctttaatacaaacttttaatttacctataaaatatatcaataaaacgaaagcacaattaagtgctttaatacttgaagctcaacaacctaaagtaaaacgtgatgatgaaatggacttttctatacccgatactttaagaattaataaatatcatgaagtgatcaatttttaccaaacaacaagaaattataatcaaacactaaaattaaatgttgcaggaataccacatgacttcgcatggggtggattgcatggagctagaaagaattattttgctaaaggttactttttaaatgttgatgttcaatcttattatcctgcactaatgattgagtatgactatttaagcagaaatgttcctaataagaaaaaatatcgtcaaataagagatagacgactagaattaaaagctaaaaaagataaacgacaagcgccttttaagattgttttaaatagtacctatggagcgatgaaagataaacataatggtttatatgatccaaggcaagcaaataacgtttgtgttgctggcatgcttttactacttgatttaatcgaaaaattagaaccacattgtgaaattattcaaagtaatacagatggtattttgattaagatgcacaaactagaggattttgaattaattgatgatatctgcttcgaatgggaaactcgcactcatatggaattagaatttgaccatttcactcatgttattcaaaaagacgtcaataattatattttagttaatgaaagaaaaaatatttataaatctaaggggacatacgtaaaaaaattaaatgatttagataatgacttacctatagtaaacaaagctgttgttgattattttattaaaaatgtaccagttgaaaaaacaataagagaatgtgatgatttaattcaatttcaaaaaatagtaaaaatcagtggtaagtaccagcatgcaatttatggtaatcaagtgatgaacgaacgagtatttagagtttttgcgtctaatgatataaatgataaatcattaatgaaagttaaaaataataaaactgaaaagataggttacacaccagctaattgttttattgataatcgaaatattataggtaaaaagacacctcgtcaattggataagagctggtacattacaattgctaagaagcgaattaatgattttaaaggcgaacaatatggacaactcggatttaatatttag

SEQ ID NO: 409725 - DNA, 483 bp, Staphylococcus aureus
atgactgaaacgattaactgggataaatttgataaacaaatagataatgaagaaattaaaaatgcaattaatgacgctaaaaacagtgattttcctgatattccggatggcgaatatgaagtagcattagaaaacatggtattaaaacaaagtaaaaaaggcgacccaatgttaacaattacattcgttattttagaaggcgaatttactgatgagaaaatttggtacaacggtgtaatgcaaccaagtaatgataaagctattggttaccaagtacataaaaacaatgtaatgctacgaagtttattagaccaaggtgaagaagatgagagtacagtattctttaaaggtttcaaacaatacaatgatttagtgttagatttagcagaagaattagttgattcagaactcgcattagaaatcaaaactgataaaaaaggatatcaacaatacaaaattactgaagtgtttgaaacagaataa

SEQ ID NO: 409726 - DNA, 207 bp, Staphylococcus aureus
atgagaagagaattaaatacaacagaacaacattttgcaacaacacgatcagaagcacaacgaattattgaagaagctagagatgaagagaaaagtaacttaacatcacaaacgattgattgtaagaacaataagtacggtgaattttatgtggtcacacttaagttcaccttcaacacaccaaaagatattatggcatatgaataa

SEQ ID NO: 409727 - DNA, 1827 bp, Staphylococcus aureus
atgcaatttagttattcaagagttgatttatttaaacgttgcccttatcacttcaaattaagatatatcgataaactcactgaattaccaaactatgaagcaaacagcccacttatagttggtcatgcattacacactggtatcgaaaaaggcaaagacgcaatgcttaatgaatacttcaatgctttcccaattgtcactgatgatgtcattaatgaagcaattaaattagaacataaccttgaaaaagcagaaacgtggttagcaaaaattgatactaatatcaatttttataacgattatgagtttatacatgagtttcaaattaataaacctgaattcattgggtttgttgatttgatagttaaacgaaaagctacaaatgacattgccatcattgatttcaaatatagtaatgcagtagataaatataaagaatcgcctcaactccaaatatataaacattacttagaagaagaagggtacaacattatttcaatggggtacttatttttacccaaatcaaatataagacaaaagaaagatgaaagtattattcaatttagaaataggttacatcaaacaatgaaaaaattaaaagtgacttttatcaaaattgaaccacaagaaatggatatcatttatttcttaaatgaatgtagggaaatctctaatgctattcgaaataaaacatttgattggttagaaaatccaaaagatgaatgttttgcttgtaatcctagatttgcacctgagtatttagaacaactaagaaatgaagaaggagaattaattatgacactacctaagaatatacgacgagagaagaaaattgatgaacgtcctgatttttggatttatggagattcctatgtaggaaaatctacatttgtagaccagtttgatgacttattatttttaaatactgatggtaatactgataatacaacgtcgcctgtagtatacattaaagatgaagttactaaagaaggtagaattacgaaacgtaaatttgcgtgggaacaatttttagaaattatttcagaattagaaactgatactgaaagtggttttaaagcaatagcaatagacttattcgaagatttaagagagcattgtagaatttacgtgtttgataaaaatggttgggaacatgagtcagatggtggttatgggaaaggttgggcaatggttaaaacggaatttaataatgccattaaacgacttaaaaatttaggatatcaaatcatatatattagtaaagaagttaaatcagaaacaacgctaaaaggtggagcaattcgcactaactttataccaaacattgacgataagactgctaacttcacaacgggtacggttgatttaacagttcgagcttttattaatggagatggcgaacgtttattacaactatcgaaacagcgtaatgtgttcggtggtggacgtttcaatttcttaaatgatacttgtgaattaaataaaaatgaatttgtacaagaattagtagcagctcaaaaagcatcacatgctaaagtcacgtctaaaactaaaaagcaagttgaaccaatttctacagaaattattgaagaaaaacctaaaacaaaacgtggaagaaaaaagaaagaatccgtagaagttgaagaagcagttgaacaagtaccaccaggcgaagaagaaacagaagaagtcattgaagaacctaaacgaaaaactagaaaacgaaaatcatctactaaagaagtagttgaagaagcaaaagaagaaaatgaaacagaagatgaacctaaacgtactagaagaagtagacgtaaaaatgctgaatag

SEQ ID NO: 409728 - DNA, 306 bp, Staphylococcus aureus
ttgactaaacattataaaaatgaagcggcttttcaaaaagacgtaatgcaatttttaaaatcacaacctaatgtatttgcagttaaatattgggcaggtaaccaatttactgtaaatggaatacccgacatattagcttgtatcaatggtcaatttcatggtattgaactaaaaactaatactggaattgttagaggtatacaaaaagaatgtatgaaccaaattcgtgaagcaggtggttatgcatatgtgttacgacctaaagattttcaaaattggaagttgaggtggtttgatgcaatttag

SEQ ID NO: 409729 - DNA, 312 bp, Staphylococcus aureus
atgaatagaagtaagagatatacagaagaaattttaaatgatacaagatggaccaccagagaaggtgatgttttagagcctataacaatggaggaggagcatattcaaaatactttgaacttattgtacaaaaaccgagatcaattacggttaggttgtagaaactttaaattaatagatgtttatgaaaatggtgaagatttcttccaaaaagtaattcgaaaatctactatttggaattcattgattaatgcgttagataaaccagctacaaaatttaatttcgaatatgaaggtggtcatattgactaa

SEQ ID NO: 409730 - DNA, 1251 bp, Staphylococcus aureus
atgaatgaaattaagctttatgctcatcaacaaaaggcactcgatatgacagaacaacataataaagttgcttactatcttgatatgggtttaggtaaaacatttgttggttcagaaaagttgtgggaattaaataccccctacaatttagttgtctgtcaaaaatcaaaaataactgattggtaccagcattttaaagattattattcagatgattatgaaatcatcatttttgataaacaacgtattgagaatataaaaccaaatagtattttaatcattaattatgaaaaagctatagcgagacctgaactgaaaaaattaaaaaaatttacattgcttttagatgaatctcaatatatcaaaaatcctaaatcaaaacgtactaaactgattgtaaatgaattaaatcccgacaatatcattttattaagtggtacaccaatcgatggtaagtatgaagaattaataactcaaattcacttattaggatggaagattaaagagagtatgtttttgtctcattatacaaatagacaatgggacgaaaatgaaatgaagtataaaatcattggttataaaaatatagataggttgaaaaagaaattacgacaatatggttgtgtgtttatgaaaactgaagaagtttttgatttaccaactcaaactaatattttcttaaaaccaaaaaagacaaaagaatatgatgaatttattaaagaaggtattgtcacactatctgatagaaaattaattgcagaaacggcatctgtaggtaatatgaacgcaagattactttgtactgcatttaatcaaaataaattagttatgttaaaagaattgattgaaagtactgaagatagattgattattttctatcagtacaatttagaaaaagaagcaattgaaaatatagtggatgaattaagtaaacctatatcttatatcaacggtgagatagtagataaaaaatcatatgagaattgtaaaaacagtgtgacactcgtccaatatcaaagtggcagttttggtcacaatcttcaaaaagcaaataaaatcatcttttttggtttgcccaatcgcgtttcatattttgaacaaagtaaaaaacgaacgcatcgtatagggcaagaaagaccatgcttttactattacatgttaactctaggtacatatgaatggaaaaactatcaaactttagtcgatggcaaagattacaatgatgaattatttaaggaggcatcaacatga

SEQ ID NO: 409731 - DNA, 684 bp, Staphylococcus aureus
ttgcaagaattacaaacatttaattttgaagaattaccagtaaggacattagaagttgacggtgaaccatattttataggaaaagatgttgctgacatattaggttacacaaattcaagaaaaactttatctgaccatgtagatgaggaagataagctgacgtcacgaatcgttacgtcaggtcaaaacagaaatgtaacgatcatcaacgaatctggattatacagtttaatcttttctagcaaattagaaaatgcgaagaggttcaaacgttgggtaacttcggaagttttaccatcactaagaagaacgggaacataccaaacaaaaccattaactacatcagaacaaattcaattaatagcacagggcaacacagaattagatgaacgtgttactaaaatcgaagaaacatatccaattatgcatggagaagcgaaacatattcaaaggttagttgctcaaaaagttgcggaaattgtgagaaacaaatttaacggtttctacgaccaagtatcaagaaagttattcgctgaaatatataaaagtattaaaaatattttcgacgtaccgagttacaactgtatacctcgtggacgatatcaagaagcgattagatttgtagagagatggcaaccatcatatgaaacaacgtaccaattagaaatgaaattaacagaatag

SEQ ID NO: 409732 - DNA, 207 bp, Staphylococcus aureus
atgaaaaacgtttacgcttgtttacttggtgaatgggttaatttgtctaataaagaaaacgtaattatcgataactcatataacgatgtaaatcattggtataaagaaaaaatcgatacactgtttgattacgattacatcaatattgagattgataatgttcactaccgtattcatccaagtttcatccaagttttaactaagtga

SEQ ID NO: 409733 - DNA, 171 bp, Staphylococcus aureus
atgaaagaaccacaaaatcgtttgaacaaaattttagaaggtatcaatggcatgcccaaatatgaatgggacagaattgtgcaagaagttgaaagagtatacagccataagaccgtcaaggtggagcttgacagtcacagctgtgaagtacttaagaaatcacttagttaa

SEQ ID NO: 409734 - DNA, 219 bp, Staphylococcus aureus
atgcgttttgattattcaagtttaaatgggaaaatagttgagaaatttggtagcagatatagctttgctcatgcaatgcaattgtcggaaaggagtatatcgttaaaacttaataataaagttggttggaaagacagagaaatatttaaagctgtaaacttgttagaaattaaagagtcagagattccaatttatttttttaacacagaagttcaatag

SEQ ID NO: 409735 - DNA, 174 bp, Staphylococcus aureus
atgaaaatagtagaagtaaaatctaagaatggtaccaattttatgattttagatggtaataatgaacctatagtagatgcagtaagatatttgaagtatctggatagtgttaagaaaagtttaaataccaagaaaacctatgcctatgcactaaaaaattttttgtttacttag

SEQ ID NO: 409736 - DNA, 2070 bp, Staphylococcus aureus
atgactatgtcaataccaattaatttacctacaaacagtactatgattaatgaattatgtacattacaaagtagaaccatcaatataaaaggagaggttttaataactgaaatatatgatgattacttttttaaaaatgatgagtggcacattacagcttttaacaaattcaagcaatttcaagatagtatcaagaactatagagacaaaagaaaaaatgttttctttaggattaaaagtaaaaatttgaatttagaatttaaatacctttttttgaaactgatagttaaagaggattggtccttatctaatttatttaatactggagcagtaaagcttaataagattgctaagttctttaatgaagtttatccaaatttaaattctttacttgattgtgatataaatacattagaaaagcactggtttaattggctgactgaaaataatataccaataaaaagaagatcatcaacaatagtttttggtgattatgaatacaaaagcggactggcttcttttttaaagaatatgtacattaatctaattaagttcattgataagcgagaagaatgggaaaaagataaatgggatattagaaatttagaaaaatatggattgagttataataaaacactaactggcaattatttaaactttgaaaaaattgagtcaattaaaatgcgagaattagcaaaaaaatatttaaaaaatcgtttgataactggtgatatagcatttgctacagcaaggttttatataagagttttaactaggttttttcaaaatatatctaaaaataaagaaacaaggaatagtttaaatgaactagatagatgtcatatcgaagcatatatagaatttttgtttgaatatgcagctaataaacatttgcaaagtactaagaattttgtgagagaagaattaaaaacaattagaaggttcttaaacgatattataactcaaaactatgctatagcaccgtaccaagatatacgatttttaatttatcctcaagacttacctaaacacgaaaagaaaaatagtagccaaattgattatatcccagattttgtattggaacagctttttgagcatataaatgatttgcataaagatttaatacctgtagtttggatagcttttaaaacaggattaagaatttctgatgtattgacattacaaaataattgccttgcaaaagttaatggaaagtattcaataatcacagatattgctaaaacttttgttaaaggacatagaataccaattgataataaattagctgatataatagcagttttaatagccgattctaaaagtaaaagtacaaaagataataatcctaataattatatttttgctatttataaaggaaaaagaaagggaatgccctttacacaacatatggtcagagcacacttaaatcatttatcaaagactaaaaatattattgatgaacaaggagaaatcttccatttcaaaactcatcaatttagacatacctatgcagtaaaattgttaaatggtggagcagatatattaacgatacaagaattattagcacactcctcaccagaaatgactctaagatatgctaagttacttgatgatacaaagagaaaggcttttgaatcagttattgatcaaggagcttttagttttgatgttgacggtaaaattaaaaatatacagcatagtagtgaactatctgaaaaagcattgaattctttatggcaagaacataaattaaacgcaatggacaatccttatggcacttgtcatgctagattgagtggtgattgtccatacatggaagctccgccatgcctgacttgtaattctgggaaaccatgtaaggatttagctattggattttctgatttagatgttgaaaaatatgaattacatatcaaatcaacggtcaaatctatagaattagctaaaaataataatagacaagatatggttgaaaagcatataaatatattaaataaatatgaagaaatactaggtaatataaaagatggaaacattatattcgggagaagtaatagaataaaagtatag

SEQ ID NO: 409737 - DNA, 366 bp, Staphylococcus aureus
atggaaaaatttaatagacaagaacaattaaaacagttgcatgcagaacgaaaagttaaaaccgagaaaaaagttgataaagcaataaatgatttagttcaaaaaaataaagaaattaactttaacatcgtttctaaacattcaaaagtttcgaaagctacattatataaaaataataaaattcgaaagaaaatagagaagttacgtgaacaaaacagagaaatatttgttcataaaaataaaaatgacggtaaagatgcgttaatctcctctttaaaaagaaaagtaaattctttagaaaaagagaaaaaaatgttgaaagaagaaattagcgttttatattctaggctgtatgaggatatttaa

SEQ ID NO: 409738 - DNA, 696 bp, Staphylococcus aureus
atgggttttgaagtttattatttagctaatgaaaatgaatttactgatgatcctttctatgaggacgtgaagattcaagagtggttagtaaatgcgcctattttttcatttgaaggaaaaagtaaacattttaggcaagatggttatagcgataattatataaacttcttgaataaagcatctgtttttgtagtttggatggatgagcaagaagaagatgttttagaaaaatgttctcaaatggcactttatttcaatagttctgctaatttctttttcttagaaactatgttaaatgaattacaattgtatgggtatcaacaatataatttaaatggaaaaaaagaagccctatattttagacaatggatactaaatttcaagagatctattgcaattatttatagaacagagcttttacctagtttatatttatatttgtatctaaagaataataatgattttaaatctccacaatatattgaagaattaaacaaagaagaattatcactaattgaattggagcagtcatataaggaagaagaaagaagcgaaaaattaaataaacttttgttaataataagtcttttatcaattttccaagtagtagaaatttttttcagtgataaaaataatatatttaatatcagtatgatacttataatgattttgctagaagtatttcgaaaaaggtaa

SEQ ID NO: 409739 - DNA, 411 bp, Staphylococcus aureus
atgattccaaatcctaatgcgccagatgaatataaatatgaaactgattatagaaaaataccaagaaaatatttaaaccctaaaatccctcaagggcgtggaaaaatcaaatggcaagcttttgcgactctcccgcaacagtttgaaattttagaacaaattataaaggatcaaaataaaatagaaaaaccattgctaacacatgattcattagataatttagatcagatttttcaaataaaaattcaaaatgatgagttatgtacaatctcatattgggaagacggtaacatttcaaaatatacaggaaaaattttaaaaaaggatgaaattagtaatacattttccttttctgatactaacaataatatatataatttaaataatgctaacgtttgtagtatcacttaa

SEQ ID NO: 409740 - DNA, 846 bp, Staphylococcus aureus
ttgaaaaagttaatacttttaattgcaattgctttagttttaagtgcatgtaattcaaccagttcacatgctaaagagttaaataatttagaaaagaaatataatgctaatattggtgtctatgcattagatactaaaagtggtaaggaagtaaaatttaatgccgataagagatttgcctatgcttcaacttcaaaagcgataaatagtgctattttgttagaacaagtaccttataataagttaaataaaaaagtacatattaacaaagatgatatagttgcttattctcctattttagaaaaatatgtaggaaaagatatcactttaaaagaacttattgaggcttcaatgaagtatagtgataatacagcaaacaataaaattataaacgaaatcggtggaatcaaaaaaattaaaaaacgtttaaaaaaattgggagataaagtaacaaatccagttagatatgaaatagaattaaattactattcaccaaagagcaaaaaagatacttcaacgcctgctgctttcggcaagactttaaataaacttatcgcaaatggaaaattaagcaaaaaaaataaaaatttcttacttgatttaatgttaaataataaaaacggagacactttaattaaagatggtgttccaaaagactataaggttgctgataaaagtggtcaagcaataacatatgcttctagaaatgatgtagcttttgtttatcctaagaaccaatctgaacctattattttagtcatttttacgaataaagacaataaaagtgataaacctaatgataaattgataagtgaaaccgccaagaatgtaataaacaaattttaa

SEQ ID NO: 409741 - DNA, 600 bp, Staphylococcus aureus
atgcaccaaacaataataagtttatcagagtataaaaagcatattaattatttaataaatccgatttatatacaaaataacaatatccatataaatattggtataaatagaacaaaagatatttctcctaaactttggtatgattttaattatttaataaaactttttactgacaccacttcttttaaatttaactcacaaaaaatagatgtccaaagtcctggtatgattgagtttattagccaacttccacacgactttataaaagaaatttattcaaataaagaggaaattttgaatttaactatgtggctttctcatttcgctatattttgtcagattttcaagggaaaagatgtaaaatctatagacggtgtagaattccaagaaaaagtaccagaagatattaaaaaattgagaaatgatgccgaaagagagcgattaaaggttgaaatagcaagatacaaattagataggatgtatatagaacaatcaacatgtgattttaaacaaaggtcttcaaacgttcccgaaaagtttgaaagtgaaattaaagacgcaaatgaagacgaagccaataatgattttgataatagataa

SEQ ID NO: 409742 - DNA, 195 bp, Staphylococcus aureus
gtgatattttctgatactaataaacaatttaaaggagatttaggttataaagaggataaaataggtgaattatttagagaaaaagatgctaaagacagattaaatgtcgatgaaataattgaaaaagaacacttggacaaaagtaaatatgaagccgagccaccgttgttcttcttttcggggagactagagtga

SEQ ID NO: 409743 - DNA, 252 bp, Staphylococcus aureus
atgaaaaagaaatatatcgtaataatagttgtagtaattataataggtttggtagtcgtggcatgtgtgatccataagcataaaaaagatcattatattgagacgcaagaaaagcggatagatttgtattttaagtataatctcaaaaattatcattcaatgaaagttacaagttttaaaaagaatccaatgggtggttattttataaagggctttgtcaataataaaaaaattataaatttgatgctgtga

SEQ ID NO: 409744 - DNA, 450 bp, Staphylococcus aureus
atgaaaaagaattatataattgtgatagttgttgcaatattaatattactaattgttattgcatacgcgtttcacaaaagtaaaaaagaacattacattgagacacaagaaaagcggatagatttgtattttaagcataatctaaaaaattatcatggtttgaaaataacaaagtttcaaaaagcgctaatgaacacttattctgctaaagggtatataaataataataagcaatatgaatttcaggcttttataaatttgagtgatgatgataaaaatcaatttaatggagacttagagtataatgaaaaaaatttaggtaaattatttaaagaaaaagaccataaaaatgaattgaaacctacagacattataaaaaaagaacacttggataaaagtgaatatgaagccgagccaccgttatttttcttttcaggtccaattgagtaa

SEQ ID NO: 409745 - DNA, 1044 bp, Staphylococcus aureus
ttgtattgtattgaacaaaatacgggtcgattaattaaaatttataattcaaaagaattttcaagtcaaaaaaataaattcaatccacaaaatgttttgtatgggaagctcagaccatatttgaataagtattattttacaaaaaaaagtggagtgtgttcatcagaaatatgggttttgaaatcaacgaaagaagataaattattgaatttatttctatattattttatacaaacaaaacgatattctgatgttgctagtaaatcggctgggtctaagatgccaagggctgattggggtttaatagaaaatataagagtatattttccagaattatgtgaacagcaaaaaataggcgaattcttcagcaaactcgaccgacaaattgaattagaagaacaaaaacttgaattacttcaacaacagaaaaaaggctatatgcagaaaattttctcacaggaattgcgattcaaggatgagaatggtaatgattatccggagtgggttgttaagttaataggtgatattggaaaagttgctatgaataaacgattttataagcatgaaacttcagcaaatgaagaaatacccttttataaaataggtaattttggaaaaaaagcagatacatttatttctagagagcaatttaatgaatataaagaaaaatatccatatcctaaaaaaggtgacatcttaatttcggcttctggtagtattggaaaaacaattgaatacaaaggggaagaagcttattatcaagattcaaatatagtttggttagatcataatgaagaagtacttaatgtttttttaaagtatttttatattcttgttaaatggaatggagttgaaggaacaacaattaaaagactctataataaaaatattttgaatacaaaaatagacttaccaactattagtgaacagcaaaaaataggtgactttttttgctatattgataacttaattgaaatacaggaacaaaaacttgaatttttaaaacggagaaaacaatcgcttctacaaaaaatgtttgtttaa

SEQ ID NO: 409746 - DNA, 234 bp, Staphylococcus aureus
atgaataaaattcttgctaatatggtttacattattgttcatgattatagacttaatagcaatggtaaactcaaattacgtatgagtagcgaatttacatttaagtatgtaagacacattgaaacaaagtttcatttagaaccatcaagttattcaggtaaatttaaaacaaatacttatgatttagattctattgatgaaatcaaatcgattggtaaagttatttataactaa

SEQ ID NO: 409747 - DNA, 849 bp, Staphylococcus aureus
atggaaagtgaatcaaaaaaagacacgaatacagaaacaaaatcagtaccagaagaaatggaagcttcaaaatatgtaggacaaggctttcaaccacctgcagaaaaagatgcgattgaatttgcgaagaagcatcgtaaagaatttgaaaaagtaggtgaacaattctttaaagataactttggactaaaagttaaagctacaaatgttgtaggtaaagatgatggtgtagaagtttatgtgcattgtgaagatcatggtattgtatttaatgcaagtctacctttgtacaaagatgccatccatcaaaaaggatcaatgcgtagtaatgacaacggtgatgatatgagtatgatggtgggtacagtgctgagtggctttgaatatcgagcgcaaaaagaaaagtatgataatttatataaattttttaaagaaaatgaaaagaaatatcaatatacaggttttactaaagaagcaataaacaagacgcaaaacgtcgggtatcaaaatgaatacttttatattacatatttatcaagaaacttaaaagaatatcgtaaatattacgaaccattgattcataaaaatgataaagaatttaaagaaggtatgcaacgagccagaaaagagctaaattatactgcaaatactgatgtagtttctacgcttttttctactaagaaaaactttactaaagataatacagtagatgatgtgattgaattgagtaataaattaaaagataaacccaatatgcctcaaaaatctcaagttactattcaattaggaaaatctagtataaatactaaaaaaccattttatgacgatataaatccaattgaagggtaa

SEQ ID NO: 409748 - DNA, 261 bp, Staphylococcus aureus
atgtattacgaaataggcgaaatcatacgcaaaaatattcatgttaacggattcgattttaagctattcattttaaaaggtcatatgggcatatcaatacaagttaaagatatgaacaatgtaccaattaaacatgcttatgtcgcagatgagaatgacttagatatggcatcagacttattcaaccaagcaatagatgaatggattgaattcaacacagatgaacaggacaaattaatcaatttaatcatgaaatggtag

SEQ ID NO: 409749 - DNA, 135 bp, Staphylococcus aureus
atggctaaaagaggcaagaaaaacggtaagcaatctactagtagaactgctaaacttgctagcaaagtacttcgagataaacgaagtggtaagaaagctaaaagtttggctggtagcgtgcttgctcaatcttaa

SEQ ID NO: 409750 - DNA, 204 bp, Staphylococcus aureus
atggaatttgagtatgtagatttaatcgatgatacaagaataaaaaactgtactcttcgtgaaatggaaggtaatgaaatggagttacccggcacttatgtagttgcgacctacacaaatgcacaaggtaacaaaaaccaactgattataaaccctgattatatcttgaaaatgaaatacaagagtttaagagcggttgattaa

SEQ ID NO: 409751 - DNA, 789 bp, Staphylococcus aureus
atgcaagcattacaaacatttaattttaaagagctaccagtaagaacagtggaaattgaaaacgaaccttattttgtaggaaaagatattgctgagattttagggtatgcaaggacagacaatgccatcagaaatcatgttgatagcgaggacaagctgacgcaccaatttagtgcatcaggtcaaaacagaaatatgatcattatcaacgaatcaggattatacagtttaatcttcgatgcttctaaacaaagtaaaaacgaaaacattagagaaaccgctcggaaattcaaacgctgggtaacttcagacgtcttacccgctattcgaaaacacggtatctacgcaacagacaatgtaattgaacaaacattaaaagatccagactacatcattacagtgttgactgagtataagaaagaaaaagagcataacttacttttacaacaagaaatcggagaactaaaacccaaagcagactatgtagatgaaatcttaaagtcaactggcacattagccacaactcaaatcgcggcagactacggtatatcagcacaaaagttaaacaaactactacacgaagctagactacaacgaaaagtaaataaacagtgggtgctttactcagaacacatgggcaagagttacacagattcagacactataacaattgtgcgttctgatggcagagaagacacagttttacaaactagatggacacaaaaaggcagattgaaaatacatgaaatcatgactgaattcggttatgaagctaacgtaactgcttaa

SEQ ID NO: 409752 - DNA, 183 bp, Staphylococcus aureus
atgacattcgcttccgacatgttgaaggtcttttctctatgcttaaaaacgtatgcacattttgaaaaagtaaaaattgcatttaatgatgtcaatgaggctagaaagtatacaagatattgcattacaaaagggtgtgctattttactatatacatctaaaatacacatttacaaaaattga

SEQ ID NO: 409753 - DNA, 867 bp, Staphylococcus aureus
ttgaatcctaaagtaaaaggtatcattgccattttaatttcggctattggtttcagttttatgtcagtgtttttcagacttgcaggtgatcttcctgtttttcaaaaatcattagcacgaaacttagtagcaatgtttattccattattttttatatataaatatcatcaaccaatgtttggtaaactctcaagccaaccattattattaacacgttcgacacttggacttataggtgtattattaaatatttacgccattgaccatatggtacttagtgatgccgattcattaatgaaactcaatcctttctggacgattttattaagtattgttttcttacatgaaaaggtaaggaagtatcaaataacagcaatgataattgctattttaggtatgcttttaatagtgaaacctgaattttcatcatctatgattccatcactagctggactattttcaggtatttttgcagcatcggcatatacatgtgttcgcgcacttagtactagagaagcaccatacaccattgtattttacttctcattattttcagtcatcgtattaataccatttactgcatatacatatgaaccaatgagtcagatgcaaatactttatctattaggggctggcttagctgccgctgtgggtcaaattggtgttacattggcatatagttttgctgctgctaaagatatttctattttcacgtatgcatctataatttttacagcaatacttggatttattctatttggagaatctccagatttctatgcaacattaggttacgtcgttattatcggtgcaagttattacatgtttgaaaaagcacgccgagacgccaaaataataaaaaaataa

SEQ ID NO: 409754 - DNA, 1017 bp, Staphylococcus aureus
atgtataaaaaatggataaatggtcaattatcacacattgattattttcaaaatcgaaaacgctttaaaagacatgtttttcaaaataaaatacttcgaaaagaaataactttcaacgataaaaataaaatgagtgaagttaaatatttatcaaatgacggcttttgttacttatcatattggtatggggataacgaaaatatagtcaatatattttattttgataaaaacagcaaagaagtattaaactttaaaaataataaagcgttccattcatattggttggataaaaacttaacttcaaacgacgtattaatactagacggtataggtacttatcataaagtagagaacatgcagaataatgatatcaaaaaaatatttactatacatacgaatcatttcatgtccccttactcctatggcgctgagattaaaccagagttcagaaacatgttactaaaccttaaagagttagatactttagttgtattaactaaagaacaaaaagatgacattataaaacaatttggtgattacaataatataaaggttattcctaatgctatatcttttgaagaaaatttaacacaaaatattcgagaaaaaaattctattattgtattacaaagatttgtagctatgaaaaatatcacacatatcatttccgctataaatattgtaagaaaaaaagtaaaggatgttaagttacacatatacggtaccggtacgcaaaaagaaaattacacaaaacttattaaaaaacttaaattgcaagataatgtgttcatccatgattacgcatttgacatacgtgctctttatacaaaaacctctctaagtgtactgacatcagattatgaaggtctcccaatgagtttactagaggccatgagttacggtgttccagttatttcatatcctattaattatggtcctaaatctataatccaaaataatataaatggaataataacaaaaaagaaggataatattaatgaattggcaaaaaaataa

SEQ ID NO: 409755 - DNA, 270 bp, Staphylococcus aureus
atgattgtagtggcagcggaagttgcacgtcgtcgtaaagcacgtggtttgaaactaaatcatcctgaggcattagctttaatcagcgatgaattattagaaggtgcacgcgatggtaagaccgttgcagagttaatgagttatggtagacaaattctaaacaaagaagatgtcatggatggtgtcgaacacatgattacagatatcgaaatcgaggctacgttccccgatggtactaagttaatcacagtacatcaccctattgtttaa

SEQ ID NO: 409756 - DNA, 1455 bp, Staphylococcus aureus
atgttaatgacaaaaaaccaagcagaaaaatggtttgataattcattaggaaagcagttcaatcctgatttgttttttggatttcaatgttacgattacgcaaatatgttttttatgttggcaacaggcgaaaggttacaaggtttatacgcttataatattccatttgataataaagcaaggattgaaaaatacgggcaaataattaaaaactatgatagctttttaccgcaaaagttggatattgtcgttttcccgtcaaagtatggtggcggagctgggcacgttgaaattgttgagagcgcaaatttaaacacttttacatcgtttggccaaaattggaatggtaaaggttggacaaatggcgttgcgcaacctggttggggtcctgaaactgttacaagacatgttcattactacgacgacccaatgtattttattagattaaatttccctgacaaagtaagtgttgggaataaagctaaaagcgttattaagcaagcaactgccaaaaagcaagcagtaattaaacctaaaaaaattatgcttgtagccggtcatggttataacgatcctggagcagtaggaaacggaacaaacgaacgcgattttatccgtaaatatataacgcctaatatcgctaagtatttaagacatgcaggtcacgaagttgcattatatggtggctcaagtcaatcacaagatatgtatcaagatactgcttacggtgttaatgtaggaaataataaagattatggattatattgggttaaatcacaggggtatgacattgttctagagattcatttagacgcagcaggagaaaatgcaagtggtgggcatgttattatctcaagtcaattcaatgcggatactattgataaaagtatacaagatgttattaaaaataacttaggacaaataagaggtgtaacacctcgtaatgatttactgaacgttaatgtatcagcagaaataaatatcaattatcgtttatctgaattaggttttattactaataaaaaagatatggattggattaagaagaattatgacttgtattctaaattaatagctggtgcgattcatggtaagcctataggtggtttggtagctggtaatgttaaaacatcagctaaaaaccaaaaaaatccaccagtgccagcaggttatacacttgataagaataatgtgccttataaaaaagagactggtaattacacagttgccaatgttaaaggtaataacgtaagggacggctattcaactaattcaagaattacaggtgtattacctaataacgcaacaatcaaatatgacggcgcatattgcatcaatggctatagatggattacttatattgctaatagtggacaacgtcgttatatagcgacaggagaggtagacaaggcaggtaatagaataagtagttttggtaagtttagcacgatttag

SEQ ID NO: 409757 - DNA, 801 bp, Staphylococcus aureus
atggaaacgttaaaatcaaataaagcgagacttgaatatttaatcaatgatatgcgtcgagagagaaatgacaatgacgtattggtaatgccatcttcatttgaagatttgtgggaattatatcgaggcttagcaaatgtcagaccggcattacctgtaagtgatgaatatttagctgtacaagatgctatgttaagtgatttgaatcgtcaacatgttacggatttgaaggatttgaagccgataaaaggtgacaatatctttgtttggcaaggtgatatcacgacgttaaaaatcgatgctattgttaatgctgcaaatagtcgttttctaggatgtatgcaagctaatcatgactgcattgataatattattcatacaaaagcgggtgttcaagttcgacttgattgtgcagagatcattcgacaacaagggcgcaatgaaggtgtaggtaaagccaaaataacacgtggatataatttgccagcaaagtatataattcatacggttggtccgcaaatacgtcgattgcctgtttcaaagatgaatcatgacttgttagctaaatgttatcttagctgtcttaaattggctgatcaacatagtttaaatcatgtcgctttttgctgtatatctacaggtgtatttgcttttcctcaagatgaagcagcagaaattgctgttcgaacagtagaaagctatctcaaagaaacaaattcaacattgaaagtcgtgttcaatgtatttacagataaggatttacaactgtataaggaggcattgaaccgtgatgcagagtag

SEQ ID NO: 409758 - DNA, 240 bp, Staphylococcus aureus
atgacaaattatgaacaagttaacaatagtacgcaattttcaagacgtacatttttgaaaatgttaggtattggcggtgccggtgttgcaattggcgcaagtggtgttggtagcatgtggtctttcaaatcaatgttcaatacaccagaagatccggaaaaagatgcgtataattttatggtaaagtgcaaccaggcattaccacaccgacgcaaaaaacatgtaaattcgttgcattag

SEQ ID NO: 409759 - DNA, 1134 bp, Staphylococcus aureus
atgattaaaaaatataagaagaaagacggttcgactgcctatatgtttgtcgcatatttaggtactgatccaattactggtaagcaaaagagaaccactagacgaggctttaagactgaaagagaagctaaaattgctgaggcaaaacttcaaacagaagtaagtcaaaatggctttctaaacaacgatataacgacgtttaaagaagtatatgagttgtggcttgaacagtatcaaaatactgtaagagaaagcacatatcaacgtgttttaactttatttgatacagctatattagaacatttccaagatgtacctattaagaaaataaccgttccatattgccaaaaagttattaataaatggaacaaaaagtattctgatattaaagctatacgaatatacacatctaatgtgtttaaatatgccgtaagccttaagataatcgttgataatccgtttgcacatacaaaagcacccaaaaaaaaagaagcgcaacaagacgcatctacaaagtattattcaagtgatgaattgaaacagtttttaacttttgttgaagatgacccattatattatgctatttttcgaacattagcttttactggctttagacgtggagaattaatggctttaacatggaacgatattgattttactaaacaaaccatatctattaataagacttgcgcaagaggtgcaaattataaactggtaatacaagagcctaaaacaaaatcatctcacagaacaataagtattgatgataaaactgcaagtgtattgaaatcatggcgcactcatcaaagagtggagtcccttaaatatggtcatacctctgataaacatcaacatgttttcactactgtacgtgataataaacaactatatcccgagcattgcaataaagcattggacttaatttgtgagaagaatagttttaagagaattaaagttcatggttttagacacactcattgttctcttttgttcgaggctggcctttctattcaagaagtacaagacagattaggtcacggggacatcaagacaactatggatatttacgctcacgtaactgaaaaacaacgtgatcaggtggctgataaattcgcaaaatacatcaatttttaa

SEQ ID NO: 409760 - DNA, 387 bp, Staphylococcus aureus
atgccaagaccctcattaagttaccacgaaaaaatcttaagaaaaactatttctaaaaacctaaaacgattgtctgaaggaaagacgcaagcagaaatatcccagcatactaatataccaacttcaactttatcaggctattttgctgaacgatcaacaatcaatcctgaaaatacagaaaaattagcaacctttttcaatgtaagctttgagaaaattgatcctcgtttttctcgaaatatgttatttttagaagatggtgatgatgaagagtactctttaacagttgaaattttagacatgattgaacagcttaataaagaaaacaaatataaagcctttattaacacacaaaaattattgataaatcaagaaaaaactaattaa

SEQ ID NO: 409761 - DNA, 237 bp, Staphylococcus aureus
atgaatgaaaacgtaaaattattactcagagcagcaaggataaataatggtatgagtcaaaaaaaggcggctagcttattaggtgtacattatcaaactttagcatcttgggaaaaagatagttctgatttatcacggtctaaaatgctattgatggaaaaaatatacagcataccgctggaatatattttttttggtaatgaaaacgagtttattcgtacaaagaggaggggttaa

SEQ ID NO: 409762 - DNA, 261 bp, Staphylococcus aureus
atgagccaattacttagtgaacaagctagtcaacagttagttaatagcatagttgatattgccgaaaaaatagctttagaaaaagttaaacaatcgcgtaagagatatctcatacaaaaagaagtcatggaagaatacaacgtgactcacaaggttataaccgagtgggaaataatgggacttcgtaaagttaagattggtaaaacaattcgctatgatcgacaagatatcgaaaatgtaattgaacaaatgaaaaattga

SEQ ID NO: 409763 - DNA, 147 bp, Staphylococcus aureus
atgaaattgtacttagtttatgtaaccttaacatcgtttttaacaattttattactagcaatatctaacatgtatgtcgcttttagtgtgtacggcatgatggtaacttatggatttaatttaacaggaggattagaaaatgaataa

SEQ ID NO: 409764 - DNA, 2364 bp, Staphylococcus aureus
gtggcaattaagaaaaaagataaaattattggagttaaagaattagaaataccgcaagaattaaagttagtgcctaattgggtattatggcgagctgaatggaacgagaagcaacaaaattatggaaaagtaccatatagtattaatggttacagagctagtacaaccaataaaaaaacatggtgtgactttgaaagtgtaagtattgaatatgaagttgatgagcaatatagcggtataggttttgtattaagtgatggtaataattttgtttgcctagatattgataatgcaattgatgaaaaaggacaaatcaattccgaattagcattaaaaatgatgcgactcacatattgtgaaaagtctccaagtggtacaggattacattgtttctttaaaggtaaactaccagataaccgtaaaaagaaaagaacggatttagacatagagttatatgattcagcaaggtttatgactgttacaggatgcacaattggtcaaaatgatatttgtgataatcaggaagtattaaatactctcattgatgaatactttaaagagaatttgccagtaaatgatgttgtgagagaggaatctaatactaatatgcaattatctgatgaagatattataaacattatgatgaaatctaaacaaaaagataaaattaaagatctattacaaggcacatatgaatcatattttgagagttcaagcgaagcagtacaaagcttattacactacttagcgttttacacaggtaaaaacaaacagcaaatggagcgtatatttttaaactacaataatcttacggataaatgggaaagtaaacgaggtaatacgacttggggacagcttgagttagataaagctataaagaatcaaaagacagtttacactaaatccatagatgaatttaatgttatacaacaggggagtaaagatattaaacagttattgaatcaattggggcatgaagaaagaacaaaaatggaagaaaattggattgaagaaggaaaacgagggcgtaagcctacaacaattagtcctataaaatgtgcatatattttgaatgagcatttaacatttatactttttgatgatgaagaaaatactaagttagctatgtatcaatttgatgaagggatatatacacagaacactacaattataaaacgagtgatttcctatttagagcccaaacataatagcaacaaagctgatgaagttatttatcatttaaccaatatggtagatataaaagagaaaactaactcaccatacttaataccagttaaaaatggtatatttaatcgtaaaacgaagcaactagaagcatttacaccagattatgtatttaccactaaaatatctactaagtataatccgaatgttgtcagacctaatttgaatggatgggattttgatcattggttatatgagattgcatgtgctgataaagaaatagtgactttattatgggaagtcataaatgactcaatgaatggtaactacactcgtaaaaaggctattttctttgttggtgatggaaataatggtaaagggacgtttcaagaattaatatcaaatttagtaggatataaaaatgttgctagcttaaaagtaaatgaatttgaccatgaatttaaattaagtgtactagaaggtaaagcagttgtaattggtgatgatgtaccggtaggcattaatattgaagattcatcaaactttaaaagtgttgtcacaggggattcggttttagttaatgtaaaaaataaacaaccttatagaaccgaatttcgttgtaccgttattcaatcaacaaatggcatgcctaagttcacagataaaacaggtgggacaaacagaagattattaattgttccattcaatgctgattttaatgattcaaatgaaaatgttgatattaaagaacaatatcttaaagataatcatgtacttgaatatgtgttgtataaagcgattaatttagaatttgataggtttacaattcctcaagtatctaaaaaaatgctagaaatatacaaacaagataatgattcggtttatgatttcaaaattgaagaatttgatcaatggaatattcaaaaagtacctaagaaagttgtttattacaggtatagagcattctgtgaagaaaatggatatatgggaaaaatgtcagacagaacattttatagacgatttgagaagtacttaggaaaagaatggaatacggatgcaaaatgtagatattcaagtatcgatgaattagaagaaattgtaggatatatcaatagaacattaatgccatttggacaacagcatagatcatataaaaatgaaaatttaaaaatagtgtga

SEQ ID NO: 409765 - DNA, 603 bp, Staphylococcus aureus
gtgattgatatgacttatggagacgttattgatgagaatttattgaatgagtttaccgaagatcaaaaagaaaaaattaaaaaacttgtattaaataatgaaaaaggttactttattgatattgaagaaatatgctctatttgtaatatttctgttgagaaagctaaaatatttggtgattttgatatgaatgattcaggagtttatgatgaagaaaatagcactataatctataacccactagattcgattacgcgtcaaagatttactatagcccatgagttgggacatgcggtactaggtcataaagggacatcttttagaactaaaatagctgataagtatgaaaatattttagagagaatgaaagaaacaagcgccaatcaatttgcagctaaattactaatgcctaaaattttagtgaaaagccttctaaaagaagaaatagaaaaactaagttttgattcaaataatttgagtgctttggatgtagaaacattagttgaaaacatagctggaaaattaaaagtttctcgagaatctttaagctatagtttgaaaaataataatttaattagagtagatgattatgaacatatataa

SEQ ID NO: 409766 - DNA, 1140 bp, Staphylococcus aureus
atgaacatatataaagaaataaaagaaaaaaataataaagttaaattgtacaatgacataaaatttaaacttattattatacctaatgaagaaaaaaaagagaaaatgtcatacgatatttgtgattttgagatgaactgcgaaaacagtgataatgataatctaaataaaaaaagtgaaattatatgtaataatttaaaatcagaattaaataaatgtaaaactcataataaggaaaaatcatggcaaatattttattttattaaagaatttatacagtctttagatctattggaagaatttaattttaattattttagagggcagcgttctaattggaaagtattgccaggtttactaagagatagcactaataaagagtatataaatcattttgaacaagaatataaaagacttgcttataattaccctgaagagctctcttatttaccttatgataaaaataacagattagaaagggctaattatttatctatattgcagcattatggaatgcaaacaagtttgctcgatattacaaaaaatccatttatcgcattattatttatggttagcgaagaaaataaaaataaaattaataaacctagttttattttgtatgaaatagacgaaaatattcatcatgagtctcatctatttattagagttataaaagatgcaaataacaaacgaattgaagcgcaaagaggagcatttctatgttatgattatctatatagtttgaatataacagatataaaaagaattaatcgtataattttagatatagaagttagcaaagataaatatgtagaaaagttaaaaaaagacattgaaataatcaatcaattaaaaaaggaatatgaaaatagtgaagaaaaaaaagatagtgattttaataatatagtaaatgaagctatagaatttagaaaaacactattagaaaatcttgaaattcctaaagatgcgaatgaaaaaattgatgaatgctatgaagaactcagaaaagaaatgttaactaagctaaaagaatatcattattttgaaaatcaactttatccagatttagataaacaaattgcgtatatattgtctaaatacaatgaccaatcaagtaaaaaatacatttctgatttgtaa

SEQ ID NO: 409767 - DNA, 1032 bp, Staphylococcus aureus
atgaaaataagaacaattgcgaaagcgagtttagcgttagggcttgtaacaacaggtgcaagtatagtaacaacgcaatcggccaatgcagaagtagcatcagcacttaaagcaggacagttagcaaagataaacgtatcatcaagtgcagtcacaacgacaacgcaagcagtgaacgcagaacaaaatcgtacggctaatactgaacaggcatcaaagtctaatacagaaaaagtatcaacatcgccttcaattaaaacagaacagacgccaaaatctaacacacaaaaggcaactcaaccaacaccaagcggaacaactcagcctttaccaaatgcacaaccgcaatcaccacaatcaacaccaaacgcatcaacatcgccttcatctagtgtagaaacacaacaaccgcaatcgcctaccacaaaacaagcacaaaaggaaataaaccctaaatataaggatttaagaacatattatacgaaaccgagtttagaattcgaaaagcaatttggttttatgctgaaaccatggacgacagttaggtttatgaatgttataccagattggttcatttataaaatagctttagttggaaaagacgataagaaatataaagatgggccatacgataatattgatgtatttatcgttttagaggacaataaatatcaattaaaaaaatattctgtcgggggtatcacgaagacgaatagtaaaaaagttgatcacaaagcaagaatcagtattactaaagaagatgagaaaggcaaaatctcacgcgatgattcagaatacaagattactaaagaagagatttccttgaaagagcttgattttaaattgagaaagcaactcattgaacaacataatctgtacggtaatattggttcaggaacaattgttattaaaacgaaaaatggtgggaagtacacgtttgaattacacaaaaaattacaagaacatcgcatggcagatgtcatagatggcactagtatcgacagaattgaagtgaatctaaaatcatcgtga

SEQ ID NO: 409768 - DNA, 687 bp, Staphylococcus aureus
atgaaattaaaaaatattgctaaagcaagtttagcattagggattttaacaacagggatgattacaactactgctcagccagtaaaagcaagtacattagaggttagatcacaagcgactcaagatttaaaagattattataaaggacaaagttttgatctgaaaaatataggaggatataaggaaggcaacaaggttactttcatatatcacaatcaacaaattgatgtgacactaacaggtaatgaaaagttagaatttaatgacgatggagaaatatctaatgttgatgtatttgtggtcagagaaaattctgatagatcaggtatcacaagttctaatggaggaataacaacttcaaataaacaagatatcatagataatgtcaaaagtgtgaacatgcaaataactaaaaaaactagtagtaatactgaaactgtaacttcatcttattacagtataagtaaagagaatatctcattaaaagaacttgatttcaaattaagaaaacacttaatcgacaaaaacggtctttataaaacagaacctaaaaacagcaaaattagagttaccatggaagatggtgggttttacacatttgaattgaataaaaagttacaaacaaaccgcatgggtgatgtaattgatggtactaaaataaaagaaattaatgttgaattaaactaa

SEQ ID NO: 409769 - DNA, 798 bp, Staphylococcus aureus
atgagaaatttaaagagagacgtattgtacataagcattatggctttgagtatttttataataggctgtgataaatctagtgttactgctgaaaaagcaaaagaagactcaaaagaagaccaaatcaaaaagagctttgcgaaaacgttagatatgtaccctattaagaatctcgaggatttatacgataaagaaggataccgtgatggcgaatttaaaaagggtgataaggggacgtgggttattagatctgaaatgacaacagaactaaaagatgaaaatatggaatccaaaggtatggtcgtacgtttaaatagaaataccagaacaactacaggtgagtattttgttaggataatcaaagaagacaatgagggcaaggtatatagtgatgaacgaaaatacccagtcaaaattgataataaaaaaattattccattaaaattaatcgatgatgaaaaagttaaaaaagaaattgaagaatttaaattctttgtacaatatgggaattttaaagaattggaaaactataaagatggtaaagtgtcatataatccagaagtaccaatttactctgcgcaatatcaattgaaaaacagtgattataatgtagagcaactacgtaagcgatataatatcccaacaagaaaggcgcctaaattgttattgaaaggctcaggtaatttaaaaggatcctcagtcggatataaaaatattgaatttacctttgttgaaaataaggaagaaaatatttacttcacagatagtattaatttcaacccaagtgaggataaataa

SEQ ID NO: 409770 - DNA, 165 bp, Staphylococcus aureus
ttggctatttatattttttgtacaatactagttttagtcgcagttggagcacttttgacaaatagaataagggataaaaaagataaaaggctagatattttatctagtgtattacttttaatttcatcaataacattgttactttatggtgttattatcaattaa

SEQ ID NO: 409771 - DNA, 1080 bp, Staphylococcus aureus
atgagatttgattttaatgcgaaaaatggtgagatttctgacaataatatttatacaaatataattataggtactggagttggacattctaaagttatatttgataacgggaaagaaattaatttttctaatgcaacgccaattatcttcgcacaatatttgaaaattgaattgaaaaagagaaatataattgtagatattaataattattttaatagcactgttatttcatttgcgcatgataaaaaatatagatataaggatatgtatattgaaaaatacaatgaaattattaaagtgatgagtgaagaagatttaaatgaggcatcggttttagaagctaaagagttagccaagaaagacatgaattataattttaaaattagtgagtacagagctactatgaaattcatggaattatttagtgactatacattttcttttaaaaagttgatttctgatttatggatttttgatcaaaagaatttggaagtatttaaaaaatatatgctaaattacgaaaattgtttgattaatataagtgaaaaaattgacaataaagaaaaattaaagaattttaaaaataaaggtgaaaaatttaattatttatatataccaaagtttaacggtcataattatatagttgaaaaagcacgtaggaactcttcatttattggatacttatttaaagagtttgataataaaaataaacattatgattatgcagtaattttggctactggatattacttatttggcgataattttgaagtgcacaagtctagaaaagaaataggtattttaggtagggaagatgaatgtataaataatataaaaaaaatagaaaattacaacgttggaaaatttgaagattttaaaaataatatcatggaaagtattaggcgattatatgaaaaagatagaaaagaattttacgaattgctatctaaactgaatggtgatgtgttggatttgaatgaaataataaaatatatgaaaactttaaccgtaggagatgttataaaagttattaagagttctagttttgttaattttaaaattaactttgaggaggtttaa

SEQ ID NO: 409772 - DNA, 291 bp, Staphylococcus aureus
atggggaaagaaatttatttagatccaattgaatttcaaaatgtattagagaaatttgaaaaaggatcaagtgagattagtgaagtttcaatttctagtataaaagatgctaaaaatgaaattatattagaaagtatagttgaactagaaaaaataattgacgacttatcgaaagcgatgaaaacgtattctaagatgattggcagcgataaagaagcaatggataaaatagcatcaacaatgcaacggaatgataaagataatgcaaataaaattgcaaataggaattag

SEQ ID NO: 409773 - DNA, 1263 bp, Staphylococcus aureus
atgcctagattagttaattcagagttagaagaatattttaataaaacaaatgatgtgaaaacgaaattaaatgaagtattatataatcattacactcaatgttattttttatctaaaactggtagtataaaaggaaaaacagcggatagtataaagaaatatgttgaatcagcacatataagcacaatttctagagctattaatttaatggataagttggaagcatcagtaaaacacttaaaagaacttggagaaaaatgcgataaaagtagtaatgccaaaattggtttacaaactttgaatgaaactaaaaaaggtgtggtctcaaaaaagaaggaattcatagatcttacaagtaattccccagcaattctatctgaagcatcagaatttattgatactgtgtctttagggaaagataatgtagaaagtgattacaatgaaagttccaaaaaaatagatagaactaaagaaaaacttaagactatggatcaaacaggtaagcaatcactagaaagtctaagcaatgatgtaagaggattaataactcaaataaataaattgaataatgaatatcatgataaaaatggaattatcgtatcaaagataaactccattacaaaagaaaattggtataaaaatgaaactaacaagggtgaatttaaaaaaatgaaagcggatcatcctgttgcttatgcagaaggagatgagacaataggtagaactcaagcaatttctaaagatggatatatagttggtacagctgaaataggtaaagttagtggaatagcatatcgaagcgacgattcgatgggggttaaaggagatgctaaagtagctggattagatggtaaggtaaagtacgagaatgttgaaggtaaggcaggactcgaagtagggagtgtaaaaggttcagctgaaattagtaactcgcatatatctgctattgcagaagcgcaattaattgatgcggaagcacaattaagatttggatcagaagataataatttgcatgtaaaaggagatgcaaaagttttgtcagcaagtgcgagtggatctttaggtgctgatggagtagaagcgaaagctgaagcagtcggagctaatacaggggttgaaggtggttttgcacttagtggattaaattttgattttggcgcgagtattggggctcaagctgggggaggtgtaaatgttggcaaaaaaggaattgaagttgatgctaaatttatacttggaggaaaaattaaaattacatggtaa

SEQ ID NO: 409774 - DNA, 390 bp, Staphylococcus aureus
atggaaaaattaatcaaagtgacgtctttaattggaattattattcaaagttttttaacattgttatttttaatatttttaattttatcagcaacagggattatacagccagaattgaccacaactgttaatggtgaacaaactatacaaagtccagaaactgctcaagcaacattcgtgacaatatttgcaatattatttgttgtttctttagcttcagatttattaggcattatagctatgaaaaagttgtttgtgaataatagagcgagtggcattttgtatattattggtgcagtaatcagcgccaatttattaacatttattgcttggttaataagtgggatttctgttttaagatataacaaaataggaaaagaagtgtcatag

SEQ ID NO: 409775 - DNA, 393 bp, Staphylococcus aureus
atgaaatatacttggtggatacttttaacaattgcagggattttaagtttaacaagtgtttatggatttattttatgtttaggtagctttggaatgttggcactgaatgtcatgtggctatttgtttatacaccgcataaaaattctaaagcacttgaatctatatcaaaaccaacgataattttatcaatcattgggacatatgcagtatttatatttatgtctatcttattttacttcgtaatgaaagctaggtttatggaaattggaataaaactttacggtgaaccttttaatatgtttggaataccattattcattattggcatcattttatttacaatcggtacagtattcgtttataaaatacagcaatcaagattaaagcaatag

SEQ ID NO: 409776 - DNA, 1122 bp, Staphylococcus aureus
atgaataaattaatacttggaatttatttatatcgaattttgtcaagagcttacttctatttgccatttttattaatttattttttagcacaaaactattctataatgcagttagaaatactaatggcgacatatggagttgcagcttttttgttcggtttatataaagagaaaatatttagaatttatcagataaaagatgcttataaattaattgtgagtgaggtatttaaaataataggcttaatattattattgtatccaagccatttttatattttattagtagcccaactgttattaggtttgagttattcaataatggctggagtagatacttctattattaaaatgaatataaaaaatcataaacttatacaaaataaatctaatggttatatgtttttatcattattaatttcaggaattattgggagttacctttatggaattaatataaaatggccgatttatatgacaggtttattttcgattttaacaattttagttattctactcacattggttgaaaacgttgattgtaatataaaatcggaatctaagagaaagagaaaaaaattattggctgatgagaaattttgggtattacattattcttttttaagagctttaatattagggttttttgtaggatttattccaattaatttgtatattgatttaaaactgaataacgttcaatttatatctgtattaactagttatacaataatgggttacatttcttcccgctacttgactagatatttgaattataaatttctatctgaaatttgtttagtaatatttttaataatatatacattccaaaatattattgcaattacaatcgctattttatttttagggatttcttcaggcttaactcgtcctcagacaattaatgaactttcaaatagtagtaacttagcagctatacttaattacgcggaaacactgtactttatttttaatatagcatttttacttattggtggttacctatattcaattggaactattcaatatttaatgttatttatgtcattattgacgtttatatatttactaacattattttatttaaggagagatcaacatgaaaatcaacacagaatttaa

SEQ ID NO: 409777 - DNA, 642 bp, Staphylococcus aureus
atggaaattttaaatgaatctgttgaaagctttgaaaaattatacttacaactacaaaatagttaccccataattgttcccacggatacaaattataatttatgcagcttgcctaacaataaaatttgcattgatagaatatttaaatataaaaagcgttcaaaagacaaaccgttatctttatttattgatgaaccagaagactggaaattatatggagaaaataaaaatgtagaattagtagataaactggttaatatattttggccaggtccattaaatattattttgaaaaataaaacgaattataactacatgcttaataattcagatagtattgcgattggatgtgttcaaaataaaacaatgagaaatctaatttcctacattcaatcaccaattgctatcacttcagcgaatatttcaggaactgctgatgatatattgataactgaaaatgaagcaattaaacatatggggaataatgttaattatatgcttaggagtaaaaataaaagtaaatataaatcatcaagtacgattattaaagtgacggggaataaaattgaactcttaagagaaggggatataaaattcgaagaaataaaagcaaaactaggttcaggtattcaatatgaataa

SEQ ID NO: 409778 - DNA, 1146 bp, Staphylococcus aureus
atgattcgaattcaagataatacaataagggatggtatgcaacaaagtaatgttcgtaaaagcattattgtaaaaaaagaagtgttacaagaaataaataagataagcataaattctgtggaagttggcatgtgcacaacttttgaggatgaatataatattcatcaataccgagaaattttaaataatgataaagaaatagtagtcttaactcggctagatgaaaatgaaattaataaaattctaaatttaaaaatacataacctagcagtaaaaatacttttaccaatatctgatttacacataaaagaaaaacttaacttcacaagtgagtattacaatgaacgaattaataagtgtttaaatatgataaaggtaaatcaagtagcaattgatatttgttttgaagatgctacaagatgttcattagaaaaattatgtgaatatatggaaatgatttcaaaatttccaataagaacagttacttttgctgatactgttggatgttcaactccatttgaatatggaaatatttttaaggaatttgtaaaaaaatatccaaatataactttttctgctcattgtcataatgatcttggattggctactgccaacacatttgctgctattttaaatggtgcacagcaaatcgagacaacttttttaggaattggtgaaagagcaggtaatgcctcaattgaagagataatagcaattttaacaaaaaagcaaatagtaatgacttcattgaatttaccagatatttataaaactagcatgaatataagtaaaatacttgatattcgattagctgaaaataaacctgttatcggaaaaaatatatttaaacatgaatcaggcattcatcaagatggcactaataaaaatataagtatgtaccagtatatattacctagtgatttaggattaaaaaattcaaaagcagtgcaatttccaataagtaatatttcgagtaagaaaattttgaaaaataaatttaaatcaattgtgcatcctaaagatattgaggaaaacatatcattttataaactcataaacaaattcatacctgaggttgtacctgaagatacagcagacttacttcaggtaataaaagggaggagtaaagatggaaattttaaatga

SEQ ID NO: 409779 - DNA, 870 bp, Staphylococcus aureus
atgaatttggattggtactatacatttgtcattttagcgaagacgttaaactatcgattagctagtgaagaaattaatctcactataccttctatacataagcaaattaaaaatttagaacagcatctcaatgtgaaactatttgaaacttataaaaatcaaattatcttgactgaagatggtcatacatttcttccaattgcgcaaagttttattgaacaatatgaaagtggcatcaagcatatccaacttaaaaagacgatgtttcaatcgaaattaaatgttgtcgtgtcttcatatatcgcgacattcattatgcccaaatttttaaaatctttctttaacgagcatccgtttattgatgtttctctccatgtcaaaaatgaaaatattgaaaaagatattaataatcatacgtatgacatcgggattagcagaaatcaacctaaactaagagaagttcattctgaaaaagtatgcgaaggtaaaattgtattgattgctcccaataaagagaataatcatcttctaaccgaggcatctttatttgaaaaatacaaaataataagtgataaccatccagaatattggtcatcacttaaaaataatattttaaatatttatgaaaaagcacaatttctatctatcaatgatgtgcatacttcaattaaattaatcgaaatgaatcaaggtatatcattcctgcctatttatataacaacagatagtgattacaatatttcggttattaacacgaaaattttacaagcacctatttcatttacatatatatacagcaaaaaagaaagtccagaaatattggcgtttattagatcatttaaaaagtatattgccaatgaacaattataa

SEQ ID NO: 409780 - DNA, 936 bp, Staphylococcus aureus
ttgatagcccatgatgtagaaattattaaaaatggtgtgaagtatcgagtcagtgacaatcctcacacctacaaacacttaagagtgcttgattacaatgttatcggttctggttacaaaaggaattattcgcctttagatggtgttgacgggcgttttcacaattatgctaaagaagaatataaaaaagttgaattaagattgaggtatgaagtacctaaaattgcttatgcctcacatcttaaatcagacatacaaacattgttttatggtcgtttttacctaagagaattggcaacgccggataacactatcaaattcgaagatatgttcgaaccattagagcaagaattcgaattagattatgttgacggtagacaactattcgttggattagttagcgaagtatctttcgacacgactaagacatcaggagaaatcacgttgacctttgagacaacagaattgcctttctttgaaagtatcggctatagcactgatttagaaagtgataacgatttagaaaaatggtcagttccggacagaatagcactaaatgaaaatgatagaagtagacaaatgacattctataatacgagttctggagatgtttattacaacggagatgtagcattaacacagttcaaccaattcaatgtagttgaaattgaattagccgaagatgttaaagctgatgataaagacggtttcactttctatatggataaaggaaacgtatcagtaattaaagatgtcgatttaaaaacaggcgataaaatcatttttgataacaagcacacatatagaggcaatttaaatatcgatctatacaacaagacgttagaacaaccggtgttgtatcccggttggaatcattttaaagccaacagacttatgaaaaagatagtctttagacacaaattatattacagataa

SEQ ID NO: 409781 - DNA, 342 bp, Staphylococcus aureus
atgacaagtcgttacataggttatatgagtaatgacgagctaatgtgcatgctacctgccgaatggaatgactggattattggcgctagacaagcattgattgaccaaagggacatctcgttgtacggcgctcaatataatgcggtcgctcaagctggtaaatcactaaaacgttttgttaggcagaacgaaagagaacattatattattcgtggtcaagaagacgaatatgaaaaaatgaaacagcgtgagctagctaaaaacaaacgtaaaagagaaatacaaaaacaagggactcgcaagttccttaacagcttaaaaacaagtcataaaggaggttag

SEQ ID NO: 409782 - DNA, 495 bp, Staphylococcus aureus
atgactgaaacaacttttaatccaattacatcattaacgattaacaatgaagaagtgaaagcaaaagcaacatttatgttcgataaaaccgctaaaaaatttgcaactgaacaagaagataacaaaggtagaaaacaaacgatttcaggatttactaatgtttataacgctttattagagcgtgacacagtggcaattgtagacttttgggaatgtgcaacagcttatctaggtaaaagtgcacctaaaagagaagatattgaagcggaaattatggaaatcatcgaaagagaaaacgacacgttgaatcttttacaaggtgcgttggacgtaatgaataatagtggttttttcaagcagaaatcacgtctattctggaaacagatgaaccaagcgccatcgttagccaaagaagacgagaaagagggcgcgaaagctggtatcgagatgatgaagaacaactacaaagaaatcatgaccgtagcaccttattag

SEQ ID NO: 409783 - DNA, 561 bp, Staphylococcus aureus
atggcgcaggataaatatattgtcgctctccaaatcgctgataaagatttagctaagaagctaactatcgaagaagcaacgcttttaggtagtttagcagagggtgggcacactatcagtaatgaccttgctgaaatcattcaaggcggtaagaaagattatagccgtaactctgtcgaagaagaaatcaagttgacgcttgatgtcgttccgggagataaaggtcaattagcattaaaagaatcggttaagcaattcaaacaattacgtgtttggatttgggaaactaaaaaacgcgatggcaaacatcacggtgtattcgcatatgtagttatcgaagagcacgaatggtcatttgatgatgaagataacaaaatcgaaatcacagcgaaagttaagttcaatagtgcagatggtacaatcaacgatttaccaaaagaatggcttaaccctagcgcattggctccggttgttgaattcgaagacatgaacgcttacgaagatagttatgaaaaccgaactaaaaaaacaactgctggcagtagcgatttaagtatgtaa

SEQ ID NO: 409784 - DNA, 438 bp, Staphylococcus aureus
atgtgggtatcagttgaacggtacttatttaacaaagtatataacaaattaaaaagtaaccctattatccaaaaacaattggacggtagggtttttgattgcgttcaaaaagacgctgtttacccatatatcgttgtgggtgaaacaaacgtcactaacaaagaaacgaccacgagcatggtcgaagatgtcggcatcacattgcatgtttatagtcaagcgcgtaatagagatgaggcatcacaaataattcaatttttaggcttcgtcttaaataacgaaatcgaaattgattattattcattcattaaaagtcggattgatacacaagaagttattactgacatagatcagtacactaaacacggtatcattcggcttgtttttaaatacagacataacacattacaaaggagtgtaacgaatggcgcaggataa

SEQ ID NO: 409785 - DNA, 414 bp, Staphylococcus aureus
ttggcaaaggttaagtatggtaattgggacttagtaaaagagttggaaaattacgagcgagacatggagcgatgggtcaaacgaggtatagcaaagactactgctaagattcacaatacaatcatttcattaatgccagttgataccggatatcttagagaaagtgtaacaatggactttaaagacggcggttttactggtgttattaatattggtagtgaatacgcaatatatgtcaattatggtactggtatatatgcaacaggcgctggaggtagtagagcgaaaaagataccgtggtcatacaaggatgcaaacggtaagtggcacactactaaaggacaacatgctcaacctttttgggagccggcaatagacgctgggcgagcattctttaataagtatttttcgtga

SEQ ID NO: 409786 - DNA, 336 bp, Staphylococcus aureus
atgtttaatccgtttgatgagtttccgcacacaattgaaattggagaggttgaagttgcaggaacatttcctaaagaatacgagcgttttaaaagtaacgaaacaattaaaggatttatggatacgcctacatcaagcgagacactcaaatttcatcaaatgagcaaagacttcgaccgtaacctatatacgccgtatcacataccaataacaaacaaaactttatttaattacgagggtaaaacgtacgaagttgtaggcgaaccggtcgaccaaggcggacaacatgaaatcaatttaactagattgagggtgcgatctattggcaaaggttaa

SEQ ID NO: 409787 - DNA, 315 bp, Staphylococcus aureus
atggacgcaaaagacgtcaaaatgattaatggactttcactcaatgattcgtctaacgatgagcagatcgaatatcttattgaagaatataaaggtgttgcagaagattattgtaatcagaagtttgatgacaaagaagtgccgtcgggtgttaagaagtttattgctgaatgtatcaagtttggtacaactggcaatatctcagcgcgcacgatgggcaccgtgagttatacctatgtaactgacatacctagtagtgcttatgcttatctaatgccttatcgtaagttaagttggggtaagcgatatgtttaa

SEQ ID NO: 409788 - DNA, 327 bp, Staphylococcus aureus
atgtataaagtaatcgaacgttttgaagatgcacaagacaatggacatgaatatcaagtgggagacatttacccacgtgatgggttagaagtatcagaagaacggttcactgaattatctacaacaaacaaccgccgtaacttaatcgctatcaaacttgttgaagacgatacaacagaacagtctgaggcgagcgctgacgagcaaaaaagtttatctgatatgaaagtagcagaattaaaagaacttgctaaaaagcgtgaaattaaaggctatagcgatatgaaaaaagatgagcttatcaaagctttagagggtgttaagtaa

SEQ ID NO: 409789 - DNA, 825 bp, Staphylococcus aureus
atgccacaaggacttactaaaacaagtaatcaaatcattccagaagtattagcgcctatgatgcaagcgcaactcgaaaagaaattgcgtttcgcttcatttgcagaagtagatagcacattacaaggacaaccgggagacactttgacattcccagcattcgtttatagcggagatgcacaagtagttgcagagggcgaaaaaatccctaccgacatcttagaaacgaaaaaacgtgaggctaaaatccgtaaaatcgctaaaggtacatctatcacagatgaggctttattaagtggttacggagaccctcaaggcgaacaagtacgtcaacacggtttagcacatgctaacaaagttgacaatgacgtattagaggctttaatgggagctaaacttactgttaatgcggacatcactaagttaaacggcttacaatcagcaatcgacaaatttaacgatgaagacttagaaccaatggttttatttgttaatccacttgatgctggtaagttacgcggagatgcatcaactaactttacacgtgcaaccgaattaggcgatgacatcatcgttaaaggtgcgtttggcgaagctctaggtgctatcattgtacgtactaataagttagaagctggcacagctattttagctaaaaaaggtgcagttaaattaatcttgaaacgtgatttcttcttagaagtagcgcgtgacgcatcaacaaaaacaactgcattatacagtgataagcactatgtagcatatttatatgatgaatctaaagcagtgaaaatcactaaaggttctggaagcttagaaatgtaa

SEQ ID NO: 409790 - DNA, 597 bp, Staphylococcus aureus
atggatttatacacattgttaggacaatttaaagacggagaaatcgacaagcagaaggtaattgatgcgattgacgaatcaaaatcgggaatggtaccacgttcgagactgaacgacaagaataccgaaattgaagagttgaaagaagagatttctaaacgtgatgaacaaattgtcaaattgcaagactctgttaaagatgatagcgagattcaaaaagaactcgaagaattaaagaatcaaaattcagagttggagacaaagtataaagaaacacaacttaataacgcagttaagttagcggttgctaaagaagcaaatgacgctaacgacattctagcattcatcaataaagatgaactggaattagtagacgacggcactgtaaaaggtttagatgaagcgattaaaacgcttaaagagtctaaaccttatttatttgcgtcgtctaagcctgtaggtaaaacaccacaaggcggaggtaatccggactcaggtgtaacgaaagaaaagtttgacaacatgagtgtcgctgaacgtaacgaattgtatttgaacgatcgtgagacattcgaaaaattagttaatcaaaattaa

SEQ ID NO: 409791 - DNA, 1419 bp, Staphylococcus aureus
ttgtaccctagccaaccaacacaaacagaaatatttgatgctattgtgaggattaacaacaaaccggaaacattggaagaaatgattgtcagatatataaaacaacatttagaaaagttatctgaaatctcaatcggtcaagaatattatgagcaacgtcctgatattgttaaggaacctaagccagttgatgctacaggagtagttgacccattgaaaccagatgacagaatgattaccaacttccatgctaacctagtagatcaaaaagtttcttatattgtaggtaagcctatcgcttttaaacatacagatgatgaagtagttaaacgtattgatgaagttttgggcaatagattcgatgataagttacacagtgtactaacaggagctagcaataaaggtattgaatggttgcatccataccttgatgaagagggagagttcaagttatttagagtaccagcagaacaaggtattcctatatggactgataaagagcacgaagaattagaggcgtttatcaggatgtataaattggaaaatgaaactaaagttgaatactgggataaaataacggttaattactacgtttatgaaaatgactcgcttattccggattactctaataatttggaaaattcaaaaacacattttagtacagggtcgtggggtaagattccatttattccattcaaaaataatgacttagaaatgtcagatatatttatgtataaaacattgattgatgcgtataacaggcgattatctgatttatccaatacttttaaagattcaaacgaattaacgtatgtattaaagaactatgatgaccaagagttgccagaattcaaacggttactacgttattacggggcgataaaagtatcggataacgggggtgtcgacacaatacaggtagaagtaccagttgaaaacagtaaaaagtatttagatgagttatatcaaaaaataatgttgtttggtcaagcggttgactttagttctgataaattcggttctgctccaagtggggttgcgttagagtttctatatactaacttaaacttgaaagcagataagttagcgcgtaaagctaaagttgctatacaggagttactttggtttgtgtttgagcacttcgacatcaaaggagaacataaagatgtcgatattagtttcaactacaacaaagtagcgaacacagaattacaagtacaaacagctcaacaatctatgggaattgtaagccatgaaacagtactagaaaatcacccgtttgtcgaagatttgcaagcagaactcgaacgaatagaacaagaacaaatggagtacaacaagcaactgcctaatttagatgacggaggtgctgacggtgcccaacaacaagaaagatctaacaataaagaatcagaatga

SEQ ID NO: 409792 - DNA, 1209 bp, Staphylococcus aureus
atgattaatgaaatgttaaacccgaaacaacaagaagtctggaactgctttataaacgataaacccaaagtattaatagcgagtggtgcaaaaagggcaggtaaaacatatgtgttcatcctgctttttttaatgcatatagctacttataaagacaaggggcttaacttcattattggaggagcaacacaagcatctataagacgtaacatactagatgatatggagttaatactaggtagagagttaacactcgacaaatctaacgcagtcaaaatattcggtaataaagtgtatgtattcgacggacaaaactcggatgcatggaaaaaagcgcgtggttttacttcagcaggtgcttttttaaatgagggaacagcattacacaatatgtttattaaagaagtgttctcacgttgtagttacaaaggcgcgagaatattaattgatacaaaccccgaaaacccaatgcatccagttaaaaaagattacattgataagagtggtcaacgattatcgaatggaagactaaatatcaaagcatttcaatttactttgttcgacaatacatttttagatgaagaatatattgaatcgattatagcgagtacaccaacaggaatgttcacagatcgtgacatttatggtaagtgggtttctgctgagggtgttgtatataaagatttcaaagaaaaagttcattacatcacagaagaagaatttaaaactaaacaaataaaaaggaaatatgcaggcgtcgactggggatatgagcattatggttctattatggttgtagcggaagacttcgacggaaacaagtacgttattgaagaacacgcacacagacataaagaaatagatgactgggtagctattgcaaaaggagttataaaaaggcatggcgatattcttttttattgtgatacagccagacctgaacatattgaacgatttaaaagagagaagataaaagcaagatatgctgacaaagctgttattgctggcattgaagttatttctaggttattcaagttaaataaaatattcattatcaaagaaaaagttagtttgtttaaagaagaaatatacaactatgtttggaaagataatgcagacgaaccagttaaattaaacgatgacacattagatgcgttaagatatgcagtttatacagctaataagccaagtggcacaggctttaattaa

SEQ ID NO: 409793 - DNA, 1107 bp, Staphylococcus aureus
atgcaacatcataaagtggctattatcggtgccggtgctgcaggtataggtatggccattaccttaaaagatttcggtataacagatgtcattattttagaaaaaggaacagtaggccattcatttaaacattggccgaaatcgacccgtacgattacgccatcatttacgtctaatggatttggcatgcctgatatgaatgcaatttctatggatacttcaccagcatttacatttaatgaagaacatatttccggagaaacatatgctgaatatttacaagtggttgccaaccattacgagctgaatatctttgaaaatacagttgttacaaatatatctgtagatgatgcatattatacgattgcaacgacaacagagacatatcacgcggattatatctttgtcgcaacaggtgattataatttccctaaaaagccatttaaatatggtattcattatagtgaaattgaagactttgataactttaataaggggcaatatgtggttatcggaggtaatgaaagtggctttgatgctgcatatcaacttgcaaaaaatggctctgacatcgcactttatactagcacaaccggtttaaatgatccggatgctgatcctagtgttagattgtcaccttatacacgtcagcgactaggtaatgtcattaaacaaggtgctcgtattgaaatgaatgtacattatacagttaaagatattgattttaacaacggacagtatcatatcagttttgatagcggacaaagtgtgcttacgcctcatgaaccaatactagcaactggctttgatgcaacaaaaaatccaatcgttcaacaattatttgcgacaacaaatcaagatattaaattaacaacacatgatgaatcgacacgttatccgaatatttttatgattggtgcaacagttgaaaatgataatgccaaattatgctatatctataaatttagagcgcgatttgcagtacttgcacatcttttaacacagcgggaaggcttaccagctaaacaagatgtcattgaaagttaccaaaaaaatcaaatgtatttagatgattattcatgttgtgaagtgtcatgcacatgttag

SEQ ID NO: 409794 - DNA, 1026 bp, Staphylococcus aureus
atgaaagccattcaaataaagaaatacaataaaaatagagatgtacaaattagagatattactattccagagatcaaatctactgaggtacttgtaaaagtagcttatgcagcaattaatccattagaaaatttaactattaatggaagtgtcaaattaattcaaaactataaaatgcctcaaactattggtaatgaactcacaggaacaattgttaaagtaggaagtaaagtcgaagattataaattaggcgataaaatatattcacgattaccaatcgatcgtataggtgcttttgcagagtatgtttctattgaatctaatgctattgcaaaattacctaaaaatttaaaccttaaaacaggtgcagcagtgccgttaacaggtttaactgcttatcaagcaattactgaagaattaaaagctatacctggtaaaacattgtttatacctggtggttcaggcagctttggacaaatggcagtacctatagcaaaatcattagggcttaaagttattgtatccggaagtccgagacttaaagatcaatttttagctaagggtgtcgatcaatatatagactacaaaactgagaattactgtgaagttttatctgacattgattatgttatagacacacttggaccaaatgaattcgataaagaattatcagttatgaaacctggtggtactattgtcagtcttattaatgcgcctaacaaagcatttgctgtgaaaaataatttttcaccatttaaaaaattgctatttggtttagcaggtaaaaaattcgataaaaaagctcaaaaaaagtcgatagattatcgttttatatttgtacgttcggatggtgagcaattaaaaattttaaataaaatcatcgaacaaaacaatatcataccagacatcgacgaccatattttcacaatagacgaaattgacaaagcacttgactatacatttaatcatcatacaaatggcaaggtattaatacgtattgataactctgacaacacaatttattga

SEQ ID NO: 409795 - DNA, 1011 bp, Staphylococcus aureus
atgaaaagtattacgtttgaagaacattatgtcattgaagatattcaaaaagaaacgatgaatgcgatatcagcagatcctaaaggtgtaccgatgaaagtaatgttagaaggccttgaaaaaaagaccggttttacaaatgccgacgaattatcacatcatgatgaacgtatccaatttatgaataatcaagacgttcaaattcaagtcttatcttatggaaatgggtctccttcaaatttagttggtcagaaagccattgaattatgtcaaaaagcaaatgatcaattggcaaattatattgcacaatatcccaatcgctttgtaggctttgcaactttacctatcaatgagcctgaagccgcagcgcgagaattcgaacgttgcatcaatgatttaggattcaaaggtgcgctcattatgggacgtgcacaagatggttttcttgatcaagacaaatatgacattattttcaaaacagctgaaaatttagacgtaccgatttatctacatcccgcgccagttaacagtgacatttatcaatcatactataaaggaaattatcctgaagtaactgcggcaacatttgcttgttttggttatggttggcacattgatgtcggtattcatgcaatacatcttgtattatctggcatttttgatcgttatccaaagttaaatatgattattggacattggggtgagtttatccccttcttcttagaacgtatggatgaagctttattcgctgaacatttgaaccaccctgtaagctattactttaaaaataatttttatatcacaccgagtggcatgttaacgaagccacagtttgatttagtcaagaaagaagtaggtattgatagaattctttatgctgctgattatccatatattgagcctgaaaaattaggtgtatttttagatgaactgggtttaacagatgaagaaaaagagaaaataagttatacaaatggtgctaaattattaggtttatcatctaacaattaa

SEQ ID NO: 409796 - DNA, 705 bp, Staphylococcus aureus
atgactaaaattgtgttaatcacaggaggcaataaagggttaggctatgcaagtgcagaggcacttaaagcattgggttacaaagtttatataggttctcgtaatgacgtaagaggacaacaagcatcacaaaaattaggtgttcattatgtacagttagatgttacaagtgactactcagtcaaaaatgcttataacatgattgctgaaaaagaaggccgtcttgatatcctcattaacaatgcaggtatatctggtcaattttcagcaccttccaaattgacacctcgtgacgttgaagaagtatatcaaacgaatgtatttggtatcgttcgaatgatgaacacattcgtccctctcttagaaaaatctgaacaacctgttgtcgtcaacgtatcaagtggtttaggttcatttggaatggttacaaaccccgaaacagctgaatctaaagtgaattcattagcttattgttcgtctaaatcggcagtaacaatgctaacgctacaatacgctaaaggattacctaacatgcaaatcaatgctgctgatccaggcgctacaaatactgatttagttggtgattttagcaataattcaaaacatgtttctgaagggatcaagccaatcattcaattagcaaccattgatgcagatggtccaacaggtacatttattaatggcgatggagagatgccttggtag

SEQ ID NO: 409797 - DNA, 708 bp, Staphylococcus aureus
atgaaattcgacttaattataagtaatattatgatagggatattagtgatttgttctgcatttgccttaatgtttgtcttttatattcaaagaaagttaacgccggaacaatacttttctttttcagaattctttttaataggaagaggtttaactatcaagaaaattttgaatagaatgatattgattgctagttttaactgtattttgtttttaatacttaagaatttttttgaaattgaattagtatgtagtgtgtgtatactaagtacattgttgggttcgattttaattatttatccggcgtttaaaattaggcatgatttacctaacaatgagatgaaaagtttgttgaactatatgtatgtatcttttgtttttttagcgcttattatttctactcttactgtatttactttagtagtattatttgatgatattagtatagtaacactttggcaagagcataaaagtggaataattttatatcttctattggtgatacctagtctattttttaatcctacaaattatgaaaagaaaatggaatatgccattgaaaaacatcgtgagagtaatagagagataaatgagacgataataaaaaataataatgaaacaattataccagacgagtcgaaaagttcttcaccattcaaaattaaaaaagtttttagattgttgaataggattatgaaagatgattga

SEQ ID NO: 409798 - DNA, 3129 bp, Staphylococcus aureus
atgatctttcaatttagtgaagatgatttagaacaggttgcactgaagtggtttgagggtcttggctattctgttaagaatggtcgagatagtagtgacaatgggattatgaatgaacgggagagcgacaaagatgttgtgcttgatgatcgtttggaagcagctttgagacgcattaatcctgaactaaacaatagtgcaattgaacaggcaattcatgaaatttctattgagaagtctcctagtttattagagaataatcgttctttccatgaaatgattactaatggtatcgaggttgaacactataatgatgatggtgagacgattaatgatttggtctatgtgcttgactttgataacccaggaaataatgatttcttagcggttaatcaattaactgttgtaaatggagattataaaaaaagacctgatattgtgttattcataaatggattaccagtagtggtaattgaactgaaaaattctacaaatgaatctgttggtattgaagacgggtatcatcagttagaaacttataaaatgagaattccacaattatttaatcataatgcagtattagtaacgagtgatggtgtcaatacaaaagctggttctttaactgctgattatgaccgttttatgacttggcgtactaaagatggaaaaactgaagattcatcaacgtttcgtagtttagatatattgattcacggtatgttaaataaagaggtactattagatttaattcgtcattttgttttgttccaagatgatggtaaaggaaatatagttaaaatattagctgcatatcatcaatattatgcggttaataaagctgttgatcgtgctatggaagcaacatctgaacatggtgatggtaagggcggcgttatttggcacacacaaggttctggtaagagtttgacaatggtcttcttctcaggaaagttaattcaaaaattaaataatccaacattagtggtcgtaacagaccgtaatgacttagacaatcaattatatggtacttttgttaagtccaaaggacgctcaggtaaaggattactaagacaaacacctaaacaagcagaatcacgaaaagaattgaaagaactattatctgtagaatcaggtggtattgtatttacaactatgcagaaattcgaacctgaagaaggtcaagtgacaatggatgctttaacagaacgtaaaaatgtagtagttatggcagacgaagcacaccgcacacaatatggttttaaagcaacttacaatgaaaaaggtgaaggtataaaatatggttatgcaaaatatttaagagacgctttacctaacgcttcgttcgttggttttactggaacacctgtatcttcgacagataagaatacgcaaatggtatttggtaattatattgatgtatatgatatgacacagtctgtagaagacggtagtacggttaaaatatactatgaaagtcgtattattccattaaatttaccaactgatttagatattgatgatgcatatgatgtcattacttttggccaagaagaagatactaaatctcgattgaaatctaaatggtcacgtatagaagctctatctggtgcagaaaaacgagtacatgctttagcgactgaaattattaatcactttgaaacaagacagaaggcaatgaacggtaaaggtatgattgtcacaatgagtcgtcgtattgcagttgatttatatgatgaaattataagacttaaacctgaatggcattctgatgatgacgacaaaggtgtaattaaagtcgttatgacaggttcatcaagtgatccgcaaaacttccaaaaacatataggtccgaaaaagagaagaaaccttttagagaatcgtatgaaagatattaatgatgaactgcaactcgtaattgtgcgagacatgtggttaacaggatttgatgtaccttcaatgcatacaatgtacatagataaaccgatgaaaggtcataatttaatgcaagctattgcacgtgttaatagagtatttaaagataaaccaggtggcttaattgttgactatgtaggtattgctgaaagcctgaaggaagcactaaaagagtatacggactctgatagagaacaaacaggtatagatacagataaagcgctagaactaatgttagtgaaatacgatatcattcaagatatgctatataaccatgactattctgactttgagtcagaagatcaattaaatcgctataatgctatctcaaatacgatggattatatcattggattaggtgagaaagaaagagagcgatttgtgacaacagttacagaactttctaaggcttttgcattatgtgcaacagaggaagctgctcaagaactaaatagtgaaattgcgtttttaaaagcagtaaaatcaggacttgttaaattattagctccacctaatgaaggaagcaagcttaaaaagacacctgctgaaatagaagcagaaataaatcaattgatttcaaagtcagttgtaactgaagaagttgtagatatttatcaaacactcggaattgaaaatccagatatctcaatattgtcggatgatttcttaaaagatgtagaaggactacagcaaaaaaatgttgcagttgaattgttgaacaaattactcaaaggacaagttaagtcattaatgaaaactaatactactgtatctaaaaggttttctgagatgctaagtaaatcaatacaaaaatataataaccgttctatcgaagcatcaaaagtcatagaagaattaattcaaatggcgaaagaaataaatcaagaaaaagaaagaggaaaagaattaggtttaagtactgaagaaattgcattttatgacgcattagcttcacatgaaacagcaaaagaagcgatggatgataaagaattaagggctattgcacatgaattaacaaaaacggttaagaataatatgagcgtagactggtcaaaacgtgagagcgcaaaggctaaaatgagagtccaagtaagacgactattaaagaaatatggttatccaccagacatacaaaaaatggcagtagaacaagtagtggaacaagcagaattaatggcaagtcaacaatataaataa

SEQ ID NO: 409799 - DNA, 1233 bp, Staphylococcus aureus
atggagtttgaaacatttaatttaactgatttatatactattagttcaggtttatcaaaaaatagaaaatattttggtactggtacaccttttttaacatttaaagatgtattcgataatttaatattacctaatgagttttctgggcaagttataactgaagaaaaagaaagagaaaagtattcagttaaaaaaggagacctttttttaacaagaactagtgagaaacaaaatgagttaggtataagtgcagtagctttaaaagactataaaaatgcgacttttaatggatttaccaaaagattaagaccaaacaaatattgtgagaataaattgttaccagtatttgctgcattttattttagaagtaataattttagaaatcaagtaaattctatgtctatcatgtctacaagagcaagtttaaataacgaaatgatttcaaaacttaaaattactatacctagtcttcaaaatcagatgaaaattagtcatatactattagcacttttaaaaaaagaaaaaatcaatcaaaaaatcatagcaaatcttgaagaactttctcaaacactattcaaacgttggtttgttgattttgaatttcctgatgaaaatggaaatccatacaaatcaagcggtggagagatggttgatagtgaattgggtgaaatacctaggagttggaaagttgatgaattaggaaattatataaaaataaaaagtggtaaaagacctaaaaataaagttgataaagaagatatagaaaatgtggtgccaataattggtgctagtaaaatagtgggttatacgaatgattatttatataatgaaaaaattattataattggtagggtaggaactcatggtgtaatccaaaggttttctacaagaacatggccatcagataatacttttgtaataacaagtgattttgaaagcattatatatcaagtacttaaaagtatagactatatatcattgaatagaggttctacacaacctctattatctcaaaaagatattaagaatactaaagtagtaatgcccaccaatgcaactttgctttcaaaatatcaaaagaaaaacaatcatattttaaaaatgatggatcaaaaaatcatagaaaacaagaaattaacccaactccgtgacacattattaccaaaattaatgtcaggtgaaattgagatacctgatgacatcgaggtgaatgaagatgatctttcaatttag

SEQ ID NO: 409800 - DNA, 1515 bp, Staphylococcus aureus
atggcaacaattggatttgaagaaaagttatggcaagcggcggataagttacgtggaagtatggatgcagcagaatataaaaatgtagcattaggtattatatttttaaaatatgtttctgattcttttgaggaaaagtatgaagaattattaaatgatgaatatgccgatgaagaagataaagatgaatacttagcagaaaatattttctgggttcctaaagaatcaagatggcaatacataaatgataattctaagaaaccagaaattggtcaaattatcgataaagcaatgatagcaattgaaagagaaaatgagtctttaaaaggcgtattacctaaagattacgcaagacctgcattagataaagaaaaattaggcgatattattgacctatttacattcaaagttggagattctgaaagtaagaagcaagatattttaggtcgtgtttatgaatactttatcgcaaaatttgcaagcgctgagggtaagaatgctggggaattctatacaccagcttcaatagttaaattgcttgttgaaatgattgaaccatatcaaggtagaatttatgacccttgttgtgggtcgggcggaatgtttgtacagagtgaacattttatcgaacgtcatcaaggtcgtatagatgatattgctgtttatggtcaagaatctaatccgactacttggaaattagcgaaaatgaatttggctattcgaggtatagataataatttaggtgatcatcatgcagacacatttcataatgatttacataaagatttgaaagctgattttatattggctaatccaccattcaatgcaagtgattggggacgagaaaaattacaagatgattaccgctggaaatttggtattccacctaaaggcaatgccaactatgcatggattgaacatatgatttctaaacttgccccaagtggtacagcaggatttgttttagcgaatggttcgatgtctacaagtggtaaagatgaattagaaatacgtaaaaacttaattgaacaagacatggttgagtgtattgtcacattaccagggcaactattctattcaactcaaattccagtatgtttgtggttcatgacaaaaaataaagctaaaaatggcaagaatgaacgacgtggagaagtactatttatagatgctagaaatataggaagcatggtatcaagaacattaaaagaattctcagatgatgaaataaaagatatagcaaatgtttatcactcatggcgtggaacaaacaataaccaatatgaagataaagcaggtttctgtaaagtagcaaagacagaagaaataaaaaacaatgaatatatcttaacgccgggacgttatgtaggattagcagaagtagaagaagactcagaaccatttgaacagaaaatggaaagaatcacagcagatttaagtgaacaatttgcgaaatcaaaagaactcgaggaccaaatccgtaagtcattggagggattaggttatggagtttga

SEQ ID NO: 409801 - DNA, 477 bp, Staphylococcus aureus
gtgaaaaaagatgagtacataaagttacatcaaagctatctaaatgaatatattaaatttgctgatgccaaggcattagctatcataagtattaatggctttattttaaattttaacttttcaaaacgtaatattaaatttcataatactgaagacattttcaattttacagcttttatattattgataattacaattatactagcagcatttgcagtatatccaagaacaaataatagaagcgaaaaaggaattattttttgggataatataaatagtatgggagaaaaagaatttatagagaaagtgaaatttgaaaaagaggaagaattacttgaaaagacgatacaacaaaattattttttagcaaaaactgcatctatgaaatattcaatcattagaaaggtttttataatttcagcattaggttattcctgtttattattttcaagtatctttcagattatatgctcttga

SEQ ID NO: 409802 - DNA, 1272 bp, Staphylococcus aureus
atggacaatcacataagaatttttgataatttatttcaaagtaatatttcaaaattccaaaaccttactagtaaatcatacattataagaaatgataatgaaaagaatagttatcttcctatggttcaagagataagagagttgtttggaaaagagggagaaattttttctaaaagtataggaacacatcctgacttttttggaatagaaaatactaatgaataccagtacatttgttccctgtttgtagatatatctgggtctacaaagctagctttgaaatatagtttggataaagttaaactttataaaaatgcgataatttctagtgctatagaaatatttcgtgcatttgacggtcatattcatagaatacaaggagatgcggtgcttgtttattttggacataaagaactggaaaaaagtgatgcaataattaatgcaatcaacgctgcgtcattaatgcagtattttaacgccacaacattaaaaaagttttttgaaagtgaaaatttagagccgttaaagattagaataggaattgattttggtgatgattctagtgtattgtggtcaaaatatggaattgatggaattaatgaaataacttctaccagtatacatactgacttagcatcaaaattacaaaacaaagccccttcaaataagattatgattggagaaaatataaataaatatcttgatattcctaaaaagtttagaagtataaaaattgagaagaacaatggtgttgatgttgagaaaagatatattttaaatacaaataatctgggaagatattctatggaagtgtttgaatgggaaaaatacttgaatagtttttcaatgttgcctcctttttctacagaaaatgaacaattttactcacctagagatttgaaaataagatgttggattattgatgaaaaaaatcaggataaatatgaatatattgaaagaggtagtgctttaaaaaaagaaatgaatttgttatttaaattagaaatttataatcaatgtctagaatttaaaaatattaaatggagagtggtaaactacggagaggaggcaaaaaaggacaaggaattagaatttgaaatgaatcagtatgaagggtatcagtattgtaatcaaaagacagcttatacaggattacattttatggaatgttatttgtacgacatcaatgataaaataatttgtcatgatagttttggtctttttataaatgataataatagagaagtgagaaaattaggaatagaggattga

SEQ ID NO: 409803 - DNA, 924 bp, Staphylococcus aureus
atgtattatccttatttgcgtgggaaacaaaatgaactatttgcaattaaagaattgttagagaaaggtttgattggtgattgtattcaacctataattgaaccaattaaatatacaaccacatttaaaaatactttgcaatactgtggtgaaaaagcattctctataaatttagtagtaaattcaaagttaactgaagaagagattagtaacgaaactgttgaacatttaactgaaataataacaaaaaacaaaagtgttattcaaaaagcttacttgggtccttctgatgaaggcaatgataggttgaaacagcaattttcaagtaatagtttagctattttaacaagtgtagatgactgggaaatgtttggagataaaaataaacttgaaatggtttttataccagatgatagacacattaaacgtaaattgcgtaatattccaaacaaaggcatcattatggatccttttaataaactaagtcgtaatgttgattatttagataatgatgacgagttttatagcgacgatcacctttattataaggaagatggatacgtagcattttcagactattctgttataggtggagaatatgtagacggtggcttttcgccattagctattgcgatacatattgtctattttgatgaggctaatgagctaagagttaagcattttgtctctgattctaataatgatagatcaaatccaggtaaaaagttttttgaggctgtagataaattagtaacatggtcaaaaaacttagatattaaaaatagatcttatgcgcttggacaatttgaagaattaaatgaaaataataagtatccaggcttaggtttaattaaaaggttatctatcatgcatcatctagaaattatgaatagatacttggagtctcaaaatgaaaatatgtga

SEQ ID NO: 409804 - DNA, 420 bp, Staphylococcus aureus
atgtcgaaaaagaaaattttaatattaactagtattatgttaatcatattaattagtgttgcaagtatctattttaaaatgaaatatgacgaaaaagaaaaacaaaaatcaatatactataaagaacaacaagcgcgcattacactttatctcaagcataacactaaagaaccgaacacgattaaatctgtgcatttcacaaaattggaaacaagtcctatgggaagtgctgtgattgaaggttacataaatgaaaacaaaaaagatgattttgttgcctatgcatcacctgaaaataactttcaatttgtaggtgatttaattaaaagtgaaagattaagtgagttactaaaaccagcgcatcaattaaaatcaccagatggtataaaaaaagaactaaataaaaagaagagttactaa

SEQ ID NO: 409805 - DNA, 822 bp, Staphylococcus aureus
atgaatcggcaggttatagaattttctaagtataatccttcggggaatatgacgatacttgttcattcaaaacatgatgctagtgaatatgcatctatcgccaatcagttgatggccgcaacacatgtatgttgtgaacaggtaggctttatagaatcaacacaaaatgatgatggcaatgattttcacttagttatgagcggtaatgaattttgcggtaatgcgacgatgtcatatatacatcatttgcaggaaagtcatttgcttaaagaccaacagtttaaggtgaaggtatctggctgttcggatttagtgcaatgcgcaattcatgattgccaatactatgaagttcaaatgccacaagcccatcgtgttgtaccaacaacaattaatatgggtaatcattcatggaaagcaatagaaattatttatgaaacatatgtacattatgtgattccagttaaacaagtaacaacagaaattcaacatttggttgaatcgtatgttcgtaagcaacaatggaatcacaaatataaaacagtaggtatgatgctttttgatgaacaacgtcaatttttacagccattaatctatataccagaaatccaaagtttaatttgggaaaatagctgtggttctggtacagcatcaattggggtttttaataattatcaacgtaatgacgcatgtaaagattttacagtacatcagccagggggcagtattttagtgacatcaaagcgatgtcatcaattgggatatcaaacttcaattaaaggacaggttacaactgtagctacaggaaaagcatatatagaataa

SEQ ID NO: 409806 - DNA, 447 bp, Staphylococcus aureus
atggaacaaatcacattaaccaaagaagagttgaaagaaattatagcaaaagaagttagagaggctataaatggcaagaaaccaatcagttcaggttcaattttcaacaaagtaagaatcagccataacgattttgatgaaattaataaaaagtttgcttatacagaacgtttaagaggtgctgacaatctcggcttaggacatccattatctttgaagaaatatcaacacggaataggatgttatgaaaattacaaaacatacgctagtgaaattcatgatcacattagaaaacttacattatcagcttttggtgtaacgcttaattctgatttgaaagagagtgaatacgatgaagctagcagaatgtatgacatgttaaagaacttctatttatatcgttaccaaaaacgaattgaaaacttgtcaattgaagatttcgaataa

SEQ ID NO: 409807 - DNA, 540 bp, Staphylococcus aureus
atggaagagaaacgatataaagtttatcaaagaggcgaaataatttatgcagattttggtaaaggtgtaggtcatgagttttcatacaaacacttttgcatagtcataaacaaaaaggataataaaaataacggcaaagtgaccgtaatccctttaacttccaaaagcaaacacaatgcttttgtaaatatacatcttataaaaccttttttaaatacactaaaacaatcaattgccaaacacgagaaaaagatagaatcgattgaaaacattataaatcaaaatcccaatgatttaaaagtcattgtttatgcaaggtttttgtgtgactccttaaagaacgaaatgaaacaatacgattttgtggaaaacaaattaaaaaacttagttgacaaaagttcttatgcaaaaacacaggatattactacaataagtaaggatagaattttaaattatattaaagatttaagcgttttaattagattgccgaaacacgaaactgaccgattggttaacatctgtttcaaaaaaatgagttga

SEQ ID NO: 409808 - DNA, 444 bp, Staphylococcus aureus; identical to SEQ ID NO: 406762

SEQ ID NO: 409809 - DNA, 717 bp, Staphylococcus aureus
atgaaaaagaacatcacgaacaaaataatattaacagcaacattgttaatattaggtacttcttcagctcaacttcctaacacaccaatcggtttttcatctgaagctaaagcttatcatattggccaagacgaaacgaacatcaatgaattaatcaaatattacacacaaaagcctctcacattttcaaatagatggttataccaatatgatgacggcaacatttatgttgaatttaagcgttattcttggtctgcacatatacgcttatggggtgctgaaagttggggcaacattaatcaattaagagaccgctatgtagacgtgtttggtttaaaagacaaagacactagacgattatggtgggtatatactgatacatttacaggtggtgttacacctgcagcatcgtcttctgataagccttataatatttatgtacaatataaagataaactacaaacatttatcggcgcacataagatatatcaaggtaacaaaccagttttaacgttaaaagaaattgatttccgagtacgtgaatcattaataaaaaataaaatactatataatgaaaatcgcaataaaggtaatattcatattaccggtggtggtaataactttacaattgatttaagtaaaagattacattctgatcttgcaaatgtttatgttaaaaatcctcaaaaaataacagtcgaagtcctcattgattaa

SEQ ID NO: 409810 - DNA, 726 bp, Staphylococcus aureus
atgaaaaaaaacattacgaaaaaaattattttatcatcagcgttgttactattaggcgctgtatcaacacaacttcctaacacaccaatcagttctaaatctgaagctaaagcttattatattaatcaagaggaaacaaatgtaagtgagttaatcaagtattacactcagcaacatttaaccttttcaaataaatggttatggcaaaaagataatggcacaattcatgcaacgttacttcagatatcatggtatagccatattcaagtatttggccctgaaagttggggtaatattaatcaattaagagataaatatgtagatattttcggcataaaagaccaagaaactattgactcatatgcactatctcaagaaacatttactggtggcgttacacctgcagcaaaacctaacgataaacactataaattgaatgtaacatataaagataaagatgaaacatttattggtggatatccattttatacaggtaataagccagttttaactttaaaagaagttgatttccgtatccgacaaacattaattaaaaacaaaaaattatatcaagataaatataataaaggtcaactcacgattactggtgacgataataattacacaattgatttaagtaagagattaccgtcaactgacgcaaataaatatgttaaaaatcctcaaaatgccaaaattgaagttaccctcgaaaaatctaactag

SEQ ID NO: 409811 - DNA, 1206 bp, Staphylococcus aureus
atgtggtttgaaaaatttaaaaataagaacaatgaaacgaagtatagatactacgagaaatacaaagatccgtatacagataaatggaaacgtgtaagtgttgtcttgaataagaatacaaagcaatcgcaaaaagaggcaatgtttcgattagaagataagataaaagaaaaattgaataaccagtcatcaagcattttaaaaactttgacttttcatacactattagatgaatggtttgaatatcatacaaaaacatctggctttaaagtaacgacgcttgataatttgaaaacaagaatcaaaaacatcaaaaagaacagttctcaaaatttacttttaaacaaaattgatacaaagtacatgcaaacatttattaacgaattatcaaacatatattctgaaaatcaggtaaagcgtcaacttggacatatgaaagaagctattaaatacgccgttaaattttacaattatccaaacgaacacatattaaatagcgtcacactaccaaagaagagtaagacgatagaagatatagaaaaagaagaagcgaaaatgtataactatttagagatggaacaggtaatacagatacgcgattttatactgaacgataataacatgcagtatagagctcgtattttagttgctggggctgtagaagttcaagctttaacaggtatgcgcataggtgagttattagctctccaagttaaagatgttgacctcaaaaataaaacgatcgatattaatggcactattcacagaatcaaatgtaatgctggatttggtcacaaagatactactaagaccgcaggttcaagaagaaaaatcgccatcaattcaaggatagcaaatgtattgaaaaaaataatgttagaaaataaaaagatgcaacaatgggaaccaagctatgttgatagagggtttatattcacaacttgccaaggaaatcctatgcaaggcagtaggataaacaaacgattgtcctcagctgcagaatcattaaatataaataaaaaagttactactcacacactaaggcatacacacataagtttattggcggaaatgaatatatcgttaaaagcaattatgaaaagagtaggacatacagatgaaaaaacgactataaaggtgtatacacatgtaacagagaaaatggacagagagttagagcaaaaattagaaaaacttgtgtactaa

SEQ ID NO: 409812 - DNA, 801 bp, Staphylococcus aureus
atgaaatttgagaatcgtgttcaacgttatcaacatttatttacaaaaactgataaacgcatcgtcaattatataagacaaaatggctatagcgatgccttttcaacgattaactccttagcccatgcgattggtacatcaccagcaacgatgacacgctttagtcataagctggattatgagaatttccaagatttaaaatttaatattcaacaagaaatgacagagacagttattgaaaatagcccaattattcaaagaattcataaatatcatcaacaaatcattcaacaaactggtgaatttattgataacgacattatccaaacctttatcgacaaacttcaatcaagtcgacatatactctttgctggactaggtagctctggtttatcagcgactgaattttattatcgtatgattcgtatggggctaaaaggtaatgttactaccgattcacatttaatgaaaatatcggcatccctactatctcattcggatatgtttattgctatgtcaaatagtggtaatacttcggaattaatttctgcagcggaagtcgccaaatctcatggtgcatatgtcgttgccatcacaaatttcgaaggtagtaaacttacagattgtgcagatttagtacttttaacaacggatcaatcgcgtaataccgaccatcaatttatcaacacacaaattgcgacactctttttaatcgatatcgtgagttatcatttattagaaaatacgaatctgagtcaaacttatcaacatactaaatctattatcctagacaacaaataa

SEQ ID NO: 409813 - DNA, 489 bp, Staphylococcus aureus
atgactttcgaagaaaaactaagtcaaatgtacaacgagattgcgaatgagattagcagcatgataccagtagagtgggaaaaggtatatgtaattgcctatgtagatgatggaggtggagaggtcatttttaattatactaaaccaggtagcgatgaattgaattattacacatatatccctagagagtataatgtctctgaaaaagtattttatgatttgtggacggatttatatagattgtttaagaagttaagaaatgcatttaaagaagaaggacttgaaccatggacatcatgtgaatttgactttgcaagagatggcaaattaaatgtatcttttgattatattgattgggtaaatacagagtttgatcaattgggccgtgaaaactattatatgtataaaaagtttggtgttttaccagaaacggaatatgaaatggaagaaattcgagcagtagagaagtatgttaaagagcaagagtag

SEQ ID NO: 409814 - DNA, 327 bp, Staphylococcus aureus; identical to SEQ ID NO: 406666

SEQ ID NO: 409815 - DNA, 471 bp, Staphylococcus aureus
gtggcatataataaaggggaagatattaaagaacccctattcatatcttatgataaatataatgaatatagctcaatatcagataaagttgaaaatggcgatttattagtaacgggtgtgggcacaattggagtaccatttttaataaaagataatacgccgctttactttaaagatggtaatattatttggttaaagaatagagggagtttggatgaatattttctattttattcttttataaatgcaaatattcaaagctatataaaaaaagtggcaggtgtgggtactgttggcacatacacaatagctaatgcaaaaaaaacaccaatttttgaaccaataaaattagaacaattaaaaatagggggatttttcaataaaatcgataatttaattaagttacaagttcacaaagtagaaataattaaacaacgtaaacaagggttacttcagaaaatatttatgtaa

SEQ ID NO: 409816 - DNA, 855 bp, Staphylococcus aureus
atggttgaaaacataagaactgaattattttttttaaagcagttcggttttaataatacccttttacaagaaatttttataaagggactagatcctataaaaactattttcagtaatgaatatctaatacgtgctaatataggtcgtaaatttactgataaagatgtattgttagccaatgattactataaatatagagaattcaaatattatttatttaacaaggatgaatttttcagagatagtaaaagtaaaatatattttaaatttgatgaaactaacataactaagctattaccagaaaaaataatgcctctctttatgtatacaaaagggaataattcacttttagatattaaaaaacaaagggtagctataataggtactcgtcatccttcaaatagagcaataaaaataacgaaaaaaataactcaaaaattcttggaagataactatgtaattgttagtggtttagcagaaggtattgatactatatcccataaaactgctattaaatataatggtaatacaattgcaatattaccaacaaatttcaaaaatatttatcctaaagaaaatatagagttagcaaaagaaatattggacaaaggattattgctcacatctattggaccaaatgaaaatacttataaatctagttttttagatagaaataaatatatagcaaatattagcgatatagtggtagtaactgaaacgaatttaaaaagtggaactatgaatacaatcagaagtgcgagtatagcagggaaaaagatcttgttcgtaaatcaaggagataatctaattaataacaaaatttatgaatttggtggggaaatgatagatgactaa

SEQ ID NO: 409817 - DNA, 1182 bp, Staphylococcus aureus
atgactaaaaaaaacaaaagcattttaatatcaaagttattattttttacagaaaacaataaattaattgaagaaaatttaagaattgcagatctgttttatgaacatgatatagcattggggattttagctcgatctacaacaataaatatattacgctccaaaattccaacagattatcaagagaaaataaattttttgagtagagatgataaaaataaaaaagattacataaagcaaaacaaagatttaattattgctgtaataggagtagttaatgaagatgctatatactcttttaactgtagattaccgttatttaatccagaaaaattaattagtaaagaattggatatatctgaaaaagtaaaacaatatggtttgcctatcaataagttcgaaaatgttattgattgtttaaaggcatatgaaattcatcaagaaaattattttaatataccatttaatcaaaaatttagtgtaataagtttgaataatgcaaatacatatcaaagtccgaaggatgaagaaaggataaagaatattttttctgcaaatttaaaaggtagcgtatctgagagggatcaagaaattttattaattttactttttcatttgattaacgaggtaagaacaaatagttattatgatagtgttaagtattggggtacatttccttcttctgatcccgaaaataaaaatacatctatttcatttttaaaggaatgcgttaggaaaattcttaatggtttgccaaaaaagggatcagaattgctaatcagacaaaaagaaatgcaatcaaaacatactactagaagtacagaacgtattaatattaaaagcaacaaagattttgaaactctaatagtgaatccagaactagttaataaaattgaaggagaggtagtttgtattatagatgattacataactaatgggtattcagcggaggcagctaaacatttgcttttagcagcaggagctaaagaagttatttttcttgcatttggtaaattcggaacgaaatattactccacaaattataaaataaaaggtgatgtatcaagtaattatacatatgaatttgaaagtgaattactttgcgaaagggtttatgaaggaaagcaagtttataacaatggtaataattctgaaatatcacgctttaatgaattaatttaa

SEQ ID NO: 409818 - DNA, 441 bp, Staphylococcus aureus
atgaaaaaatatatcaaactacttattatagtaattataacatgtttaattatagtagggtatttgttacacaaaagtaaaaaagaacattatattgagacacaagaaaagcgaatagatttgtattttaaatataatcttaacaattatcattcaatgaaagttacaagttttaaaaagaatccaatggggggttattttataaaaggctttgtcaataataaaaaaaattataaatttgatgctgtgatattttctgatactaataaacaatttaaaggagatttaggttataaagaggatgaaataggtgaattatttagagaaaaaaatgctaatgaccgattaactgtcgatgaaataattgaaaaagaacacttggacaaaagtgaatatgaagccgagccaccgttatttttcttttcaggtccacttgaataa

SEQ ID NO: 409819 - DNA, 573 bp, Staphylococcus aureus
atggagaaaaacgaatatacagctaaatataatgaatataatcaattattagacgctacttactcgcaagctgtagcataccttttaaataaatatggcgctgtaaccgatgactattataaggaaaaatcatacacacgatttttaaatggagaaatcaaaagtattacaaaaggaaaatacactagagctagcgaaggattatattgtcatcacataagcgaagacaaattccaaaacttatctgacctaagattcatttccgaatttaagtactcatacaactatcaaaagaaagaaaacttagtttactgcgatttaatcgagcatttaattttacatgcaattattacaaaagaatctgatggtcaatttggcgcggctggattatgtcaaatgatcaaaccaacagtcattgattggtacattagcgaatataatccaaaaccagcatggatgcaagccaccaaagcacgtgcctatttgcctagaatattagtagagaaactactcattaaaattgacgatatgttagaaggaatagaaatatatgatttccttgagtctagataa

SEQ ID NO: 409820 - DNA, 573 bp, Staphylococcus aureus
atggggtataaaaggaaaacggtcttaactcagcgtaatataaaaaatgctttagtgagtttattagagaacaataagtttgatttcattacaatcaatcaaatagtagaagaagcggaaataacaagaagtactttttacaggtattatgatgataaatatgaattaatatcagaaatagaagaagaaattttagaacatattcataaagaaaggcaaaagatagacgagaacgcttcagagaagaatttattagatattgagatgtttaaatatctgtttgaaacattagagccatattcgaacacgatatatcgattgttaggatataatggtgattccagttttgagatgaaactcaagaatgaaatatcaagaagatttatagatatagaacaacgtaatcatatttctcaagtacgagcagacttagtaaaggaatatgtatttgttattatgataaaaacattacaatattggtcagctcataaagacgaagtagatattgatgaaatagctttaacaattagggatatccagttaaaaggattaagaaaagcaatagggttataa

SEQ ID NO: 409821 - DNA, 420 bp, Staphylococcus aureus
atgtcaaaaaaatacattttaattattatcggtactatattcactatagccttcattattgtaggcgtcattcttataatgaagtataacgagcttatgaaacaaaaagaattttactacaagcagcaacaagaacgtattacattgtatcttaaacataatacaaaagagcctaatacgattaagtcggtacattttacaagtttggacaaaggtcctcttgatgaaagaatcattgaaggctatatcaataataataaggacgacggttttgttgcttacatggtacctgcatataatcatcagtttggtggtgatatgcttagagacgaaacggtacagaaattactaaaaccatcaaaggataggaaatctcctgatcaaattaaaaaagaattgaaagagaaaaggtctaagtaa

SEQ ID NO: 409822 - DNA, 603 bp, Staphylococcus aureus
atgttaattagtcttgtaatcccagtttttgctttgttagttattggtggtattatttggatgattatagaaggtatagtacatatttcaaaaaagaataaagcaattgataacttttttaaccaagttaataaagtaagtgagacatataaattcgctactacttttttatttctaatcttggctacggctggtatttctcaattttatctatattatatagtatcagcgtttcttttttggcttgtcatacttacctttggtattgcaggtatcatttttttaatgccatatggattatgttttctaccgttttataagcaaaaaaagaaaaaacagacatttaaaaaatacatggtttacactacgattggtttgtcaatttgtctaggcttatctctagttttggttcacactacgaaaatttatatggacgaaggtggcgtaagatactattacggtagttttgtaatgaaacaagcgggcggttatgcttatttagctttagcagtactttcaacgttgttaattgttgcgaaaaaagctacaaataaaaataaagaaatcgaaaccgtcgacaatacaaatataacggaaagataa

SEQ ID NO: 409823 - DNA, 1434 bp, Staphylococcus aureus
atgtataaaaaaatgttcacaattttaattacgttattttctataatgtttatggttcctaatgatacttttgcagaaggtaagcacaacatgatggacatgaaagaaaatgatcaaaagcgaaatgatatgatggatatgaaaagtcatgacgaaagaaaaaatttgaattcttcacaaggaaaaaatgaaataacatttcccaaagttttagatcctaaaaaagataacaatggttataaaagttatacattaaaagcgcagaaaggaaagacagaattttacaaaggtaatttctctaacactttaggatacaatggaaatttacttgggccaactttaaaattaaaaaaaggagataaggttaaaattaagttagtcaacaacttagatgaaaatacaacatttcattggcatgggttagaaatagatggaaaagtggatggaggcccttctcaagttataaaaccaggaaaagaaaaaacaataaaatttgaggttaaacaagaggctgctacattatggtatcatccccacccctccccaaatacagctaaacaagtttataatggtttatcagggttattatatatagaggatgacaaaaagaataattatcctagcaattatgggaaaaatgatttgcctataataatccaagataaaacatttgtatctaaaaaattaaattatacaaaaacgaaagatgaagatggtactcaaggtgatacagtccttgtgaatgggaaagtagatcctaaattaacaacaaaagaaggaaaaatacgtttgagacttttaaatggctccaatgctcgggatttaaatcttaagctaagtaataatcaaagttttgaatatattgcttcagaaggcggccatttagaaaagactaaaaagttaaaagaaattaatttagctccttcagcaagaaaagaaatagtaatagatttatctaaaatgaaagaagaaaaagtcaatcttgttgataatgatgaaacagtaattttaccaattattaacaaagaaaaaagtactaacaaagacactactccaaaagtagataaaaaaatcaaattagaaggtatggacgataatgttactattaatggcaaaaaattcgatcctaacagaatagatttcacacaaaaggtaaaccgtaaagaaacttgggaaattgaaaacgtcaaagataaaatgagtggtatgaagcacccgttccatatccacggaacgcaatttaaagttttatcagtggatgggaagaaaccttcagaagatatgagaggcaaaaaagacgttatatctctggaacctggacaaaaagccaaaatagaagtggtttttaaaaatactgggacatacatgttccattgtcacatacttgagcatgaagataatggaatgatgggacaaataaaagtaacaaaataa

SEQ ID NO: 409824 - DNA, 291 bp, Staphylococcus aureus
atggactatacacgtcttaacacggatgaacttacgttcatagaatcatattatcaccagaatctttcagttaaagagatttcgagtagattgaaacgttctagacagacaatttataacgtaatcaatgtttttaagtcggggatgtctgcccttgaatattatcaagaatacaaacaaagaaagtctaattgtgggaggcatagaatagttcttccagaagaacagtctgattatatccgagagtatgtaaagctaaagctgcaactgaaactatcaaaaatgagttaa

SEQ ID NO: 409825 - DNA, 1089 bp, Staphylococcus aureus
atggaaaataaaaataataggtattcaattcgtaaattttcagttggtgtaggatctattttaatagctagttttataatgatttttcaaaatgaagctcatgcttctgaaaaagcaatagaaacacctaaagaggaaaaagcaatagaaacacctaaagaggaaaaagcaatagaaacacctaaagaggaaaaagcaatagaaacacctaaagaggaaaaagcaatagaaacacctaaagaagaaaaagcaatagaaacacctaaaaattctaatgatttgaagtttttaaaggatgcaaaattttcttcagattcagaaaatttagatatacgtcttagacctgaatataatgttgggaatgcattagtcgtaagagtagataaagaaataaatcctgaaaaatttgtggattatccagaaggatacacagtacaaagttatgtgtcaaaaggatcagattatccaagtgttgaaaagatagttaaaaataaaataacaggtatgtataaaataacgtatactcttatggataaagctggaaatcctgttaatggttctgatgggcaggttgtcattcgtagccttaatatatatttttatgatcctacaccagtattagaaagtattgataaagtaaataagaaaataaaagatgggaactacagtaatggagatgaagttaagaaagagctagataaaataagagttgacattgaaagacctaaagaaataccaaatatcaaagaatttttaagtaaggttgatatggaagaaaaaaaattaaaagtaacagatacaactgcaccagaggcaccaagtgtaaatgacacagaagtaggaagtaaaaaagtgtcaggaaaaggacacgaagtaggaaatactgtaactgttacattcccagatggaaaaacagcaacaagtaaagtagatgaaaaaggcaacaattataaaaatgaaaagcttctaccaaatacaggtatgaaacaagaaggaaaaaatacagctttttcatcaatcataataatattgatggcatcaatgttatttattaataaacgtagaaaaaaagaaaataaagaaatatag

SEQ ID NO: 409826 - DNA, 819 bp, Staphylococcus aureus
atggactatacacgtcttaacacggatgaacttacgttcatagaatcatattatcaccagaatctttcagttaaagagatttcgagtagattgaaacgttctatacagacaatttataacgtaatcaatgcttttaagtcggggatgtctgcccttgaatattatcaagaatacaaacaaagaaagtctaattgtgggaggcatagaatagttcttccagaagaacagtctgattatatccgagagaaaatagctgatggatggacacctaatactattattggcagaggtgaacgcacgatcaactgttctgttaaaacactttacagaatgtttaaagagaacatttttgctgtacatgatttacctatgaaaggcaaaagaaagccaaatggtcattctgaaaaaagaggcagacagacttttaaaagaaatatttctgaaagaatagaagaatttcctttattcaataaggagtttgggcatcttgaaggaaatactattgttggtcgtcgtcatggtagtgcaatcattactttggtagaaagagtatccaagatgattatcaccttacgccccttaggtcgtaaggcaactgatatagaaaacgctctacactcaatgttttcatctttaccttctcatatatttaaatcaattacttttgattgtggtaaggagttctcaaactggaaaacaatatgcacctgtcatgatatatctatattttttgctgatccaggcaagccatcacagcgaggtttaaatgaacattctaacggaatacttagacgcagtggattagataaactctattaa

SEQ ID NO: 409827 - DNA, 168 bp, Staphylococcus aureus
ttgaaaattggtgatttggcgaagccagatatttcaagagatttagtattttttgatgtgggggccaaaattttgttagtgttccacctttttaatgagaaaggttgggttattttggctaacaaagaactgaaaattagaaatatagatagtggattgctaggttga

SEQ ID NO: 409828 - DNA, 432 bp, Staphylococcus aureus
ttggaaaataaaagtaatggtttagttggatatgctatagcaactttttgtattatttttggctttttttggtttatgtttggtggtggaggttggatttggataggttttccgtttttaatatttggattcttaggactacttgttgagttgagtgaagaaggctataagaggtattgctattttactggtggagttggaatgattttcttatctttgtattttgtagattatgaattttttgttctgaaatttatatttgccattttaatttgtggtgctatgacttgctttgtagttggtgctatttatgctttcagaatttctaatggtaaagcttcttttgctgatacgctttttaaggtttttgatattgctggtgctgtatattctgcttatttattattcaaagaaattgttaatttcttttag

SEQ ID NO: 409829 - DNA, 267 bp, Staphylococcus aureus
atgccaataccaactaatgcacctacaattaatgttataggtaacgttaaactggatatcgacacacctaaaatcggaaatagtttaacaagtgatgcgattttagttcttaaaaacgcgaatataccaccagctttattaacgtttattaacaagggtcctaaaactgtcattgcattccccatcacgctgataaataaaccgaacataaaaactaaaggacctaaaactgctgcaaataatccaaacccaacaaccgctaattga

SEQ ID NO: 409830 - DNA, 1143 bp, Staphylococcus aureus
atgattaaaaaaagtttaatagttccactatatattaatattttcttagtatttacagctattagtttagttgttcctagcttgccattaatcattaaagatttaaatatagatggtgatgcttttgggatacttattgctgtattttctctttttcaaatgattttttcgcctatagttggctttttttctgatagatacgctaaaaagcactttttatctattggcttgttactttatatcgtttctgaatttttatttggaattggtatggggttctatacacttttgtcttcgaggatactcggtggtataagtgcggcgttaatccaaacttccgttattggtattattggtgacatatctgatgaagctaatcgcgataaaaatttcggcacgttttcagcaatcacgtcattaggctttatcataggccctggtataggcgcattgtttgctacatttcatcttagactaccgtattttatagctatggctataggtatcattatgttaataattaatttaaatttgaaaataccacatgttcaaacattggcatcaaaagaaaataaattagcaactttatcatttaaatatttgaaactttatttattaccagcgatggtgatacttttattagctttcggattagctgcgattgaagaattgtatccgttatatctcgtagataaggcagactttacttcgtttcatattgcccttgctattatcggtggttcattgttgggggcgctaacacaatatttggtttatcctaaaatctcaaggcatttacatgagttttctattattatcattagctctatttattcaataatggtattatgtattttgttactcttaaattctgtcatagcacttgttttaattagttgtgttatttttataggctttgatattatacggccagcaattactgtatatttatcaaaaatcgcaaaagataagcaaggtttagcaggttctatgaactcaacctttacatctttaggtacgttaattgcccccattattgcaggttacttttacgtacaaaacataaatgcgccagtttatatcgctattctgacgataattttaacgataattgctttgatttttttgccaaaaaaagaataa

SEQ ID NO: 409831 - DNA, 465 bp, Staphylococcus aureus
gtgattagttctgataaagttgcagatatgaaaggtcagatatttaaacaattgagattagcgaatgaagaaatggaaaatcgtttccgattaatgacggaaagcgaagattatcgaattggacatgattttagaagttttgatatgcctgcatacttcgttatttttgatgagtttacagcagttacatcaacattagataaaaaagaattacaggaaatgaatgattatcttgtaaatattattatgaaaggtcatcatgcaggtatatttatgtttttaacagcgcaacgtcctgatgcagatgtcattaaagggaatgtacgtgaccaattgggattacgcgtatctttaggtaatttatcaactgatggttataaaatgatctttggccaaactgataaggaatttcaatcaatacatgaatcaggtattggaggaggttatatctctattttaggataa

SEQ ID NO: 409832 - DNA, 405 bp, Staphylococcus aureus
atgagtgtgaaagtgataggtgataaagcattagaaagagaattagaaaaacgttttggcataaaagagatggtaaaagttcaagataaggcgttaatagctggtgctaaggtaattgttgaagaagtaaaaaaacaactaaagccctcaaaagatacgggagcattaattaatgaggtaagttttagtaaacctgaatggataaacggaaaacgtacaattactgttcattggcgaggttctaaagaccgttataaaatcgtacatttaattgaatatggacacgttcaaaaaggaacaggtaaatttatcaaacctaaagctatgggcggtgttaatagagcaataagacaagggcaaaataagtattttgagacgctaaaaagggagttgaaaaaattgtga

SEQ ID NO: 409833 - DNA, 408 bp, Staphylococcus aureus
gtgattgatattttgtacaaagttcatgaagtgattagtcaagacagaattattagagagcacgtaaatatcaataatattaagttcaataaataccctaatgtaaaagatactgatgtaccttttattgttattgacgatatcgacgacccaatacctacaacttatactgacggagatgagtgtgcatatagttatattgtccaaatagatgtttttgttaagtacaatgatgaatataatgcgagaatcataagaaataagatatctaatcgcattcaaaagttattatggtctgaactaaaaatgggaaatgtttcaaatggaaaaccggaatatatagaagaatttaaaacatatagaagctctcgcgtttacgagggcattttttataaggaggaaaattaa

SEQ ID NO: 409834 - DNA, 645 bp, Staphylococcus aureus
atggcagtaaaacatgcaagtgcgccaaaggcgtatattaacattactggtttaggtttcgctaaattaacgaaagaaggcgcggaattaaaatatagtgatattacaaaaacaagaggattacaaaaaattggtgttgaaactggtggagaactaaaaacagcttatgctgatggcggtccaattgaatcagggaatacagacggagaaggtaaaatctcattacaaatgcatgcgttccctaaagagattcgcaaaattgtttttaatgaagattatgatgaagatggcgtttacgaagagaaacaaggtaaacaaaacaattacgtagctgtatggttcagacaagagcgtagagacggtacatttagaacagttttattacctaaagttatgtttacaaatcctaaaatcgatggagaaacggctgagaaagattgggatttctcaagtgaagaggttgaaggtgaggcacttttccctttagttgataataaaaagtcagtacgtaagtatatctttgattcagctaacatgacaaatcatgatggagacggtgaaaaaggcgaagaggctttcttaaagaaaattttaggcgaagaatatactggaaacgtgacagagggtaacgaagaaactttgtaa

SEQ ID NO: 409835 - DNA, 351 bp, Staphylococcus aureus
atggcaaaattaaaacgtaacattattcaattagtagaagacccgaaagcaaatgaaattaaattacaaacgtacttaacaccacacttcatttcatttgaaattgtatacgaagcaatggatttaatcgatgatattgaggacgaaaatagcacgatgaaaccaagagaaatcgctgacagattgatggatatggttgtaaaaatttacgataaccaattcacagttaaagacctaaaagaacgtatgcatgcacctgatggaatgaatgcacttcgtgaacaagtgattttcattactcaaggtcagcaaactgaggaaactagaaattttatccagaacatgaaataa

SEQ ID NO: 409836 - DNA, 138 bp, Staphylococcus aureus
atgatggacttaattgaaaatggtaaagacgctaacgaagttttaaaaatgccatttcattatgtactttccatatatcaaaataaaaacaataacatttctgaagaaaaagcagaggctttaattgatgcgttttaa

SEQ ID NO: 409837 - DNA, 396 bp, Staphylococcus aureus
atgccaattggaccagttaaagccgtgaagacagttcctaatataggtactttagtcgataaaaaactaattaatccatcagcctttgcaatactagctaataatggagctaatacagttactgcgttgccaactgtgcttatgaatgcacctaatccaaaaactacaggaccaattgcagcagcaataccaccgaatataacaatcgaccttttagatccatcacttaaacttgaaaaccaatcaactgctacagatagctttttgattagttcttccattactggagcaaacgcactttcaatagaagtccatacatcagcacctactaattttaatttattcattgctactttaaatctttcggagccactttcagaatctttaaacgtttga

SEQ ID NO: 409838 - DNA, 213 bp, Staphylococcus aureus; identical to SEQ ID NO: 408503

SEQ ID NO: 409839 - DNA, 675 bp, Staphylococcus aureus
atgaattatttcagatataagcaatttgacaaagatgtcattactgtagccgttggctactatctaagatatgcattaagttatcgtgatatatctgaaatattgagagaacgaggcatctatgttcatcattcaacaatttatcgatgggtacaggaatatgctcctattttgtatcaaatttggaagaaaaagaataagcaagcttattataaatggcatatagatgagacgtatatcaaaattaaagggcaatggaattatttatatcgcgctattgatgcagatggccatacactagatatttcgttacgtaagaaacgagataatcactcagcatatacgtttattaaacgtcttattaaacaatttggcaaacctcaaatgataattacaaaccaagccccttcaacgaaggtggcaatgtccaaagtgattaaagattttaaacttacccccaactgtcattgtacctctaaatatttaaataatctcattgaacaagatcatcgtcatatcaaagtaaggaaaataagttatcaaagtatcaatacggcaaagaatacgatcaaaggcattgaatgtatttatggactatataaaaagaaccgcagatctcttcagatctacgggttttcgccatgccgtgtaattagcatcatgctagccagttaa

SEQ ID NO: 409840 - DNA, 2181 bp, Staphylococcus aureus; identical to SEQ ID NO: 408527

SEQ ID NO: 409841 - DNA, 774 bp, Staphylococcus aureus
atgattcattcaaaaaaattaacgctcggtatatgtttggtattactcattatattgattggaggttatgtcattatgacaaaagcaaatggtcgaaacgcccaaattaaagacacatttaatcaaacattaaaattatatccaaccaaaaatctcgatgatttttacgataaagaaggctttcgagatcaagaatttgacaaaggagacaaaggtacttggataatcagctctgaaatgaatattcaattaaagggagaaagtttaaaatcaagaggaatgattctatatatgaatagaaatacaagaaggacaacaggttatttttttgtaagtgaaacaaaaggaaaaacgtatgaaaaagaaagaaaatatccagtcaaaatggaacataatcaaattatcccaacgaagccaatacaagatgacaagttgaaaaaagaaattgaaaactttaaattttttgtacaatatggcaattttaaagatattaatgattataaaaatggtgatatttcatataatcctaatgtgcctagttattcagcggaatatcaattgaggaatgatgattataatgtgcaacagttaagaaaaaaatatgacataccaacgaaacaagcaccgaaactgttattaaaaggcgatggtgatttaaaaggatcatctgtagggtctaaagagttagaatttacttttgtcgaaaataaaaaagaaaatatttacttttctgataatattgattataaaccgactgagcgagatgaattatga

SEQ ID NO: 409842 - DNA, 141 bp, Staphylococcus aureus
ttgaaacgagtttcttcttgttttcacactgttttttttattcctattggtgttgttgcttactttttgtttttctataaagatgatgcttttgacgagatggaagaaaaatatgattatcatgaagataataaaaaatag

SEQ ID NO: 409843 - DNA, 189 bp, Staphylococcus aureus
ttgaataaaaacacagtgttagataaaggttacgttatagcaactattttaaatgttttctttttacttggattaatttttatatctcatttggaaaatttatatatattaattctgtatgttattttgatgggaataaatgctatttatttggttgttaaggttatgaatttcaaaaagaataattag

SEQ ID NO: 409844 - DNA, 180 bp, Staphylococcus aureus
atgttaagttatggtggaatgcttaaacagaagcataaaattttaaatttagacgatgccgaagacggcaatttaattaatacaagtgataaagataaaacaacagatgaagaagaaaaggcacattcgattacggcaatttggaatttcgaaaagcaaaattattatttaagacattag

SEQ ID NO: 409845 - DNA, 945 bp, Staphylococcus aureus
atgcccaattttgagaaatacaatttatcacaagtaaaaactgaaagattttaccaactgcctaaatatttgttcgaagatgcatattttaagaaaatgtcagcagaagccaaaattatgtatgcattattaaaagatcgtttcgaattatccatccaaaatgaatgggtagatagaaataataacatttactttattttcagtaataaacatttgtgtgagtacttaggttatggagaacaaaaaatcataaaattgaaaaaagagttagtaaattttaatttattaactcaagagcgtgttggccttaataaaccaaatagattatatttattaaaaccaaaatatgatattgaagcaagtcttaccaaggaacttccaaattcacagttccagaacaatgaatttggaagttctagaactgtgaatttaagtggtcaagaacttccaaattcacagtctaatgatactgagttaaataatactaattatatagaaaatgaggataatgatacgtatgatatgaatgatattatatctaatactttaataaataataatcatcattcgaatcatacaaatcatcaaaaaactgaatttaataatgacgcccttaagttccaagtactcgaagaattgccacaacaacttcaaaactatttaagtaaatttgaaattagagaaattcggattattaaaagcgtattactcaaagggaaaaagtcatttaatacttcacatgatacttattatcgtttagaagatgttgagtttgaaattgtaagtgtattgaaacgttttaaagcgatgttgctacaaaaaaatgaaaccgttgaagctatgcaaggttatttaatgcaatccattaaagctgaacttgaagaaacacatgccctttatatgcgccgtaaaaacatgaaacaatataatatctttaatcaataa

SEQ ID NO: 409846 - DNA, 342 bp, Staphylococcus aureus; identical to SEQ ID NO: 408476

SEQ ID NO: 409847 - DNA, 2955 bp, Staphylococcus aureus
atgtcatatgagattacttctactgatttggaagttacgtatccgcacgagattatatcaattggtgatacagtcagagtaaaacatagagattttaacccgccattgtatgtagaggcagaagttattgccgaagaatataacataatttcagaaaatagcacatatacattcggtcaacctaaagagttcaaagaatcagaattacgagaagagtttaacaaacgattgaacataatacatcaaaagttaaacgataatattagcaatatcaacactatagttaaagatgttgtagatggtgaattagaatactttgaacgcaaaatacacaaaagtgatacaccgccagaaaatccagtcaatgatacgctttggtatgatacaagtaaccctgatgttgctgtcttgcgtagatattggaatggtcgatggattgaagcaacaccaaatgatgttgaaaaattaggtggtataacaagagagaaagcgctattcagtgaattaaacaatatttttattaatttatctatacaacacgctagtcttttgtcagaagctacagaattactgaatagcgagtacttagtagataatgatttgaaagcggacttacaagcaagtttagacgctgtgattgatgtttataatcaaattaaaaataatttagaatctatgacacccgaaactgcaacgattggtcggttggtagatacaaaaactttatttcttgagtatagaaagaaattacaagatgtttatacagatgtagaagatgtcaaaatcgccatttcagatagatttaaattattacagtcacaatacactgatgaaaaatataaagaagcgttggaaataatagcaacaaaatttggtttaacggtgaatgaagatttgcagttagtcggagaacctaatgttgttaaatcagctattgaagcagctagagaatccacaaaagaacaattacgtgactatgtaaaaacatcggactataaaacagacaaagacggtattgttgaacgtttagatactgctgaagctgagagaacgactttaaaaggtgaaatcaaagataaagttacgttaaacgaatatcgaaacggattggaagaacaaaaacaatatactgatgaccagttaagtgatttgtccaataatcctgagattaaagcaagtattgaacaagcaaatcaagaagcgcaagaagctttaaaatcatacattgatgctcaagataatcttaaagagaaggaatcgcaagcgtatgctgatggtaaaatttcggaagaagagcaacgcgctatacaagatgctcaagctaaacttgaagaggcaaaacaaaacgcagaactaaaggctagaaacgctgaaaagaaagctaatgcttatacagacaacaaggtcaaagaaagcacagatgcacagaggagaacactgactcgctatggttctcaaattatacaaaatggtaaggaaatcaaattaagaactactaaagaagagtttaatgcaaccaatcgtacactttcaaatatattaaacgagattgtccaaaacgttacagatggaacaacaatcagatatgatgataacggagtggctcaagctttaaatgtggggccacgtggtattagattaaatgctgataaaattgatattaacggtaatagagaaataaaccttcttatccaaaatatgcgagataaagtagataaaaccgatattgtcaacagccttaatttatcaagagagggtcttgatatcaatgttaatagaattggaattaaaggcggtaacaataacagatatgttcaaatacagaatgattctattgaactaggtggtattgtgcaacgtacttggagagggaaacgttcaacagacgatatttttacgcgactgaaagacggtcacctaagatttagaaataacaccgctggcggttcactttatatgtcacattttggtatttcgacttatattgatggtgaaggtgaagacggaggttcatccggtactattcaatggtgggataaaacttacagtgatagcggtatgaatggcataacaatcaattcctatggtggtgtcgttgcactaacgtcagataataatcgggttgttctggagtcttacgcttcatcgaatatcaaaagcaaacaggcaccggtgtatttatatccaaacacagacaaagtgcctggattaaaccgatttgcattcacgctgtctaatgcagataatgcttattcgagtgacggttatattatgtttggttctgatgagaactatgattacggtgcgggtatcaggttttctaaagaaagaaataaaggtcttgttcaaattgttaatggacgatatgcaacaggtggagatacaacaatcgaagcagggtatggcaaatttaatatgctgaaacgacgtgatggtaataggtatattcatatacagagtacagacctactgtctgtaggttcagatgatgcaggagataggatagcttctaactcaatttatagacgtacttattcggccgcagctaatttgcatattacttctgctggcacaattgggcgttcgacatcagcgcgtaaatacaagttatctatcgaaaatcaatataacgatagagatgaacaactggaacattcaaaagctattcttaacttacctattagaacgtggtttgataaagctgagtctgaaattttagctagagagctgagagaagatagaaaattatcggaagacacctataaacttgatagatacgtaggtttgattgctgaagaggtggagaatttaggattaaaagagtttgtcacgtatgatgacaaaggagaaattgaaggtatagcgtatgatcgtctatggattcatcttatccctgttatcaaagaacaacaactaagaatcaagaaattggaggagtcaaagaatgcaggataa

SEQ ID NO: 409848 - DNA, 384 bp, Staphylococcus aureus
atgatgctgaaatttaaagcttgggataaagataaaaaagttatgagtattattgacgaaatcgattttaatagtgggtacattttgatttcaacaggttataaaagtttcgatgaagtaaaactgctacaatacacgggtttaaaagataagaacaacactgaaatatatgatggcgatattgcagagtttaaatatcctcatgacaaacgttttaaagaaatagggataataacgcattctgcagaaaaggcttgttttgtaatcaagatgataagagacacagtccaagaatttgagttatatagaggtgttgcgaatagctatttaaaagttattggtaataagtttgataatccggagttactggaggaatcggaatga

SEQ ID NO: 409849 - DNA, 432 bp, Staphylococcus aureus
atgacacaaccaacaagagaagaattaattaatttcatgaaaaaacatggagctgaaaatgttgactctatcactgatgaacaaagtgcaataagacactttagagctcaatcaaaagtttttaaagacgaacgtgatgagtacaagaaacaacgagatgagcttatcgtggatatagctaagttaagagagcgtaacacagagttagagaacatgtggcgcacgctcaaaaatgaattgcttggaagatacgaacataactgttttaaacttagagaactacaccctgagagcaaagcgaacaggataggagctctctatataggaggtaaaagcactgcagatattatactgtcgcgaatggaagaactagacggaacaaatgagttctacgaatttttaggtcaaatggaggaagacactaatgaataa

SEQ ID NO: 409850 - DNA, 189 bp, Staphylococcus aureus; identical to SEQ ID NO: 407963

SEQ ID NO: 409851 - DNA, 897 bp, Staphylococcus aureus
atgatggagcttgttgtaagagaacacaacattcaaaaggcaattaagaaagttaaaaagaataaaggtgcccctggcattgatggcatgaaagtgagtgaaatacaaggtcactttgcgcaatactttccaaaaataaaacaaaaactgcttgaaggtacatacaaacctcaagcagttaagaaagttgaaattcccaaagcaaatgggaaaaagcgtgtgcttggtatacctgtcgtaagagacagagtgatacaacaagcaattaaacaagtgattgaacctagtatcgatcgtaccttctctaaacacagtcatggctttagacctaatcgtagtacaggaacagcactgaaagaatgtgcgtcttactatgaagcaggttacacgatagccgtagattgtgatttaaaacaatgctttgacaacataaatcatgataaactcatgtatttatttgagcgccacattaaagataaagcggtatcgacatttatccgtagaaggttacaagttggtgccattgacctatctggcgaagtcgcagaaagaaagataggtgcaccgcaaggtggtgtgatatcaccattactctgtaacatatatctacatgaactggataaagagctcgaaaaacgtaatcatcgttttgtgagatatgcagatgacttcgtcatctttgtcaagacgaaacgtgcaggtgaacgtgtgatggatagtattaaaacattcatacacaaaaccctcaaacttgaagtcaataatgataaaagtaaggtgggttctcctacccgtttaaagttcttgagttgtctaatgagcaaagtaaatgagacccactacggaagcaaaaagaaatttaaaacgcaacttaaagtggttaaccagacgaagtag

SEQ ID NO: 409852 - DNA, 372 bp, Staphylococcus aureus
gtgccacatgtcggcaattggcgagacaagttctttaaagagcgtgaaggtaaatatcaagtagaaggttgttttattgaatcaggtgcacttaataataaaagtgatgaatacggtatcaaaaggaacagacatgctcaaatttattataattcagttagaaatcgagataaacagatagagatttctaaaattgctaaaaatactaatataaataaaaatttaattcaaagagtttatgaacatatatttgaaaataagtatttattagaaagtggatttaaacaatttgatcctgacttttatatggctcaaagttggcaacgtttaagagaagggaaaaatattaaaaaaatggatataataacgtag

SEQ ID NO: 409853 - DNA, 303 bp, Staphylococcus aureus
atggctgaaaattataaagacatgacgcaggaagagttaagagatttattggctgaaaagaatggagaattgtttgatttagcgagcgaaatcgatgaagaaactgaatttgatattttgtttttctcagcaataggagttagcgacggagatttcataaaaagttcaagttctacgcttggcaatgcttttaatcttgctgaattattggataatgctactaatttcgacgatgtcattaacgccattcaaaaacgtaaactacaaaaatttcttgctatagataacaacaaggagggctaa

SEQ ID NO: 409854 - DNA, 264 bp, Staphylococcus aureus; identical to SEQ ID NO: 406010

SEQ ID NO: 409855 - DNA, 327 bp, Staphylococcus aureus
atgaacattcaaaaagtaatgaaattaatattgaaaaaaaatcatgagatgagggagattttaaaaaagttcaacaaaaatatcagacacaaagatctaattgtcatcaaagtgaaagatgaaaacagcgttccattagtcatttataaaggtggagagctgaagagcaaacgagtagttaaatttttatgggtaactagaaacggaaattacgaaggtggttacgacataaacatagagcattatgcaaagagtgaaaaaggcagacccggtagatatgaaaaatcaggatttagaagtttgttttttaaggaggattcacagtga

SEQ ID NO: 409856 - DNA, 321 bp, Staphylococcus aureus
gtgtgtgaatatctcaactttttagtactacataaagcctgtagcaaagaaaaaataaaactatctgatcagcataaagactttgaatacatgcttcgcaaagaatggattactcaagttgagaacgacctcgaaatttctgaagattcttcattctcgattctgtatatgaaatacagtggttacgtgtctataacatctaaaggtaaagatgtttatttttccgcgcgtaacagctggattagatggattcttggtacaatcatcagtatttctatagcaattgcatcactagtaataaaagcgttactagaatgctag

SEQ ID NO: 409857 - DNA, 240 bp, Staphylococcus aureus
atgagtgaaccaatcaaagaaaagttagaactactaattcttaaaacacttaaacataaagaaaattcaacatctatcatcagtaatgacgagttagaaaagctatttaatatgtataaatatttaaatgagcctaatcaaaaaagggtttggatagtagatttaatcccatgcgtagctttgatttgtgcaactagcattctagtaacgcttttattactagtgatgcaattgctatag

SEQ ID NO: 409858 - DNA, 237 bp, Staphylococcus aureus
atgattaacatacctaaaatgaaattcccgaaaaagtacactgaaataatcaaaaaatataaaaataaaacacctgaagaaaaagctaagattgaagatgatttcattaaagaaattaatgataaagacagtgaattttacagtcctatgatggctaatatgaatgaacatgaattaagggctatgttaagaatgatgcctagtttaattgatactggagatgacaatgatgattaa

SEQ ID NO: 409859 - DNA, 453 bp, Staphylococcus aureus
atgatgcctaaatatcgagtgtgggacgaatatacaggaagaatacacgatgttgtaggattcgacttcatcgagaatgaagttcactatgaaaactacgcggaagcagaagctttaatacacgcaagagatttcaaagatgtagaacttatgcaaagtacaggacttaaagacaaaaacaacaacgaaatatatgcgggagatatagttgagttcaaagatggagtactcatgatagcgggcgacgatgaatctgtaataggaacaattaatagagcagtaatatctattgatgttgtaaatggtattcaattaaaagattttatgtttgagggcgcagtctccgaaaatgattactttgagtatatagacataaaatccttccttagatatgactgtgaggttaaaggcaacatatttgaatcatcacatttattggaggtaacagaatga

SEQ ID NO: 409860 - DNA, 195 bp, Staphylococcus aureus
atgatgcaaacctataaagtaagtctttgtatcaagttcttagcgtctaaatgtaattataaattaaaaaagcattattttgtgcaaagtacgaatgaggaagaagccacgaatacggtattaaaactgactcgtaaaaagctcccattcaaaactgcaagcatagaagtagaaaaagtggaggtagtagaatga

SEQ ID NO: 409861 - DNA, 324 bp, Staphylococcus aureus
atgccttatatttatttaataatagccataagtactgaagttattggaagtgcatttcttaaatcttcagaaggcttttcaaaatttataccatccttaggaacaataatttcatttggaatttgtttctattttttaagtaaaacaatgcaacacctaccactaaatataacttatgcaacttgggcgggactaggtttagtcttaacaaccgtagtctcaataattattttcaaagaacaaataaatctaataactatagtatctatagttttaatcatagtcggcgtagtttcgttaaacattttcggaacatcgcattaa

SEQ ID NO: 409862 - DNA, 144 bp, Staphylococcus aureus
ttgaaaaaaacagaacgtaatttattttctattttcttatctttaggaagtctttttgctatctttagtggtttctttattttgggcattggaatgttaattggtggagcaactttattagctaaaagtatttctgaagaataa

SEQ ID NO: 409863 - DNA, 765 bp, Staphylococcus aureus
atgatgaataattcgacgaattataagcgcttaaaagcgaatttagaatatttgaaaatgaatcaaatgattaatcatcttgatgatgttatcgattttagtattaaaaataacctgtcatttatagatacactaattaaattaagtgactacgaaatcgaaattaaagagaaaaatttgattgaatcgatggtaaaggtggcggcatttccgtttaaaaaagaaatatcagactttgactttaattttcaaccgagcatcaatcaacaagaaatttgggattttacagatttgcgttttatagaaaaatatcaaaacattgtctttttaggctcaagtggcgttggcaaaacacatttagctacaggcattggtatgactgcagctaaaaatagagtgagtacttactttattaaatgtcatcatttgatagagaatttaagaaaagcaaaacttgagaacagattagaaaatagattgaagcactatagcaagtataagttattaatcatagatgagattgggtacttacctattggaagtgaagatgccaaactattctttcaattaatagatttaagatatgaaaagaaaagtacaatatttaccacaaatatcaatttcaacttatggaatgaaatatttgatgaccccaaaatcgcaaatgcgattttggataggatattacatcattcaagtgtagttaaaatcaaaggcaaatcgtatagattaaaagatcattcacctaagaaggaaattacttag

SEQ ID NO: 409864 - DNA, 1293 bp, Staphylococcus aureus
atgaaattatctttagacataaatactgattttgaagttactactcttacagatttaccaaaattaaaaattgttatggagaacttaaacatgaaaataaacaaaagtgaaatagcgagacacatgggtgttgatagaagaacagttgataaatatttaaatggctttgagccaaccaaaaagagaaatcgtcagtctattattgacaagtattaccctatcatcgaaaaattactttcagactctagcgaacaaaagttctactataagcgtattctttggcaatatttgaaggataaacatgggttaatgtgtgcctattctacatttagagcttatatccttaaacatgatgagtttaatcgttattttatgaaaggttatcaacagatgtcgcctaaaggcacaccgagattcgagacaaaagccggtcatcaagcacagtttgactggaaagaaggcattaactttaaaacgaaggataatcaaatcgtttcactaaatataggcgtactactacttccttattcccgctttgtaatcatgcaagtgacaatgaataaatcaagtgatgtcttatttaatttattgacacaagcgtttgagctaatgggaggtgtgcctaatgaacttgtaacagataacatgaaaacggtcatggatcaaccaagaacagaacgtacaaatggtcaaataaatcgtagatttaaacaattcgctgatgattttaattttaaagtaaaaccttgtattgccggccgtcctagaacaaagggtaaagttgaatcgataatgaaaatattagatgaaattcatgcatatcaaggcgaattatatttggaagagattcctaagtttatttctaatcttaatgagcgactgaactactcagttcatacgagtacaggtaaaatacctattattgctttagaaaaagaaaaaagtttcttacaaccactaccgaatgtgaatgtaagaaactcatataaagtgaaacataaatatttgaaagtcaaccgctctaatatgattacatataagtccaatcaatattcagtaccagctgaatattgtgggaaaatagttgaagttcaagtttatgatcaaaaactacacgtttattataacactaaatcgatttgtgaacatctcatcacacaacgtaaattaaattatcaaaaagaacattatttagaaacactgtcatcttcttttggaaatagagaaatggatgatattaatcagattgcgatagataatttgaatgcgattggagagttgtatgatgaataa

SEQ ID NO: 409865 - DNA, 1236 bp, Staphylococcus aureus
ttgagacatgacatttatgaaggagtgctattttacattatgaaaggtattaaaccaaattatgccgagcttggtcgacaatataattgtgatccaagaacagttaaaaaatattatgaagcaggaaaagaaaatgaattagaacgattgaagaaaagacaacaaaataagaaagcatcaaaactagatccatttaaagaaattattaataaaaaaattgaattaggatgtacagctatggccatttttaaatatatagagaaaaagggttatgaaggtaaatatactattctacgagaatactgtaaaaataaaaaacaaaatgagactaaaaaagcaactatacgcgtagaaactaatcccggtatagctgctcaagtagactggaaagaagatatggtaatgcatgataagtttggcagaacttatcaattcaacatctttctttacgttctacactattcaaaaatgaagtatatcacattaacttgggatagaaaacaagataccttatttgaatgtttaaaagacgcttttgaatacaccgaaggggttccaaaagaaatctggttcgataatatgagaactgtagttgatcgacctagaacacaatataaaaaagtcgtctttaataatttattttatcaatttagtaaggatgccaactttgaacctattgcttgtagaccctatcgtcctcaaacaaaagggtctgttgaatcattagctaaatttgttgaacagcgtttaagaccatacgattatgaattttatgatgctgtagaacttattgggctagtaaacgatttatgtcacgaattgaatcacttagaaatttcacaagcaacagaacaacgacctatcgacgttttcaattatgaagaaaaagaacatttaaattcttttaatgccaagttactagatacttacatcgaaaatgagtgtataagaatcgtttctaaagaatcgatgattaactttagaaaaggtaaatactcggtacctactaaatacattggtgaagaagtacaagtgatattcaataattctactgatgaattgctgatttattatgatggtgaattaataagacggcataatctatccgaaagaaaatttaattatatcgttgaagatatgagtgaaatattaaaatcagatgtatttaaacataaggatgacaaagaaattcttacgtatatagaaaattcattattactgtatgacgaaatttag

SEQ ID NO: 409866 - DNA, 1347 bp, Staphylococcus aureus
gtgctcaaagcgtttggtgttgactttagctctctaactaaaggtatgggtattgttggcgatataacaaaagcgtcttggaataagattaaaagtaaggcgattaattggataaaagaaggattagagagccaagcgggagatggttctgtgtttgatagtttcagaatactacaaccttattcagcaccgccaaaacctcctaaccccaattatccatttaacggaggcgttcatcatggtgttgactatgatacgccgaccggtacccctatacgtacgccaatgggtggacgtgttagaagttggtatgacaactatggtggcggtaaagcaattactgttcaaaaaggtcgaacatttttgtggttcatgcacttatctgaacaattgcgtagaacaggtgaacaaattaaagctggtcaattaattggtaaatcaggtaatacaggttctatgactaattaccgccatttacatttccaagtcaatcaaggcggagagtccaataggtattcgacagaccctattccttggttacggaaaaacgacaaaactggtggaaagaattcacctggagggagtggttctgaaaatgcgcgcagagcgattagaacagctcaaaatatacttggaggtcaatacaaagctagctggattacacacgaaatgatgcgtgtagcaagacgtgaatccaattatacagctaatgcagttaataattgggatagcaacgcaagagctggtacaccttcaagaggtatgttccaaatgatagatccttcatttagagcgtacgcaaagtcgggttacaataatcctcttaacccaactcatcaagctatatcggctatgagatatattgtgggtaaatgggtaccaagaacgggctcatggagagctgcgttcaaacgcgctggtgattacgcatatgctactggtggcaaagtctacaacggattgtaccacttaggagaagaaggatatccagagtgggttattcctactgatcctgcacgtaaaaacgaagcaatgaagatgttacattatgcagcagcagaagtaagagggagaaaagcgagtaaaaataagcgtcctagtcaattgtctagtgtaaatgggtttgatgacccaagcttattattgaaaatgattgaacaacagcaacaacaaatagctttattactgaaaatagcgcaatcaaacgatgtgattgcagataaagattatcagccgattattgacgaatacgcttttgataaaaaggtgaacgcgtctatagaaaagcgagaaaggcaagaatcaacaaaagtaaagtttagaaaaggaggaattgctattcaatga

SEQ ID NO: 409867 - DNA, 1311 bp, Staphylococcus aureus
gtgctcaaagcgtttggaattgatttcagttctctaactaaaggtatgggtattgctggcgatataacaaaagctgcatggtctaagattaagaaaagtgcaatcaagtggcttgaggatgctttcgcagagtcgggtgatggcggtgtattagatatgagtaaattacgttacttatacggtcacattgctgcttatacacgagaaaccggacgcccattccatgaaggtctggattttgattacatttacgaacctgttccatcaaccattaatggtagagcacaagttatgccttttcataatggtggttatggaaaatgggtaaaaattgtaaagggcgccttagaagttatttatgcacatttatctaaatataaagttaaaactggtcaacaagttagggtcggccagactgttggtatatcggggaatacggggtttagtacaggacctcacttacattatgagatgcgttggaatggaagacatagagacccgttaccgtggttaagaaagaataatgggggcggcaaaagtgcacccggtggtaatggtgcagctaatgctagacgagctattaaggctgctcaaaatattttaggaggaaggtataaggcgagttggattactaacgagatgatgcgtgttgcgagtcgtgagtccaattatacagctaatgcagtcaataattgggatagcaacgcaagagctggtataccttcaagaggtatgttccaaatgatagatccttcatttagagcgtacgcaaagtcgggttacaataatcctctcaacccaactcatcaagctatatcggctatgagatatattgtgggtaaatgggtaccaagaacaggctcatggagagctgcgttcaaacgcgctggtgattacgcatatgctactggtggcaaagtctataacggattgtaccacttaggggaagaaggatatccagagtggataatacctactgatccaagtagagcgaacgaagcacacaaattattagctttagctgctaacgatattgataaccgctctaaaaataagcgaccaaacaacttaccaaatccaagtataagtaatagtgatacaaactatattcatacattggagaataaactggatgcggttattaattgtttggttagtttggttgagtctaatcaagttattgcagataaggattacgaaccagttattaataagtatgtgtttgaagatgaggtaaataattctatcgataaacgagagcgtcacgaatctacaagagttagatttagaagaggaggcacgataatctaa

SEQ ID NO: 409868 - DNA, 369 bp, Staphylococcus aureus
atggcgagaaaagcaagaattgtaacaataaacgataaaccttataggttcagtaaatttgaaatggaattaatagaaagtcacggtataaccgctggaatggtttctaagagagtaaaagacggttgggaactacatgaagcaatggacgcaccagaaggtacgcgtttaagcgagtacagagaaaagaaaacaatagaaagactggaacaagctagactcgaacgcaaattggaaagaaagcgaaagagagaggctgagctaagaagaaagaagccacacttgtttaatgtacctcagaaacatccaagaggacgttatgcgtgctacctgttggaaaacgacatattcgtgaaagttaagaagtag

SEQ ID NO: 409869 - DNA, 243 bp, Staphylococcus aureus
atgacagataacgcacgcaaagaatacctaaatcaattctttggatttaagagatatctgtatcaggataacgaacgagtggcacatattcatgtagtaaacggcacttattactttcatgggcatatcgtgccaggttggcaaggtgtgaaaaagacatttgatacagcggaagagcttgaaacatatataaagcaaagtgatttggaatatgaggaacagaagcaactaactttattttaa

SEQ ID NO: 409870 - DNA, 207 bp, Staphylococcus aureus
atgaaaatcaaaattgaaaaagaaatgaatttacctgaacttatccaatgggcttgggataaccccaagttatcaggtaataaaagattctattcaaatgatgttgagcgcaactgttttgtgacttttcatgttgatagcatcttatgtaatgtgactggatatgtatcaattaacgataaatttactgttcaagaggagatataa

SEQ ID NO: 409871 - DNA, 369 bp, Staphylococcus aureus
atggcgagaaaagcaagaattgtaacaataaacgataaaccttataggttcagtaaatttgaaatggaattaatagaaagtcacggtataaccgctggaatggtttctaagagagtaaaagacggttgggaactacatgaagcaatggacgcaccagaaggtacgcgtttaagcgagtacagagaaaagaaaacaatagaaagactggaacaagctagactcgaacgcaaattggaaagaaagcaaaagaaagaggctgagctaagaagaaagaagccacatttgtttaatgtaccacagaaacatccaagaggacgttatgcgtgctacctgatggaaaacgacatattcgtgaaagttaagaagtag

SEQ ID NO: 409872 - DNA, 243 bp, Staphylococcus aureus
atgacagataacgcacgcaaagaatacctaaatcaattctttggatctaagagatatctgtatcaggataacgaacgagtggcacatattcatgtagtaaacggcacttattactttcatgggcatatcgtaccaggttggcaaggcgttaaaaagatgtttgatacagcagaagagctcgaaacatatataaagcaacatggtttggaatacgaggaacagaagcaactaactttattttag

SEQ ID NO: 409873 - DNA, 387 bp, Staphylococcus aureus
atgaaaatcaaatttaaaaaagaaatgacattagatgaattaattaagtgggcatgggagaaccctgaattagtaagaggagagaaattttatgcgcaaggcaagagtaatgaaacatatgtgtatttccatctttacgacggaagaaagtgcatcttaagagaatatatatcagccgatgacacttttgaagtcgaatatgaagaggaaatcacggaagaaactgtaataccgaagttagtaaaaatgtacaaagacggaaaaatgtccgtttacaatgactattcgattaagcgttctttgctttattcccctaaagcatactatatcttaaacgacgacctaactatgacgttaatctggaaagatggggagttggtagaatga

SEQ ID NO: 409874 - DNA, 204 bp, Staphylococcus aureus
atgatgtggattactatgactattgtatttgctatattgctattagtttgtatcagtattaatagtgatcgtgcaagagagatacaagcactcagatatatgaatgattatctacttgatgaagtagttaaaactaagggatacaacgggttagaagaatacaggattgaattgaagcgaataaataacgatattaaaaagtaa

SEQ ID NO: 409875 - DNA, 651 bp, Staphylococcus aureus; identical to SEQ ID NO: 409598

SEQ ID NO: 409876 - DNA, 144 bp, Staphylococcus aureus
atgtttgttttgaattgtattgcttcgttatttattttgtttttatcgattaaacggattaagtatttactagataaagaagaaaatagacataaagttgaaattaataaaataaaaacaaatatatttaaaaacataaaataa

SEQ ID NO: 409877 - DNA, 267 bp, Staphylococcus aureus
ttggaagttttaagtaatttaacaatgaattttatttttgtaggctttattgttattagtttatgtatagtatgtgtttttgttttaaattatttttataaaaatgattatattgagtattatcaatggaaatcttggaagagaaagctttttattatgatgtttttatttattgtatcaataattcttttattttttgcacatcgatgttttgagaaaagtattactgattataataaaaatatggaagaacaattggaaaattaa

SEQ ID NO: 409878 - DNA, 174 bp, Staphylococcus aureus
atgattgaaatatttaaatcatttatatttatattatttgcatgggtaattttttattggattattccctatggtatgtatttaacgttaaaacataaaaatatggaaaaggaatcaattatgcgtcacgatgtttatttgaaaaatcgtgactgtttaaataaagataagtaa

SEQ ID NO: 409879 - DNA, 468 bp, Staphylococcus aureus
atgagttttattttccagaaattattatttccaccttcgaaaaataatttaactacatatgaagcattgaaatattatacacatttaaagggatattacggtttggatcatatatcaaaaggaatagcatacattgcctgtgtgttaattccactcaatttcttttttagattcaatgacatcaaaaaagataataactataataatattataagtacgttattcctattattatactttttagttaatggaatttcattgattattcaaggattcactgcagaatttacaattagtttaattagtaaggcaaatattcataataatcatgaatttgctgtgaacttatttagatatgtcatacaagaaggtggtatttcttttagtacatatctagtgtgtaacttttgcataataatgtggttattattttcgtgttctttattaggtggtgtaaactctagttaa

SEQ ID NO: 409880 - DNA, 144 bp, Staphylococcus aureus; identical to SEQ ID NO: 409862

SEQ ID NO: 409881 - DNA, 261 bp, Staphylococcus aureus
atggaacaaatcacattaaccaaagaagagtgtgtcgaacaatgcatcaataaagacttaaaacttttagattatcgagttcaacaaattttagaaggtgttctatcagaaagtaccacatacggtgatgcaagaaataaattagaaacattgaaaattattgctgaatctcattttaaaaccgaacacgcttcagttatttacaaattagcattgaaaaagttagacaaaaaaatcaacgccactccaattaaagagtga

SEQ ID NO: 409882 - DNA, 321 bp, Staphylococcus aureus
atgccacatgtattaaacgtaaccgttccaatacctgaaacacacgtgcttatcacaaaagatgaatatgaagagttaatagcttactcattagaccctgtatggaacatgagcgacttaaagaagaaattaaaaattgcatctgatgagactatcaaggacagattactatttcatcctagatttgaaaaagaactaagagcgcaaggaattgtgcattacccagatgagaattttaatcgctggagatttaacgcaagaaagatgaataaattcgtcgatgagcatttcaatgaaatatataaggagagaataaaatga

SEQ ID NO: 409883 - DNA, 312 bp, Staphylococcus aureus
atgggaatccctgatccgttatctaatcctatgtctgatcctttactaggagatagttggatggtaggtgatttgaaaaaaagacaggaaaaaaaactaatcacaacagtcatcgcacctgaacatgatgaaaagcatcgtgaaaataaaagtaaaatgaaaaaatctgaaaagcaattgatcaatcagttaattaatcatggccatacatttaagagtgattttaaaaatgtagctaaaggtgattgggttaataaagccatgcaagacttagataaattaggcaatgagcttaaaaaaataatgaattag

SEQ ID NO: 409884 - DNA, 330 bp, Staphylococcus aureus
atgatgtttgaagaatacaaaaaaatagatgatcttgaaaatgcatatgaaatagagttgaaacgtattgatagggaaatacaaaatcttaatgatttaaaatatcaccttagaagagaaaatgaacaaagttatgatgcatttttgtatttaaagaataaaatgaactatagtgaagagtcaaatgctaaggtgagacgactagttgaagaatttgattatgaagcagatacttatattagacaaaaagagttaaagttagaagattataaagaagaaataagaagagaatatatacagcaatctgaaaaaataatggaggcgaagtag

SEQ ID NO: 409885 - DNA, 1377 bp, Staphylococcus aureus
atgactaaaaaagagtatgaaatcaatcccggtaaaataaagagtaatacggaagaaactagcgcaatagctaatatcagttatgaaatagaaaatgcaaatgataacaacttagaaactacaaaaattaatgggcaaattaaggatttaaaaaaagacgggaagtttcccaaaaacttagactacatagatagttatacagatcccagtacggggaccacggcaacggcatttttaaataaagatacaggtaaagttactgtaggaatggctgggacaaacgttcacggcgatcaaattaaaaaagtagctttcagtttggtggcgccatcatcaattcgaccctctaatcaagatttgaaagatgtactaggcactatggaggatggtgctgcggatcttgctattggagttggattggtcaattataaaggaaaacattttgcaaatacacagcagtttattgagaatttacaaaaaaagtacgaaattgataccgttactggtcattctttaggagggagagatgctatctttcttgggcttcgttataacatcaaaaatgttgtggcatacaatcctgctccgttagaagtaaaaagcattcgtaataaatttggtggtcaattgtttagaaatacgacatttccagatgaaaaatatttaaaagagttaatggataattatgatggagatattactaaggttataactcaaaaggatggattagactatttagtgaagcgtacagatcatttaacttgtggtgatgtgttacgtataaacaatggtcagggccatgcgatggagaattttttaggagaaaaagaacaacgtgaaataatcgaagaactaatgttagtaaaaggatatcgcgatgcaaatgacaaagcatttaaggctttgaaaaaaaatactgagaaaaaactcggtaaaatagatgaaatcaaatcgaagttactgcaaacgaacggtggcgccctctcgtcttctcaacaaaaattgcttgaaactttagtggcattttcggtagctgaaggactaagtaaaatggttgaccaagaacttcagcagttgaaaaatatgttcaatcttatggatgagaaatttgaagcaaattggaaagacgcacaagaagctagtgatattgtaggtaaacatctttcatacccagaaaaggtaagtgcattagataacggtggtgtcaatgaaagtaaacttgctaccgaaccacataatgaaataaaagacaaactaaataaaattacggacttatctaagaaatataattcgtatttacagcaaatcgaaaaaagtattaatgaaatagttgctaaggatcaacaattggcagggcaaataggtgatttaatatga

SEQ ID NO: 409886 - DNA, 768 bp, Staphylococcus aureus
atgaaacgtttaaataaattagtgttaggtattagttttctgtttttaatcatcagtatcgttgctggttgtggtacagggaaagaagcggaaattaagaaaagctttgaaaaaacgttgagtatgtatccgataaaaaatctagaggatttatacgataaggaaggctatcgtgataatcagtttgataaaaaagataaaggaacttggattgtcaattctcaaatggcaattcaaaataaaggagaacctatgaaatcaaaaggcatggttctgtatatgaatagaaatacaagaacaacaaatggctattattatgttaatgtgattaagggcgaggataaaggtaaacatcaagacaatgaaaaaagataccctgttaaaatggtcgacaataaaatcattccaactaaagaaattaaagatgaaaaaataaaaaaagaaatagaaaactttaagttctttgttcaatatggaaactttaaagatttgtcgaagtataaagacggagatatttcatataatccagaggtgccgagttattcggctaaatatcaattaactaatgatgattacaatgtaaagcaattacgtaaaagatatgacataccaacaaataaagcaccgaagttgttgttgaaaggtacagggaatttaaaaggttcatcagttggatataaagacattgaatttacgtttgtagagaaaaaagaagaaaacatttactttagtgatgggttaatttttaaaccaagtgaggataaataa

SEQ ID NO: 409887 - DNA, 768 bp, Staphylococcus aureus
atgaaacgattaaatacattggtattgtacatcagttttttgatattaatcatcagtatcgttgctggttgtggtacagggaaagaagcggaaataaagaaaagttttgaaaaaacattgagtatgtatccaattaaaaatctagaggatttatacgataaagaaggctatcgtgatgacgaatttgataaaaatgataaaggaacgtggactattagttctgaaatggcaattcagaaaaagggagaagccttaaatataaaaggtatggttttgaagttaaatagaaatacaaggagtgcaaaaggattttactatgttaatgcgataaagaaggatgaaaatggcagacctctggataatcaaatagaatatcccgttaaaatgattgacaataaaatcattccaactaaagatatcaaagatgaaaaaataaaaaaagaaatagaaaactttaagtttttcgcgcagtatggcaattttaaagatttgacgaagtataaaggtggagatatttcatataatccagaagccccgatttattcagcaaaatatcaactaaccaatgatgattataatgtaaagcaattacgtaaaagatatgatataccgacgaataaagcgccaaagttattgttaaaaggttcaggaaatttagatggttcatcagttggatacaaaaaaattgaatttactttcgtagagaaaaaaggagaaaacacttactttacagctaacctacattttaaaccgagtaatgatgaataa

SEQ ID NO: 409888 - DNA, 771 bp, Staphylococcus aureus
atgatgaaacgattaaacaaattagtgttaggcattatttttctgtttttagtcattagtatcactgctggttgtggcataggtaaagaagcggaagttaagaaaagctttgaaaaaacattgagtatgtaccctattaaaaatctagaggatttatacgataaggaaggctatcgtgatgatcagtttgataaaaatgataaaggtacatggattataaattctgaaatggttattcaacctaataatgaagatatggtagctaaaggcatggttctatatatgaatagaaataccaaaacaacaaatggttactactatgtcgatgtgactaaggacgaggatgaaggaaaaccgcacgacaatgaaaaaagatatccggttaaaatggtcgataataaaatcattccaacaaaagaaattaaagatgaaaaaataaaaaaagaaatcgaaaactttaagttctttgttcaatatggcgactttaaaaatttgaaaaattataaagacggagatatttcatataatccagaggtgccgagttattcggctaaatatcaattaactaatgatgattataatgtaaaacaattacgcaaaagatatgatataccgacgagtaaagctccaaagttattgttaaaaggttcagggaatttaaaaggttcatcagttggatataaagatattgaatttacgtttgtagagaaaaaagaagaaaatatatactttagtgatagcttagattataaaaaaagcggagatgtataa

SEQ ID NO: 409889 - DNA, 297 bp, Staphylococcus aureus
atggctactgaaaaagatataaatgatttgtttttaaatcatgtgaattcaaacgcggttaagacaagaaagatgatgggagaatatattatttattatgatggcgtggttataggtggtttgtatgataatagattattggttaaggcgactaaaagtgcacgtcatcaattgcaagataatacattagtttcgccatatccaggtgccaaagaaatgatattaattccagacattaccgaagcaataaatctcactaatttatttgagctcataaaaaatgatttgaaaaactaa

SEQ ID NO: 409890 - DNA, 162 bp, Staphylococcus aureus
atgaaatatgatggaatacagcaagacgaatatttattaaatttgaatatgcttggtgtcaaaacttttgatgaattaaagcgacttggaaaagttgcttttttaattgctgaagctttcgttgaagaggaaggatataaattctatttccgtatcgtttaa

SEQ ID NO: 409891 - DNA, 750 bp, Staphylococcus aureus
atgaaaataagaggctatgattacaagtcaagaaagaaaaaagttgaagaaatcttagagaatactaattttataaatgaagtgaaaagattccctaataatgataattttacatatgagaatggttataaagcttggcttagtgcaatttttatagatttaagaaattctactaaattattcacagaaaatagtgaagtagatgttgccaaggtgattagaggctttacgtctgaagttatagagattttacaaaaggatactcaagataatgaattgaaagaaattggtattaggggagattgcgtatttgctgtatattcaactgctagcaaagaagaaatatatgatgtctaccaacgtgcagtttacattaatacctatttaaaaatgttgaataaattattagatgaaagaaatcttccaaatatcaaagcaggtattggtttggctgcagataaaaatttggcagtgaaggcaggtagaaagagttcaggtataaatgattttgtatggattggaaaagcagtaacaacagcgtcaaatttagcagatcttggtaataaagagggcatttgtcccattgtaatgtcaggaactttttacactaattatattgatgttgaagagaatgaaaattcaaaaaattggtggaaaaaaaatcatgattaccaaaacggtacatattaccatggaaatattgtatttacagaatttgatgaatggattaagtcaggtatgattgattaa

SEQ ID NO: 409892 - DNA, 567 bp, Staphylococcus aureus
atggaaaacaacaatttaaaaaatgagcttttaaacgagttagataggcatttagagtggataaagagttgtgatacaaaagcttcaattgttttagcaatgttaggagtttttattgttactatttcttctaaactattcttagatagtcaaaaagaaatagtattaaacgcattgaacaatataaatttttcgaatttaatttatttaatatttgaaggagcggtctattttttattttttgatggagtatttaatataattagggtgctttttccccagttaagaaaatctgttaaggcatataacggaatagaaaatgactccttatattattttgaaagcatttcaagcaagacttattctgagtataaaaagcaaagaattaatagaacatcagaagaagaaatccatgatattttatcacagatttatataaattcaaaaatatctacaaaaaaatatcatttttataagaaaggattagcattggtactttgggggattttaggaattttaactttgcattctatcggtattattttagttaaagcgggaggtttttaa

SEQ ID NO: 409893 - DNA, 240 bp, Staphylococcus aureus
atgacaagagaaataagatcatttagttcagagtttaagttacaaatgggtagattatataaaaatggtaaacctaggaaatcgataaagcaacatcaaaacactggtttattcaatcatcaagataacctatcagatgaagaaaaagagctgattaaattacgcaaagaagtccaacatttaaggatagagaacgatattttaaagcaagaagcgctgatcatgggacgaaaaaagtag

SEQ ID NO: 409894 - DNA, 2553 bp, Staphylococcus aureus
atgtcagaaatgctacatgatcgtatagaaaatcaactgtttttacagtatccagatatacctaattatattattgataatttaaatcatcatttaagaccatatcaagaagaagctgtgcaaagattaatgtatcttgaagagcaagatgaaggtaatttatacaacaaattgatgtttaatatggcaactggttctggtaaaacacttgttttagctgcatcagtattatatttatttaaagaaaaaggttatcaaaatttcttgttttttgttaatagtactgcgattgtcaataaaacgtatgacaatttaaccaacacgtcatctagtaagtatttgtttaatccagaaggcattgtcattgatggtaaattgataaatattcaagtagtagataattatcccgttttacctgatgaaaatacgatttaccttaaattaacaacgattaatgcattgcatgataaattaaattatccaagagaaaatgaaattacttatgaagatttagctcaatttcctattgtgttattagctgatgaagctcatcatctaaatgtcagcacaaagaaaaaaggcaaaaaaactactcagcaaattgaagaaactaactgggaagtaactgttgataggattatgaagcaaaacaaaaagaataaattgttagaatttacagctacggtacagttagaagatgatatttttgaaaaatataaagatagaattctttatcgctatgatttaaaggaatttatgcaacaaggttattcaaaaaacgtgacacttttgcatgcgagtgaagaaaatgaacataaaatattacatgctttattaatgagtgaatacaaaaattatatagctgataaaaaccatataacgcttaagccagttatcatgtttcaatcgacttctattaaaggctcacaagaaatacatcaaatgatgcttgaccgtttagaacaattaacttatgagcaattagaaacgataattgataatggttttaaattttacagtggtcaaaatagtatttggagtaaggtcttcagtttttataagcaagcaaatatagtaaaagtgttagatgacttgaaatgggattttaatgaacaaacgacattaaatgtaaataatgataaagaaaaagagaaaaatgctcaattactgaataatctagaagatccagataaccctataagagctatctttgcagtgtacaaacttaatgaaggttgggacgtcttaaatcttttcgatattgtcaaaatagatgagaagaaaaaggtcaacaaaaacgcgacgaatgcagaagcgcagctcatcggtcgaggagctagatattatccatttatttatgaagaagaaaaatcgtataagcgtagatttgataatgaatttagtgatttaaaatcaatcgaaacgttacattatcatacgattaatgactcttcttatattaaaaatttacaccaatctttaacagaagcaaaagttcaaataaatgctgatataagcgagatacacgaaggaaaagtgaaaaataaatttaaaaaaactgaccttttcaaatttggaaaaatatatgttaacaaaacagtgccaacaactgctgaggactacaagaaattagaaaattataacgcatctagggaatatcaaaaggagctattcaaggttagtgagtcaaatttaactcaaggtattaaagctatagctgaagatcgtaaagaaataagattaaatattaataaaccattattacaaaaagctttaagaagtaatccattctttagatattctaatttaaaagagtatgtacctagtatcacaagtatgcagacatttataaagtcaaaagattttttaggagatttagatatcagtgtaactataccaaaagagatggatattagtgatatcacacctaaactaaagttgtctgtattgaatgattatttaagtaatttagaaacaaaaattaaaaataattatctgaaagtcaaaggtacaactatttttgaaggtatgaaactttcagaattaatcgatgattatgttgtcgaagtgaataatgtcaatagagatgtaacagacttagatgatcagaagagacctaaaaatatgggacaacatgattggtacatttatgataaagctattgtaaatggtcttgagagtgatttgattgacttaatcaataacatgatggaagatctacaaaataaatacgaagaagtttatttaatacgtaacgaacgtaaaattaagtttagagaaatagatggtgtgagaggttttatgcctgacttcttgttgtacttaaaagataatgaatacacatatcaagtatttgtagaacctaaaggtcaacatttattattaaatgataaatggaaagagcaatttatgttatcattgaataaaagacatgatattgaagtacttgctgaaaataatgatgttagattagtaggattatgcttttattctgatgatttaacaaaaagaaaagaatttaaggatcagtttaacaatcaactattaaattaa

SEQ ID NO: 409895 - DNA, 1860 bp, Staphylococcus aureus
atgagtgccaacatattagatgaaatcagtgaaatactaagtggagtagaaaaatattggataaatgaaaaactagcaaaacaaataataatagaagatttacgtaataacgatactaaattgatttctaagcttttagctaataaatctattaatgaaacatatgttcaagacatagatgggtataaaatattcgacaaagaatcattaatttcattgttacgttataaaaattactggcaagatagctatactaagtatgctaataaaattggtttaacggtggaaggtaaatatttgaattataattctgatgtggtattagattttccatttaaggactgtgtatttgaaggtggaatgactaaagaagatagtattttaaaaaataatgaaaaattttataatgaagtaattgctaaagaagaaattgatactttattatcacctaaagctttcaccaaagttaagaagtacgataaaaatgggcaacatgatattaaaagtattgaaagtacagataatctaattataaaaggaaataatttattctctttatttagtctcaaaaaggtatataaaaagaaagtaaaaagtataataattgatccaccatactattttaataaaacaaaagctgctgatagttttgactataactcaaattttaatttttctacctggttaatttttatgaaaaacagattgcaaactgcaagagatttattaagagaagatggaatcattgcaattatgataggtatagatgcatatgagtatttaaaggtattagctgatgaaattttctgttctgatactaaaaataattatataggcacaattacatggagaaagagtgataaccaatcgaatattggaactttttcaaacgtaattgattatatccttttatatagaaaaacttcaaatgctaccttaaatagaattcctttatctgaaaaagctaaaaatgaatatagttatgaagacaataatggtaagtttagaagaggaatactgctacataaaactcgaggaagatattattatgaactaaaaactaaaatgggtaccactttaaatggaccgtggatgaaaacaaaggaagaaatagagaaattagataatgaaggcaaaatatattggacaacaagaggtgatggccaaccttatgtaaaaatatatctagatgatactaaaggacagataccgaatgatttttggggtatagaatttggaactaatcaaagaggagctaatgaaataaataaactttttaataagagagtatttaattttgctaagcctgaaaaactaattaaaagtttagtagatattacttcttcacaaaatgatattgtattagatttctttatgggttctgccactactcaagcggtagcacataaaatgaatcgtcaatatattggtgttgaacaaatggactacattaatactgtatctatcccaaggttacaaaaagttattgagggtgagcaaggcggtgtttcaactgatttagattggcaaggtggtggttcttttgtatatgttgaattggcaaaagaaaatcaagaaatcgttgaaagtcttataaattgtgggacaaaagaagaattaagtcaacgaatcgataaattattaaatgatggagttcttaattatgaagtagattttgataagtttacaagtactaaaaaagaatttcatgaattagaacttgaagaccaaaaagaagtgctaattagattgttagatagtaatcaattatatgttaattactctgacattgaagattcagcatataatttcacagaagatgaaatagcatttaaccatagcttctacggaggtgagtaa

SEQ ID NO: 409896 - DNA, 447 bp, Staphylococcus aureus
atgaaagtaatttttacacaagatgttaaaggtaaaggtaaaaaaggtgaagttaaagaagtaccagtaggttatgcaaataacttcttattgaaaaagaattatgctgtagaagcaacaccaggtaaccttaaacaattagagttacagaaaaaacgtgcaaaacaagaacgccaacaagaaattgaagatgctaaagcattaaaagaaacgttatcaaacattgaagttgaagtatcagcaaaaactggtgaaggtggtaaattgtttgggtcagtaagtacaaaacaaattgccgaagcactaaaagcacaacatgatattaaaattgataaacgtaaaatggatttaccaaatggaattcattccctaggatatacgaatgtacctgttaaattagataaagaagttgaaggtacaatttgcgtacacacagttgaacaataa

SEQ ID NO: 409897 - DNA, 1968 bp, Staphylococcus aureus
atgaatcggcagtccactaagaaagctttactaataccatttgtcatcatgatcatcacagcaattgttttaatgggtgtatggtttatctttaatagtcttatagcactaattgcatctatcgttcttgtcgtgatgattattgttagcatcgttttattcagacaagctttaatgaaaatggatagttatgtagatggtttgagtgctcaaatttcaacaacaaataataaagcaatcaaacatttaccaattggtatcattgttttagatgaaaatgatcacatcgaatgggttaaccaatttatgacagatcatatggaagcaaatgtcatttctgaatctgtaaatgaagtatttccaaacattttaaagcaattagatagagtgaaatccgttgaaatagaatataatcagtatcatttccaagtacgttattctgagaatgatcactgcctctatttctttgatataactgaacaagtacaaacaaatgaactatatgaaaactctaaaccaatcattgcgacattatttttagataactacgatgagattactcaaaatatgaatgatacgcagcgttcggaaatcaattcaatggtaacgcgtgttattagtcgatgggcaactgagtataatatattctttaaaaggtatagttccgatcaattcgtagcctatttaaatcaaaaaatattagctgacttagaagaatctaaatttgatatcttgagtcaattacgtgaaaaaagtgttggttatcgtgcccaattaacattaagtattggtgttggtgaaggtactgaaaatttaatcgatttaggtgaattatcacaatcaggcctagacttagcattaggacgcggtggcgaccaagttgcaattaaaagtattaatggtaatgtgcgcttctatggcggtaagactgacccgatggagaaacgtactcgtgtaagagcgcgtgttatctcacatgcgttaaaagatatccttgcagagggtgacaaagtcattatcatgggacataaacgtcctgacttagatgcaattggtgcagcaatcggtgtgtctagatttgcaatgatgaataatttagaagcatacatcgtattaaatgagactgacattgatccaacattacgacgcgtgatgaacgaaattgataaaaagccagagttaagagagcgatttattacatcagatgatgcttgggatatgatgacatctaagacaaccgtagtgattgttgatacgcataaaccggaactggttttagatgaaaatgtcttaaataaagcaaaccgtaaagttgttatcgatcatcatagacgtggtgaaagcttcatctctaatccattgttgatatatatggaaccatacgcaagttcgacagctgaattggtaacagagttactggaatatcaaccaacagaacaacgtttaacacgtcttgaatcaacagtgatgtatgcaggtattattgtagatacaagaaactttacattacgaacaggatcaagaacattcgatgcagcgagttatttacgtgcacatggtgcagatacgattttaacgcaacatttcttaaaagatgatgtggatacttacattaatcgatctgaattaattcgaactgtaaaagttgaagataatggcatagcaattgcgcatggttcagacgataaaatttatcatccagtaacagttgcacaagcagcagatgaactgttaagtttagaaggtattgaagcatcatatgttgttgcgagacgtgaagataatctgattggtatatctgcgcgttcactcggttcagtaaatgtccagttaacaatggaagcacttggtggcggtggacatttaaccaatgcggcaacacaacttaaaggtgtgacagtcgaagaggcgatagcacaattacaacaagcaattacagaacaattaagtaggagtgaagatgcatga

SEQ ID NO: 409898 - DNA, 924 bp, Staphylococcus aureus
gtgttttcaaaaatacaacctaaagcaacaataattgcaacgattgcgttggtatttgtcgctttagctttatatctagtgcctggtttaggactaatatttgcattatttgcaaccataccaggtatcgttttatggaataaatcaatacaatctttcgggattagtgcacttattacagtaattataacaactgttttaggtaatactttcgttttaagtgccatcatattagtcttaattgcaagtttaattattggtcaattgctcaaagaaagaacgtctaaagaaagaatattatacgtaacaacagtagcgatgagcttaatttcattaatcgcttttatgttactacaaacattcggaagaattccaccatcagcgagcatagtaaaacctttcaagcaaacattacatgaagcgattacgatgagcggtgccgatgcgaatatgacccaaatattagaagaagggtttagacaagcgaccgttcaattaccaggtttcatcattatcattacatttttaatcgtcttaattaacttaatcgttacatttccgattttacgaaaatttaaaatcgctacacctgtatttaagccacttttcgcgtggcaaatgagcggtattttattatggatatacattattgttatcatatgtttattatttacaggtcaaccgagtgtgttccagagcattcttttaaacttccaacttgtgttatcattagtaatgtatattcaaggtttaagtgttattcatttctttggtaaagcgaaaggtttgccgaatgcagtaacgattttactattgattatcggtacaatactgacacctacgacacatattgtaggactacttggtgttatcgatttaagtttgaatttgaagcgaatcatgaaaaataattctaaaaagtga

SEQ ID NO: 409899 - DNA, 969 bp, Staphylococcus aureus
atgacaaattacacagtagatactttaaatttagggaaatttattacagaatctggggaagtcatagataacttgcgtttgagatatgagcatgtcggttatcatggacaaccattagttgtagtttgtcatgcattaactggcaatcatttaacatatggaacagatgattatccgggttggtggcgagaaattattgatgggggatatatacccattcacgattatcaatttttaacatttgatgttattggtagtcctttcggttcaagttcacctttaaacgaccctcattttcctaaaaaattaacattaagagatatagtcagagcgaatgaacgaggtatacaagcccttggttatgacaagattaatattttaatagggggaagccttggaggaatgcaagcaatggaactactttacaatcaacagtttgaagtagataaagccattatccttgctgcaacaagccgaacatcatcttatagtagagctttcaatgaaattgcaaggcaagccattcatcttggtggtaaggaaggtctaagtattgcacgccaattaggttttttgacatatcgatcatcaaaaagttatgatgaacgtttcacgccggatgaagtagtcgcataccaacaacatcaaggtaataaatttaaagaacattttgatttgaattgttatctgacactgctagatgtattggatagtcacaacattgaccgaggtcgcacagacgtaacgcatgtttttaaaaatttagaaacaaaagtgttaacgatggggttcatagatgatttgctatatccggatgatcaagttcgtgcattaggcgaacgttttaaatatcatcgtcatttcttcgtgcctgataatgttgggcatgatggattcctactaaactttagtacctgggcacctaacttatatcatttcttaaatttaaagcattttaagcgtaagtaa

SEQ ID NO: 409900 - DNA, 330 bp, Staphylococcus aureus
atgataactcatatgaacatgttaatacttattttattgtgtggtatcgtaacgctattaattcgaattataccttttatcatgatttcaaaagtgcaattgcctgatgtcgtggttcgatggctatcatttatcccaatcacactatttacggcacttgtcatagacagcattattcaacagacgcctcatggtgaggggtatacattaaacatcccttacattatcgcgctcattccgacggttattttatctataatcacgcgtagtttaactattacaattattagtgggattgttatcatggcagcattacgatttttcttttaa

SEQ ID NO: 409901 - DNA, 525 bp, Staphylococcus aureus
atgtgcgcgttgtttatagcaggtacaccgatatcagcgattgtactaactgtatttatcgtaaattcaagaatgttccttttaagtatgtcgcttgcaccaaacttcaagacatatgggttttggaaccgtgttggattaggttcattagtaactgacgaaacgtttggcgtcgccattacaccttatttaaaaggagaagctatcaatgatcgttggatgcatggtcttaatatcacagcatatttattttgggcaatttcatgtgtagctggggctttatttggcgaatatatctcaaatccgcaaacgctagggttagattttgctatcacggctatgtttatctttttggccattgcgcaatttgaatcaattactaaatcgcgattaagaatttacatagtactcattattgccgtcatagtaatgatgttatcgctaagtatgtttatgccttcatatctagcaatattaattgcagccacaatttcagcagcgttaggagtgatgatggaacgatga

SEQ ID NO: 409902 - DNA, 180 bp, Staphylococcus aureus
atgacaacacatttaagttttagacaaggcgtgcgagagtgtatcccaacattattgggttatgccggtgttggtatttcatttggtattgtggcttcgtctcaaaactttagtattttagaaattgtcttgttatatatgccggtgctgcgcaatttattatgtgcgcgttgtttatag

SEQ ID NO: 409903 - DNA, 1515 bp, Staphylococcus aureus
atgactttatatttagatggtgaaacactaacaattgaggatattaaatcatttttacaacaacaatcaaagattgaaattattgatgatgcgttagaacgtgtcaaaaaaagtagagcggtagttgaacgtattattgaaaatgaggaaacgatttacggtattactacaggttttgggttatttagtgatgtacgtatagacccgacgcaatataatgaattacaagtgaatctgatacgctcacatgcctgtggactaggtgagccattttcaaaagaagtagcattagtcatgatgattttacgattgaatacattattaaaaggtcattcaggtgccactttagaattagtgagacaattacaattttttataaatgaacgtattataccgataatcccacagcaaggctctctcggtgcatcaggagatttagcgccattatcacacttagcattagcattaattggtgaagggaaagtattgtacagaggggaagaaaaggatagtgacgatgtattaagagaattaaatagacaacctttgaaccttcaggctaaagaaggtttagcattgattaatggtacgcaagctatgacagctcaaggtgtcattagttatatagaagcagaagatttaggttaccaatctgaatggattgctgcattaacgcatcagtctcttaatggcattatagatgcatatcgacatgatgtgcacgctgttcgtaattttcaagaacagattaatgtggcagcgcgtatgcgtgattggttagaaggatcagcattaacgacgcgacaagcagaaatacgtgtacaagatgcatatacgttgcgttgtataccacaaatccatggcgcgagttttcaagtattcaattatgttaaacagcaattagaatttgaaatgaatgcggctaatgataatccacttatatttgaggaagcaaatgaaacgtttgttatttcaggtggtaacttccatggacaacctattgcttttgcattagatcatcttaaattaggtgtaagtgaattagcaaacgtatcggaacgtcgtctagagcgactagtaaatcctcaattaaatggtgatttaccagcatttcttagtccagagccaggattgcaaagtggcgcgatgattatgcaatatgctgctgcaagtctcgtttctgaaaataaaactttagcgcatccagcgagtgttgattctatcacttcatctgcgaaccaagaagatcacgtatctatgggaactacagctgctagacatggttatcaaattattgaaaatgcaagacgtgtgttggcaatcgaatgtgttattgcattacaagcagcagagttgaaaggtgttgaaggtttatcaccaaaaacacgtcgtaaatatgaggagtttcgaagtatcgtgccatccattacacatgatcgtcaatttcataaagatattgaagcggttgcacagtatttaaagcaatcaatttatcacacgactgcatgtcactaa

SEQ ID NO: 409904 - DNA, 429 bp, Staphylococcus aureus; identical to SEQ ID NO: 405623

SEQ ID NO: 409905 - DNA, 381 bp, Staphylococcus aureus
atgatgccacgtaaatttagagttttgcaaattggaggagacgatttagaacctatttttcaacacaaaaaaggtgtgagttgggattacttcgatattggattgtttgaatttgatagtggttatgtagaggctattgaagcgattgttgaagcagaagggcgctttgattttatctatattcaagcaccatactcggagacattaacgaatttattacaaatgataagtgaaccatacaatacgtatgttgatgaatcattttggtcagttgaatatgaacaagacgaaaatgtccaaaaatacgttgttcaaccattacattaccggaatattgaagaacgtaataataaattagaggcagttagcttctcaggatag

SEQ ID NO: 409906 - DNA, 609 bp, Staphylococcus aureus
atgaaagggagtagtccaatgagaaaaaagagtggtccaattaacaagcgtgtagattttctctctaaccgattgaacaaatattcgattagaaaattcactatcggtacagcttcgattttagtaggttctacgttaatttttggtattggtagcggtgaagctaaagctgacgaaaaagtttacaccaataatgaaaatggtactaaaagtaagcatgaaaagagcgaagtagaaagcgcaccggaagcgaaagctacagaaaatgtgcaagaaacgaacaaagtagaaagcgcaccggaagcgaaagctacagaaagtgtgcaagaaacgaacaaagtagaaagcgcaccggaagcgaaagctacagaaagtgtgcaagaaacgaacaaagtagaaagcgcaccagaagcgaaagctacagaaaatgtgcaagaaacgaacaaagtagaaagtgcacaacaacaagataaaggaaaatcagtagaggcaaatgaaaagtctttttatgatttaagtaaaaaaattgatcaagcagttaataaaaaagaagttgtggaaaagcaagttaaaaagcaattttcgagtgtattatctgaaaaaaaataa

SEQ ID NO: 409907 - DNA, 2079 bp, Staphylococcus aureus
atgagtggagaagagattgtttccgaagtttacaaggaaatatttaaagaaatttcattaaatattgataaaaattctttgccaccagtaattactaatagattttttgctattgatagtttaagtgatgctgagtctataaataatcaacaagaaaacagctcaaaattagttacgctagaatcttataaaatatacgggccacatcaaactggtacattaaatgcatctgatcccaatacaaaagaaaatcaagctattaagttggttcctggtccaggtattgggaataaggaacagaatagaacagctatatatgctccaaatactatagattttagaaaagactttaatatgaattttgatattgcgctatggccccaaggcatgttttcaagacctgatggattaggattcatgttttcaaaatctacccctgaagaatatcttagtcaaggtggcattctaaatgatagtggtgtgtcaaatgcttttggattcaaaatagatacctataataatggtaatgtggacaatttagaaaaagatttttctaaagaaaaaggtgcttcgccgaaagcttatggaacgtttgtttataacgatgctaatggaacaactcatagttatactaagtacccgttagataatcaaaataggcaacaaaaaaacaatttatttaatggtttcactcaagcttttaatggctttagaggccaacaatataatactgtaaatattaattataatgctgatagcggtaagttgaccgtgaactatgctggactaacatggacagcactattatcagatattggagcagacaaaaatagtagatataatttcggaattatatcaagtaaagaaacagatagaaatgttccaggtagttatcatacagttaaagttaattctgcctcaataacttataccccaggttcaaatgatgcgcaagataatacaccaggatatgaagatggaagaacgaaaccaggtcaaaaagtagatattccgcaaacaggagataaagacttaccaccaggaacgaactttgagattccaaaagatcgagtaccagagggatggacagtaacagtagatccagatgggaaagtatcagtaacgccaccggcggacgtaacaccaggaacaaaagtagatattccagtgaaagtaacatatccagatggttcaacagaagaaacacctgtaaaagttacaatcattccaaatgatgcgcaagataatacaccaggatatgaagatggaagaacgaaaccaggtcaaaaattagatattccgcaaacaggagataaagacttaccaccaggaacgaactttgagattccaaaagatcgagtaccagagggatggacagtaacagtagatccagatgggaaagtatcagtaacgccaccggcggacgtaacaccaggaacagaagtagatattccagtgaaagtaacatatccagatggttcaacagaggaaacatctgtaaaagttataatcatttcagatgactcagactctgatgcggacagcgattcagattcagacagcgattcagactctgatgcggacagcgattcagattcagacagcgactcagactcagatagcgattctgactctgatgcggatagcgactcagattcagacagcgactcagactctgatgcggacagcgattcagattcagacagtgactcagactctgatgcggatagcgactcagattcagacagcgattcagattcagacagcgactcagactcagatagcgattctgactctgatgcggacagcgattcagattcagacagcgattcagattcagacagcgattcagattctgatgcggatagcgactcagattcagacagcgactcagactcaagaaaacatacatctgttaaaccgatgagtgttactaaagatcatcataataaagccaaagcactaccagaaacaggtagtggaaatgatgaatcaaataatggaacattattcggaggattattcgcagcattaggttcattattattattcggtcgtcgcaaaaaacaaaataaataa

SEQ ID NO: 409908 - DNA, 456 bp, Staphylococcus aureus
ttgaaaaaattatgttcattaattgtagtaacattaatttgtatcattgcattatcagcttgtggtaaagaacaaaccaaaacatatgaaggtgatgttagtggtaaacatgtactaacttctatcacatataaagatgataaggttttaaaacagtctacaatcaacacaattaaatatgacgatctaggtatggataaagacgaagccaaaaagttattcgccaaatctgaaagtattttcaaagaccttaaaggcgtaaaatacaaagtagactataaagataaaaaagcaattgaacacttagacatagattacacagaagttgacatgaaaaaattaaataaacgtcttggtgtttcaactaaagaaaataaagatattagttttgaaaaacttgaaaagcaattaaagcacagaggtttaaaagaaaaagataaaatggacgacaaatag

SEQ ID NO: 409909 - DNA, 777 bp, Staphylococcus aureus
atgtcaaaatctaatcaaaaaatcgcatcaattgaacaattaagtaataacgaaggtatcatttctgcattagcatttgaccaacgtggtgctttaaaacgaatgatggctaaacatcaaacggaagagccaactgtcgctcaaattgaacaattaaaagtattggttgcggaagaattaacacaatatgcgtcttcaattttattagatccagaatacggtttaccagcatctgatgcacgtaacaaagattgtggattattacttgcttatgaaaaaactggatatgacgtaaacgctaaaggtcgtttacctgactgtttagtagagtggtctgcaaaacgtttaaaagaacaaggtgcaaatgctgttaaattcttactttactatgatgttgatgatgctgaagaaattaacattcaaaagaaagcatacattgaaagaatcggttcagaatgtgttgcagaagacattcctttcttcttagaagtattaacatacgatgacaacattcctgataacggtagtgttgaattcgcaaaagttaagcctagaaaggttaacgaagcaatgaaattattctcagaaccacgctttaatgttgatgtattgaaagttgaagtaccagtaaacatgaagtatgtagaaggctttgctgaaggtgaagtggtttatacaaaagaggaagcggcacaacactttaaaaatcaagatgcagcaactcatttaccatacatttacttaagtgctggtgtttctgcggaattattccaataa

SEQ ID NO: 409910 - DNA, 198 bp, Staphylococcus aureus
atgatagagtctgggacatcacaatgtcctaggctctacaatgttatattggcggggccccaacacagagaaattgggaccccaatttcaacaggcaatggaagttggggacggggccccaacacagaagctgacggaaagtcagatttcaataatgtgcaagttggggatggggccccaacacagagaatttcgtaa

SEQ ID NO: 409911 - DNA, 183 bp, Staphylococcus aureus
atggcagacgaaagtaagttcgatcaatttaaaggaaatgttaaagaaacagtaggtaacgttactgataacaaagaattagaaaaagaaggtcagcaagataaagcgactggtaaagcaaaagaagttgttgaaaatgctaaaaacaaaataactgatgcaattgataaacttaaaaaataa

SEQ ID NO: 409912 - DNA, 684 bp, Staphylococcus aureus
atgactaaatccgttcgtgaagcattagatcatatcattgatagacaaggtattgcagatcatatttatcaaggttatgcgaaacctgcaacgagtccatttaatgataaaattccatatattaaagaacctaagttaaccaaacaaaatatcgaacaagcaaaaacgttattagctaaagatggttatacaaaagaacaccctttaaaaattaagttaattacgtatgacggtcgtccagagctatcgaaaattgcgcaagtattacaatcagatgctaaaaaagcaaatattgaaatcgacattaaaagtgttgatgacatagaaggttacttaaaagaccgttctgcatgggatgcaacgatgtatagttttgggacaatccctcgcggtgatacaggttatttctttaatcaagcatataaaaaagatggtgctattaataaaggagactacaataatagcaacgtcgatgatttaattaatcaattgaatcatactgtagatgttaaggaacgtcacaatatttctaatgatattattaaattatcaagtcgagatgtaccaaacagttatattgcttacaacgatcaaatagtcgctgctaactctaaggttaaaaattataaagtaacacctgaaggtatctatttaatcgattatcgaacaacgattgaacgataa

SEQ ID NO: 409913 - DNA, 801 bp, Staphylococcus aureus
atgaagtttaaaagactagcaactatattttcagcagtattagtgttatcaggatgtggctcaatgcattcatctggcaaagacttaaatatttcgttaccgttaaaaacaaagtctattgcaccttatgaaacagatgtaccagttaagattggtgctgcagaatcattatttaaaacaaatgatcaaggaaaaatagaaaaagcattagtgaaatcgtatcatcaaccaaatgatacaacgttagatatagaattaaaagataatattaaatttcaaaacggtcaaaaattgactgcagaaaaagtgaaatctagccttgaaaatagcatgaaaaaaagcgacttggtcaaatattcattaccaatatcatcaattaccgctaaaggtcaaaaactgacaattaaaaccaactccgcttaccctgaacttgtatctgaattagctaatccttttatggcaatttatgatacagatgctaaatcagatgttaatcaacttcctgttggtacaggcccttaccaaataaaagattataagcaatctcgaaaaatatcattgtcgaattttaaggactattggcaaggtaaaccgaaacttgatcatattactgtgacgtaccaagaagacggcaataatcgcgtcagaaatttagaatctcaaaaagatgatttaataactgatgtcccagttaataaagttcatgacatagaaaataatcaaaatttaaaagtgtcaaaagaatctggatttagaacttctttacttatgtataatcatactaataaaaaaaatgactaa

SEQ ID NO: 409914 - DNA, 645 bp, Staphylococcus aureus
atgaatttaagagaaattgtaggaaatataaaaagaccgtatttaacaccactaataatatttacgattttaatctcgcttttttttgatgcaattatgttttttaacagtaagctatatgataagttacctatatatttagtcatatttttagtttttggaatattagtgtcagtgttgctgtatatacaagaaaaaggtgaaaagataaaagttgagaaaaaaaatgtgaattggtatttgacattaaatgttatagcaggttattcaatgccattatttattacatctggttatgtagttggagcaacagtttatgggacagatgttttaaattattggtgtggaataattttgacattatttgtttcgtggtttgcattatttttattttataaaaatgagtttgatagtgaaaatccaaacaaagcagttaatgtcatagcaattattataaagttatctgctttaggattaatattttatattagtattattgcacctagtgttgaagatgaaaaaaactttatttttgtaagtattttaattaatatagctgtcgatgcattacttgttagatcatattttaactatgcattatataagagtgtaaaaaaagatatcgaaaacggggtggatgattaa

SEQ ID NO: 409915 - DNA, 219 bp, Staphylococcus aureus
atggaaaaccaaaaacaaggcaatggcttaaaaattgcaacatgggtatttattgtattaacagtagttataccgctatttggtattggaagtattgtttgtagtattaattacaaaaaatacgatgcagaaaaaggttcgaagttattgaaaattgcaattatcgtaacaataattgtttttgttttaaatttattagcatatttaggtttaagataa

SEQ ID NO: 409916 - DNA, 501 bp, Staphylococcus aureus
atgactttcgaagagaagttaagtcaaatgtacaacgagattgcgaataaaattagtagcatgataccagtagaatgggaaaaggtatatacaatggcttatatagatgatggaggaggtgaagtattctttaattatactaaaataaacagcgatgaattgaattattacaccgatatacctaaggagtataacatttctgtgcaagtatttgatgatttatggatggatttatatgatttgtttgaggaattaagaaatttatttaaagaagaaggactagaaccatggacatcatgcgaatttgactttacaagagaaggtaaattaaaagtttcatttgattatatagattggataaattcagaatttggtcaaataggtcgacaaaattactataagtatagaaaatttggaattttaccagaaacggaatatgaaattaataaagttaaagaaatcgaacaatatattaaagagcaagaagaagctgaaatatag

SEQ ID NO: 409917 - DNA, 501 bp, Staphylococcus aureus
atgactttcgaagaaaaactaagtgaaatatacaacaagattgcgaatgagattagtgggatgataccagtagagtgggaaaaagtatatacgatagcctatgtaaatgatagaggtggagaggtcgtttttaattatactaaaccaggtagcgatgaattgaattattacacgaatatatctagagattataatgtttcggaagaaatatttgatgatttatggatgaatctgtattacttgtttaagaatttaaggaatttatttaaaacagaaggacatgaaccatggacatcatgcgaatttgactttacaagagatggtaaattaaacgtatcttttgattatattgattggattaaattaagtttaggtccgttagctagagaaaattactatatgtataaaaaatttggggttataccagaaatggaatatgaaatggaagaaattaaagaaatcgagcaatatattaaagagcaagatgaagctgaactatag

SEQ ID NO: 409918 - DNA, 501 bp, Staphylococcus aureus
atgactttcgaagaaaaactaagtcaaatgtacaatgaaattgcaaatgaaatcagtggaatgataccagtagagtgggaaaaagtatatacaattgcttatgtagatgatgaaggtggagaggtcgtttttaattatactaaaccaggtagcgatgaattgaattattacacatatatccctagagagtataatgtctctgaaaaagtattttatgatttgtggacggatttatatagattgtttaagaagttaagaaatgcatttaaagaagaaggtcttgaaccatggacatcatgcgaatttgactttacaagagagggtaatttgaaagtatcgtttgattatatagattggattaaattaggttttggtccatcaggaaaggaaaactactatatgtataaaaagtttggtgttttaccagaaacggaatatgaaattaataaagttaaagaaatcgagcaatatattaaagaacaagaagaaactgaactatag

SEQ ID NO: 409919 - DNA, 1107 bp, Staphylococcus aureus
atggataaatcacttgaaattaacttaaaagaattagaaagcataatgtataaagaaaaagtaatcgacgttaaagagtatgataatttaaaagtaacttttgagacactaaacgatgctcctaaaagtgaaatacccactccctttacaatagaacaaatgttatataaattagaaactaaaaatttatattttcctgaaattaagtcaaaagaaaaatgtgtggagcttttacatagtgttggctattataatttgaagcattttatgtataatgaatttggtaaagatgagccgaaaaattttgatgaagtatatatactttataaatttgatagatatttattgaaacaattatttagtttagtaaatatgttggaaactcatataagaaatattattttagaagtatatatgttagaaattgagtataataacaagccttcgacactgttctatttagataaagatttatattttgagaaagttaatgatgagtataaatattctgccaaaaagctaaaagagttcaataggttacaaaatgttttttggagagctatagaaaaaaagaaaagtaacgataacgttaaacataatattaaaaaatacaatattataccagcttgggttttattccaaaattttagttttggagatttgtctactttttatagaactacattaccaacttatagaaataaagtaagtaagcgaattgaaaatttaatagaaaaaaatactggtataagcataaaacttccagaaaagttattgtgtgcatggttgaatagtatcaggtttttgagaaatagaatagctcacacagatataatttatggaattaattttacaaacacctgtgcaaaacatcatagtgatgaggaaatgtatgtaaatatagaaaagtataaatatcagcaaaggttagttacatttttattagctatgaagaaaatatttatgagtatgccagaaaataatattattgaatggaatgagactctaactaagatagagaataaatgttcagaacataactttattaaactttctaggttaggagttattgaaaataacctttcttactttaaaataactaaataa

SEQ ID NO: 409920 - DNA, 201 bp, Staphylococcus aureus
atgaaaaaattttttaatctatgggtatgttcgttcttatttttagtaataatatcatgggtaataattagtataaaatttggtaatatcagcacgatgcaaatattaatttctaatctgtttatatttattgcttatttactatatttagttaagttcattcgtttcaaaaaaacagtggcgatcagtaaacaagtataa

SEQ ID NO: 409921 - DNA, 1827 bp, Staphylococcus aureus
atgggatatagaatagaaacaagaacgtttgaagagttagaaggaaaattaaagttaccaacttttcaaagagcactagtttggtctaataatcaaaagcaagaatttttctcaacgctgaaagatggttttccttttggttctattctgttatacgaatatgaaaatgataataaatacagtcttattgatggcctgcaaaggtattctacaatggtagatttcatggagaatccaacaaactatattgaatttgaagattttacattgaaaattgctgaattgtataaaggggcatcagagagtacaaaagcagaagtagttaattatgccgaagatattctgctgaaaattattgaaaaatatattgattctacaaaagaaaatgtaaaagtaaatgaactagctaaaaaaatggtggataaatttccagtattaggtgaaacagatattagagatgaaatcactcaaatacagtcagatgttattacttattttaataatcaactagatattagtaatgtcaagattccgtgtatcttctttgaaggagaagagactgaattggcagaagtttttcaaaggttaaacagtggaggtaaaaagttatcgaagtatcaagtttttgctgcacattgggacagatatgaagttgaattgggagatttaaagtatagtgatgagatacttaaaaatgtaatagaaaggtacgaaagattaaataatgatagaggtatcttaattgaaaattttgaccctaaagaaatggagacgtcaagagtaattaatttatctgaattatgttatggacttggtaaagtgatttctgatgaattacaagcattttttaaagagtcaacagaagatatatgcaatgaattaggatttcaaacaatgctaattgtatttggcattcctacaaataagatgaatgagttaccatataaatatcaatatatgaagaataaaaataatatagaaatcttgtttgaaaaaattgtgaagatatataaaataataaataacaagtttaaagaagctttctctatggtagtatcgtcaagagaagataaatatgaaactaaatcttttactagattacaaataatgtcattcttttcatctttatggatctcatcgtatagtattgaattagatgaaaataaaaacacattttctattaaacaaactaaatctttgaaaaaaaatcaacaagtgattttgtctaatatcataatttatgcaatttatgatgtgataagaaagtactggtcaggaacaggtgatcgaaaattaatggatatatacatatctcaaaacaatagatatttaaagccgttagcaaaagaagtgtttagaaatgagctacttagatggaatgaagagaatataaataagacaagtattaatattcaaacggatgagaagatgatcattacttttattgctaataaatttagaagcttctattcatctttgaatgataatttagattatgaacatattttttcaagaaaattatacaagctgcataaaggtaatgcaataatccctgctggatctttaggtaacatcatgttacttgactctggtattaatagaagaaaaaaagaaaaatttctttattcagcaatagatattgataaggcatctattacgggaactatagaaaatcagtatgttaacaacagtttttatccagataaaagaacaatagatactattgaaatagatataattgatgaaaaatatgatagtttaataaaaatgatcaaaaatcgtggtgataaattaatagaagaagttgttagagaattatataaataa

SEQ ID NO: 409922 - DNA, 690 bp, Staphylococcus aureus
atggaaaaagtagccattttagtagatggtggatactatagaaagataagcgcaaaagtctacggaaaagttacagcgaaagaaagagctgacgagttatatagttattgcaatagacacttaaaagagacacatttcaaagaagaaatatataataaattatacagaatattttactatgattgtcctcctattgataagatagtttatcaccccttattaaaaaagaatgtaaatttttccaatactgatacgaaaaagtggacagaagactttttcaaagaaatgagcaaaaaaagaaaggtagcattgaggttaggagagttgagtgagtattcagttgaatacaacttaaaatactctattacaaaaaaattattaaatggaagtatcgatttaaatgatttgaaagaaaaagatttttccctatcattacaacaaaaaggtgttgatatgaaaataggtttagacatagcttcattatcatttaaacatcaagtagataaaattattttaatagctggtgatagcgattttgtacctgctgctaaactagcaagaacagaaggaattgattttgtattagattctttaggggcagatattagaaacaacttgtcattacacattgatggtaggcgtacttgtgatgaaaaatttaaattttatttaaatcaactatttaaataa

SEQ ID NO: 409923 - DNA, 681 bp, Staphylococcus aureus
atgaaatttaaagcgatagcaaaagcaagtttagcattgggaatgttagcaacaggtgtaataacgtcgaatatacaatcagtacaagcgaaaacagaagttaaacaacaaagtgaatcagagttgaaacactattataataaaccatttttcgagcgtaaaaatgtgactggatataaatatactgaaaatggtaaagattatatggaagtcgcaacagatcatcagtattatcaaatatcgttactaggtccggataaagataaatttaaagaaggaaataatccaggtctagatatatttgtcgttagggaaggtgacagtaggcaagctgcgaattactcaattggtggcgtaacaaaaacaaacagtcaaccttttattgactatatacacacaccaatccttgaaatcaagaaaggtaaagaagaaccacaaagtagtctataccaaatttataaagaagacatctcattaaaagaacttgattatagattaagagaacgtgcgattaaacaacacggcttgtattcaaatggtcttaaacaaggtcaaattacaattacaatgaatgatggcacaacacatacaatcgatttaagtcaaaaacttgaaaaagaacgtatgggtgagtcaatcgacggcactaagattaataaaattctagtagaaatgaaataa

SEQ ID NO: 409924 - DNA, 630 bp, Staphylococcus aureus
gtgctttgtgaatctaaacaaatttataaaaatcctaaatatcgagttattagatataataatcaatatttcatggtcgatttagtaagtacttggattacttatttttttcctatgattaattggtttttgcccaaaaagtacgcaaaaattagcgaaaatgaatttgaaaggttaaatattgtcgaacctgttaaaaacaatgttttttggccggttgcaggaagttcagttctattcggaattatattgagaaagtacggtaatttctttaatgttcagtttgaaaaacaactagcaatcactgtattttttatcatgttaatagggatgttaattttttatttctatctaaataaaaaattaacattaaaaatttttaataccaacgtggttaataagaatagagttgtattaataccgactttcaaacaagggttgttattagtttttgcgtacatttttttaggaagcgcttcaatatttactttaaccattcttttgacgacagagtcacaaaatataataatatttttaacttgggttattatcacgatgtttttctttttagtgaatatggcttcgataggtaatacaaatattcatgttattttaagaataaacgagtag

SEQ ID NO: 409925 - DNA, 621 bp, Staphylococcus aureus; identical to SEQ ID NO: 406149

SEQ ID NO: 409926 - DNA, 123 bp, Staphylococcus aureus
atgctatgtgatattaaggttattaataaaaatccgagatataaagtcgttcaatataatgatgagtatttgttaattgatttagtaagcacttggcttgtatacttttttcctttttattaa

SEQ ID NO: 409927 - DNA, 1407 bp, Staphylococcus aureus
atgagtattgacatgtatttagacagatctcgaaaccaagcttcaagtgtggggaatttgagtcaaacaatgaattcaaattatgatgcgttggaaaaagcaattactcaatttatcaatgatgatgcgcttaaagggaaagcgtatacgtcagctaagcaattttttagtacggtgttaattccattatcaacaagtatgaaaacattgagtgatttaacgaagcaagcttgcgataattttgtgtcacgttatacgagtgaggttgatagcatatctttaaaagaatcagagcttgaagaagatatcagatcattaagtcaacaaattacgcgatatgaaaatttgaataacaatttgaaaaagcatgcttccgataatcagcaagccatttcatcgaaccaacaaataatacaaacattaggtcaacaaaaacatgaattagaagagaagctacgcaaattgggtgagtttaatcaaaaatcaccagaaatatttaaagaagttgaagaatttcaaaaaattgtccaacaaggacttacccaagcgcaaaatttttggaacttttcaacaaatcaatttaatattccttcaggtaaagaacttgattgggccaaagcaagtcatgaaaaatatttgaaagttgctatggggaaaattgaacataaagcagagaaagaaactttaaataaagcagactttgctgttataaaggcatatgccaaagaacatccagaagacgatatcccgaaaagtataatgaaatatataaatgacaataaagatagtattaaacgagatatgggattagatattacgtcaacacttttagagcaaggcggtataaatgcaagtaaattcggtgtatttatcaatacagcaggtggagtgaaaggcccagccggtccaaattcatttgtggaagtcaaacgtacatcaggtaatgtgtttatagaaaatggtagtaaatttgctaaaggtggaaaatatctaggtaaaggtgttgcaggtgtaggatttggtataggtatgtatgatgaccttgcaaatgatgataaaacatttggggaggcgttgtcgcataatgctttaactacaggaataggtactggtgctggaattgctacttcagcaacaatagtcgcacttgctagtaacccagttggttgggctgctttaggaggtttggcagtaggtattggagctacccaccttgctgattgggcttaccaagcaaatattttggggttaaaagataaaactgattgggttggacataagatagatgaaggtattgataatttcaaaaagtcaacggtaaatacagtagatagcattggaaatgtcgttggtgaagctacaaaaagtattagcaatcatataaaccctatgaaatgggagtggtaa

SEQ ID NO: 409928 - DNA, 786 bp, Staphylococcus aureus
atgaaaacatatgatttaattgtaataggatttgggaaagctggtaaaactttagcgaaatacgctgcatcaacaggtcaacacgtcgcagttatcgaacaatcttcgaaaatgtatggaggcacttgtatcaatataggatgtataccttcgaagacacttgtacatgatggattagaaggcaaatcctttgaagcaagttataatcgtaaaaacgatgttgtcaatgcgctaaacaataaaaattaccacttattagcagacgataacaacattgatgtactggattttaaagcgcagtttaaatctaatactgaagtgaatttattaaatcagcatggcgatatcgtcgatagtattactgcacctcatatcattattaataccggtgctacctctgtcattcctaacattaaaggccttgatcaagctaaacacgtcttcgattcgacaggtttattaaacattagctatcaacctaagcacctcgttattgtaggtggcggttatatcgccttagaatttgcttcaatgtttgcgaatttaggtagtaaggtaacagtattagaacgtagcgaatcatttatgccacgcgaagatcaagatgtcgttgcacatgctattactgacttagaaaataaaggcattgcattgcattgcatacaaatgttgaaacgactgaattgtcatctgacaatcatcatacaacagtccatactaacgttggtaactttgaggctgatgcagtacttttggctatcggacgcaaaccgaatacggatttag

SEQ ID NO: 409929 - DNA, 252 bp, Staphylococcus aureus
atgaaaatgcgcttgcaacaagcttttttcaactctagtcaggggccccaacacagagaaattggatttccaatttctacagacaatgcaagttggggtgtgggccccaacacagagaatttcgaaaagaatttctacagacaatgcaagttggcggggccccaacaaagagaaattggattcccaatttctacagacagtgcgagttggggtggtacaacgataaagaaatactttttctatagaaattag

SEQ ID NO: 409930 - DNA, 1038 bp, Staphylococcus aureus
atgaaaacacgttgttacgatggtaaaaaatggcaatatgaatttaagcatgaaggaaaaagataccgtaagaaaggttttagaacaaagcgtgaagctaattctgctggactagacaagttaaatgagttaagaagtggttttaatatagataactatataactcttgaagaatacttcgaaaattggattaaaacatataaacaacctgttgttaaagaaaatacctaccgtcattatagaaatgcattacaacatatacaaaaacataaaataggtaaaatggagttatcaaagataaatagacaagtttatcagaaattcataaacgactattcaaaagaacacgcaaaagaaactataagaaaaacaaacggtgctattcggtcagctttagatgacgcattatatgatggacttatttttaaaaaccccgcttataaagttaattataaagccggaaaacctacgaagtcagaacaagaaaaattcatctcggtaactgaatatgaaatactaaaagatcacgtcagaaagaagagaactcgttcatcattagcgctattcataatgatttgtacgggttgtcgtgtcagtggtgcaagaaatataaagattgagcatatcaaccaagtgaaaaacactatatttattgacgagcgaaaaaccaatacttcccctagatatatcagtatcgctaaatctgatatgaaacacattatggacgtcataagtacatttgcaattagctatgatggttacattttcaaagaaggcggatctataattaaccttcatgctatcaataatgctttgaaatcagcctgtagagtcaataatataccaattattacatcgcacgcattaagacacactcattgttcttatttactagcaaaaggtgtatctatacattacatttctaaaagattaggtcataaaaatatagcaataactacatctgtgtattctcatttgttagaagaaaaatttaatgaagaggacaaaaaaacaactaaaattttagaaagtatgtaa

SEQ ID NO: 409931 - DNA, 444 bp, Staphylococcus aureus
atggacaaagtaataacatttttgataataatttttttgacgattttaatagttctgtactatttcaatgctattaagaaaaattatgaatttgctaatagtgctcaaaagattttttcgattatctcttttacatttgcaactgaagtttacttgttatttgcaatatatatattattcttcaaaatttttaatagtaaaaacatagaaataactgtattcatcgttagtttgacaacaatattattccaacaatttttaccaaaatcattcgaacgagttgttttatcagatgataatactaaacttaaattagataaaaaatatggagaaaaaatggctatagattttaaaatatttaactatgtcggtatgattattatattatcaatgttaatcataaaatttgctcacttggttttaaaaggaatattaaattattag

SEQ ID NO: 409932 - DNA, 216 bp, Staphylococcus aureus
atgaaagataaatacaaaatagatccagggattattaaaaataatacagaggaaactacagctatttctaaaatcagctacgaagttgaaaatgcgaatttatatggagctgatagtgaagatataacaagacaaatagaatatttgaaagccaaaaaaaattcccttctaatcttgaatatgttgatagttacactgattctcttaatggagtaa

SEQ ID NO: 409933 - DNA, 348 bp, Staphylococcus aureus
ttgaataaaaaatctcttatgattgtaattataattttaatattgattctaggcggaatctttttgaagatgaaatacgacgaaaagaaatattatgatgaacaaaaagaaagaataataatttatatgaagtataatgttaaagggtttaaagaaatacaattcgaggaacaaaaagaaaaccctttagatggatttgttattacaggttatataaataatgacaagactaatactttttcagcgcatatgtggtctgaagataattatcaatttgaatacatctcatcatatagtgataaactggatagaatgatgataaaagatgaaaaacagtttcagaattaa

SEQ ID NO: 409934 - DNA, 444 bp, Staphylococcus aureus
atgaaaaagaattatatatttgtgatagttgttgcaatattaatattactaattgttattgtatacgtgtttcacaaaagtaaaaaagaacattacattgaaacacaagaaaaacgaatcgatttgtattttaagcataatcttaacaattataaaaatatgaaggtgacagattttcataaaactccgatgggtgggtatttcattgtaggttatataaatgatgataaaaaatataaattccaagcaagtatagattcgggaagcaataatcaatatcagaaagatattggttaccatgaagataaattaggcaaattattcaaagaaaaagaccctaaatataaactctcagtcgatgaaataattgaaaaagaacacttagacaaaagtgaatatgaagccgatccaccgttatttttcttttcaggtccaattgaataa

SEQ ID NO: 409935 - DNA, 1086 bp, Staphylococcus aureus
ttgagattcccagagtttgaaggcgaatgggaagagaagcagttagggaatattataaaagttaattctggaaaagattataaacatttggataaaggcgatataccagtctatggtactggcggttatatgacaagtgtttcagaaccactaagtgaaattgatgctgttggtattgggagaaaagggactataaacaaaccatatttgcttgaggcgccgttttggacggtggatacattattttattgtacacctaaaaaagaaacagacatactatttatattaagtttatttagaaaaataaactggaaagtatacgatgaatcaacaggtgtgccaagcttaagcaaacaaaccattaataaaataaatagatttgtccctacaaataaagagcagcaaaaaataggcaagttcttcagcaaactcgaccggcaaattgaattagaagaacaaaaacttgaattacttcaacaacagaaaaaaggctatatgcagaaaatcttctcgcaagaattgcgattcaaagatgagaatggtaatgattatccagattggacaaatgaaagattgggtgaagttacaactgttactatgggacaaagtccgaaaagtgtaaattatactgataactcaaatgatacggtattaatccaaggaaatgctgatatagagaatggattaattaatccccgtatttatacaagggaagtaaccaaattaattcagaaggacgaaattattttaactgttagagcacctgtaggcaaattagctatggcacaaattaatgcgtgcattggtagaggtgtatgctcaattaaaggagataaatttttatattattttctagaatggtttgccactcaaaataaatggatccgtttttcacaggggagtacatttgaatctatttcagggaatgacataagaaatatacacattaaaataccagtcgaagatgaacgtactaaaattataaaattgttaaatagtttagatgtattaaattcaaaaacagatttaaaaatccaaaaccttaaacagagaaaacaatcgcttctacaaaaaatatttgtttaa

SEQ ID NO: 409936 - DNA, 789 bp, Staphylococcus aureus
atgactacatttgatgctaaaaaattaaaaaaagaatatcttgattggtataatcagaccttagagttttctaatttatcaaacaatgtagtaagaatagatactccttttaaagataattctttagataatttaataatttacgctttatacgatcagtccagagacatgattacactgacagatgacggctatactatatttgatttagaaaataatggtatttctttaaataaatcaaaaaaacgtaaaaagatttttgaagagcacctttcagcttacggtattaaatataacgataaaactcacgaaatttttgttcaaactaactttaaaaattttaataaatcgaaacataatttattacagtgccttatatttgttaatgatatgtacttactttctaatcctaagtcacagaacatatttacagaagatgttgcaaacaaattggatgaacataacatttattacggaagagatttacctattataggaagcagtggtgttgttcataatttcgacttttttattagcgctaagaaaaatcaaaaagaaaaatttatcaatgctatttctaaccctaataattctatgattattaagtcgaaaataacagatgctatgcaagcaaaaaaaataaaaagacacaggcaaaatgagtttatttttattttaaatgactcaaaaaaagaaataaatgaacataataaaaatcttcttcatgaaaactatattagtacaatagattatagcgaattagatgaaaagataggtttattgatttaa

SEQ ID NO: 409937 - DNA, 180 bp, Staphylococcus aureus
atgttaagttatggtggattgcttaaacaaaagcataaaattttaaacttagacgatgccgaagatggtaatttaattaatacaagtgatgaagataaaataacagatgaagaagcaaaagcacattcaattacggcaatttggaattttgaaaagcaaaattattatttaagacattag

SEQ ID NO: 409938 - DNA, 426 bp, Staphylococcus aureus
atgaatgacttgaatgatataaagtacaaaaatgaaattagtaatcattcaaatcaatttacacataattttgatgataaagaaatactattgcaagaattcccagaacaactaactaattatttattaaaatatgattatagagatttagaaatcataaaggctgttattcttaaagcaaaaaaatcatttaattcaaggcatgaagatatgcattacatgttagaggacattgaggatgaaatattaacttctttaaaaagacttaaaaaagctatacatgataggggagttaaaggccaaaaggaaacaatcaattcaatgcaagcttatttaatgcaaacaattctaactgaacttgaagaaacacatgccctttatatgcgccgtaaaaacatgaaacaatataatatctttaatcaataa

SEQ ID NO: 409939 - DNA, 609 bp, Staphylococcus aureus; identical to SEQ ID NO: 407197

SEQ ID NO: 409940 - DNA, 489 bp, Staphylococcus aureus
atgaaaaaagtaaacaaagagtacttattgaactttataattgtaacgttcttactcggaataataatcatacctatatccgtattagtattctcaataccattttttagcataataggtttccaatcattagcagataatttaaatataagttctttaataacaataaattggtattcaaataatatgttttataacattggctatattgcattattctttatagtaacttatctaatatttatttttcttgaactttttataatatttttacatataaaatacaaaaagaaatttaataatattatcttattcatattctttataactgctaatatgatcgtattaaacttaataattttgaagattttctacaacattcatataaacttatattttcaaattttcatttattctttatgcttctatcttttatttactcataaagagatttacaaaatatttgaagaaaataaaagtaaaaaataa

SEQ ID NO: 409941 - DNA, 3456 bp, Staphylococcus aureus
ttgaaaaatcttaattcaaaatgtggccgaacgctatctcgattttctattcgcaagtgttctgtcggtacagcgtccttcttaatcggtactgttgcatttttcggcattcaccacgaagcttttgcagctgaaaactcaaaaactcctgtccctgtgacgcaattactagagaactcaaacaaagaatcgacagaagaaaaaactgacttacaaaccaatgagaatgaaacattacagggaggagtatcaaataatacattaaatcgagaagttgaaaaagaaaatgtaaatggtatacaggaaaaacccaatgcacaaaaggaagaaaaaacactatctgattctcaactcacacgttcttcgcaacaagacaactcaactacgacagcttcaccgcaaacgaatgatcaccaacttcctataaagcatgacacaagttatgagaaatctacatcaaactcaactttaaatgaacaacctatggaaccaacaccatttccaaacaatactgttaaaacagaagaagttggagctacacaaaatgcagcgactgtacctcttcaattacagacggttaaaggtacaaaacaattgcgtgcagtaaatactgctgcggttaccccagcggtttcaggtggtacaaatgtaaatgacaaagtgacagcttcaaatatggatattagtgaatcatatattgaaccgaataactcaggtagcttctatttgaatagccgttttactgtcaatggtacggtgaaagaaggcgattacttcacagttaaaatgcctaatgccgtcaacacatatggagatacacgttactactccgactttagagaagaacttaaaaatagcaatggcgatgttattgctttaggcgaatatgacgtagctagccacacattaacttacaaatttactagcactgttaataatttacaaaacgtgacaggttcattcaatttaacacaatttatggaccgtcaagtcgcaaaaacatcagatacttatcctttaaaatatgaaattgctggtgaatctttcaatacacaaattaaagttcactatggtcaatatcaccacataggcgactctaacttgaaatcaatgattacaatggaagattctaagacgggtgaatatgaacaatacatttacgtcaatccattaaaaaaagatgcatatggtactgtcgtaagagttaaaggtttctcaaataacctttctgatagtaatggtcaagtgaacccagatacaactcaaataaaaattttaaaagttgatgaaaaacaagacctaaatgacagttttggtgtagatgatagtcaatatgaagatgtgactaaccaatttaaaactgtttatgatgaaaataacttggcagatattcattttggcgacttacatggtgcacgttatattattaaagtgacaagtaaagaaaaagaggattcttctgcagatttaaaactaagttcttcaatgtacacaaaaaataggtatggacaatatgatcgtataacttgggataaccacattgtgaaaagttcatctagcggtaatgcagatgggacagaggtttcatatcaattaggtgacaaagtttggaatgacgcgaacaaaaatggtatccaagatgcgggtgaatttggaatcccaggcgtaaaagtcattttaaaagataaagatggaaattttctagagaaaactgaaacaaatgcgaatggtaaatacgtttttgataatttgtcaaacggcatttatacagtagacttcgaagcacctgaaggctatacagcgagtccacaaaaccaaggcaatgatgcattggattccgacggcccaactagtgcacacgctataattagtgacggtaataatttaaccattgaccaaggtttttatctcactgaaccacctgtgcctacgactcataatattggtgacaaagtctgggaagacttaaataaagacggtatccaagacgacaatgaaccaggtatttctaacgtgaaagtaacattgacagattcggatggtaatgttgttgatacacgtaaaactgatgataaaggaaactatttatttgaagatgttaaagctggtgactacattgttacattcgaaacacctgaaggcttcacacctacacaaacaggtcaaggtacaatagataacgactctaacggtacttctacaaaagtaactgttggtgacagtgacgatttatcactcgacagtggtttctacaaaacaccaaaatataatttaggtaattatgtatgggaagatacaaataaagatggtaagcaggattcaactgaaaaaggtatttcaggcgtaacagttacattgaaaaatgaaaacggtgaagttttacaaacaactaaaacagataaagatggtaaatatcaattcactgatttaaacaatggaacttataaagttgaattcgagacaccatcaggttatacaccaacttcagtaacttctggaaatgatactgaaaaagattctaatggtttaacaacaacaggtgtcattaaagatgcagataacatgacattagacagtggtttctataaaacaccaaaatatagtttaggtgattatgtttggtacgacagtaataaagacggcaaacaagattcaactgaaaaaggtatcaaagatgttaaagttactttattaaatgaaaaaggcgaagtaattggaacaactaaaacagatgaaaatggtaaatatcgtttcgataatttagatagcggtaaatacaaagttatttttgaaaagcctgctggcttaacacaaacaggtacaaatacaactgaagatgataaagatgcagatggtggcgaagttgacgtaacaattacggatcatgatgatttcacacttgataacggatacttcgaagaagatacatcagatagcgactcagattcagatagcgactcagactcagacagcgattcagattcagatagcgattcggactcagacagtgattcagattcagacagcgactcagattcagatagcgattcagactcagacagcgattcagattcagatagcgactcagactcagacagcgactcagattcagacagcgactcagactcagacagcgactcagactcagacagcgactcagattcagacagtgattcagactcagacagtgattcagactcagatagcgactcagatagtgattccgattcagatagtgattccgattcagatagtgattccgattcagacagcgattctgaatctgataaagatcataatgacaaaacagataaatcaaataataaagaattaccagatactggtaatgatgttccaaataatgacactttatttggctcactattcgctacacttggtggattattcttaattggcagacgtcgtaaaaacaaaaataataatgcagaaaaataa

SEQ ID NO: 409942 - DNA, 414 bp, Staphylococcus aureus
gtgattggcttaccagcgaatattttctatggtacaagtattccaacatgtattttagtatttaaaaaatgtcgccaacaagacgacaacgtattatttatcgatgcatccaatgattttgaaaaaggaaaaaatcaaaaccatttaaacgatgcccaagtcgaacgtattatagacacatataagcgtaaagaaacgattgataaatatagctacagcgcgacattacaagagattgccgagaacgattataatctaaacataccgagatatgtcgatacattcgaagaagaagcgccaattgatttagatcaagtccaacaagatttgaaaaatatcgacaaagaaatcgcagaaattgaacaagaaatcaatgcatacctgaaagaactaggggtgttgaaagatgagtaa

SEQ ID NO: 409943 - DNA, 150 bp, Staphylococcus aureus
atgaagattaaaactttcgctacttttactcatcgtcaattagataaacaagttaataggtttttaaagaatgatattcatgtattagaaattcaaacacgcagtaattggttatatatttcagctattgttttttatgaggataaataa

SEQ ID NO: 409944 - DNA, 2862 bp, Staphylococcus aureus; identical to SEQ ID NO: 408048

SEQ ID NO: 409945 - DNA, 777 bp, Staphylococcus aureus; identical to SEQ ID NO: 408049

SEQ ID NO: 409946 - DNA, 909 bp, Staphylococcus aureus
atgaaaaaattcattggatcagttttagctacgacattaattttagggggatgttccatgatggaaaatgaatcaagtaaagacacgaatacagaaacaaaatcagtaccagaagaaatggaagcttcaaaatatgtaggacaaggcttccaaccacctgcagaaaaagatgcgattgaatttgcgaagaagcatcgtaaagaatttgaaaaagtaggtgaacaattctttaaagataactttggactaaaagttaaagctacaaatgttgtaggtaaagatgatggtgtagaagtttatgtgcattgcgaagatcatggcattgtatttaatgcaagtctacctttgtacaaagatgccatccatcaaaaaggatcaatgcgtagtaatgacaacggtgatgatatgagtatgatggtgggtacagtgctgagtggctttgaatatcgagcgcaaaaagaaaagtatgataacttatataaattcttaaaagaaaatgaaaagaaatatcaatatacaggttttactaaagaagcaattaacaagacgcaaaacgtcgggtatcaaaatgaatatttttatattacatatttatcaagaaatttaaaagaatatcgtaaatattacgaaccattgattcataaaaaggataaagaatttaaagaaggtatgcaacgagctagaaaagagctaaactatactgctaatactgatgttgtttctacacttttttctactaagaaaaactttactaaagacaatacagtagatgatgtgattgaattgagtaataaattaaaagataaacccaatatgcctcaaaaatctcaagttactattcaattaggaaaaccaagtataaatactaaaaagccgttttatgacgatataaatccaattgaaggatga

SEQ ID NO: 409947 - DNA, 1461 bp, Staphylococcus aureus
atgtgtaataattttaaagatgactttgaaaaaaatcgtcaatcgatagacacaaattcacatcaagaccatacggaagatgttgaaaaagaccaatcagaattagaacatcaggatacaatagagaatacggagcaacagtttccgccaagaaatgcccaaagaagaaaaagacgccgtgatttagcaacgaatcataataaacaagttcacaatgaatcacaaacatctgaagacaatgttcaaaatgaggctggcacaatagatgatcgtcaagtcgaatcatcacacagtactgaaagtcaagaacctagccatcaagacagtacacctcaacatgaagaggaatattataataagaatgcttttgcaatggataaatcacatccagaaccaatcgaagacaatgataaacacgagactattaaagatgcagaaaataacactgagcattcaacagtttctgataagagtaaagctgaacaatctcagcaacctaaaccatattttgcaacaggtgctaaccaagcaaatacatcaaaagataaacatgatgatgtaactgttaagcaagacaaagatgaatctaaagatcatcatagtggtaaaaaaggcgcagcaattggtgctggaacagcgggtgttgcaggtgcagctggtgcaatgggtgtttctaaagctaagaaacattcaaatgacgctcaaaacaaaagtaattctgacaagtcgaataactcgactgaggataaagcgtctcaagataagtctaaagatcatcataatggcaaaaaaggtgcagcgatcggtgctggaacagcaggtttggctggaggcgcagcaagtaaaagtgcttctgccgcttcaaaaccacatgcctctaataatgcaagccaaaaccatgatgaacatgacaatcatgacagagataaagaacgtaaaaaaggtggcatggccaaagtattgttaccattaattgcagctgtactaattatcggtgcattagcgatatttggaggcatggcattaaacaatcataataatggtacaaaagaaaataaaatcgcgaatacaaataaaaataatgctgatgaaagtaaagacaaagacacatctaaagacgcttctaaagataaatcaaaatctacagacagtgataaatcaaaagaggatcaagacaaagcgactaaagatgaatctgataatgatcaaaacaacgctaatcaagcgaacaatcaagcacaaaataatcaaaatcaacaacaagctaatcaaaatcaacaacagcaacaacaacgtcaaggtggtggccaaagacatacagtgaatggtcaagaaaacttataccgtatcgcaattcaatactacggttcaggttcaccggaaaatgttgaaaaaattagacgtgccaatggtttaagtggtaacaatattagaaacggtcaacaaatcgttattccataa

SEQ ID NO: 409948 - DNA, 537 bp, Staphylococcus aureus
atgactaacacattaacaactgatcagttacaagagttattacaaatacaaaaggagttcgacgatagaataccaaccagaaatttaaatgacacagtagctagtatgattattgaatttgtagagtggattaacacgcttgagttttttaaaaattggaagaaacaaccaggtaagccactagatacacaattagatgagattgctgattacttagctttcagtttgcaattaactctgactattgttgatgaagaagatttggaagaaactactgaggttatggttgatttgattgaaaatgaagttactttacctaaactacattcagtttattttgttcatgtaatgcatacactaacggaacaatttgtaaaaggtattgataatagtattgtacaagttttaataatgccttttttgtacgccaatacttactattcaatcgaccaacttatcgacgcatacaaaaagaaaatgaaaaggaaccacgaaagacaagatggaacagcagacgcaggaaaaggatacgtgtaa

SEQ ID NO: 409949 - DNA, 249 bp, Staphylococcus aureus; identical to SEQ ID NO: 408140

SEQ ID NO: 409950 - DNA, 309 bp, Staphylococcus aureus; identical to SEQ ID NO: 408139

SEQ ID NO: 409951 - DNA, 243 bp, Staphylococcus aureus; identical to SEQ ID NO: 408137

SEQ ID NO: 409952 - DNA, 1278 bp, Staphylococcus aureus
atgaatatatttaaaaataaattattatggattgcgccaatagcaactatgattatcttggtaatcttttctttagctttttatcctgcatataatcctaaaccaaaagatttaccaattggtatattaaacgaggataaaggtacaacgattcaagataaaaatgttaacattggtaaaaaattagaggataaattattagatagtgattctaataaaattaaatgggttaaggttgatagtgaaaaagaccttgaaaaagatttgaaagatcaaaaaatctttggagtagctattattgataaagacttttcaaaagatgctatgagtaaaacacaaaaagtagttatggatagtaaaaaagaagaaatgcaacaaaaagttgcttcaggtgaaattccgccacaagtggttcaacaaatgaaacaaaaaatggggaatcaacaagtagaggttaagcaggctaaatttaaaacgattgtaagtgaaggatcaagcttacaaggttcacaaattgcatcagctgtgttaactggtatgggtgataatattaatgctcaaattacgaagcaaagtttggaaacattaacgagtcaaaatgttaaagtcaatgccgcggacatcaatggtttgacgaatccagtaaaagtggataatgaaaaacttaataaagttaaagatcaccaagcaggtggtaatgcaccattcctaatgtttatgccaatttggataggttcaatcgtaacgtctatcttattgttctttgcatttagaactagtaacaatatcgtcgtgcaacatcgtatcattgcttcaattggacagatgatatttgcagttgttgcagcatttgcaggtagctttgtttatatttatttcatgcaaggcgttcaaggatttgattttgaccatccaaatcgtatcgcaatttttgtagcatttgcgattcttggtttcgtgggccttattttaggtgttatggtatggctaggtatgaagtcagttccaattttcttcattttaatgttctttagtatgcaacttgtaacgttacctaaacaaatgttgcctgaaagttatcaaaaatatgtatatgattggaatccattcacacactatgcaacaagtgtaagagaactattatacttgaatcatcatattgaattaaatagtacaatgtggatgtttatagggtttatgatttttggcgctgtatcaagtttagtttcagctattgttagaaaacatagcacaaaacgtactgaagtgccgtcataa

SEQ ID NO: 409953 - DNA, 858 bp, Staphylococcus aureus
atgtttgtcgaagcggatttatcacaagatgaacattgggatgaagcaatgaaagattgtaaatatgtcttgagtgtagcatctccggtgtttttcggtaaaacagacgatgcagaagtgatggcgaagcctgccattgaaggcatacaacgtattttaagagctgcagaacatgctggcgtgaagcgtgtggtgatgactgcaaactttggtgcagttggttttagcaataaagataaaaattcaatcacaaatgaaagtcattggacaaatgaagatgaaccaggcttatcagtatatgaaaaatcaaaattgttagctgaaaaggcagcgtgggattttgttgagaatgaaaatacaatagtagaatttgccacaatcaatccagttgcaatttttggaccatcattagatgcacacgtttcaggaagtttccacttgttagaaaacttattaaatggttcaatgaaacgtgtaccgcaaattccattgaatgttgttgatgtgagagacgtagctgaactacacattttggcaatgacaaatgaacaggctaatggcaagcgatttattgctacagctgatggacaaattaatttgttggaaattgcaaaattaattaaagaaaagagacctgaaatagctcaaaaagtttctactaaaaaattaccagactttattttgagtctaggtgctaaatttaatcatcaagctaaagaaggtaaacttttattagatatgaaccgcaatgtaagtaacgaacgtgcaaaaacattacttggttgggaaccgattgcgacacaagaagaagcaattttagcagcaattgatagtatggctaaatttcatttaatataa

SEQ ID NO: 409954 - DNA, 849 bp, Staphylococcus aureus
atgaaacgactggatggaattcccgaatcaatgttaattcctttgatagctcgagcaaaagagtacgaatacgaaaaaccaataataaaagacgcactatctaaaaaaatatttgatggtttagatgatatgtacaaaaatgttacatgtgatgatatgtctcaaattggaattagtatacgttctgtgataatagatagtgttactaaaaggcttatcaaggataataaaaatttgattgtggtcaatataggttgtggcttagatacaaggtttcaaagatttaataaagaaaaaatatcgtggatagatttagatgtacctgaatcaatagaaatacgaaaaacattttttaaagaaacagatagttataagatgatagctaaatcaatgctggattacagttggattgaagatgttaaaaattataaattttttaatagtaagtcaaatatattgtttatctttgaaggtgtattgatgtattttgatgagagtgtaatgactaaattattacatactattattaaaaagtttggagatcataatttggtctttgcgattgaattttgctcaaaaacaattgcaaataatacaaaaagacataaatctgtatcaaaattatcctcacaacctgtttttaaatatggatacaatgatttaaatgaattggataaagttttaccaaataaaatgaaagttataaatgaatataattactttgactaccataagaaaaggtgggggctctttgggtattgtagatatataccttatctgaaaaaaaggctaaacaataaaatagtaattatggaatataaaccagctaaattaatcactcataattga

SEQ ID NO: 409955 - DNA, 591 bp, Staphylococcus aureus
atgaatatttttaaaataattaaaaaaggagggataaatatttataaaatgaacctctatatatcatcatatattcctatatttttaatgatttttataaaaagtatggaaaatattagcttaaagcaaatatcaataactttcttaaaaaattggatgttttggggagcagtaatattattgtgtgttatatgtatattagttttattagactttttaaaaaacttaaagagtacagagcagaacaatacaaaatcaattgatctttcagatgaaaatataaaaagccatgaaagtgaagtattaaactattttataacatttttaattccaatactcacattaaatccagtttcatggccatctatttggtctaatattatattaattttattaataggtgtttattttgtgaaaaataatttattgagttttaatattttacttattgtattaaactataatatttataaagatcaatattctaatatatatatatctaaagctagtataaatgaaattaaaattcataatttaaaggcttacccgtataaacaaacgaatgttttttatatttctaaaaaaaagtaa

SEQ ID NO: 409956 - DNA, 891 bp, Staphylococcus aureus
atgataacagatattctacaaaatgattttgacgtatatttatattttgtcttcggagaacacttagacaacaatagtacatatacaaatttgccaataactaatgaactagttagtagtattaaagaaatttgtagagagtatgctagtaaaattgcaaacttaaatcaaattgaagattataatatcgtcggagctaatgaatcaattattgaaagttacgatttaaataataattttatggggctaccaaacataaactctctttttgctaatacaaatagattagttaatatacaagatcatgaattaaaagattatcgctattttataatagaagtagaattaaatgaggaacatttttattttattagaaaaccatttaaaccaggtatgttaaaggaaggtaagattataagtagacaaagaggacaatttggatgggtacaagaatcagacctaatagcttttgacgataaaattgatatgataatttctgatgaaaatatactgatatttaatagggcatcatttgaacatgcatataatttttctgaaatatatgattatttatcgtttaaagttttggaaaaccaaactttgaaagataatatccaaaattttgatgaattagtaatagatatagatggtacagaaactttaaaaagaaaggtagcaagtctttacaataaacaaaatatatgcctctttttaaataaaattgatgtaactaaaaaaataaatgttgactacaatttaaacttaacttttgatggtaatcaaatagtttatgaagaaaaatctcaagcaaaacatataatagcacttatgcaagatgcatattatgaaacttatataggagaagaacagggaacggattctaggaggtag

SEQ ID NO: 409957 - DNA, 174 bp, Staphylococcus aureus
atgaaaatgtacttaacttatatctgcttagtttcattgttaacaatattattactagcaatatctaacatgtatgtcgcttttagtgtgtacggcatgatggtaacttatggatttaatttaacaggagagattacaacgtgcgaaaacaagttattattacaaaaacagtag

SEQ ID NO: 409958 - DNA, 213 bp, Staphylococcus aureus
atgaataataaagtaagcaattacagaaggtatattggtttaacacaaaatcaaatggctaataatttaaaaatttcagttactgcttatagaaataaagaaagaggaataacaccatttaaagattcagagaaggtgtttataaaaaataaattaatagaaaatggtatcaaagacattactattgatgatatttttttaattaataagtag

SEQ ID NO: 409959 - DNA, 585 bp, Staphylococcus aureus
atggaagagtttggtgaaaaattcacacataaagctcataaatctattgtttcaaaatgggaaaaagggctaacaaaaccaagtaatgaaagattaaaagagattgctaagttagggaatataagtgtacatcaattaatatacggtgattttctagggttgttagaaagtattgcaaacgaggaaataaagtttattttagacacaaatatgtgtgctaacaatagttttctagctaatgaattatcatcttcagtttctcgttttatattttcctattatgaaagaggtaaagaaaattttaacgaaaatttatttagaaaattgttacaacattatttacaattagaattagatttaggaaatagagatcttgaatctttaacatatttcgcttatcaaagaacaataaatgcgcaagaattagtagttgactattatgaagattcaaaagcaaaagaatttttaaaagatgagagcatcgatgaattccttacgacaatatctaacaaatactttgatctattagaatacattgatgactatagagttaaacatgatctagagaaaattagtgaagagtga

SEQ ID NO: 409960 - DNA, 801 bp, Staphylococcus aureus
atgggatattttaaaagagttgtactttacataattgttatggttgtgagtgtttttataataggttgcaataaatcaagcgatacttcagaaaagccaaaagaagattcaaaagaaacacaaatcaaaaagagctttgcgaaaacgttagatatgtatccaattaagaatctcgaggacttatatgataaagaaggataccgtgatggcgaatttaaaaagggtgacaaaggaatgtggactatatatacagattttgctaaaagtaataaacaaggtggattgagtaatgaaggtatggtcttatacttagatagaaatacacggactgcaaagggacattattttgttaagacattctataataagggcaaattcccagatagaaaaaattataaagttgaaatgaaaaataataaaattatcttattagataaagtagaagatataaatctaaaaaagagaatagaaaactttaaattttttggacaatatgcaaatcttaaagaattgaaaaattacagcaatggtgatgtctcaattaatgagaatgttccaagttatgacgcaaaatttaaaatgagcaataaagatgaaaatgttaagcaattaagaagtcgttataatattcctactgataaagcaccggtattaaaaatgcatattgatggtgatttgaaaggaagttctgtgggttataaaaagttggaaattgacttttcaaaaggtgaaaaaagcgatttgtcagtaatagattctttaaatttccagccggcgaaggtggatgaagatgatgaatga

SEQ ID NO: 409961 - DNA, 261 bp, Staphylococcus aureus
atggaacaaatcacattaaccaaagaagagtgtgtcgaacaatgcatcaataaagacttaaaacttttagattatcgagttcaacaaattttagaaggtgttctatcagaaagtaccacatacggtgatgcaagaaataaattagaaacattgaaaattattgctgaatctcattttaaaaccgaacatgcttcagttatttacaaattagcattgaaaaagttagacgaaaaaatcaacgccactccaattaaagagtga

SEQ ID NO: 409962 - DNA, 777 bp, Staphylococcus aureus
atgcaagcattacaaataatagaacagaacgacacacattacgtagatagtagagaagttgcggaaatggtaggcaaggaacataaaaatttaattagagatgttgaaaattatagaagtgtaattttgcaaagctcaaagttgagccctgacgattacttcatagaatcaacttatttaggcgcaaataatcgtcagactaaacactacctactaaccaaaaaaggatgcgacatagtagcaaacaagatgacaggcagtaaagggattttgttcacagcaacttatgttgacgcattccataaaatggatgaacacattaaacaacaagcaaaactttatgtaccacaaacaccaatgcaagcattagagatgatgttcaaagcgcaaaaagaccaagaacagtttaaccaacaaatgcaacaagaaatcacaggtattcgtcacattgtcggtatcgaaacaaaaaactggcgcaatgatacaaacaaaatgttatctgcgattgcgcaacatttaggtggcggagcaatgcaccaaaaagttaagtctgaagcttacaaagtattagaagaaaaaggacgttgtaatttaaaaatccgtatgcagaatcgcaaaggcaaaatgctagcgaatggtgcgacgaagacacagattaacaagttgtcaaaattagatgtgattacggatgaacctagattgattgagatttacatttcagtgattaagagtatggcaattaaatacggtgtagatattagccagtttgaaatttaa

SEQ ID NO: 409963 - DNA, 216 bp, Staphylococcus aureus
atggaacaagaacaaagagaattactcgcatacattcattacattttgaatatggagattagcaatacgtcagaaacatatacacacacgatcgaagaagcaggcaaaatcgaaactatagaagtcagtagagaacaacacttagaagaggttatgaaatgggcggcgcaagagattgaaaaacactttgatttagtgtctgaaccagaggattaa

SEQ ID NO: 409964 - DNA, 633 bp, Staphylococcus aureus
gtgtatattgatcctttaaaaaatgttcgtttatctattaataacgcaattaataatgttgaaatttctagaagcatggcaattaaacagtctttaaaacttaagtaccaattagatataattaataaaaataacttaaatttattttctaacttcaaagtagactttcatctaaacaacttaattgaaatgaattttaatttgcgtaattctttttcttctctaacatttcaaagaaatttattttctgaagatgcgataaaatcttttaaggaactctataggtttgatgatgagatagtgcttcaagcacaacagaccattagagatttttatatcaatccaactgctatctctactttggctgaagccatcaattcgacctatccaataaatgagcaaggtacctataaaagaaacgataaatttgtcaatcgtatcaaaaatgattttccacatcctttcaaacagttaataagatggtctaatggcattgcggcgggtgctgacattcaaatctttgtaacaaactatataaacgagaacgatttacatattcaaaattcattgatagttgctatagtttgtttattaagttttttatcgacctattgttcacattctaaaaagtaa

SEQ ID NO: 409965 - DNA, 123 bp, Staphylococcus aureus
atgaacattcaaaaagtaatgaaattaatattgaaaaaaattcatgagatgagggagattttaaaaaaagttcaacaaaaatatcagacacaaagatctaattgtcatcaaagtgaaagatga

SEQ ID NO: 409966 - DNA, 264 bp, Staphylococcus aureus
atgccaaaaatcatagtaccaccaacaccagaaaacacatatagaggcgaagaaaaatttgtgaaaaagttatacgcaacgcctacacaaatccatcaattgtttggagtatgtagaagtacagtatacaactggttgaaatattaccgcaaagataatttaggtgtagaaaatttatacattgattattcaccaacaggcactctgattaatatttctaaattggaagagtatttgatcagaaagcataaaaaatggtattag

SEQ ID NO: 409967 - DNA, 162 bp, Staphylococcus aureus
atgagcgacacatataaaagctacctattagcagtactatgcttcacagtcttagcgattgtactcatgccgtttctatacttcactacagcatggtcaattgcgggattcacaagtatcgcaacattcatattttataaagaatacttttatgaagaataa

SEQ ID NO: 409968 - DNA, 237 bp, Staphylococcus aureus
atgaaaacacataaatttaaacgaatggcaattgacttaatagaacgtgtacaaagcacttcttatcaagttgattataagtacaacgttatatgggtctggcactacagcgatgactatttaggaaaagtcgcatcaataaatatgcacaacaatgtagatgacgataacacaatattggctagatacgagaaagctaaaaagatgctagcgggggaggtgttaagcgatggctaa

SEQ ID NO: 409969 - DNA, 639 bp, Staphylococcus aureus
atgaataaatcagaaacagttgttgaaataaataaagctatggttgcatttcgcaaggaagtaaaacaaccgctcaaagataaaaacaatccattttttaaatcaaaatacgtacctcttgagaacgttgtagaagccattgacgaggccgcaacacctcatgggttgtcttatacccaatgggctttgaacgatgtagacggacgcgtaggagtcgctacaatgcttatgcatgaaagcggtgaatatatcgagtatgatcctgtatttatgaatgcagaaaagaatacgccacaaggagcaggctcgttaataagttatcttaaacgttattcgctatctgcgattttcggtattactagtgaccaagacgatgacggaaatgaagcaagtggaaaaaataataatccaaaacagcaaactagaacgcaatgggcaagtagcgaaactatagggattttaaggaaagaggttataagtttcactaaattgataaagggcacggataaagaagctccacaaaatatagtagaacaaaaattcgacataaataactataaattaacagaaaaacaagcagcagaagctattcaaaaaatacaaaacaacgcaaaaacaattactggaggaaaacaataa

SEQ ID NO: 409970 - DNA, 651 bp, Staphylococcus aureus
ttgaaaaaatgtttcattgcttgccctataggtactgatgattctaaagtaagaagaaactctgattttcttttacaatccatcataaaacctgctttagaatcagattttgaaatccaacgatctgaccttatatcatcgaccaataaaatcactgatgaaataattggtggattaacgaattctgaattagttattgtagatttgagtacgcataacccgaacgtattttatgaattaggttacagacacgctctagagagaccaacaattactatgattaacaaagatgagaatatcccttttgatgttagcgcttaccgtacaatttactacagcgaattatacgcggatgtagtaaatgccaaagaccaacttaaagaaactatcaaaacatttacagataatgatttcaattttgaaaatccagtcaataagtataataatatcgataatgaatacggtgttttaaatagacatttgttagatataaaaagcgatttatccgaattaaaagagtttctaccttcagtgaccaaacaagaccctgatattcccgctgattctatggtaagaatgatggaacttgccgttcagtatccggatcaatttgaaagattgatggaattgcaaaacaaaaacagtcaataa

SEQ ID NO: 409971 - DNA, 249 bp, Staphylococcus aureus
atgcttaaaacagatagcgcacgtaaagaatacttaaaccaatttttcggctctaagagatacctgtatcaggataacgaacgagtggcacatatccatgtagtaaacggcacttattactttcatgggcatatcgtgccaggttggcaaggcgtgaaaaagacatttgatacagctgaagagcttgaaacatatataaagcaacatggtttggaatacgaggaacagaagcaactaactttattttag

SEQ ID NO: 409972 - DNA, 252 bp, Staphylococcus aureus
atgatgaataaccgcgaacaaatcgaacaatcagttataagtgctagtgcgtataacggcaatgacacagagggattactaaaagagattgaagacgtgtataagaaagcacaagcgtttgatgaaatacttgagggtttacataatgctatgcaagatgcactcaaagaagatattgaacttgatgaagcagtaggaattatgacaggtcaagttgtttatgaatatgaggaggaacaggaaaatgactaa

SEQ ID NO: 409973 - DNA, 534 bp, Staphylococcus aureus
atgactaacacattacaagtaaggctattatcagaaactgctagaatgcccgaacgaaatcataagacggatgcaggttatgacatattctcagctgaaactgtcctacttgagccacaagaaaaggcagtgattaaaacagatgtagctgtaagcattccagagggctatgtcgggctattaactagccgcagtggtgtaagcagtaaaacgcatttagtgattgaaacaggcaaaatagacgcgggatatcatggtaatttagggattaatatcaagaatgataatgaaacgttagagagtgaggatatgagtaactttggtcggagtcctgctgggatagatggaaagtatgcccgactacctgtaacagataaaattttatgtatgaatggtagttatgtcataaacaaaggcgacaaactagctcaattggttatcgtgcctatatggacacctgaactaaagcaagtggaggaattcgagagtgtttcagaacgtggagcaaaaggcttcggaagtagcggagtgtaa

SEQ ID NO: 409974 - DNA, 246 bp, Staphylococcus aureus; identical to SEQ ID NO: 407772

SEQ ID NO: 409975 - DNA, 207 bp, Staphylococcus aureus
atgacacaatacttagtcacaacattcaaagattcaacaggactaccacatgaacatattactgtggctagagataatcagacgtttacagttgttgaggcagagaataaagaagaagcaaaagagaagtacgaggcgcaagttaaaagggatgcgattattaaattaggtcagttgtttgaaaatataagggagtgtgggaaatga

SEQ ID NO: 409976 - DNA, 384 bp, Staphylococcus aureus
atgattaaaaaacttaaaaatatggattggttcgatatctttattgctggaatactgcgattattcggcgtaatcgcactgatgcttgttgtcatatcgcctatctatacagtggctagttaccaaaacaaagaagtacatcaagggacaattacagataaatataacaagagacaagataaagaagacaagttctatattgtattagacaacaagcaagtcattgaaaactctgacttattattcaaaaagaaatttgatagcgcagacatacaagctaggttaaaagtaggcgataaagtaaaagttaaaacgattggttatagaatacactttttaaatttatatccagtcttatacgaagtgaagaaggtaggtaaatga

SEQ ID NO: 409977 - DNA, 204 bp, Staphylococcus aureus
atgaatttaaataaaataactgatgtctttcatttattggttgctaatttagttagtatcctttttttattaggattatgtattgtgaatatctctgtatataaaacttttggtcagaacatgggattgctagcaactggcattattttaatagttatttcattgatattaaaccatgaaagtaatcaagaaaggaggcattga

SEQ ID NO: 409978 - DNA, 1275 bp, Staphylococcus aureus
ttgggtattttttataaaactgaaatgcgtgatttaaaatacaacgaagaagatttgcaaatgatggtacaaactttacctggctttcaaggaacaaagctacgtgaatatgaaggtatagaagctattaaacatagcgatatatttactgcagttatgatgattgcatctgatttagcgcgtatgccaattaggttaatatcgaacggacaaattgattatggtaataagattgtaaacctattgaacaatcgtcctaatccgatgtataacggttatattttcaagttagttgtatttgccagcgcattattaacttcacatggatatgtcgaaattgctcgcgataaagttggtaaaccaacaaatttaacatttaggaaaacctcagaagttgaattgaagtcagacagaagaggacaaccttattattttcatcaaagagtagatgataacggtagaagaattcaacgtaatattaaatttagtgacatgttagatgttaaattttattccttagacggtataaacggtttatcactactagatactttaagtaggactattgaatctgataataacggcaaggatttcctcaataatttcttacgtaacggtacgcatgcgggcggtatattgaagatgaaaggcgttctggaaaataagactgcaagaaatagagcaagagaggagtttcacaaagcttttagcgggacaaaacaagctggtaaagtcgttgttttagatgaatctatgacatttgaccaattagaggttgatacagaagttttaaagcttattagagaaaataaatcatctacaagagagatagcaggtgtgtttggtattcctttgcataaattcggtatagaaacttcgaatatgagtatcactgacgcaaaccttgattatctctcaacgttaaaaccttatatcacttgtgtttgtgcggaattgaatttcaagtttaataacgaacacgaagatgtgaaccgtgaatttaaatttgacaccactgaaatacgagtggttgatgaaaaaacgcaagctgaaatcgataaaatcaatattggttcaggaaaaatgaatattgatgaaataagacaaagagatggcttggcaccgatcccagatggttacggaagtattcacagggttgatttgaatcatgtgaatattgcgctggtggatgaatatcaaatgaataaatcaaaatccattgataataagttgaaaggtggtgaggaaaatgagcaaggaaacaagagttggtaa

SEQ ID NO: 409979 - DNA, 1236 bp, Staphylococcus aureus
atgaaaacaaaagaagagttacgatctgagatttcagacattaaaagacaaattgatttgaaagttaagtacgcaacacgggcacttaataacgatgagttagaaagagcagaagaattagaacaagaaattactgatttacgttctcaaattcaagaaaagcaagaagaattagataaattaaaagaaaaagacgggggttcagaggatgacccacaaccagttgttgtaaatgaagcgcgttcttatcaacaacaagcgaatataaacgaattaggtatttcgattcaaaatacaaaagtaacatcacaagaagttagagacttttcagaataccttgaaactcgtgatgaaaatactattaaaggcggttctttgaaaacggattctggtttcgtattaattccggaagagattgtaacagatatccttacgttaaaagaagttgaatttaatttagataagtatgtcacagttaaaaaagcacctagcggttcaggtaagtatccagttgtacgtcaatcttctgttgctgcacttcctgaagttgaagaattagctgaaaacccagaattagcggttaaaccgttttatcaattggtttatgacattaaaacacatcgtggttacttccgtatttcacgtgaatctattgaagatagcaaagttaatgtactacaagaattgaaattatggatggcgcgcacaattgctgcaacgcgtaatcaagcaattattgatgtgctgaaaaacggttctcaaggagaaggtggtaagcaactaaaattagaaaaagttgctgcaaaaggtatcgacggattgaaagatgctgttaaccttaacatcaaaccaaattacgagcacaatattgctattgtatctcaaacaatgtttgcaaagttagataagatgaaagacaaaaacggaaactacttaattcaaccagatgttaaagaaaaaacgcaacaacgtttactaggtgctaaagttgaaatcttaccagatgaaatgttaggagaaaaagcaaacgagacattgattttcggtaatctaaaagatgcaattgtattgtttgaccgttcacaatatcaagctggctggacagattacatgcatttcggtgaatgtttaatggtagctgtacgtcaagattgccgtatcttagatgaaaaatctgcaattgttattaattatgaagatacgaaaaatgttggagacgttagtttagaagcgtaa

SEQ ID NO: 409980 - DNA, 159 bp, Staphylococcus aureus
atggcgatgttcaaagtaaagaaatcttatactgacttagaaaaaggggaatatctggaaagcggtaaacatgttgaaatgacagtaaagcgtgctgattatgtcaacaaaaagctgaaagaacacggtgtaatactagaacgtgtcaaagaagaatag

SEQ ID NO: 409981 - DNA, 333 bp, Staphylococcus aureus
atgcaattgacaaccactgaactaaagttactaaaaacgcattgcaaaatagatcataactctgaagataaattactagaaacctattatagttgggctttttatgaaatagtcagtgctgttacagatgattatattgaatacgaagactggtttaaaagtaaccctctttttactcgtgctgtataccctttggctaattattattttgaaaatcgtatcgcttatcaggatagaaatttatcacttgcacctcatatggttttaagtactgttcataaattgagagattcatttgaacgatatttggagagtgaagaagatgaaatttaa

SEQ ID NO: 409982 - DNA, 333 bp, Staphylococcus aureus
atgaaatttaattcaaacaaattaactgagcgtatcgatttttgccaagatatcagcgaacgagtaaatggtaatccagcaaaaccaaagtcgaaagttttatattcatgttatgcatgtatacaagaagctaaagaatctgatacacagaccaacttgaatacaggtagtaaatttataaaaactattattatcagagatcctagaggcgattataaaccctcaaacaaacattacattacgcacgaaagccaaagatataacattaagtatgttaaatcggattatcaagataaatcttatctacgtgtgtatggtgaggtggttatatag

SEQ ID NO: 409983 - DNA, 390 bp, Staphylococcus aureus
atgattaacattactaatttgattagaaatacaattgttaaagaaaatgttacagaagaatcacatgtatttaactatacagtagatgaccattttcacgaaaaaaccaataagcctattgtgcggatatacccactaccatttaaccctgatgaatacgctgatgatagtgaatttactagggagtataattatcaaattgatatttggtggtctgaggatgaaccgaatgaacaggctgaaaaaatagtagagtcgctaaagaaaatgaattttcaaagttactatagagaacctttatatgaaagtgaagtaatgtcatttaggcatattataagagttaaaggctcaatattatcaatacaaaatggaggagaaataaatgactga

SEQ ID NO: 409984 - DNA, 4650 bp, Staphylococcus aureus
atgcctaatcctataggtaatatggttataaaggttgatttagatggttctgggtttaatcgaggtataacaggtttaaacaggcaaatgaaaatggtttcacgtgagctttcggctaatttgtcacaattttctagatatgataattcgttagaaaagtcgaaaataaaagttgatggtttgagcaaaaaacaaaaagttcaagcacagattactaaagagttgaaagataattatgacaaacttagcaaagaaactggtgaaaacagtgcgaaaacacaagctgcagctgctaaatataatgaagcttacgctaaattgaatcaatacgaacgagagttaaaccaagctacacaagaattaaaagacatgcaaagagaacaaaaagcgttaaacagtgcgatgggtaaacttggaaatacctttaataattttggtcctaaacttcaagaaattggtaacagtatgaaaaatgtaggccgtaacatgactatgtatgtaactgcaccggttgttgctgggtttgctgttgctgctaaaaaaggtattgaatttgatgacagtatgagaaaagttaaagcaacttcaggtgctacaggcgaagagtttgaggctttaaagaaaaaagcgcgagaaatgggagcgactacaaaatttagcgcatcagattctgctgaagcattgaattacatggcacttgctggttgggattctaagcaaatgatggaaggtttaagtggtgttatggatttagcggcagcatcaggcgaagatttaggcgcagttagtgatattgtcactgacggacttactgcatttggtttaaaagcaaaagatagtggtcatttcgcagatgttttagcacaaactagctcaaaagcaaatacggatgttagagggctcggagaagcttttaaatatgttgctcctgtagcaggtgcgttaggttacacgattgaagatacatctattgcgataggtttaatgagtaatgccggtatcaaaggtgagaaagcaggtacagctttacgaacaatgtttaccaacctttcaagtccgactagagctatggggaatgaaatggagcgtttaggaatatctattacagacagtaacggcgaaatgattcctatgcgaaagctcttagatcaactgagggagaaattcaaacatctttcaaaagaccaacaagctagttctgccgctacaatatttggtaaagaagcgatgtcgggagcattagcgattataaatgcttctgatgaagactatcaaaagttaaccaaatctatagactcatctagcggcgcatctaaaaggatggctgagacaatggagtctggtttaggtgggaaattaagaactttaaggtcgcaattagaagaactagccttaacgatttatgacagaatagaaccagcactacagattatagtaagtgcttttagcaaagtagtgacatgggttactaaattaccaacatcaatccaattagctattgttgggtttggattatttgcagcagttttaggccctttagtttttatgttcggtttgtttatcagcgtaatggggaatgcgatgacagttttaggaccactgttaataaatgttaacaaagctggtggtgtattcgcgtttttaagaactaaaatcgcctcacttgttaaactgtttccaattttaggtgtatcgatatccagtttaacgttacctataacattaattataggtgcattagttggtattggtatagctttctatcaagcttataaacgttcagaaacttttagaaatattgtaaatcaatcaatctctggtgtagcaaacgcatttaaagcagctaaactagcattacaagggttctttgatttattcaaaggtgatagtaaaggcgcggtcactctcgaaaagatattcccacccgaaactgtagcaggaatacaaaatgtagttaatacgattaggacaactttctttaaagtagttgatgcaatcgttggtttcgccaaagagataggcgctcaattagcctctttctggaaagagaacggctcagaaataacacaagctttacaaaatatagctagttttattaaagcaacctttgaatttatttttaactttattatcaaaccaatcatgttcgcgatttggcaagtgatgcaatttatttggccggcggttaaagctttaattgtcagtacttgggagaatataaaaggtgtgatacaaggagctttaaatatcatactaggtttaattaagttcttctcaagtttatttactggagattggcgaggagtttgggatgcgattgttatgattcttaaaggagtcgttcaattaatatggaatttaattcaattatggtttgtaggcaaaatacttggcgttgttaggtactttggcggattgctaaaaggattaatagcaggtatttgggacgtaataaaaagtatattcagtaaatctttatcagcaatttggaatgcgacaaaaagtatttttggattcttatttaatagtgtcaaatcaattttcacgaatatgaaaaattggttatctaatacttggagtagtatccgtacgaatacgataggaaaagcgcagtcattatttagtggcgtcaaatcaaaatttactaatttatggaatgcgacgaaagaaatttttagtaatttaagaaattggatgtcaaatatttggaattccattaaagataatacggtaggaattgctagccgtttatggagtaaggtacgtggaatttttacaaatatgcgtgacggcttacaaagtattatcagcaaaattaaaagtcatatcggcggtatggtagatgctattaaaaaaggacttaataaattaatcgacggtttaaactgggtcggtggtaagttgggcatggataaaatacctaagttacatactggtacagagcacacacatactactacaagattagttaagaacggtaagattgcacgtgacacattcgctacagttggagataagggacgcggaaatggtccaaatggttttagaaacgaaatgattgaattccctaatggtaaacgtgtaatcacaccaaatacagatactactgcttatttacctaaaggctcaaaagtatataacggtgcacaaacttattcaatgttaaacggaactcttccaagatttagtttaggtactatgtggaaagatattaagtccggtgcatcatcagcatttaactggacaaaagatcaaataggtaaaggtaccaaatggcttggcgataaagttggcgatgtcatggactttatcgataatccaggcaaacttttaaattatgtacttcaagcgtttggagttgatttcagttctctaactaaaggtatgggtattgctggcgatataacaaaagctgcatggtctaagattaagaaaagtgcaatcaagtggcttgaggatgctttcgcagagtcgggtgatggcggtgtattagatatgaataaattacgttacttatacggtcacactgctgcttatacacgagaaaccggacgcccattccatgaaggtctggattttgattacatttacgaacctgttccatcaaccattaatggtagagcacaagttatgccttttcataatggtggttatggaaaatgggtgaaaattgtaaagggcgccttagaagttatttatgcacatttatctaaatataaagttaaaactggtcaacaagttagggtcggccagactgttggtatatcggggaatacggggtttagtacaggacctcacttacattatgagatgcgttggaatggaagacatagagacccgttaccgtggttaagaaagaataatgggggcggcaaaagtacacccggtggtaatggtgcagctaatgctagacgagctataaaggctgctcaaaatattttaggaggaaggtataaggcgagttggattactaacgagatgatgcgtgttgcgagtcgtgaatccaattatacagctaatgcagtcaataattgggatagcaacgcaagagctggtataccttcaagaggtatgttccaaatgatagatccttcatttagagcgtacgcaaagtcgggttacaataatcctctcaacccaactcatcaagctatatcggctatgagatatattgtgggtaaatgggtaccaagaacaggctcatggagagctgcgttcaaacgcgctggtgattacgcatatgctactggtggcaaagtctataacggattgtaccacttaggggaagaaggatatccagagtggataatacctactgatccaagtagagcgaacgaagcacacaaattattagctttagctgctaacgatattgataaccgctctaaaaataagcgaccaaacaacttaccaaatccaagtataagtaatagtgatacaaactatattcatacattggagaataaactggatgcggttattaattgtttggttagtttggttgagtctaatcaagttattgcagataaggattacgaaccagttattaataagtatgtgtttgaagatgaggtaaataattctatcgataaacgagagcgtcacgaatctacaagagttagatttagaagaggaggcacgataatctaa

SEQ ID NO: 409985 - DNA, 1944 bp, Staphylococcus aureus
atgaaaataaataagttaactatatcgaactttgctggaatcaaagaagaaaaatttaactttgacggtaaagatgcaaaaatatacggcaataatgcgactggcaagactacaacagcaaccgcattacaatggctgcttttcgataagggtttagacggttcaaccaaatcatttaaccctgtacctttaaacgaaaaaaacgaagaaaattatgagttaattccgactgttttcgcagaatttgaaatcgacggaaaaattacgacttttaaaaaagagtcacatcctaagtacacaataaatcaaaaaacgaatcgcaaggaatactcacgaagtcgaacgaagaaacaatatatcaatgatgaatcaataaaagtaaaggattataaagctcgtattgatgaactgattgatgaagatgtattcaagttaattacgaaccctcaagcatttaacttactagattggaagaaacgaagaagtttgttgtttgaaatcgctaaaccaatcaatgatgaggatgtcattaaaacaaatgatgattttaaagaactaaataatattcttggagatcacgaaattgaaacaaagaaaaagattcttacagacaagataaaacagattaacaaagatatcaaagatattccgatacgtattaaccaaacgcaacaaaataagcaggatgtaccggaattcgataatgatagacacacaatcataaaacaagaaattgagcaacttgaaaatgagcgtatagatattcaaaacggtgcagaagaaattaatttgcgtaaccaattagctgataaacaatcagaattgaagcgcatagaagctaataatagcgccagtaatgagaacaaaatacatgctttaacaaatgagctacacgttgaaaatggaacggttgcgaatcttaaaacaagattaaagcaaaacaaacaacaaattacacatgaagaaaatcgacgtaatcaattattagaaaatcataaaggattaaaaagtgatttagaaaaagctaaaaatcaaaaatttgaatatcttgatgacaatgtatgtagttgttgtggtcaacagttaccagctgaacaagtgagtgaggtaagagaaaaagcattgcagaaattcaatgcaaacaaatcgaaagaattagaaacaatacaaacatctatcaatcacattatttcagagggcaagaaaataaagccaattatcgagaaattagaggatgacaacaataatttacaaattaaaatcaacgaagcagaagagcgttcagcaagaatacaaaacaaaattaataagttgaaaataactcacgttgacgttacgcaaactgacgaatacaaagcagtaatgttagagataaatgagattaatcaaaaacgctctaacatcaggaaaactattcaagataaagtttcaggaatagatgacaaaataagcgaacttactcaagaaaaatcagaaattgaagtgtcaatatcaatcgaaaaatcaaataaacatctagatgatgttatttctgaattaagaaatgaagaagacagattattggatgaaaaagaaaagtattcacatgacctttatatcttaaaagaatttacaacaacaaaagtcaaaatgcttactgaaaacatcaataacgaatttgatattgctgaatttaagctattcaataccttagttaacggcgaattagaagaaacatgttcaacaacggttaatggtgtcgagtatgacagcggtttaaataacgcctcaagaattaatgttggcttagatatcatcaacacactatcaaaacattttaaagttacagcgccaatatttattgataatgctgaatcagtaacagagcttatcaaaacagaatcacaacaaattcaattgatagtaaatgaacaagataaaaaattaagaatggagactatataa

SEQ ID NO: 409986 - DNA, 477 bp, Staphylococcus aureus
atgactggttggataagtattgatcgctcaattcaaaatcattggctatttaaagaaaagagaacattttcaaagtttgaagcatggatatatttactcatggaagcgaatcattcaaaggcaaaagtgcctattggaaaccaaattgtaaccgtagaaagaggacaaagattaacatcgattttgaccttgtctgacctttttaactggtcacgatttaaagtgaaaaccttccttgacttactcgagagtgatggaatgttagaagtcaaaacaacatcaaaatatacccttataaccattgtcaattatgacttttatcaaagtgagcagggcaggaaccaacatcaaaacgacatcaaaccaacatcaaaacaacatcagtcaaacatcaacccaacatcaacccaacatcaaaacaacatcaaaccaacacaaacaataatgataataaagataataatgaaaagaatgtga

SEQ ID NO: 409987 - DNA, 4530 bp, Staphylococcus aureus
atgggagaaagaataaaaggtttatctataggtttggatttagatgcagcaaatttaaatagatcatttgcagaaatcaaacgaaactttaaaactttaaattctgacttaaagttaaccggtaacaacttcaaatataccgaaaaatcaactcatagttacaaacaaaggattaaagaacttgatggaactatcacaggttataagaaaaacgttgatgatttagccaagcaatatggcaaggtatctcaagaacagggcgaaaacagcgcggaagctcaaaaattacgacaagaatataacaaacaagcaaatgagctgaattttttagaaaaagaactagaaaaaacaacaactgagtttgaagagttcaaaaaagctcaagttgaagctcaaagaatggcagaaagtggctggggaaaaaccagtaaagtttttgaaagtatgggacctaaattaacaaaaatgggtgatggtttaaaatccattggtaaaggtttgatgattggtgtaactgcacctgttttaggtattgcagcagcatcaggaaaagcttttgcagaagttgataaaggtttagatacagttacccaagcaacaggagcaaccggcggagagcttaagaagttgcagaattcatttaaagatgtttatggcaactttccagaagacgctgagactgtaggcggtgttttaggggaagttaacacaaggttaggtttcactggcaaagaacttgagagtgccacagagtcattcttgaaatttagtcacataacaggttctgacggcgtacaagccgttcaattaattacgcgtgcaatgggtgatgcaggtattgaagctgatgagtatcaaagtgtacttgatatggtagcgaaagcagcacaggctagcggtataagtgttgatacattagctgatagcattactaaatacggtgctccaatgagggctatgggctttgagatgaaagaatcaatcgctttattctctcaatgggagaaatcaggtgttaatactgaaatagccttcagtggtttgaaaaaagctatatccaattggggtaaagcgggtaaagacccaagagaagaatttaagaagacattagcagaaattgaaaggacaccggatatagctagcgcaacaagtttagcgattgaagcatttggtgcaaaagcaggtcctgatttagcagatgctattaaaggcggtcgctttagttaccaagagttcttaaaaactatcgaagattcgcaaggaacggtcaatcagacatttaaagattctgaaagtggctccgaaagatttaaagtagcaatgaataaacttaaattagtaggtgctgatgtatgggcttctattgaaagtgcgtttgctccagtcatggaagaattaatcaaaaagctatctgtagcagttgattggttttcaagtttaagtgatggatctaaaaggtcgattgttatattcggtggtattgctgctgcaattggtcctgtagtttttggattaggtgcattcataagcacagttggcaacgcagtaactgtattagctccattattagctagtattgcaaaggctggtggattgattagttttttatcgactaaagtacctatattaggaactgtcttcacagctttaactggtccaattggcattgtattaggtgtattggctggtttagcagtcgcatttacaattgcttataagaaatctgaaacatttagaaattttgttaatggtgcaattgaaagtgttaaacaaacatttagtaattttattcaatttattcaacctttcattgattctgttaaaaacatctttaaacaagcgatatcagcaatagttgattttgctaaagatatttggagtcaaatcaatggattctttaatgaaaatggaatttccattgttcaagcacttcaaaatatatgcaactttattaaagcgatatttgaatttattttaaattttgtaattaaaccaattatgttcgcaatctggcaagtgatgcaatttatttggccggcggttaaagccttgattgtcagcacttgggaaaatatcaaaggtgtaatacaaggggctattaatattattttgggtattatcaaagtgttctctagtcttttcacaggaaactggcgaggcgtttgggacggcattgtaatgatactgaaaggtactgtgcagttaatttggaatttaattcaattatggtttgtaggcaaaatacttggcgttgttaggtactttggcggattgctaaaaggtttaataactattatatgggttgctataataggcgttttcaagaaatcattatcggcaatttggaatgcaacaaaaagtatttttggtttcttattcaatagtgttaaatctattttcactaatatgaaaaactggttatctagtacgtggaataatatcaaaagcaataccgtcggcaaggctcattcgttatttacgggtgtaaggtctaaattcacaagtttatggaatgcgacgaaagatatatttattaaattaagaaattggatgtcaaacatctggaactctattaaagataacactgtaggtatagctggtcgcttatgggatagagtgcgtaacatctttggaagcatgcgtgacggtttaaaatctatcattggtaaaattaaagatcatatcggtggtatggtagacgctgttaaaagaggtcttaataaattaattgaaggtttaaactgggtcggtggtaagttgggtatggacaaaataccgaagttacacactggtactgaacatacgcatactactacaagattagttaagaacggtaagattgcgcgggatacgttcgctacggttggggataaaggacgtggaaatggtccgaatggtttcagaaatgaaatgattgaattccctaatggcaaacgggtacttacgcctaatacagatacgacagcgtacttacctaaaggttcaaaagtatataacggcgcacaaacttattcaatgttaaatggaacgcttccaagatttagcataggtactatgtggaaagatattaaatccggtgcatcatcggcatttaactggacaaaagatcaaataggtaaaggtaccaaatggcttggcgataaagttggcgatgttttagattttattgaaaatccaggcaaacttttaaattatatacttgaagcttttggaattgatttcaattctttaactaaaagtatgggaattgcaggcgacataacaaaagctgcatggtctaagattaagaaaagtgctactgattggataaaagaaaatttagaagctatgggcggtggcgatttagtcggcggaatattagaccctgacaaaattaattatcattatggacgtaccgcagcttataccgctgcaactggaagaccatttcatgaaggtgtcgattttccatttgtatatcaagaagttagaacgccgatgggtggcagacttacaagaatgccatttatgtctggtggttatggtaattatgtaaaaattactagtggcgttatcgatatgctatttgcgcatttgaaaaactttagcaaatcaccacctagtggcacgatggtaaagcccggtgatgttgttggtttaactggtaataccggatttagtacaggaccacatttacattttgaaatgaggagaaatggacgacattttgaccctgaaccatatttaaggaatgctaagaaaaaaggaagattatcaataggtggtggcggtgctacttctggaagtggcgcaacttatgccagtcgagtaatccgacaagcgcaaagtattttaggtggtcgttataaaggtaagtggattcatgaccaaatgatgcgcgttgcaaaacgtgaaagtaactaccagtcaaatgcagtgaataactgggatataaatgctcaaagaggagacccatcaagaggattattccaaatcatcggctcaacttttagagcaaacgctaaacgtggatatactaactttaataatccggttcatcaaggtatttcagcaatgcagtacattgttagacgctacggttgggatggatttaagcgtgcgggtgattacgcatatgctacaggcggaaaagtttttgatggttggtataacttaggtgaagacggtcatccagaatgggttattccaacagatccagctcgtagaaatgatgcaatgaagatgttacattatgcagctgcggaagttagagggaaaaacgcaagtaagaataaacgacctagtcaattatctagtgtaaatgggtttgatgacccaagcttattattgaaaatgattgaacaacagcaacaacaaatagctttattactgaagatagcgcaatctaacgatgtgattgcagataaagattatcagccgattattgacgaatacgcttttgataaaaaggtgaacgcgtctatagaaaagcgagaaaggcaagaatcaacaaaagtaaagtttagaaaaggaggaattgctattcaatga

SEQ ID NO: 409988 - DNA, 147 bp, Staphylococcus aureus; identical to SEQ ID NO: 407426

SEQ ID NO: 409989 - DNA, 1170 bp, Staphylococcus aureus
atgtcaattagattaaataaaaaattaaatgaaaatgcattcaatgatcctaccaaagaaactatccaaaaatcaattaaccaattatgttctgatgtggattcaggtcaagttattatgccaatctttcagcgcgatttatcttggacagccgaaaagaaaatagacttatacaattttcaattaggaggttttgctccggtttctcctatttcaatgaatagaattggtcctaaaagtaaggggatgccccacgtaaagctattaagtagaactgaaatagaagaattaaatgaaggtagtctaagtgtgatagatgggcaacaaagaatttcaacgaattatcaagcttattcaaatgatgaatcaatacaagaaatagcgctagatttaactaaagggaaatttgtcaatttaaaagaaaaaaagccaagtaaaaatcaaatacctgttggtgttttatacaataaagatcctgaggtctatactgagtatcttagattcaatccgaaattagcagaattctctgtatcatctattctaggacaaatacgcaccaaattttttaattatttttataccattaactatgctcaagacttatctggtgaagaacaaattgaatggtttgacgttctaaatttggcgggtagtagagttcctgagcttcaaatgaagctcactaaattacaaataaaaggcttggatttttataaagaatactccaacatttttagagatagattggaaatggccggacttgaccatctatttatacaaaaaaatacagaggtctctatacctttagccacactcaattctgcttttgaaatagtgagtggtaaaaaaaatcatacttcaaattacagtcccatcccgtcagatgccaaaggatcttttttaaatgagttagagcccgatcaattaagaaagtgttttaaaatgacattaaacggcttagaagatgccttgaactttattgatatcaatagtctaagagaaccatcaagaattgattatatttcctatttatctgggtatttcacctataataagaatgcttctaacacttctatacaaaacgttataaattggtataataatactaactttggaaataaatccaatcaagaaagacgagaattgtataatgaattattaatgtgttaa

SEQ ID NO: 409990 - DNA, 207 bp, Staphylococcus aureus
ttgaaggaacttgattttaaaataagaaaactgttgattaaaaaatacaaactgtatgaagggtcagctgataaaggtagaattgttattaatatgaaagatgaaaataagtatgaaattgatttaagtgataaattagatttcgagcgtatggcagatgtcattaatagtgaacaaattaagaacatcgaagtgaatttgaaataa

SEQ ID NO: 409991 - DNA, 501 bp, Staphylococcus aureus; identical to SEQ ID NO: 408035

SEQ ID NO: 409992 - DNA, 2163 bp, Staphylococcus aureus
atgaataaaattaatgatagagacttaacagaattgagtagttactgggtttatcaagacatcaataaagataatgattttacagttaacggaaaaagatttaagcaggttgatgaatataatgataatggaaataaaaataaaaaaggtgcctcagatttaaaaatttatgaattgttggatgaaaaaggaaaaccaactggtgaacaaaccatgatttatcaaggaacatctaatgaggcaataaaccctaataatccattaaaatctttagatatcggagatgattggttacaaaatgcgaaattaatggataatagtaataagtcaacggattatcttaagcaatcagacgaatttgcagatttatatagagacaaactaaatgacgctaataaattaagtaagtataactttacacaaaaatatggtgttagtccaaataattacaaaaacaaaaccattgtggcggatggcggtaattcggaaggcggtgcaggagcaaaatatcaaggagcgaaacatccaaatgaaaaagttgttgctactgacccagcaatggtaccttatgctgcttggcagaaatttgctagaccacgctttgataatatgattagttttaatagtaccaacgatttattaacatggttacaagatccattcatcaaagatatgccaggaaaacgcgttaacattagtgatggtgtgcccaggttagatgctttaatagacagccatgtaggttataaaaggaagttaaatagaaaagacaacacatacgatactgtaccactaatcaaaattaagtcggtaaaagatacagaaattaaaaatggaaaaaaagtaaaaaagactattaacataacattagatatggatgggcgaattccgataaatgtttggacaggggattcgattgcacgttctggaagaggaactttaattaaacttaatttagaaaatcttgatgcgttgagtaaactgattactggtgaaactagtggtatgttagcagaatgcgtaatctttttaaatgaaagttttaacatctcagaaaatgaaaataaaaattttgcagatagaaagcaacaattatcagaaggatttaaggataagattaacttatttcaattagaagaaatggaaagaactttaattagtaaaataaactcacttgaagaagttgcagatgaaacaatagaaagtattagtgctgttaaacacttattacctgattttgcattggatgcattaaaagaaagaattaatgagttgtttaaaggtataaaatcttttatagaaaaagtgtatgatagtatagataatgaaattttagaaattttcaaaaatatagatcacgacttcagagatggagtatctgaagaaatgatgaaacatttgaaagtagtgaaacagaatatagagcgaataaaaaatcaaaatgatatttatggtaggcaaattgcagaaattagaagtattatgaaacaacaagatgcaacaattttagatgggaatttccaaattaattgtagcggcgaaaatatggtacagggtctagttataccttctaattatttaggaagaaaaatgaaaatattaaaagaccatatcgatgatggtattaaaaaaatagcagactatgttcaaagtatatatgatgaatatgcatcgaaaattgttgatgtaataaaatatttgattaatacaattcccaaaatacgtaagaatttaagacatgcaattgaaatgttaaatgtaaaaaagaaagaatttttgtccctgattcctaatgtaacttgtaattatattaaaactaaattagaagaattagataatactttaggcaaatgggagccatttcttaatgatttaaaagcagtgtcaccaattttagataaccatttagatgatattgttaagaacatgaagcctttgattgtacagatgttatttgaaccatcacattatgatgatatgtttattttaaacacacaagctcatgcacgtcttgatcaaatggcacaacagtttgaagttgtttgtaatggcttgaacgaaaatgaaggacaagcaattcaaacgatggatcaatctgcctctctaatacggtcaaacttaattcaagttaaagaacaattagaaaaactagctgtatactaa

SEQ ID NO: 409993 - DNA, 405 bp, Staphylococcus aureus
atgattatgcaacgtgctttaaaaattgctaacaacacaatcaatcaattagaaacaaagattgaacgtgataaaccaaaaattgtatttgcagatgcagtatctactactaagacatcaattttagttggagagttagcaaagatcattaaacaaaacggtataaacatcgggcaacgcagattgtttgagtggttacgtcaaaacggattccttattaaacgcaagggtgtggattataacatgcctacacagtattcaatggaacgtgagttattcgaaattaaagaaacatcaatcacacattcggacggtcacacatcaattagtaagacaccaaaagtaacaggcaaaggacaacaatactttgttaataagtttttaggagaaaaacaaacatcttaa

SEQ ID NO: 409994 - DNA, 606 bp, Staphylococcus aureus
atgtcagaaatgctacatgatcgtatagaaaatcaactgtttttacagtatccagatatacctaattatattattgataatttaaatcatcatttaagaccatatcaagaagaagctgtgcaaagattaatgtatcttgaagagcaagatgaaggtaatttatacaacaaattgatgtttaatatggcaactggttctggtaaaacacttgttttagctgcatcagtattatatttatttaaagaaaaaggttatcaaaatttcttgttttttgttaatagtactgcgattgtcaataaaacgtatgacaatttaaccaacacgtcatctagtaagtatttgtttaatccagaaggcattgtcattgatggtaaattgataaatattcaagtagtagataattatcccgttttacctgatgaaaatacgatttaccttaaattaacaacgattaatgcattgcatgataaattaaattatccaagagaaaatgaaattacttatgaagatttagctcaatttcctattgtgttattagctgatgaagctcatcatctaaatgtcagcacaaagaaaaaaggcaaaaaaaactactcagcaaattga

SEQ ID NO: 409995 - DNA, 825 bp, Staphylococcus aureus
atgtttaaaaatttagatcatgattttgaagatggcgtgacagaggaaatgatgaagcatttaaatgttgtgaataataatataaattttgtgaaaaagcaaaatgatgtatatggagagcagataaccgatattaaaaatataatgtctcatcaagatgcaacggtaatggatggaaacttatctattaattatagcggtgaacatatgatttcgggtcaagtacaatcttctaattatttaaccagaaaaatgacaattttaaaaaaccatattgataatgcagttaacaaaattagtgattatgttcaagaaacttacaataattattttgaaccagtattaaactacattcttgaagttatacattcggtagaaacagctgtgagacatatttatgaaataagcagtttaatatacaaatcaggaatgaaaataaagataaaggcaatgggaataaatgttgacgaaattgataaaatgcttgaagttttaaaaagtaaacttaaaaacttagacgaatttttaaataatttaaaaatagcttcgccgattttagaaaatcacttagatgatatagttagaaatatgaaaccgttaattgttaatcagatttttgaaccatcacattatgacgatatgtttattttaaacacacaagctcatgctcgtcttgatcaaatggcacaacagtttgaagttgtttgtaatggcttgaacgaaaatgaaggacaagctattcaaacaatggatcaatctgcctcgttaattcgttcaaacttaattcaagttaaagaacaattagaaaaactagcagtttactaa

SEQ ID NO: 409996 - DNA, 273 bp, Staphylococcus aureus
atgaaaaaaagattattatttgtaattgttattactttatttattttttcttctaatcatacagtcttatctaacggcgatgtaggtacaggaaacctaagaaatttttatactaaatatgaatatgtgaatttaaagaatgttaaagacaaaaattcaccagaatcacaccgcttagaatactcgtataaaaatgatacattgtatgctgaatttgacaatgaatatataactagtgatctaaagggaaaaatgtcgatgtttttggtataa

SEQ ID NO: 409997 - DNA, 342 bp, Staphylococcus aureus
atggataaaaagcaaataaaaggcttcgtgtgtgattatcataagcgaactagaagtgatgtattaatagatgatgatataaatactgatgaattcttttcaataggtgatgaaaattctaatgaatggatgacagacgataatgttgatgatcatattataaagaatcacttagaaatgattgttgaccgagtagctaatgataaagagttttatattttcgattctttaatacaaggacgtagttatcaagatattagtagtgtcttagattgttctgaacaatctgtaagattatggtatgaaaccttattagataaaattgtggaggtgatagaatga

SEQ ID NO: 409998 - DNA, 180 bp, Staphylococcus aureus
atgcgttcaaatggacgatataagccctacaacgtcattgaacgcttacaagttgatttgtatcaagcaagtattaaacaacgttcagaacgtcaaaaacaaagaaatacagcaattgaaaacagtaagattgcacgagtaaatgaatatcaccaatcttcatatgtaaaagtggtgtaa

SEQ ID NO: 409999 - DNA, 642 bp, Staphylococcus aureus
atgaacatagaaactgtagtaaatgaatttgaaacacaagcaggcacgttactaaggtactacactggattattagaacatagtaaagtacaaccgtattgctttaagttatacaatgatccgtttgatatggtttatgtgatgatgaacgggaagttattcggtcatgtatatattaaagattgtaaagtaaggcaatcatttgaattagcgtcacctaagcacactgaggggcttataagaagtatagaaggtcattatgtaggttatgaattacatgacggtaaacagctttctattagtgatatgatggccagtcaattatttgaagatgagtattttatgtatggattacaaacatatgcagaatcaaataatagtgatgtgtttgagtacctagaaaatggatttgataccgatacacttgagggcattcaatcgagtaatactgatgtgatatcgaatattgaaatgttgtatcagatagctacgggaatcaatgaaccagcaccagagttagttgaggggttgagattagtaactgagtttgtacaagatgagaaggctgcacaagaggattacacggggttagaacgtaaattgaatgatctaaaagcgtcttattatagtataagtaaataa

SEQ ID NO: 410000 - DNA, 1524 bp, Staphylococcus aureus
atgaatttcgattggataaaaacgcgttcagacttcgatgatgacaagcctgccgttattgatcacgcaaaacaaacatcttggacataccaacaactcaatgcacgcgctgataatatggcacattatttaacatctcaaggtgttaaaaaaggcgatgttatcggtatttttgcgccaaatgatattgcaatattagatttattatttgcttgttttaaaacaggtgtggtttttttaccattgaattggcggcttaacccaaaagaaattgcagccattgtggaagatgcacaattaaaactgcttttctatgctgaaaaacatttaagttcactcaccgatattaaccaaaacttattgcatatggatattgatgtagcccaatatgatgaaatcgtaaatccagattatcaccaaccttttcaagcaacacctgttgaaccacaagatcttgcagcattaatttatacaagtggtacaaccggatcacctaaaggtgtgatgttctcatatgaatcatttgttcataacggtgcaaacttagagctgacgtacaagttcaattcaaactatattacgattgtatcaacaccaatgttccatgttttagggtttaacgatactgtattaccagtattaatgtcaggtggtacacttattcttcaacgttactttaacggcgaagaattgaatgacatgattgcacaatatcaccctacatttattatcatgattccgacaatgtattatagtacgctacgtgctagtaattttaatcctgaaaattttaaagctatggattatatcatccaaggtggttcacaaccattaccaagtatccaagcagcttttaaacaatatggcataaacattattaacggctatggtttaactgaagcacctcttgtacttgttaatacaccggaaaattcaaaacgtaagccaatgagtattggtaaagcagtcatgttcgttgatgcacgtatccttgatgataacggtgaggaagtacctactggtgagattggcgaacttgcaattaaggctaaaaatgtcacgccaggatattggaataaaccagcagagactgccaaagcatttcatggtcgatatttattaactggtgacttagcgaagatggacaacgatggcgatatatttattattgaccgcaaaaaagaattaatcataactggtggcgaaaatgtcttaccatccgaagtcgaaaatgctttagctgagcatccactagtagaccggtgtgtggtcgttggctatgatcatccaaaatatggtgaatcaattgctgcagccattatacttcgcgaagatgaacctcattacgctgaaattttaaatcaacatatgcgaagtcgtttagcaggttataaagtcccaagaatgtatgtaccagtgacacatatgccgttaaacagtacgcagaaaccagataaacttgcgattcgacaaatgatgattacaaagtctcacaaacactttaaaggtgataaaaatttttga

SEQ ID NO: 410001 - DNA, 1035 bp, Staphylococcus aureus
atgatgactttagaaacgcttatcaaagaacaattagatcctcatttagtagaagttgatgaagggacgtattatccgagaacatttattcaacaattatttgtagatggttatttcggtgaggcggcattgagaaaaaatgctgaagtaatcgaagctgtatcgcagtcttgtttgacaacaggattttgtttatggtgccaattagctttttcaacgtatttagaaaatgccacgcagccacatttaaataatgacttacaacagcaattgttatctggagaaatattaggtgctaccggattgtctaatccgatgaagtcatttaatgatttagaaaagttgaaccttgaacacacttatgttgatggacaattggttgtcagtggacgtatgccagctgtaagtaatattcaagaagaccattattttggtgcgatttcgaaacatgaatcatcagatgaatttgtcatgttcattctacgtgccaatcaagatggtatcactctcgttgaaaaaacaaactttttaggagtaaatggctcggctacgtatcaaattactttgaatcaagtcgtagtgccacaatcacaaattatcacgcatgatgcaaagcagtttgcggcaactattcgcccacaatttattgcttatcaaattccaataggattaggctcaattaaaagttctttagagttaattgatgcattttcaaatgcgcaaaacggaataaatcaatatttagagtatgatgttgaagcttttaaaaaacgttatcgtcaacttagagaggaatattatgcaatattagatgacggtaacttaacttcacatttaagtgaattaatatcattgaagaaggacattggctatttattgttagatgtaaatcaagcttctgttgtcaatggtggttcaagagcgtacacaccatattcgccacaagttcgcaagttaaaagaaggattcttcttcgcagcattgacaccaacattaagacatttaggtaaacttgaggcagagttgaaggggtaa

SEQ ID NO: 410002 - DNA, 762 bp, Staphylococcus aureus
atgacacgtcccacaaataacaaatttatattacctattatcacatttattattttcttaggcatttgggaaatggtcattattattgggcattaccaacctgtattgttacctggtcctgctcttgtaggaaaaagtatatggactttcattgttactggagaaattttccaacatttagcaattagtttatggagatttgtagcgggctttgttgtcgcattgttggttgctattccattgggcttcttgcttggaaggaatcgttggctatacaacgctatcgaaccgctatttcaattgattaggccgatatctccgatagcatgggcaccatttgttgttctatggtttggtattggtagtttgccagcgattgcgattatttttatcgccgcttttttcccaattgtattcaatactattaaaggcgttagagacattgaacctcaatatttaaaaatagcgacaaatttaaatttaactgggtggtcattgtatcgcaatatattatttcccggggcatttaaacaaatcatggctgggatacatatggcggtaggaacaagttggatatttttagtttctggtgaaatgattggtgcacaatcgggattaggttttttaatcgttgatgcacgaaatatgttgaacttagaagatgttttagcagcaatattctttatcggattatttggttttattattgatcgattcattagttatattgagcagtttatacttagaagatttggtgaataa

SEQ ID NO: 410003 - DNA, 1230 bp, Staphylococcus aureus
atgggagactttaataaagatattgatcaaacggtggaaagattaacgaacttcgacgccaacaattctatagatggtgataagacagataacttaataactgaattaagtggtgtgaattcatatgtcaaaaacatgaagccaaaccgtgcaagaattagttctacaagtggaaaaattgaaggtgcaattgcaaggcataaaacaagtgaagagttagtaagatggcaaacttatatggaaacgttaagtgaaaatctttataaaacaccaggtctaagtaaagcagcttctgacataattacccaagctggacgcgagtactatgctatcaaagctgtagggaatggcagtgctttaagaggatataaagaatatctgaaaacacgagatattaataaattaattaacaaaatgagtaaaaaccaattaaaaagaatgtcattggtattaaatacagatagaggtaatattaaaataaaaaatgcagtaaaaatggcaagtgaatttgcccgtaataatccatttaaaaaaggtaacttggtaaattggatgagcaaagtccaagggtatcaaagtgtaagtgcccaagtattaaaaaaagggttgcaagataagaactttaaatatacatttggagatgcaaagaaattttttgatacagctgaaatgaaaaaagcagcagttacagaatttaaaaatacctttgtacctcaaaacataagggaaacattctttaagaaagaaaatataacatccaagacagcattaaagaaaaatatgagcaaattctggaatgaagatatcaagggaggaatcaaagagtttaaattagactttgctaacaaaaatatcattggtaaacttggtaaaatgttgaaactaggagggaaagctctaaagccactagcatttgttactgcaattacagataacataggaaagaaatctttgcaagaacaattagtgggtatgggtgtagatttaggtgctattggtgctagtgcagctgccggtgcagctattggaacggcaataccattacctgtagtaggtactttagtaggagcattagctggaacagcagcaggtatacttttagatagtaaaatagcaggtatgagtaaatcactaaccgaacatgctaaagacggaataaactcgggtattaataaagttaaaagtggattcggaaaaataacttcaggatttaaatcagtatttggttaa

SEQ ID NO: 410004 - DNA, 846 bp, Staphylococcus aureus
ttgttacgtgttggtaaagaaacgcaagtgtatcgttatttcggacaagaacgtaacaatactacatacaacttagcacgcatgaacatgttattacatgatgtacgatatgaaaatttcgatatccgtaatgatgacacgttggaaaatccagcctttttaggccatacatttgatgcggttattgcgaacccaccgtatagtgcgaaatggacagcagattcaaaatttgaaaatgatgaacgatttagtggttacggcaagcttgcgccaaaatccaaagcagactttgcctttattcaacatatggtacattacctagacgatgaaggtaccatggcagttgtactcccacatggtgtcttattccgtggtgccgcagaaggcgtcattcgtcgttatttaattgaagaaaagaactacttagaagccgtgattggcttaccagcgaatattttctatggtacaagtattccaacatgtattttagtatttaaaaaatgtcgccaacaagacgacaacgtattatttatcgatgcatccaatgattttgaaaaaggaaaaaatcaaaaccatttaagcgatgcccaagtcgaacgtattatagacacatataagcgtaaagaaacgattgataaatatagctacagcgcgacattacaagagattgccgagaacgattataatctaaacataccgagatatgtcgatacattcgaagaagaagcgccaattgatttagatcaagtccaacaagatttgaaaaatatcgacaaagaaatcgcagaaattgaacaagaaatcaatgcatacctgaaagaactaggggtgttgaaagatgagtaa

SEQ ID NO: 410005 - DNA, 450 bp, Staphylococcus aureus
gtgcaacgttatttcatagaccaaaacgctgatgtaagtcagcgtttttttattacaaaaaaagaagatattcatcatataacaaatgtaatgagatatgatgttggtagtaaaattattttaacttttaatgatcaaacagtttatttatgtgaaattgctgatataacaagtgataaaattgcagttgatttaaaagaaaaacaaaatattaatacagaattgccagttgatgttacgatttgcagtggactaattaaagctgacaaatatgagtggttgctacaaaaagctactgaattgggtgcttcatcatttatagctgtgagcatggaacgctcaattgttaaattaaacgaggcgaaagttgccaaaaagatagagcgttggcaaaaaataattaaagaagctgctgaacaaagctatcgtttagtgattccatctatttaa

SEQ ID NO: 410006 - DNA, 927 bp, Staphylococcus aureus
atgacttcatctactaatgttaaagctttaatcgaaaaaaataataataaaaaagggaagcataatgacaaaattataccagttattttagccgcaatttcagcgatttccattttaacaacactaggtatattaatcacattgcttttagaaaccatcacttttttcaccagaattccaataactgaatttctattttctactacttggaatcctaccggttcagaccctaagtttggtatctgggcattgataatagggactttaaaaatcacagttattgcgactatatttgcagttccagtcgggcttggtgcagcaatttatttaagtgaatatgcaagtgaccgtgcacgacgcataattaaaccgatattagaaattttagcaggaataccaacaattgtgtttggtttctttgcattaacctttgttacaccagtattaagatctttcataccaggtcttggagagtttaatgctataagtcccggcttagttgtcggtattatgattgtccctctcatcacaagtttgagtgaggatgcaatggcatctgtaccaaataaaattcgagaaggtgcctatggacttggagcaactaaattagaagtagcaactaaagtcgtacttcctgcagcaacatcaggtattgtagcttcaatcgttctcgcgatttcaagagcaattggagaaacgatgattgtatcattagcggcaggtagttcgccaacagcttcattaagtttaacaagttcgattcaaacaatgactggatatattgttgagatagcgacaggtgatgcaacatttggatcaaatatttattacagtatttatgctgtaggattcacattatttatctttaccttaatcatgaatttactttctcaatggatttctaagcgttttagggaggagtattaa

SEQ ID NO: 410007 - DNA, 1200 bp, Staphylococcus aureus
atgaagaaaatattattagccgttacaggtggcattgcggcatataaagcaattgatttgacaagtaagttaacacaatctgggtatgaagttcgcgttatgttaacgaatcacgcacaaaaatttgtgacaccattagcatttcaagcaataagtcgaaatgctgtttatacagatacttttatagaagaaaatccttcagaaatacagcatattgcattaggtgattgggcagatgcaatcattgttgcacctgcaacggcaaatacaattgcaaaattgagtgtaggtattgctgatgatttggtgacatcaacgttgctagcaacagagacaccgaaatttattgcgcctgctatgaatgtgcatatgtatgaaaataaacgtacgcagcaaaatattaatattttaaaagaagatgggtatcattttatcgaaccaggaagcggatttctagcatgtggttatgttgctaaaggacgtatggaagaaccgcttcaaatcgtttctgttattgatgctcattttcaaaatagtaatcgtttagctaatagttcatttcaagataaacgcgcattggttacagcaggaccaactattgaagttatcgatccagtcagatttgtatccaatcgttcttctggaaaaatgggctatgcaatagctgaagcattgcgaaatcgaggagctatcgtgacgttagttgctggtcctacaacactagaggatccaaaagatattgaagttattcatgttcaaagtgctgaagaaatgtttgaacaagtgacaagccgatttgacgaacaagatattgttgtaaaagcagcagccgtatctgactatacaccagttgatgtattagaacataagatgaaaaagcaggatggtgatttatcagtatcttttaaacgtactaaagacattcttaaatatttaggtgaacataaaacatcacagtatttaataggctttgcagcagagactgaagatattgaaaattatgcacaacaaaaattacgcaagaaaaatgcagatgtgattatttcaaataatgttggggatatgtctatcggatttagttctgatgataatgaattgacaatgcattttaaaaataatgaaaaggtaaatatcaagaaaggaaaaaaagtagtattagctgcacaaattttagatgaactagaaactaggtggcaataa

SEQ ID NO: 410008 - DNA, 168 bp, Staphylococcus aureus
atgaaaaagacactgggatgtttacttttaattatgcttttagtcgtagcaggttgttcttttggtggtaatcataaattatcatcaaagaaatcagaagaatcaaaacaagaaactgtaaaaaaaagaatcggaagaagagaaagacccagatttagagaaatttga

SEQ ID NO: 410009 - DNA, 771 bp, Staphylococcus aureus
atgaaaggaattaaagatgcgccatctctagataagttggatccattaatgacagaaaagtcgtttacgaatagtaaagggattcaaggatggaaagattacaaagaattaatgggtaaagtggaacttgcagattatagatttacaaaagattcaaaaggatcttcaataaaagatgttgatgcattctttaaaggtaagaaaggtataaaaaggaaagtgattgaaacacacgatgatgtaaaacaagttgattattggtatgtagatccagatggaaagaaaattggcaattcaaacacacctgttttttacgcagaaattatgacaaaatataaagatggaaagttagtttatgcatcagtcgaaccaggttcttacgtaatacataaagatgatgcaattaaatatgacgattattctaagttaaaaaaattaagtcaactaactaaacttgatcatccaaaaccagttccatatagcgtagctcaaatcaaatctttcggagtacctttaacaagcgtttcatttatgacacatggatcaaagggtactaaagatgaagtgttgccggcattggcctatttcactttttcaccaaaaaattatgaagacaagtctaatccagatccaaaagttttaaatttagtacatatggatttcttaaatgcatctagtgattttggtaacgcacattttgttgttttaagtaaatatattaaagagtatgaatcaaactatgaaacagcgtcagatgattctttaaaatag

SEQ ID NO: 410010 - DNA, 384 bp, Staphylococcus aureus
  misc_feature (15)..(24): n is a, c, g, or t
atgcagttggtgcgnnnnnnnnnntccccttttaatttattaattaggggctcttatgcagttggtgcgttagcaatcaactgtaatcctttatccccttttaatttattaattaggggctcttatgcagttggtgcgttagcaatcaactgtaatcctttatccccttttaatttattaattaggggctcttttgctgttggtgcgttagcaatcaactgtaatccttcgtccccttttaatttattaattaggggctcttatgcagttggtgcattagcaaccaactgtattcctttgtccccttttaatttattaattaggggctcttttgctgttggtgcattagcaaacaactgcgttcaacttaaccgaatagtttaa

SEQ ID NO: 410011 - DNA, 1257 bp, Staphylococcus aureus
atgaagaacaataaaatttctggttttcaatgggcaatgacgattttcgtcttctttgtcattacaatggcgttatccattatgctcagagatttccagtctataattggtgtcaaacactttatatttgaagttacagatctagcaccattaattgctgcaatcatttgtatactcgttttcaaatataaaaaggtccaacttgcaggtttaaaattctcaatcagcctgaaagtaattgaacgtctattgctagctttaattttacctttagttattctaattattggtatgtacagctttaatacatttgcagatagctttattttattacaatcaacaggcttatcagtacctattacacacattctgattggacatattctaatggcgttcgtagtagaattcggattccgttcatacttacaaaatattgttgaaacgaaaatgaacacgttctttgcaagtattgttgttggtttgatgtattcagttttctcagcaaatacaacttatggtacagaatttgctgcttataacttcctttatacattctcattctctatgatccttggtgaattaattagagcgactaaaggacgtacaatttatattgcaacgacatttcatgcttcaatgacattcggacttattttcttgtttagcgaagaaatcggcgatctattttcaatcaaagtcatcgccatttcaacagcaatcgttgcagtaggatacattggtttaagcttaattatccgaggtattgcatatttaacaacaagacgaaaccttgaagaacttgagcctaataattatttagaccatgtcaatgacgataaagaaactaatcatactgaggctgaaaaatcttcttcaaatattaaaaatgctgaaaaaacaggtgtagctactgcatcaacggtcggtattgctaaaaatgatactgaaaatacagtggctgacgaaccaagcattcatgaaggtactgaaaaaacagaagctcaacatcacatagataatcaaactgaatctaatcatgatgaagatcatgacatcacttcggagtcagtagaatcagcagaaccagttaaacatgcaccacaaagtgacgatttaacaaacgattcaaatgaagatgaaaaacaatcattaaaagaacctgcgacttataaagaagacagacgttcatcagttgtaatcgatgcagaaaaacatatcgaaaaaactgaagaacaatcttcagataaaaacaaataa

SEQ ID NO: 410012 - DNA, 1329 bp, Staphylococcus aureus
atgagtaaaccagaatatcaactaaacccaggtaaaataaatgcaaatacagaagaaacatctgctatatcctattttagttatcaaattgaaaatgcaaatattagtggtttggataaagtaaaaatgtatcagcaaattgatatactaaaagatagatacaaattcccttctaatcttgaatatgttgatagttacactgattctcttactggagtaacaacttctgcttttttaaataaagatacaggcaaagtaactctcgggatgactgggactaatttacaagacgaagcctttaaaaagttaaaagaaggtgaattttcaagacaaaattttaccaatgctttggaaacagttaaagatggatatgcagatcttaaaatattatattctcctgcatctgatcaaaactatagatatgcgaatacacaagaatttataaataaaataaaaagtaagtatgacattgattttattactggtcattcactaggtggaagagatgcagtagttctaggaatgagtaatggtattccgaacattgtggtttataatccagctcctatttctataactagtttgaatcctaattccccagatggaaaacgattgttagagttatataaaaattataaaggtaatattactaggtttgttgcagaaaatgatgcattgacagaaaatctgaagaaatataagtattatgtttttttcggtaatgataaagtctttaaaaatggtaaaggtcatggaatggaaggctttctgaccaaagaagaacaaaaagctataaaaaaagaactaaaaaaactacaaggttatgcagaagaaaataataagtcatttgtaaagcattcaaataatgctatctctaaattagctagtatagaattacttagagcaaatatgatgactacaaatggaggaggattatcttcttcgcagcaaaaagttttagaaagtttaacagctttaacaattgcgcagtcattcagtcaactgatagacgatgaaattaatcaaatcaaaaaaatgtataatgaaaagaaaaagaaatttggaaaaaattgggaagacgctcaaaaagctggaaaagctgtaggtgaagatttgagtgtaaatggagttctcaatgctttagatgaaggtcaagtgaatgaaagtagtatggtaagagaacctgaacaaatgatatctgcaaaagaaagacaactttcaacgatagggtcttctgtatcaaattatattatgagagttagactcagtattaatgaaatcgttgataaagatcaagtgcttgcatcacaaataggtggattactatga

SEQ ID NO: 410013 - DNA, 987 bp, Staphylococcus aureus
atgaaagaaaatttttggagtgaattaccacgtccattttttattttggcgccaatggaagacgttacagatatcgtctttcgacacgttgtaagtgaagcagctagaccggatgtgtttttcactgaatttacaaataccgagagcttttgccaccctgaaggcatacatagtgtgcgtggacgcttaacttttagcgaagatgaacagccgatggtcgctcatatatggggagataagccagaacagttccgtgaaacgagtattcaattagctaaaatgggctttaaaggaatagacttaaatatgggatgtcctgtagcaaatgttgctaaaaagggtaagggttccggcttaatcttaagacctgacgtcgctgccgaaattattcaagcaactaaagcaggtggacttccggtaagtgttaaaacacgccttggctactatgaaatcgatgaatggaaagattggttgaagcacgtcttcgaacaagatattgccaatttatctattcatcttcgtacacgtaaagaaatgagtaaagtagatgcacattgggaattaatcgaagctattagaaatttacgtgacgaaattgcaccaaatacattgttaacaattaacggtgatattcccgatagaaaaacaggacttgaacttgcagaaaaatatggcattgatggcgtcatgattggtagaggcattttccataatccattcgcttttgaaaaagaaccacgcgaacacacaagcaaagaactattagatctgttgagattacatttatcattgtttaacaaatatgagaaagatgaaatacgacaattcaagagcttgcgtagattctttaaaatctatgtgcgtggcataagaggcgctagcgaacttcgccatcaattgatgaacacacaatcaattgcagaagcacgagcacttctagatgaatttgaagcccaaatggacgaagacgttaaaattgaattatag

SEQ ID NO: 410014 - DNA, 468 bp, Staphylococcus aureus
atgattgaatattatttgaagaaaattatacatttatttgaaaataataaatgcgaaattttacatttaaaaatgaattttaatgataactttgatatgttaagttatatttattgtattgagaacatgcatagaggttcaaatattataaagatagcggagtatatattagtaaagtattttcaaaaatattgtataaaaaaagacttttctataggtccatttcaagttaaaaaaagtttttgtgtgtctaataatttatatttagagtcactagataaattattggagttgcacagtagtgctcatgtaattaatgaatttattgaaaataaaaaatattatttgaataataatgagattttatccttatatcattcagggaaggttatggatactagcttttcaactttaatgtatataggattatttaaacatttttctagttatttaagaaaacacgaataa

SEQ ID NO: 410015 - DNA, 1272 bp, Staphylococcus aureus; identical to SEQ ID NO: 409802

SEQ ID NO: 410016 - DNA, 789 bp, Staphylococcus aureus
atgaactggaaactgacaaagacacttttcattttcgtgtttattcttgtcaacatcgtgttagtatcgatttatgttaataaagtcaatcgctcacacattaatgaagtcgagagtaacaatgaagttaattttcagcaagaagaaattagggtgccagccagtattttaaataaatctgttaaaggcatacaattagaacaaattacgggacgatcaaaagactttagttcaaaagctaaaggtgattctgatttatccacatcagatagtggaaaattattaaatgcgaacatcagccaatcggtaaaagttagtgataataacttaaaagatttaaaagattacgttaacaagcgcgtatttaaaggtgctgaatatcaattaagcgagattagttcagattctgtaaaatatgaacaaacgtatgatgattttccgattttaaataacagcaaagcgatgttgaactttaaaatagaagataacaaagcgactagttataaacaatcaatgatggatgacattaagcccacagatggtgcagataagaagcatcaagtgattagtgtgagaaaagcaatcgaggcattatattataatcgttacttgaaaaaaggtgatgaagtcattaatgctagacttggttactattcagtcgtgaatgaaacgaatgttcaattgttacaaccaaactgggaaattaaagtgaagcatgacggtaaggacaaaacgaatacttactatgtcgaagcgacaaataataaccctaaaattattaatcattaa

SEQ ID NO: 410017 - DNA, 192 bp, Staphylococcus aureus
atgatttgcattttgctactagtttataaaatgattaggaactatgatccaaacactatagatttactcgttatgtttatagcaatctatccaatcacattattaatgtttagttcaaattatttagttgtaagtgaattttggtttgtgttgttctattttattacaaaaggacggcgtcatcatggttaa

SEQ ID NO: 410018 - DNA, 789 bp, Staphylococcus aureus
atgaataaagtcacaattaatcctcaaatccaattaacttatcaaattgaaggtaaaggggatcctataatattacttcatggattggatggtaatttagctggatttgaagatttgcaacatcaactagcatcatcatataatgtacttacttacgatttaagaggtcatggcaagtcttctaaaagtgaatcatacgatttaaacgatcacgttgaggatttaaaaattctaatggagaagttaaatattcatgaggcacatattctaggacatgatttaggtggggtagttgctaagttatttacagataaatatgcttatcgtgtaaaatcattaactaccattgcatcgaagaaagatgacttaatacacagctttactcaattgttaatacaatatcaagatgatatagcgggttttaataagtctgaagcgtatattcttttattttctaaattgtttagaaatcaagagaagacgatgaaatggtatcaaaaacaaagaatatatagcactaagtctgaggatgatagtgcggtggcaattcgttcattaattttgcataaagatgaacctatgtatttaaaaaaacgtacatgtgtacctactttgttaattaatggggaacatgatcctttgattaaagataaaaatcattttaaattggaagcgcattttttaaatgttacgaaaaaaatcttcgaacattcaggacatgcaccgcatattgaagaaccagaagcatttatgaattattatttaaattttttaaaaagcgtatcataa

SEQ ID NO: 410019 - DNA, 1011 bp, Staphylococcus aureus
atgacttcattaaaagagagagattatttttttgacaacgcaagagcaattttaatattattagtcgtatttggacatatgttacaaccctacactagtggcgataaatatttatcagcattatacctagttatttatagtttccatatgccaacatttttgtttatatctggttatttcgcgaaaaatattgataaaccatactatttagaaaaaatttcaaaacgtttgatagtaccttatatgatattttttgcattcttttcaatatattatttcttaacaggtaaaagtgacgaattacaacttgatccttttaacccagtatttgcgttatggtttttgatcacgctatttttctttcatgtcattttagtaatagttagaagatttaatccatataaagtgctatcagtttcaattattatatctattggagcaggtttttcaggaaacatcgatagctacttaagcatttcaaggacaatcgtatttttcccaatattttacctaggttacattttcaccaaaaaacatacggctatttttaaaaataaaaaactaataccagtatctatcattacgtttattttgttttttatcatttacgtgattcatcctatcaatgcagattggttattaggaagttcaccatatacttcacttgaaaatgaaggacagagtgtattcagtccttttaaacgacttatattatatggaattatattaatcgcaatgactgcgtttctaaatttaatatcaacaaagaaaaaattatatacttatattggtagtcgtacgctatacgtatatttattacatggtttaattattggcattgttagaggatttgaatggtacccattcgataatcctatatcattaatgacgtatctttatttaataagtatatctgtaatcatcgtatatgtattatctacaaactttgtttgtaaatggacaaatccaataattaatttacaaagaccatcacagtttaaagactcataa

SEQ ID NO: 410020 - DNA, 1092 bp, Staphylococcus aureus
atgagtaataaattagaatcatacagaagtgagattgtctcactgaatcatcaaattttagacttattatctaaacgtggtgaactagcacaaaaaattggggaagaaaaattaaaacaaggtacacgtatctatgatccacaacgtgaaaaagaaatgcttaacgacttaatcgatagtaacaaaggaccattcaacgataatactattaagcaattatttaaagaaattttcaaagcctctacagatttacaaaaatctgaaaatgaaaaacatttatatgtatcacgtaagttgaaacctgaagatacgattgtaacatttgataatgggggcattattggagacggcaataaatcatttgtatttgggccatgttcagttgaatcatttgaacaagttgaagctgttgctaaaaacttacatgctaaaggtgaaaaatttattcgtggcggtgcatttaaaccacgtacatcaccatatgatttccaaggtttaggtgttgaaggtcttaaaatacttaaacaaattaaagataaatatgatttaaatgttgtcagtgaaatcgtaaatccaaatgattttgaagtggctgatgagtatttagacgtattccaaattggtgcacgtaatatgcaaaacttcgagttattaaaagaagctggccgtacgaaaaagcctattctattaaaacgtggtttatctgctacaatcgaagagtttgtttatgcagctgaatacattgcttcacaaggtaatcaaaacattattttatgtgaacgtggaatccgaacttatgaaaaggctacacgtaacactttagatatttcagcagtaccaattttaaaacaaggtacgcacttaccagtcatggtagatgttacgcatagtacaggtcgtaaagatatcatgttaccaactgcgaaagcagcattagcagtaggtgctgatggcgttatggctgaggtgcatccagatccatctgttgcacttagtgatgcgggtcaacaaatggatttagatgaattccaagcattttatgatgaattaaagcctttgtctgatttatataacgctaaaaagttaaaataa

SEQ ID NO: 410021 - DNA, 123 bp, Staphylococcus aureus
atgtttgatgatctcaaaattgcaaatgcgagtttggagttgttagggtcccttatgcatgcccttagcgcaaacactctacttaaagaaacggtagttgttatagtatacttaaatgcataa

SEQ ID NO: 410022 - DNA, 1047 bp, Staphylococcus aureus
atggtaaataaaaaagatattgctaaaaaagtaataggtaaaacgccaataggcgttaaattgaaattagcgaaagtcatcatcattttatgtgtggtggctttttttatatttccagtaattataatgtttttgttagcgcctgatttaaataaaggtaaagatgatgctggttgtactgttagtggcggtaatgtttcggcaaatggtattgataagtttaacgaaaatgctaaaggtggaaaattagagggtaaaggaaaagaaatacagaaaattgcagaaaaaaataaagtacctgtgaatatttttatggctattattgcgagtgaatcacaatggggtaaaggagaaaatgcgacaagacaaaataatcctttgtctgttatgggttcaaaatcgattcatgattcaacatatccaactattgaagacggtcttaatgcgggagctaaaaatttgtatgatgtttatatttctaaaggtttagatactcctaaaaaaataggtcccaaatatgcgcctgttggtgcgtcaaatgaccctaataatatgaatgcccgttggataccaacagttgaaaaaattatgaaagatttaggcggttcagaagctaaaacgtcatgtagtaatggtaaaggaaagtctataaagtttaatggtaaattgccacattggtcaaatgatgaccctggaaaaggtaatttatacactgccggtcaatgtacttggtatgcatacggtatgcgtcaaaaaatgggtaaacctgtatcaacttattggcatgatgcacataaatggaatgatagggctaaggctgagggttataaagttgataaaaatccggaacctggtgcattatttattgctgaacaaggtgcaggcggtcatgatgggcattatggtcatgtggctgttgttattggtgtaagtgatggtggtaaaacatttagaataacagaaatgaattgggaagctgcttttaaagttaatgaacgtacattgaaaatgactgatggatatagttttattcatgataaggagtga

SEQ ID NO: 410023 - DNA, 477 bp, Staphylococcus aureus
atgaacaaatttaaattaagttggttaaatattggtacagctttatttatattaacgtatattaatatagctatatttatcacttatatatttcaacctaaaatactagttggcatcaaagatatgttaaatgcaattacaaataaccatatctctaaaatttttagtaatattaattctgatatgatttataatttatatctgttctatttttatctaattggtgtttgtgcttgtttactttatttatctatactgctttgtgtcttcaagataataattccatctcgaataggtgaaatacttggatggttaatcagtttactaacacaacaatttaatatttttttaatcgcaaaaatgactaatgataaaatagccaccgacacttgcattatttgtatttcaggattcttattctttacttatctttatttaaacagtcacgatttttcaaataaacatcgtgacgcataa

SEQ ID NO: 410024 - DNA, 1335 bp, Staphylococcus aureus
atgaacaaagtccacaaacctttatatttttatttaatgcttttcttctctacaactatcataggtgcacttttattgtatttacctttcactggtaaaaagccaatatcttttttagatgccctatttatagcttcaagtgcatttacagttactggcctatccccagttgatataggatcacagtttaatatacttggtgaaatagtaatactattattaattcaaataggtggtctgggtatcgtgaccgtaaccctattgacactagtatttttaaatagaaagatatcaatgaaaaatagattcttgattatggttacatggaatattgacgaacttggtggtgttattaaactaattaaacacttggctatttatagtttagtcactgaattaattggtatgatttgtttgtgtttatcttttataccaaaatttggtataggcaaaggtttatttttaagcttattcacatcagtatcagcttttaataatgctggatttgccctttttaagaataacttaatagattattctagtgatccaattgtcattattacaatctcaatactcataatatttggaggtattggacattttgtcgtgatagactttattaattgtaaaaaattgagtaaattatctttacattctaaattagtcttaactacaactagtatcctaataattataggagctattacattctttttattagaacagtttaatactatgcaacatatgggactagttgaaaaaatcggaaattcttttttccaatcagtaacaacacgaacagcgggttttaacagtatagatatagcaagcattaacaaatctaccgccttaatgttaatgctacttatgtttattggtggtgcccctctcagtgcagctggaggaattaaaataactacttttgcagtagcgtttatttttgtactaaattatatacgtaaagaaaataatgtttcagtattcaataaagaaatatctgacaaacatataaaactatctattgttaccattaatatctcatttctatttatcagtatcattacttttatattatcgataattaatccgaacatatcattaatcaagttattattcgaagtggtttctgcattcggaacagtagggttaagtatgaaccttaccacagaatatcatggtattactaaaataattattatattcgttatgctttgcggtaaagtaggactattaactttattaagaacatttataccaccaaaaaatcctaaaaattaccgctacactaaaggacattctttttttacattacttaataatttatctataagataa

SEQ ID NO: 410025 - DNA, 213 bp, Staphylococcus aureus
atgagaatccttgcgtttgttatacattctgaatttaggaaaaaaggttatggaaagagattattagctgattctgaagaattttctaaacggttgaattgtaaagcaataacactaaatagtggtaatagaaatgaaagactatctgcacataaactatatagtgataatgggtatgttagcaatacatctgggtttactaaacaactataa

SEQ ID NO: 410026 - DNA, 153 bp, Staphylococcus aureus
gtgagatattttctaattgaaaattatcttactgctgtttttttagggatttatgtcccagccttatttcataaagaaaatgtcttaacaatggattttggtaaaaacaatgtcaatagagaacatgcgtacttatcaacaaagagtgtataa

SEQ ID NO: 410027 - DNA, 1227 bp, Staphylococcus aureus
atgaagaattttagaagtattttacggtatattggtaaaacctcaaagtttattgattacccgttattagttacatatattgtattgagtttaattggattagtgatggtatatagtgccagtatggttccagcaactaaaggcacattgactggtggtatcgatgttccaggaacgtatttttacaaccgacaattagcatatgtcataatgagttttatgattgtattttttattgcatttttaatgaatgttaaattactgagtaatattaaagtgcaaaaaggtatgattataactatcgtctcgctattattactgacgttagtaatcggtaaagatattaatggttctaaaagttggataaacttaggatttatgaacttacaggcatctgagttattaaaaattgcaatcatattatatatcccatttatgatcagtaaaaaaatgcctagattattaagtaaaccaaaattaattttaagtcctattgtattagcattaggttgtacgtttttagttttcctacaaaaagacgtagggcaaacattactaatattaattattttagttgcgatcattttttattcaggaattggggtaaacaaagtcctaagatttggtataccagcagtgctaggattcttagtagtatttgtcattgcattaatggctggttggttaccaagttatttaacagccagatttagtacgctaacagatccattccaattcgaatcaggaactggataccatatttccaattcattgcttgcgataggtaacggtggcgtatttggaaaaggattaggaaatagtgcaatgaaattgggctatttaccagaaccacatacagattttatttttgcaattatttgcgaagaattaggtttaatcggaggattgctagttattactttagagttctttattgtatatcgtgcctttcagtttgcaaataaaacatcatcatatttttataaacttgtgtgtgttgggattgccacatactttggaagccaaacgtttgtaaacattggcggtatttcggcaacaattccattaactggtgtgccattgccatttatcagttttggtggatcatcaatgattagtttaagtattgctatgggattacttctgattgtaggtaaacaaatcaaagtagaccagcaacgaaagaaacaacaacaaaaagttgatataagaagacaatttaattaa

SEQ ID NO: 410028 - DNA, 1143 bp, Staphylococcus aureus; identical to SEQ ID NO: 409830

SEQ ID NO: 410029 - DNA, 885 bp, Staphylococcus aureus
atgaaaattattcagttagaatatttcttggctatcgtgaaatataatagttttactaaagctgcacaatttttacatattagccagccatctttaactgctacgattaaaaaaatggaagcagatttaggttatgacttatttacacgttcaacaaaagacatcaagattaccgaaaaaggaatacagttttatcgttatgcgagcgaattagttcaacaatatcgatccacgatggaaaaaatgtatgatttaagcgttacatcagaaccaaggataaaaattgggactcttgaatctacgaatcaatggattgcgaatttaattcgaaagcaccattccgactaccctgaacagcaatatcgtttatatgaaatacatgacaaacatcaatctatagagcaattactgaattttaatattcatttagctataacaaatgaaaaaataacccacgaagatataagatccattcctttatatgaggaatcttacattttattagcacctaaagaaacatttaaaaatcaaaattgggtagatgttgaaaatttgccactcatattgccaaacaaaaattctcaagtgcgcaaacacttagatgactattttaatagaagaaatattcgtccaaatgtcgttgtagaaacagatcgattcgaatcagcagttggatttgttcatctcggcttaggttacgctatcattccgagattttattaccaatcatttcacacgtccaatttagaatataaaaaaattcgaccaaacttaggccgaaaaatttatatcaattatcataaaaagcgtaaacactccgaacaagtacatacattcgtacaacaatgccaagattatttatatggacttttagaggctctttaa

SEQ ID NO: 410030 - DNA, 297 bp, Staphylococcus aureus
atgtataaagattataacatgacccaacttacactaccaatagaaacttttgttagaattcctcaaaatgatatttcgcgatatgttaatgaaattgttgaaacgatacctgatagcgaattcgatgaattcagacatcatcgtggcgcaacatcctatcatccaaaaatgatgttaaaaatcatcttatatgcatatactcaatctgtattttctggtcgtagaatagagaaattacttcatgacagtattcgaatgatgtggttagctcaagatcaaacatattattcaaaataa

SEQ ID NO: 410031 - DNA, 510 bp, Staphylococcus aureus
gtgattcgaaaagcagaatctattcattctccaataactttttggtatggaaaatatattattttgattcccagtttatattttaaaagtataaatgacaaaaaactaaaatatataatattgcacgagtatgctcatgctaaaaacagagatactttgcatttaattatctttcatattttttctattgctatgagttataatccactaatacaaattgtaaaaagaaagatgattcatgacaatgaagtagaagccgatagatttgtccttaataatattaacaaatatgaatttaagtcttatgcggaagctattatggattccgtattaaaaacctcatttttcaacaaaaatatattaagccattcatttaatggtaaaaaatcattactcaaaagaagattaattaatataaaagtcaaaattaattctaatttttatttgtatttttactttttttatcatgataattcaaagccagtttttaatggggcaatccttaactga

SEQ ID NO: 410032 - DNA, 1071 bp, Staphylococcus aureus
atggctgaaaataaaaacaatttgtcgattaacgaagatcattctaatgcagctatgacgcatacctctgacgctatcgcatcatctgattttattattagagaattagattttaatcaggaacctgaaatgcaacgagaaagcaaaaacttttggcaagatgcttgggctcaattaaaacgaaataagttagctgttgtcggtatgataggtttaattatcattgtaatatttgcttttatcggtccagttataaataaacatgattatgctgaacaaaatgtacaacatagaaatcttccggcaaaaatacctgtattagacaaagttccatttttaccttttgatggtaaagatgcagatggcaaggatgcttataaagcagcaaatgctaaagaaaattattggtttggtactgatcagttgggtcgagatttatggacaagaacatggaaaggtgctcaaatttcattgtttatcggtgttgttgcagcgatgttagatatttttattggcgttgtatatggtgcgatttctggattcttcggtggacgtgtcgatacgattatgcaacgtatacttgaagtcatagcatctattccgaatttaattgtcgtaattttatttgtattaatttttgaaccatccatttggacaattatattggctatgtctatcacaggctggttaggcatgagcagagttgtacgtggagaatttttaaaattaaaaaatcaagagtttgtcatggcttcgaaaacattgggggcttcaaaattcaaattgatatttaagcatattttacctaatacattaggtgctatcgtggttacatcaatgtttacagtacctagtgctattttcttcgaagcatttttaagtttcattggtataggtgtacccgcacctcaaacatcgttagggtcattagtaaatgatgggcgcgcaatgttattaatttatccacatgaattatttataccagcaatgattttaagtttattaattctattcttttacttatttagtgatggattacgtgatgcatttgatccgaaaatgcgtaaataa

SEQ ID NO: 410033 - DNA, 291 bp, Staphylococcus aureus; identical to SEQ ID NO: 409824

SEQ ID NO: 410034 - DNA, 243 bp, Staphylococcus aureus; identical to SEQ ID NO: 409872

SEQ ID NO: 410035 - DNA, 195 bp, Staphylococcus aureus
atgatgcaaacctataaagtaagtctttgtatcaagttcttagcgtctaaatgtaattataaattaaaaaagcattattttgtgcaaagtacgaatgaggaagaagccacgaatacggtattaaaactgactcgtaaaaagctcccgttccaaactgcaagcatagaggtcgaaaaagtggaggtagtagtatga

SEQ ID NO: 410036 - DNA, 405 bp, Staphylococcus aureus
atggagatagaaattaaatttaatgaagtgtttaatgcgccgatggggtcgccccgtccacgctttcgtaaaacaggtagatttgttcaaacttacatgccaacgtcttacacaaagcataaagcgtatatacaagggcaaatgcctaagttaaatctagagcgcgcactaaaaatcgaattagacttttactttccattgcttaaatcgtggtcgaagaaaaagaaaagcgaaatggttgggcagtataaagtgactaagccggatatcgacaacttaattaaaacggtattagatgcttgtaacaattatttgtggaaagatgacaatcaaattgcagaaataactagctcaaagcgttatggaattgagcccaaaataatcatacgaatagaagaaatataa

SEQ ID NO: 410037 - DNA, 372 bp, Staphylococcus aureus
atggcgaaaacagcaagaattgtaaggatacacgataaaccttataggttcagtaaatttgaaatggaattaatagaaagtcacggtataaccgctggaatggtttctaaaagagtaaaagatggttgggaactacatgaagcaatggacgcaccagaaggcatgcgtttaagcgagtacagagaaaagaaaacaatagaaagactggaacaagctagactcgaacgtaaattggaaagacagcgaaagaaagaggcagagctaagaagaaagaagccacatttatttaatgtgcctcaaaaacattcacgtgatccgtactggtttgatactacttataaccaaatgtttaagaaatggcaggaagcataa

SEQ ID NO: 410038 - DNA, 1167 bp, Staphylococcus aureus
atgaaaagaaactttccaaaattaatagctttaagtttaataatttctttaagtattacccctattgcaaacgccgagagcaattcaaatatcaaagcaaaagataagaagcatgtgcaagttaatgtcgaggacaagagtgttcctactgacgtacgtaatttagcgcaaaaagactatctttcttatgttacttcacttgataaaatctataataaagagaaagcctcgtatacacttggtgaaccttttaaaatttacaaattcaacaaaaagagtgatggtaattattattttcctgttttgaacactgaaggtaatatcgattatatagttacaatttcaccaaaagtcactaaggattctagttcatcttctaaatacacaatcaatgtttcttcatttttatctaaagccttaaatcaatataaagatcaacaaattactattttgacaaactcaaaaggttactatgtggttactcaaaatcataaagcaaaattagtactaaaaacaccacgtctagaagataaaaaggtaaaaaagaccgagagtatacctactggcaataatgtaacgcaactaaagcaaaaagcttctgtcactatgccaactagtcaatttaaaagtaataattatacttacaacgagcaatatgtaaataaacttgagaatttcaagataagagaaactcaaggtaacaatggttggtgtgcaggctatacgatgtctgcattactaaatgcaacttataatactaacaaatatcatgcagaagctgtgatgagatttttacacccaaacttacaaggacaacaattccaatttactggtttaacgccaagagagatgatttattttggacaaactcagggaagaaatccacaacttcttaatagaatgactacatataatgaagttgacaatcttactaaaaataataaaggaattgctattttaggtagtagagtagaatcaagaaatggtatgcacgcagggcatgccatggcagttgttgggaatgctaaattagacaatggacaagaggttataattatatggaatccatgggataatggttttatgactcaagatgctaaaaacaatgttattccagtatccaatggcgaccattatcgatggtattcatctatttatggttattaa

SEQ ID NO: 410039 - DNA, 366 bp, Staphylococcus aureus
atgggaaaatttaatagacaagaacaattaaaacaattacatgcagaacgaaaagttaaaaccgagcaaaaagtttctaaagcaataaatgaattggttcgaaaaaatgaagaaattaactttaatattgttgctaagcattcaaatgtatctaaagctactttatataataatagtaaaattcgaaagagaatcgaagagttacgtgaacaaagtaaagacatatttgtacataaaaataacagtgacggtaaagacgcattaatttcttcattaaaaaggagagtaaaatctttagaaaatgagaaaaagaggctcaaagatgaaataaacacattatataataaaatatatgaagatatttaa

SEQ ID NO: 410040 - DNA, 1635 bp, Staphylococcus aureus
ttgactaaaaataatatacctataaaaagaaaatcatcaacaatagtttttggtgattatgaacataaaagtggactagcttcttttttaaagaatatgtatattaatctaaataaatttattgataagcgagaagaatgggaaaaagataaatgggatattagaaatttagaaaaatatggattgagttataataaaacactaactggaaattatttgaactttgaaaaaattgagtcaattaaaatgcgagaattagcaaaaaaatatttaaaaaatcgtttgataactggtgatatagcatttgctacagcaagattttatataagagttttgactaggttttttcaaaatatatctaaaaataaagaaacaaggaatagtttaaatgaactagatagatgtcatatcgaagcatatatagaatttttatttgaatatgctaatagtaaaaatgtgcaaagttctaggaacttcgttagagaagaattaaaagcaattagaaggttcttaaatgatattgctagtcaaaattatgatatagccccctctgaagatatacgttttttaatttatcctcaagactttcctaagcgcgaaaagaaaaatagtagccaaattgattatatcccagattttgtattggaacagctttttgagcatataaatgatttgcacaaagatttaatacctgtagtttggatagcttttaaaacaggactaagaatttctgatgtattaacattaaaaaataattgtcttgcaaaagttaatggaaagttttcaataattactgatattgctaaaacttttgttaaaggacataggataccaatcgataatgaattagctgatatagtagcagttttaatagccaattctaaaattaaaagtacaaaagataacaaccctaataattatatttttgctattcataaaggaaaaagaaaaggaatgccctttacacagcatatggtcagagcacacttaaatcatttagcaaaaacaaaaaatattcttgatgaacaaggtgaagtcttccatttcaaaactcatcagtttagacatacttatgcagtgaaattgttaaatggtggagcagatatattaaccatacaagaattattagcacattcctcaccagaaatgacactcagatatgctaagttacttgatgatacaaaaagaaaggcttttgaatcagttattgatcaaggggcttttagttttgatgttgacggtaaaattaaaaatatacagcatagtagtgaattatcagaaaaagcattgaattctttatggcaagaacataaattaaacgcaatggacaatccttatggtacttgtcatgctagattgagcggtgattgtccatatatggaagctccgccatgcttaacttgtaattctgggaaaccatgtaaggatctagctattggattttctgatttagatgttgaaaaatatgaattacatatcaaatcaacggtcaaatccatagaattagctaaaaataataatagacaagatatagttgaaaaacatactaatatattaaataaatatgaagaaatattaggtaatataaaagatggaaacattatattcgggagaagtaatagaataaaagtatag

SEQ ID NO: 410041 - DNA, 939 bp, Staphylococcus aureus
atgaagcaatttgtaaacttaggtaaatctgatgttgaagtgtttccaatcgcacttgggacgaacgcagtaggtgggcataatttatatccgaacttagatgaagaacaaggaaaagatgttgttcgtcaagccattaatcatggtattaatttattagatacggcatatatttatgggccagaacgatcagaagaattggttggagaagttgttaaagaatatccgcgagagcaaattaaaattgctacaaaagggtctcatgaatttgatgaaaatcaagaagtacatcagaacaatcaacctgaatatttaaaacaacaagttgagaatagtttgaaacgtctacaaactgattatatcgatttatattatattcattttccggatgacaacactccgaaagatcaagcagttgcagcattacaagagcttaaggaacaagggaagattaaagccattggtgtatcaaatttcacattagatcaacttaaagaagcaaataaagatggttacgttgatgttgtacagttagaatataatttattgcatcgcgaaaatgaggcagtattacaatattgtgttgatcaccaaatcacatttattccatatttcccattagcatccggtattttagctggaaaatatgatgagaacactaaatttagtgaccatcgtactacacgtcgtgattttaaaccaggtgtatttgaagaaaatgtgcgtcgcgtaaaagctttggaaagcatagctgcagcacatcaaacttcaattgcgaacattgtattagcattttatttaacgagaccagctatcgatgtgattattcctggtgcaaaacttgcagaacaagtcgttgaaaatattaaagctgcagatatcgttttatcagatgatgagattcaatatatcgatgaactgtttccgattgaagactaa

SEQ ID NO: 410042 - DNA, 720 bp, Staphylococcus aureus
atgaaaaacagttatcaagcccaaaaagtaattgaggaagtcgttaaagaaaaaccaaaagcacgatggttgtttttaacactttcaacaaaaaatgcgattgacggcgaaactttagagcagagtttaaaacatttaactaaagcttttgatagattgagtagatataaaaaagtaaaacaaaatttgattggttttatgcgttcaactgaagttacagttaacaaaaatgacggaagttataatcaacatatgcacgttttattgtgtgttgaaaatgcttattttagaaaaaaagagaattatataacgcaagaagagtggatcaatttatggcaaaaagcacttcaagttgattacaaaccagtcgcaaatatcaaagcaattaaaccgaataaaaaaggcgataaagatatacaagctgcaattaaagagacatcaaaatactcggttaagtcgtccgattacttaacaggaaaccatgaaaaagacgcagaaattgttcaagatttagaacaaggtttatacagaaaacgcatgttaagttacggtggtttacttaaacaaaaacataaacttttaaatttagacgatgccgaagaaggtaatttaattcaaacgagcgatgaagaaaaaacgactgaagaagaacaaaaagcccattcaattacggctatttggaatttcgaaaaacaaaattatttcttaaaaaatttgtaa

SEQ ID NO: 410043 - DNA, 516 bp, Staphylococcus aureus
atgaaaatcaacacagaatttaaaggaaataatataccatatgaatatgcggcaggcgcagatataagtgatttaataaatggcaatccaattaaatcattcccgtttgaaataacagaacttccaaaagatactaaatatcttgcatggtctctgatagattatgatgcaataccagtttgcggatttgcatggattcattggagcgttgctaatgtaagtgtcactcgtgattcaatttcaattaaacctgatttatcaagaacaaagggcgactatgtacaaggtaaaaatagcttcactagtggtttgttagctgatgatttttcagaaatagaaaatcactatgtaggacctacaccacctgatcaagatcatcaatatgaattaacagtttatgcgttagatcattctttaaatttgaagaatgggttctacttgaatgaatttttaaaagaagtaaatcaacataaaattgatcaaacaagtattaaccttataggaagaaaaatttaa

SEQ ID NO: 410044 - DNA, 324 bp, Staphylococcus aureus; identical to SEQ ID NO: 409861

SEQ ID NO: 410045 - DNA, 180 bp, Staphylococcus aureus
atgccttatatttatttaataatagccataagtactgaagttattggaagtgcatttcttaaatcttcagaaggcttttcaaaatttataccatcctttagaataaaattaaataaaatacgaaaattaaaaggagttaaaaatgccttatatttatttaataatagccataagtactga

SEQ ID NO: 410046 - DNA, 180 bp, Staphylococcus aureus
atgaaacaaattagcattggctatgaaaaaatctatgaggatagaatttttcatagccattttttaaaagagcaagaagtaaaaaattggaaaaccgtcgatcaaataattaaaaatgaacacttagttaaaagtgattatgaagcagaaccacctgtaaatggcggttataaaatgtag

SEQ ID NO: 410047 - DNA, 651 bp, Staphylococcus aureus
atgaacgagcaaataataggaagcatatatactttagcaggaggtgttgtgctttattcagttaaagagatttttaggtattttacagattctaacttacaacgtaaaaaaatcaatttagaacaaatatatccgatatatttagattgttttaaaaaggctaaaaagatgattggagcttatattattccaacagaacagcatgaatttttagatttttttgatattgaagtctttaataatttagataagcaaagtaaaaaagcgtatgaaaatgttattggatttagacaaatgattaatttatcaaatagagttaaggcaatggaagattttaagatgagtttcaacaatgaatttagtacaaatcagattttttttaatccttcttttgttatggaaacaattgctattataaatgaatatcaaaaagatctatcttatttaaaaaatataattaataaaatgaatgaaaatagagcttataatcatattgatagttttatcacttcagagtaccgacgaaaaataaacgattataatctttatcttgataaatttgaagaacagtttagtcaaaagtttaaaataaacagaacttcgataaaagaaagaattattattaatttaaacaagaggagatttaaatga

SEQ ID NO: 410048 - DNA, 507 bp, Staphylococcus aureus
atgataattaaaattttaacaattctattactactttgtatattgagctatttggttacaaatagaaagaagccttttctgttcttaaagacactctttatgggtgtggtatttatctttataggatatatttcactggcaatatctgccgtaattatttatggtattattcaatttatcacaattgattttggtagttttttcttaatgggtattatattgatcttgatttcaagtatattccaattatttatagttagattactttttagaaaaaagaatgtagatttgacagaggttgtcgttttagaacatttaattcaatggttcttagtttactttgcgatctatcaagcagtaaatgaaaaaatggacattaatgatattaatatcgacaatttccaatctgtcttttttgacgtgtctaatttgaatttagtaattctaccaacgttaatcattagctgggtcacaatatttaactatagaatgagaagttacaaataa

SEQ ID NO: 410049 - DNA, 126 bp, Staphylococcus aureus
atgaaaaataaattgatagcaaaatctttattagcaatagcggcaattggtattactacaactacaattgcgtcaacagcagatgcgagcgaaggatacggtgtaaatggcggttataaaatgtag

SEQ ID NO: 410050 - DNA, 162 bp, Staphylococcus aureus
atgagcaacatttataaaagctacctattagcagtattatgcttcacagtcttagcgattgtacttatgccgtttctatacttcactactgcatggtcaattgcagggttcgcaagtatagcgacattcatattttataaagaatacttttatgaagaataa

SEQ ID NO: 410051 - DNA, 651 bp, Staphylococcus aureus
atgttgaaaaatattttgaaagtaaaagaaccaaagaaaaaactagaagtgttaaccaatgttgaggttaagaaattattaggagcagctaataatattagagataaattcttaatacaattattatatgaaacaggattacgtataggtgaggtattatcattacgcattgatgatatcaaatttgattttagaaaaggtcaccaaatagttttgaaaaatagatttaatagcaatggtacttatttaaaaactggtgaaagaaaaatatttatttctcaatcgttaattgatttatatgacgattatgtgtacgaaataattgacgaactttccatatgttctgattatctttttgtaaaaataaagggtagaaatgtaggagaagctatgcattatagtgatatatattcattatttaaaaggctaaaacataaaacatctataaatgttcacccccatttatttcgccatacacatgcaactgttttttataatgaaactaaggatattaaacaagttcaagaaagactcggtcatagtaatatacaaacgactattaatttatatgttcatcccactgaagaagatatacgtgaagattggaataaagttaagcatcaatttcaagtttttaataaaggggaataa

SEQ ID NO: 410052 - DNA, 147 bp, Staphylococcus aureus
atgaggtttggaaattataaaattgattctttttggttaattatgattataggttttctagctacttctatattttttccttttatgcttttgtctgtaattgttttattgatttttggtttagaaaaagatgataaaaaggattaa

SEQ ID NO: 410053 - DNA, 240 bp, Staphylococcus aureus
gtggcatataataaaggggaagatattaaagaacccctattcatatcttatgataaatataatgaatatagctcaatatcagataaagttgaaaatggcgatttattagtaacgggtgtgggcacaattggagtaccatttttaataaaagataatacgccgctttactttaaagatggtaatattatttggttaaagaactgtctcttatacacatctccgagcccacgagactcctga

SEQ ID NO: 410054 - DNA, 573 bp, Staphylococcus aureus
atgaaattaaaatcattagcagtgttatcaatgtcagcggtggtgcttactgcatgtggcaatgatactccaaaagatgaaacaaaatcaacagagtcaaatactaatcaagacactaatacaacaaaagatgttattgctttaaaagatgttaaaacaagcccagaagatgctgtgaaaaaagctgaagaaacatacaaaggccaaaagttgaaaggaatttcatttgaaaattctaatggtgaatgggcttataaagtgacgcaacaaaaatctggtgaagagtcagaagtacttgttgctgataaaaataaaaaagtgattaacaaaaagactgaaaaagaagatacagtgaatgaaaatgataactttaaatatagcgatgctatagattacaaaaaagccattaaagaaggacaaaaagaatttgatggtgatattaaagaatggtcacttgaaaaagatgatggcaaacttgtttacaatatcgatttgaaaaaaggtaataaaaaacaagaagttactgttgatgctaagaacggtaaagtattaaagagtgagcaagatcactaa

SEQ ID NO: 410055 - DNA, 435 bp, Staphylococcus aureus
gtgaaacaacaaaaagacgcatcaaaaccagcacacttttttcaccaagtcattgtaattgctttagtactctttgtatcgaaaataattgaatcatttatgccaattcctatgcctgcatcagtaatcggtttagtattattatttgtattattatgtactggtgctgttaagttaggcgaagtcgaaaaagtaggaacgacactaacaaataacattggcttactcttcgtaccagccggtatctcagttgttaactctttaggtgtcattagccaagcaccatttttaatcattggactaataatcgtctcaacaatactattacttatttgtactggctatgtcacacaaattattatgaaagttacttcgagatctaaaggtgacaaagtcacaaaaaaagatcaaaatagaggaggcacaagctcatga

SEQ ID NO: 410056 - DNA, 1722 bp, Staphylococcus aureus
atgatgaaattttcagtaatagttccaacatacaattcagaaaagtatataacagaattacttaatagccttgcgaaacaagattttccgaaaactgaatttgaagtggttgtagttgatgactgttcaacagatcaaacgttacaaatagttgaaaagtatcgcaataaattgaacttgaaagtaagtcaactcgaaacaaattctggtggtccaggtaaacctagaaatgtggcgttaaaacaagcagaaggtgaatttgtattatttgtggactccgatgactatataaacaaagagactttaaaggatgcagcagcatttattgatgaacatcactcagatgtcttattgattaaaatgaaaggtgttaatggtcgtggtgtaccacaatctatgtttaaagaaacagcacctgaagttactttgttaaattcaagaattatctatactttaagcccgactaaaatctatagaacagcattactaaaagataatgacatttattttccagaagaattaaagagtgcagaagatcaattatttacaatgaaagcatatttgaatgcaaatcgaatcagtgtgttaagtgataaagcgtattattatgctacaaagcgtgaaggtgaacatatgagtagtgcgtatgtttcacctgaagacttttacgaagtcatgagattgattgctgtagaaatattaaatgcagatttagaagaagctcataaagatcaaatcttagcagaatttttaaatcgtcattttagtttttctcgtacgaatggcttctcacttaaagttaaacttgaagagcaaccacaatggattaatgctctaggagactttatacaagcagttccagaacgtgtagatgcattggtgatgagtaaattacgaccattgttgcactacgcgagagcgaaagatatagacaactatagaactgtagaagaaagttaccgtcaaggtcaatactaccgttttgatattgtagatggtaaattaaacattcaattcaatgaaggcgaaccatactttgaaggcattgatatcgctaagccaaaagtgaaaatgacagcatttaaatttgataatcataaaattgttacagagctaacgttaaatgaatttatgattggcgaaggacattatgatgtcagacttaaattacattcacgaaacaagaagcacacaatgtatgtacctttaagtgtcaatgcgaataaacaatatcgttttaacattatgttagaagatattaaagcgtatttacctaaagaaaaaatttgggatgttttcttagaagtccaaataggtacggaagtatttgaagtgcgtgttggtaatcaacgtaataaatatgcatatactgcagaaacaagtgcattaattcatttaaataatgatttttatagattaacaccgtatttcacaaaagactttaataacatttcgttatactttacagctattacattaacggattcaatctcaatgaagttaaaaggtaaaaacaaaatcattttaactggtctggatcgtggttatgtatttgaagaaggtatggctagtgtcgtgctaaaagacgacatgattatgggaatgttaagccaaacgtcagaaaacgaagtggaaatcttacttagtaaagatattaagaagcgagacttcaaaaatattgttaagttaaacactgcacatatgacttactcgctaaaataa

SEQ ID NO: 410057 - DNA, 771 bp, Staphylococcus aureus
atggatttgaacttaacgatgattataatcataattttatttggttttatcgcggcgtttatagattcggttgtagggggtggcggtttaatttctacgccagcattattagcaatcggtctaccaccatctgtggctttaggtacaaataaattggcaagttcatttggttctttaactagtatgataaagtttataaggtccggtaaagtggacttatttgttgttgccaaattatttggttttgtatttttggcatctgcatgtggcgcatatattgcaacgatggttccgtcacaaatattgaaacctctaatcattattgcactttcgtcggtgtttatattcacattacttaaaaaagattggggcaatacacgcacgtttactcaatttacatttaagaaagccataatatttgcagcactttttatattaatcggcttttatgatggatttgtaggtgggggaacaggttcatttatgctttttgtattgttagtctttggttttgattttttaagtgcagcaggaaatgctaaagttttgaactttgcttctaatataggtgcgcttgtattatttatggtattaggacaagtagattatgtaataggtttaattatggctataagtatgattgctgggtcatatactggagcacattttgctatcaaacaaggtgttggctatgtaaaagtattatttattattattactgctattttaattttaaaaaatgcttttgattatattcaacaatttgtataa

SEQ ID NO: 410058 - DNA, 495 bp, Staphylococcus aureus
atgactgaaataacattcaaaggtggaccaatccacttaaaaggtcaacaaattaatgaaggtgattttgcacctgattttacagtgttagataatgacttaaatcaagtaacattagcagattatgctggtaaaaagaaattaattagtgtggtaccatcaattgatacaggtgtttgtgatcagcagactcgcaaattcaactctgaagcttctaaagaagaggggattgtgcttacaatttcagcagacttaccattcgcacaaaaaagatggtgcgcttcagcaggtttagacaatgtcattacattaagtgaccaccgtgacttatcatttggtgaaaactatggcgttgttatggaagaacttcgcttattagctcgtgcagtatttgtattagatgtagataataaagttgtttataaagaaatcgttagtgaaggtactgatttcccagattttgatgctgctttagctgcatacaaaaatatttaa

SEQ ID NO: 410059 - DNA, 948 bp, Staphylococcus aureus
atggcagaacaacaaacaattatggaacgcttgtttcatacattagatgaaaaagctaaaacattaaataatgaaaatggccaaagttttattgaaaatcttgggctagcaatggaacaagtatataccaatgaaagaggattgttagaacaatcgacgttacaagatcgacgtaaagcattccaatttgcatatttaagtttaatgcaggaagaaaagatacaagcaaatcatcaaattacaccagattcaattggattgatactaggatttttagttgagcgttttatgaacaaccaagaagaattacatattgttgatattgcaagtggtgccggtcatttaagtgctactgtaaaagaagtgttacctgaaattgcggttatgcatcatttaattgaagttgatccagttttatcacgtgttagtgtacatttagcaaacttcttagaaattcctttcgatgtgtatcctcaagatgccatcatgccactaccattagaagaagcagatatcgttattggtgattttccagtaggctattatccaattgatgaaagaagtaaggagtttaagctaggttttgaagaaggacatagttattcacattatttattaatagaacaagcaataaatgcattaaaagatgctggatatgcctttctagtggtaccaagtaatatttttacaggtgaacatgtaaaacagcttgaaaaatatattgcaacagagacagagatgcaagcatttttaaatttaccaccaactttatttaaaaatgaaaaagcgcgaaaatctatattaattttacaaaagaaaaaatcgggtgaaacaaagccagttgaagtattattggcaaatattcctgatttcaaaaatccttcacaatttcaaggatttatgacagagttaaatcagtggatggacacaaatcgtcctaaaaaataa

SEQ ID NO: 410060 - DNA, 1218 bp, Staphylococcus aureus
atgtcatatacttctgtattgtttaataagaactttactttttatttaatagggatagctttttctaacatgggcagtgcttttactacgtttgtttttccattaatgattttaaagcttactggatctgcatttcaagttggcatagtttctgcactaagttttatgccttatgcaattttaggattgccagctggtgctttaattgacagattgaataagaagaccataatgaaatgtgctgatataattaggttcgtttcatatttaagtataccagtattaagttttttcaatatgttaagcatctttcaaatttatgtagttgcaatcatttcaggtattggattagtatttcacagtatttctgaggtttcgataatcccaagtattgtaaaagaagaagatttggcgagcgcaaacagttatatatacgctactcaaaatgtttcggaatttttgggccctataattggaggtttactttatacatatatgggatattcaatattgatttttatagattctatgacttttttactctcatttttcagtttgatattaattaaaattgaaacaaagagtatattcaatcaagaaaagttgagtggaaaaaattttttgagcgatgttaaagttggatttgattatctattatctaattcaactattagagtaatggctgttgttgtaagtttatccaatctaattatctcaccttattatatttatatagtaatgtttgtaaaggaagacatgaatcaatcatctcaagcattggggttagttttaggtatctcatcattaggtgcgctaatcggttcattatctgcaagttttctcttgaaattatttaatttcggaaaactaattgtaattatattatttttagatacaatttttagattaatgttaccatttagtacttatatttttatactcatcccacttttagggttgacatatatgacacaatccattttaaatatagcgataatcacactgaggcaaaagaaatgttcagaaaatatgttaggacgtgttaatagtgtttttaaaacaatggtttttgcattcagacctataggcctttttttaggcggtatattacttgaaaataaaggtggattttatgcacttacgatcagtgctgtgttatttataccattagtgttatatatactgaaaaatagattttatcaagttgaagaatattaa

SEQ ID NO: 410061 - DNA, 1008 bp, Staphylococcus aureus
atgaatttggctaaacgcatattacaaggggaacaattaacaaaagagactgtattgaaaatttatgaggatactaatattgataccttagatttattaaatgaggcgtacattttaagaaaacattattttggtaaaaaagtaaaattaaacatgattttaaatgctaaaagtggtatatgtcctgagaattgtgggtactgtggacaatcacgagatattaaacaaaaacagcgatatgctttaattccagaggaacaaattatcgatggagcaaaggtggcacatgataatcatattggaacatattgtattgttatgagtggtagaggaccgagcgataaagaagttgatcatattagtaatactgtaagaacgattaaatctcaacacccgcaactaaaaatctgtgcatgtttaggattaacgaatgacgaacaagctaagaaacttaagtcagctggtgtagacagatataaccacaatattaatacaagtgaaaattaccatgataacgtcgtgacaacgcatagttataaagatagaacagatacgatagaactaatgaaagcgaataatatatcaccatgttctggcgtgatttgtggtatgggagaatctaatcaagatattgttgatatggcatttgctttaaaagaaatggatgccgacagtattccgattaattttttgcatccaatcaaaggcacaaagtttggaagcatggatgatttaacaccaatgaaatgtttaagaatcgtagcattattccgattaatcaatcctacgaaagaaattcgtattgctggaggaagagaggtcaacttacgttcgttacagccattagcattaaaagcggcgaattcaatatttgtcggtgattatctaattactggtgggcaaccgaaccaattagactacgatatgattaatgatttgggctttgaaattgattatgacacttgtgaaaataaggaaaacaagaatgatgtttcaagagcaaattga

SEQ ID NO: 410062 - DNA, 267 bp, Staphylococcus aureus
atgaaaggctctaaacaaatacttttgattatgggcattatatctcttattgttttatttatttttacactattcatcatggcacaatatgcaaaacattatgaacaaaaatccgacagttccaacgcacatactttaaactcatcatcagccataattgagcaacatactatgtcgaatttagcgtctctagatttatacgctcctgttcgtaacattacttctagtcgtgatattcatcccatttatttcatgacaaaagattaa

SEQ ID NO: 410063 - DNA, 357 bp, Staphylococcus aureus; identical to SEQ ID NO: 408044

SEQ ID NO: 410064 - DNA, 573 bp, Staphylococcus aureus
atgaaaaagagtatttatatcttaccattagcttatatagttattgagtcacctttacaaattggcaatgttatcttaaccccatctttaaaagtaattgaatcaggtcattttcatacagacttttcactaatatcaatgtttaacaaaaaagagtttttatctattttatctacttcgcaattaaaagaagatgcactagttatttttaaggacgatttctttgaacctaccacggtagaccaaaattattattttattaataagttaagtcaaaaagccgacagaactctagatattataagaataaacgaaaataattttggtgttcctgaacaattaccaggtataccaggtattacctcaaatggttggcaagtagctgaacaattgactgaccacaaacttagaacaattaatggaaaagtcatgtttatgattcgagaaggaataggattatatccaattgacttatcttctaatatttatgaagataaattatataattgtctttatgttacttcaaatgaaattaatttacttttcagagataaagtccgtataattgtgtaa

SEQ ID NO: 410065 - DNA, 1344 bp, Staphylococcus aureus
atgcgattaaagtcaatcataactgttatagctttaatattaattatgtttatgtcagcgattgaatcatctattatttcgcttgcattacctacaattaaacaagatttaaatgcaggaaatttaatttcattaatttttacagcgtattttatcgcattagtaattgccaatcctatagtgggagaattactttcgagatttaaaattatttatgtggcaattgcaggattacttttatttagtataggtagttttatgtgtggtttaagtactaattttactatgctaattatatcacgcgtgatacaaggttttggatcaggtgtattgatgtcattatcgcaaattgttccaaagttagcatttgaaattccgttacgatataaaattatgggcatagttggcagtgtttggggtatttcgagtatcattggaccgcttctaggtggtggtatattagaatttgcaacatggcattggttattctacataaatataccgattgcgatcattgccattatattagttatatggacatttcattttccagaggaagaaacagttgctaaatcaaaatttgatactaaagggctcacgctattttatgtatttattggattgattatgtttgctttattaaaccaacagctattacttttaaatttcttgagttttatcttagctatcgttgtggcaatgtgtttatttaaagtagaaaaacatgtttcttcaccatttttacctgtggttgaatttaatcgttcgattactttagtttttataacggaccttctaacagctatttgtttaatgggattcaatttatatattccagtctaccttcaagaacaactaggattatctccattgcaaagtggattggttatttttcctttatctgtagcttggattacattgaattttaatttacatcgaattgaagcaaaactatcaaggaaagttatttacttactatcatttacattgttactagtaagtagtattatcatttcatttggtattaaattgccggtacttatagcatttgtgttaattttggcaggattaagttttggatatatttatacgaaagatagtgtaattgtccaagaggaaactagcccattacaaatgaagaaaatgatgtcattttatggattaactaaaaatcttggggcatcaataggttcaacaataatgggatatctttatgcgatacaatcaggaatctttggtccaaacttacacaatgtgttaagtgctgttgctgtaattagcattgggcttattgttttatgggtcgtattttttaaagaacagtcatctcaatcaaaagaatag

SEQ ID NO: 410066 - DNA, 1065 bp, Staphylococcus aureus
ttgttaacggtagatcaagtgaaagaattggtaggagaaattaaagatcctattatagatgtgcctttaaaagaaacagaaggtattgttgaagtttctattaaggaagaaaaagaacatgtgagtgttaaattagcaatggcacaattaggtggtgcaccgcaattagatttacagatggctgttgttaatgcattaaaagaaaacggtgcgaaaacggtcggtatacgatttgaaacattgccggaagaaaaagtaaatcaatttaaaccaaaagaagaaaataaacctaaaacgatagaaggcctattatctcaaaataatccagtcgaatttattgcaatagcctccggtaaaggtggtgtcggtaaatctactgttgcagtaaatttagccgttgccttagctcgtgaagggaaaaaagtcggattagtagatgccgatatatatggatttagtgtaccagatatgatgggtattgatgaaaagcctggaattaaagggaaggaagtaattccagttgaacgtcatggcgttaaagttatatcaatggccttttttgtggaagaaaatgcgccagttatatggagagggccaatgttaggtaaaatgttgacgaatttctttacagaagttaaatggggagacattgaatatttaatactcgatcttccacctggaacaggagatgtagctttagatgttcatacgatgttaccttcaagtaaggaaattattgtaacgacacctcatcctacagcagcatttgttgcagctcgcgcaggtgcgatggcaaaacatacggatcattctattcttggcgtaattgaaaacatgagttattttgaaagtaaagagacgggtaataaagaatatgtctttggcaaaggtggcggtactaagttagctgatgaacttaatactcaattacttggggaattacctttagagcaaccatcttggaatccaaaagattttgcaccgtcaatatatcaatcagatgatcgtctaggtaaaatttatagctcgattgcacaaaaagttatagctgctacaaataaatag

SEQ ID NO: 410067 - DNA, 768 bp, Staphylococcus aureus; identical to SEQ ID NO: 408102

SEQ ID NO: 410068 - DNA, 771 bp, Staphylococcus aureus
atgatgaaacgattaaacaaattagtgttaggcattatttttctgtttttagtcattagtatcactgctggttgtggcataggtaaagaagcggaagttaagaaaagctttgaaaaaacattgagtatgtaccctattaaaaatctagaggatttatacgataaggaaggctatcgtgatgatcagtttgataaaaatgataaaggtacatggattataaattctgaaatggttattcaacctaataatgaagatatggtagctaaaggcatggttctatatatgaatagaaataccaaaacaacaaatggttactactatgtcgatgtgactaaggacgaggatgaaggaaaaccgcacgacaatgaaaaaagatatccggttaaaatggtcgataataaaatcattccaacaaaagaaattaaagataaaaacataaaaaaagaaatcgaaaactttaagttctttgttcaatatggaaactttaaagatttgtcgaagtacaaagatggagatatttcatacaatccagaggtgccaagttattcagcaaaatatcaactaaccaatgatgattataatgtaaagcaattacgtaaaagatatgatataccgacgaataaagctccaaagttattgttaaaaggttcaggaaatttagatggttcatcaattggatacaaaaaaattgaatttactttcgtagagaaaaaaggagaaaacacttactttacagctaacctacattttaaaccgagtaatgatgaataa

SEQ ID NO: 410069 - DNA, 3153 bp, Staphylococcus aureus
atgagtcaattgctaaatgatacgttatcggcttggttgttaattgaatctttaagtccaggagaagtaaattttacagcggaagatatactctcagctgaacattttaaaaatggtgcaaagcaagcacaacttcaaagctttgatgaatattttgaaatatggaattctgaacgctttattatatcagaagaaaaatcagagactggggaacttatatttaaattttatagacattgcttccgctataatgaaattaatttgaaaattcaggatatttttgatgattattctgatattcataatccaaatgggacacactgttatggttacacatttaacacagataaacacggcaaagtgatagttgattctatacatattccgatgattatgagtgcattaaaagaaattgaaaagaacaaaaatgccaatatagaagaaaaatttaatgattctgttgaaaaattttttcaaaaagtaaaagaaattttagcagatgaaccaattaatgaatttaaattgaagaagatggacaaagcttatgatgagtacttttctgtattaaattcaaagaaagatggattatttggacattatgtagcaatagaatatgtgaaagatagtgatttaccacagccggaatttaacagtttcttcataagtgatattgagaaagcaagaaaatctcccaaccaaactttaattgattacattgaaggtgtagaagaaagtcagcgcatagaagtagatgaaaataaagaaatgtttgacaaatttttacatccttcacgtttgcctgatggacgatggccatcacagactgagtttagattgtctttaatgcaacaacttgctgtaaaccaaattacgagtggtaatgaaagaataagttcagttaatgggccaccagggacaggtaagactactttattaaaagatatatttgctcatctagtagttgaaagaggtaaagagttagctaaactaaataatcctaaagatgcatttgtcaaaacaaaaattcatgaaacggatgataaatacgtatacttactaaaggaatctattgccaaatataagatggtagtcgcatctagtaataatggagctgttgaaaatatatctaaagatttaccgaaaattgaagaaattataagaaatcccgaaaaatgtaaattccctaaatatgaacagaattatgcaaatttagcacatgaattaaaagattttgctgaaatagctgaagatttgattggtgaaagtgcctggggcttattttctggagtttttggtaaaagtactaatattaaccaagtattgagtcatatgttaaaacaagatgcgaatgatattggctttgctaaattactacaaaatgagaataatcgtatgagttataacgagttaatgagtgaatggcaatcacatcaacgtgcatttttagaagagttgaggcatgttgaaatgttaaaagaagaatctattagagcatatgatgtttataaaaattgtgagtctttctctaagattgaacaggttattaatagtgaaaaaacaagtattgaagaacaggtatatcatttagataatgaaacgttacgagacaataaagaaatagaagatttggataatcgaattaattatattgttaagcaaatagaaactttaaatgagttaattaaatccatcaaagaaagcaacaaaggttttattaacaaactgaaagcgatgtttaattcagaagaagatgaaagctataaagatcataataaagagaagcaacaattattaacacaacagttagagttagagaaatgtaaaaaaaacaaacatgaagaccttgttagcaaactaaaagaaaaagagaaattaattaaacaattaactaaagtacagttgcaattagacgagttaaattcacagttacaagagttagaagcatatcgtattgagtcaaaaattacaattccagaaaaagatttttggagtgacaacaattatgatgagcgccaagttactaatctgtggacgagtgacgaacttcaatacagacgtgccatgctctttttaagagcaatgatattgcataaattattattgattgctaataatacaactatttattatgcgattaatgattttaaagatagaaggaaattaattgatgcaaatccagataaagtacacaacgcatggaatgtgatgcatttaatatttccagtagttagtacgacgtttgcaagctttaaatctatgtatgggggcataccaaaagatttcatagactacttatttattgatgaagcaggacaagcaatacctcaagcagctgtgggagcattatatcgttcaaaaaaagttgtagctgtaggtgatccgattcaaatagaaccggttgtgactttagaaagtcatttaattgataacattcgtaaaaattatcatgttccggaatatctagtttctaaagaagcttctgtgcagtctgttgcagacaacgccaatcaatatggtttttggaaatctgatgctactgatagtaatcaaaaaacctggataggcatacctttatgggtgcacagacgatgtttaaaacctatgttcacgatagctaaccaaatcgcttataataataaaatggtgttgccaagtaatattacaaaagtaggtaaaacaggttggtatgacgttaaaggaaacgcagttcaaaaacaatttgtgaaagagcatggtgaaaaagtagtgggattattagctgatgattggattgaagcaattaaggaaggtaaaaatgaaccgagctcatttgtaatatcgcctttttcagcagtacagcaacagattaaacgtatgttaaagcaacaactaccgactagaattgatattgaacgtacaaaaattaatcaatgggtcgataaatccattggtactgttcatacttttcaaggtaaagaggctcagaaggtgtattttgtaataggtactgataatacccaagatggtgctgtgaactggtcatgcgaaaaaccaaacttgttaaacgttgcagtgacaagagctaagaaagagttttatgtaattggcgacatgcaaagaatacagatgaaaccattttatgagacgatttttaaagaaagaaatgtaaaataa

SEQ ID NO: 410070 - DNA, 948 bp, Staphylococcus aureus
atgcttaaaaataaaatattagctacaactttatctgtgagcttacttgcccctcttgccaatccgttattagaaaatgctaaagctgccaacgatactgaagacatcggtaaaggaagcgatatagaaattatcaaaaggacagaagataaaacaagtaataaatggggcgtgactcaaaatattcaatttgattttgtgaaggataaaaaatataacaaagatgctctgatattaaagatgcaaggattcattagctctagaacaacatattacaactataaaaaaactaatcatgttaaagctatgcgatggccattccaatataatattggtttaaaaacaaatgataaatatgtttctttaattaattatttacctaaaaataaaattgaatctacaaacgtgagtcagacattaggatacaatatcggtggtaatttccaatcagccccatcactcggtggtaatggatcatttaactattctaaatcgattagctatacacaacaaaattatgtaagtgaagtagaacaacaaaactcaaaaagtgttttatggggcgtcaaagcgaattcattcgccactgaatcaggtcaaaaatcagcatttgatagcgatttatttgtaggctacaaacctcatagtaaagatcctagagattatttcgttccagacagtgagttacctcctcttgtacaaagtggatttaacccttcatttatcgccacagtatctcatgaaaaaggttcaagcgatacaagcgaatttgaaattacttacggaagaaacatggatgtcactcatgccattaaaagatcaacgcattatggcaacagttatttagacggacatagagtccataatgcattcgtaaatagaaactatactgttaaatacgaggtcaattggaagactcatgaaatcaaggtgaaaggacagaattga

SEQ ID NO: 410071 - DNA, 363 bp, Staphylococcus aureus
atgttaaaagaattcaaagagttcgccttaaaaggtaacgtcttagatttagcaattgctgttgtgatgggtgcagctttcaacaagattatatcttcattagtagaaaatatcatcatgccattaattggtaaaattttcggatcagttgattttgctaaagaatggtcattctggggtattaaatacggtttatttatccaatctgttatcgactttattatcatcgcgtttgctttattcatctttgttaagattgcaaatacattaatgaagaaagaagaagccgaagaagaagcagttgtggaagaaaatgttgtgttattaactgaaatcagagatttattgcgtgagaaaaaataa

SEQ ID NO: 410072 - DNA, 1122 bp, Staphylococcus aureus
atgaaaattatacatacagcagactggcacttagggaaaatattaaatggcaaacagcttttagaagatcaagcgtatattttagatatgttcgtagaaaaaatgaaagaagaagaacctgatatcattgtgatagctggagatttatatgacacaacatatccaagtaaagatgcaatcatgttattagaacaagcgattggaaagttaaatttagaactgcgtataccaataattatgattagtggaaatcacgatggtaaagagaggttaaactatggggcgagttggtttgaacataatcagttatttataagaacagattttacatcgattaattcaccaatagagataaatggggttaatttttatacactcccttatgctactgtgagcgaaatgaaacactactttgaagatgacaccattgaaacacatcaacagggaattacgcgctgtattgaaacaatagcaccggaaattgatgaagatgccgtcaatattttaattagtcatctgactgttcaaggtggaaagacatctgattctgaaagaccattaactattggaacggttgaatcagttcagaaaggtgtttttgatatatttgattatgtcatgctaggtcacttgcatcatccatttagtatagaagacgacaaaattaaatatagtggctccttattgcagtattcattttcggaagcgggtcaagctaaagggtatagacgtttaacaattaatgatggcattattaacgatgtatttattcctcttaagccacttagacaattggaaattatctcaggcgaatataatgatgttattaatgaaaaagttcatgtgaaaaataaagataattatttacattttaaacttaaaaatatgtctcatattactgatccaatgatgagtttaaaacaaatttatcctaatactttagcgctgacgaatgaaacttttaattataatgaagaaaataatgctatagaaataagtgaaaaagatgacatgtcaattatcgaaatgttttataaacatataactgataaagaattatcggatatccaatctaaaaagataaaaaatattttagaaaacgaattgagaaaggaggattaa

SEQ ID NO: 410073 - DNA, 468 bp, Staphylococcus aureus; identical to SEQ ID NO: 406968

SEQ ID NO: 410074 - DNA, 288 bp, Staphylococcus aureus; identical to SEQ ID NO: 406969

SEQ ID NO: 410075 - DNA, 324 bp, Staphylococcus aureus
atgaaatttatggcagaaaataggctgacgttaacaaaaggaacagcaaaagatattatagaacgattttacacgagacatgggattgaaacattagaaggctttgatggcatgtttgttacacaaactttagaacaagaagattttgatgaagtgaaaattttaacagtttggaaatcaaagcaagcttttacggattggttaaaatctgatgtctttaaagcagcgcataaacatgttagaagtaaaaatgaagatgaaagtagcccgattatcaataacaaagtaattacatatgatataggctatagttacatgaaataa

SEQ ID NO: 410076 - DNA, 735 bp, Staphylococcus aureus
atgagaatgaagcgatttttaactattgtacaaattttattggttgtaattattatcatttttggttacaaaattgttcaaacatatattgaagacaagcaagaacgcgcaaattatgagaaattacaacaaaaatttcaaatgctgatgagcaaacatcaagaacatgtgagaccacaatttgaatcacttgaaaaaataaataaagacattgttggatggataaaattatcaggaacatcattaaattatccagtactacaaggtaagacaaatcacgattatttaaatttagattttgagcgagaacatcgacgtaaaggtagtatttttatggattttagaaatgaattgaagaatttaaatcataatactattttatacgggcaccatgtcggtgataatacgatgtttgatgtgttagaagattatttaaagcaatcgttttatgaaaaacacaagataattgaatttgacaataaatatggtaaatatcaattgcaagtatttagtgcatataaaactactactaaagataattacatacgtacagattttgaaaatgatcaagattatcaacaatttttagatgagacaaaacgtaaatctgtaattaattcagatgttaatgtaacggtaaaagataaaataatgactttatcaacgtgcgaagatgcatatagtgaaacaacgaaaagaattgttgttgtcgcaaaaataattaaggtaagttaa

SEQ ID NO: 410077 - DNA, 1002 bp, Staphylococcus aureus
gtggaagaatttaagcaacattataagggtttaattgatgaaagtttaacgtgccaagataaagtagaattgataaaaaagtgtgagaaatacactgacgaagtgattcgtaaggacgtcttgcctgaagacattgtcgatattcacaaaaactatatattgacgttaaacttaacgcgtgaagatgtgttcaagacattagatgtcttacaagaaatcgttaaaggctttggttatagttatcgagattatcaaagattggtagataaacttcaagttcacgataaagagatagacttagcttctagcttacaacaaacaatgcttaaaacagatattccacaatttgatagtattcaaattggcgttatttcagtggcagcacaaaaagtaagtggagattattttaatttaattgaccataacgatggcacaatgagctttgctgttgcagatgtcattgggaaaggtataccagctgctttagcaatgagtatgataaagtttggcatggattcttatggacactcacaattaccgagtgatggcttaaaacgtttaaatcgtgttgttgaaaagaatattaatcaaaatatgttcgtcacaatgttttatggtttatatgaagaaatgaaccatttattgtattgtagttcagctggtcatgagcctggatatatttatcgcgctgaaaaagaagaatttgaagaaatttcagttagaggtagagtgttaggaatcagttcacaaacacgatatcaacaacaagaaattcctatataccttgatgatttaattatcattttaacggatggtgtgactgaagctagaaatagtgaaggtacctttatagataaacaaaaacttttagaatatattaaaaaacataaacatatgcacccacaagatattgttcaaattatctatgaagcaattttaaagcttcaaaacccaaataaaaaagatgatatgactattttgattataaaaagagtaaattaa

SEQ ID NO: 410078 - DNA, 1218 bp, Staphylococcus aureus
atgaaaggtaaacaaatattaggcgtagatccagcatttagaacaggttgtaaattagcagtcattaacccattcggtacttttatagcaaaaggtgtgatttatccgcatccaccagtttctaaaaaagaggcagcagagaaggattttgtacaaatggttaaagcgtatgatgtgcaattaattgcaattggcaatggtactgcaagtcgtgaaacagaacaatttgttgcagatttaattaaaaagcatcagttgccagtacaattcatcattgtcaatgaagcgggcgcttcagtatactcagcatcagaaattgctagagatgaatttcctgattttcaagtggaagaaagaagtgccgtatcaattggacgacgcgttcaagatccattaagtgaattagttaaaatcgatcctaaatctattggtgtcggacaataccagcatgatgttaatcaaaaagcactagaaaatgcattaactttcgttgttgaaacagcagttaaccaagtaggtgttgatgtcaatacagcatcatcatcattattacaatatgtgtctggtctaagttcgcaaattgctaaaaatataattgcatatagagaagaaaatggcgcaataaagcataataaagagttaagcaagattaagcgtttgggtgctaaaacttttgagcagagtataggatttttaagaatagtagacggttcagagccattggataatacatcgattcatcccgaaagctataaagtaacgtatcagttattagataaactcggatttggtggcaatgatttaggtagtgatgcattaaaagctaaattaaattcattggatatggatgaactggcgattgaattacaagtcggtgtacctacattagaggatattattaaatccttgaaagcacctaatcgagacccaagggacgagtttgatacaccaatccttaaatccgatgtgctatcaattgaagatttaaaagaaggaatgaaattgagtggcacagttagaaatgtagtagattttggagcatttgtagatataggtgttaaacaagatggacttgtccatgtttcgaaactttctaagaagttcgtaaaaaatccaatggatattgtcagtgttggtgatatcgttgacgtttgggtttacagtattgacaaaaataaagacaaagtatcattaacgatgattgatccacatgaataa

SEQ ID NO: 410079 - DNA, 897 bp, Staphylococcus aureus
ttgccattggatttttataattatgtaaataaatatattagcaataaaatatttaatcatgataattatttaattactaaaaatgaggttataaatttctattttaatcatggtagtgactttaataattttaagaagggacagaaatggacaaagtccaattttaagcagggaaataaacttaaaatacacgaatttatcattgcagtaacttatgtgaacttattaaatcattcatatatgaaatatatcaatgctgaaaattactatgaccctagcaaaaaaataataaaaggaatgaaaaataattatcataaatttacagattcattcagtgattttgtagaaatggtggacgatataacatggagaatacgcgattcgtttgattatattggaggattaaaaaataaagaaattaacgaagatgagaacgaatatatcgaacaattaattcaatttgttatattatctaaattcggctatatgaatgtggaaaatcattttaattatattgagaacttaaatacacttaataacgaattaacgactatattaagaagtgagttcgcccacatctcaaatgatatgtataataatttatttagtaatttattcgatgttgtgaatacatggaaaaaagattattcaaataatttttataataatactcagaatactataactacaaaaaagttagatataatatcttcatttataaaacaatatgataaaccatttgaacgagacgaatatggcaaacatgttaaagcagaagtgtttgaagggataagtgattttcataagcgtgtaaaagaaggatttgctgcaaatgatgtgttattacaattaaggttagaaatgagtgtacatgaaaatgataaatttactagttaa

SEQ ID NO: 410080 - DNA, 918 bp, Staphylococcus aureus
atggacctaaaaaaatttgaagaattatataaagattatagtgatgatgatgtaatagagcaatttgctatatataaaataacagatgaaaagcaagtaatggaaattactgataaaaaactgaccagtgaagataaacaagtttttcagagaatagctaatttaagttatcaatttaatgtcgtaaaggaaatgtatgattactatctttatgattttcaagtaattactgattatatcaaagataaaagcaacctaaataataagtttaaatctgttgactttgtcaacctatattttttacatttcttatctactgcaagggcattttatcaatatactgaaaacttatttaagtctataggtaaaaaagaatttgaggaatggaaaaataatatatcaaatatttatgataataatttttcttatagattatgttatcaaatgaggaatttcacgcaacatcatggtttggcgattacgaatattaaagaaaaattaaatttaaattgtaacggtgaagaaataaacgactatcaattattcattgatccatctatattactaaatactaactataaatggaataagacagttaagagcgatttagaaaagcataatggattaattgatttttatcaactaataacagattatgatgagtgtataaaaaatatgcttttgtattcatatataggattaataaataagtatagaaatgaattaaatcaattaatgtcaaaagctatgaaaatagaaggagaaatgggtataccttttttaagaaaagctaaaaagaaagaattcagagaatactatgaaaatattgaatttacagaattaaaaggaagtaaggcaataattgatatatttaatatgatgtgtgatttatatactcaactcgagacatctagttaa

SEQ ID NO: 410081 - DNA, 1194 bp, Staphylococcus aureus; identical to SEQ ID NO: 408107

SEQ ID NO: 410082 - DNA, 603 bp, Staphylococcus aureus; identical to SEQ ID NO: 408105

SEQ ID NO: 410083 - DNA, 315 bp, Staphylococcus aureus
atgtattttgttttagcaatatttacaatcattagtgccagtgtaagtttaggttattcaattcaagcatgtgcatctagtcataatataaatgcatattatgcacttagtcgaagcttacctttatttttattagctattttttctttagtcattcatagtgctatatttttgataactatatccattgcaatgattttagttcaatttttagatgcgattgttggttataaaagtgaagatgtctttaaaacttatggtccattagcaacatctgtagtgaacttaatattattaatagttttcttattttaa

SEQ ID NO: 410084 - DNA, 540 bp, Staphylococcus aureus
atgaacataggtaataaaattaaaaatcttagaagaattaaaaatttaacgcaagaagaacttgctgaacgtacagacttatcgaaaggctacatttcacaaatagaaagtgaaaatgcctcaccaagtatggaaactttcttaaatattatagaggtgttaggaacgacgccaagtgaattttttaaagacagtgaaaatgaaaaagtattatacaagaaggaagaacaagttatttatgatgagtatgatgaaggttatatattaaattggttagtttcaaagtcaaatgaatatgatatggagccattaatattaactttaaagcctggagcatcatataaaaattttaatccatcagagtctgatacgtttatttattgtatgtcaggtcagataacacttaatttaggcaaagagatatatcaagcacaagaagaagacgttttgtattttaaagcacgagataatcatcgtttgtcaaacgaatcaaacaatgaaacacgaatacttattgtagcgacagcttcatatttatag

SEQ ID NO: 410085 - DNA, 315 bp, Staphylococcus aureus
atgcgtaatactaataaatttctcttaatcccgtatttactatggatggttatatttattattgtaccagttgtattactcatttatttttcatttttagatatcaatggacattttagtttcacgaattatcaacaaatttttactacaaaatatttgaaaatgtttgcatattcaattttatatgccgctttaataacaattattacgttggctatcagttatccagctgcctattatattactcgttcgaaatttcaaaatatcttattaatgataatgattattccaagtcaagtccagactcctgtgtaa

SEQ ID NO: 410086 - DNA, 1293 bp, Staphylococcus aureus
ttgtttgctaacgcaccaacagcaaaagagcccctaattaataaattaaaaggggctctaagaagcggggttatggatatgtttgcagcgttattacaaataaagaattataaactctttgttgctaatatgtttctactaggtatgggtattgcggttacggtcccatatcttgttctttttgcaactaaagatttaggtatgacaacaaatcagtatggattacttctagcatctgcagcgattagccagtttacagtaaattcaattattgctagattttcggatacgcatcactttaatagaaaaattattattattctcgcattattaatgggtgcgcttggtttttcaatatacttttttgtagatacaatctggttattcatattactatatgcgattttccaaggattatttgcaccagcaatgccccaactttacgcatctgctagagaatctatcaatgtttcaagctctaaagatagagctcaatttgccaacacagtattacgttcaatgttctcattgggctttttatttggtccatttattggtgcccaattaatcggtttaaaaggctatgctggattgtttggtggaacaataagtatcattttatttactttagtacttcaagtgtttttctataaggatttaaacattaaacaccctattagtacgcaacaacatgttgaaaaaattgctcctaatatgtttaaagacaaaacgcttttattaccatttattgcatttattttattacacattggacaatggatgtatacgatgaatatgcctttatttgttactgattatttaaaagaaaatgagcaacatgtcggttatttagctagtttatgtgctggtttagaagtgccatttatgatcattcttggcgttttatcatctagattacatactcgaacattgttgatttatggagcgatttttggtggtttattctacttcagcattggggtatttaaaaacttctatatgatgttagcaggacaggtatttttagctattttcttagcggttcttttaggaattggtattagttatttccaagatatcttaccagattttccaggatacgcctcaacactattttctaatgcaatggttattggacagttaggcggtaacctattaggtggtgctatgagtcactgggtaggtttggaaaatgtattttttgtatcagcagcatcaatcatgttaggtatgatacttatattctttactaaaaatcaaaaaattacaaaagaggatatgatatcaacatga

SEQ ID NO: 410087 - DNA, 318 bp, Staphylococcus aureus
atgaagaaattaatcatcagtattatggcggtcatgctatttttaacaggttgtggtaaaagtcaagagaaagccactctggaaaaggatatcgataatttacaaaaagaaaataaagaattaaaagacaaaaaagaaaagcttcaacaagaaaaagaaaaattagcagataagcaaaaagaccttgaaaaagaagtgaaagatttaaaaccttcaaaagaagataacaaggatgataaaaaagacgaagacaaaaataaagacaaagataaagataaagataaagaggcatcacaagataagataaagtccgtataa

SEQ ID NO: 410088 - DNA, 729 bp, Staphylococcus aureus
atgaaaaaagtaatggggatattattagcaagtacacttatcttaggtgcttgtggacatcatcaagatagtgcaaaaaaagagagcgctagtcacaaaaagaaagaaaatgacaatgaagaattaaatgaagaacttaaagaatttaaaagcaaaaaaaatatggatataaaaattaaaggcgatactattgttagtgacaaatttgaagctaaaataaaagaaccgtttatcatcaatgaaaaagatgagaaaaagaaatatatcgcttttaaaatggaaattactgctaaaaaagacgataaagatttaaatccatcttctatttctcatgactatattaatatcactcaagatgataaaaatacagtaaataaattaagagatggttatcttttaagtgataaaaaatataaagattggacagaacataaccaagatcaaattaaaaaaggcaaaactgcacaagccatgtttatctatgagttaagaggtgatggaaatattaatttaaatgtccataaatactcagaagataaaacagttgattctaaatcattcaaatttagtaaacttaaaaccgaagatttttctcatagagcggaaacaagagaagaagtagaaaagaaagaaaaagaatttgaagaagagtacaaaaaagaacaagaacgagagaaagaaaaagaaaagcaaaaagatgacgaccacagtagtttagatgaagtataa

SEQ ID NO: 410089 - DNA, 519 bp, Staphylococcus aureus
ttgatttctaatatttcaatttttgcaaaagacgataaaatgcaagttagtgataagtttaatcaaatagtcgctaaaatggattatttaaaaaacaaaaggaatcatttagttcatagttccaaaatagcagaagatgaaaaaaagtttttagaaacctatattaaaatagaaaaatataatgaaagtaatatctatttaaaagatgataaagttaatataaagagaaagttgaatcaaaataattttgattttgaaatggttaaagacatttttgaaatcagagaagaattagttgatttagagatagaagacttaagtattaataatatagaaagctcatatatttttgaaagcactttttttgctgatgtattagatgatgtgaattttgcaaaaaaacaaaatttacaaaaaaaacgtaattcgaaatcacttgaaagtgaaaatgtttacaaagataaaaagaaattgttgaatacagacataaaaacaaaatttgatatggtgacgttatga

SEQ ID NO: 410090 - DNA, 429 bp, Staphylococcus aureus
atgataaaaaaaataaaagatataataaaattggaagttaattatttaaataggattgataaagataatactgacaatgatgggataatattaaaagcaaataacaatgtaaatttaccaaatgaagataatgaagcttatgtagaaattatttttactatgagaagtgtagaatctaattcatgggaaaatgagaaaaataaaaagagaattttagatgatgaaaatgatcaaaatataattggcaaattaagagttaattataaaataatatgtgatttcagtacagagagggaagaaaaaatgagagatgcacttttagaaattatagaaccttatttcagaaaagaagttgaaactttattgtcaaatatgaaattaccaaattttattcttccttacaggttttgggaaaatgaagataactaa

SEQ ID NO: 410091 - DNA, 780 bp, Staphylococcus aureus
atgaagataactaatataagattaaaaagtgcaaataaaaaaagtgttaaaaaactttactttcttgaaggtatagatgctatagaaaaaatagagaataattacgaaaaaaaagtttttttagtctctatacttgaggggatcagacaatactcaacacaaaattataaaatagaatgtgattttaaaaaatttcattatagaatatttcagtattataggataattaagagaaaattaaaagagacagttaaaaattttgatgaaaaacaagtacagacgttatcaaaaatttataataaattatgcaatgttagtgataaaaataattatattggacaaattttggagtatacttatataaaatatatcagaactgaggattctgtgtataaaattggtcatgaaccaatagtatatcataaacgtaaatcactgcatggaaaagaatcttatagcaatagattattagattttgtgactatagagaatagaaagacgataattttatgcgaatgcaaagcgaacttgcaaagagagtttcaaggtttaatcaagcattttaataaaccatttagacagaagttacagttgatgaatcatttagaagataagttaaagcaatgccattctggaaatgaaaaacctaataactttgtagaaatcaaaaaagtattagtaactgcatttgcgccgactaatcaacaaaacttacctagaagatatcaacgagaaatacccatacttacaattagcgatatgaaaaatatggtgttataa

SEQ ID NO: 410092 - DNA, 1710 bp, Staphylococcus aureus
atggaaacaggtaaaagtgatgtacttgataaaattgaaaaaattaataaaaaagatagtgccttacaagaaattataccaaaaggttatgaaattgaacatcatcaatgcggtattgccttaaatcaacttataccaagtaaaaaagaaggcgagccagataaaaaggtttttatcacaagtacaatccctcaaatcactgaacgctttgaagatattgagagtaacgaagtcagctttaatatgcttttctatgacaataaaacgccagtaaatatagctgtgagtgccgaagaaatttcagatagtcgtcaactcttgaaattggttaataaaaagctggatgtaacatcgtcgacatctactaaacttgttgattatattaatgcatctaaacggtataatccaccattgaatgttaaagttgcaacgcgtttggggcatgtgaaaggttattttatttatccttatcaagaagtgatgaaagacagcaatatcaagttgtttagtaatgataaaggatttcaaaagttaatagactcttttcaaagcaaaggaacattagaaggttactctaaaaaagtgttcggtcaaataaaagatctaccaatggtaatggttatgttatatgcctctttaggttcggttttattaagagaatttggattacagccctttattgtagaaatatcaggtagtacatctacaggtaaaacattcacactcaacttagtatcaagtgtttggggaacgagcgaccttatcacgacatggagttctactcaaaatagtattgaatcgatggcatcatttttgaactcatttccaatgtttaaagatgatacacgtaatacacatcctaagtttgttaccagtgccacatataacttttctagtggtgaaagtaaatcaagaagtaatattaatttaacactaaacgctaaaaaagaatggcgaaatattttaatttctactggtgaatcatctatcgcaaatatggctgatgaaaaagcgggtgtatcagcacgtgtagttacactacaagatccaccatatccagataattttgattttaccacattagacaaatcgtttagggagaactatggaacgttagggttggcatttattaaacaatatgagtctaaaaaagacgtgtataagaacgcttttgagagctatcaacggtattttaatcaaaaaggtagtaatgaaatcatgcaacgtttaggacgtgcctttgcgttactacaagttaccggtgaggttttgaatgatattgatgggtttgaacatgaccattttaaaattatcgaacaagcctatgacagcatggttaaaaacaataagacgattgataaacctaagcaactgttagaggaactattacaatatttagatgcaaatagaaataatatcgctggtgatggctatagttcagtcaaaaatggtgacatcaaagctatatataaacgtgattatttatgtatattaggtcaaactgtacacgataaattaggtcatgaaatgcagactataacaggtcaatggggcaaaaaaggatatttaattaaaggtgaaaaagatcgcttgcaaaaaaaggtgagtcacaaaaacattaagtatagaggatttgctataaacaaagaaatgcttgaagaattaggatttgatttctcgaattctcataatccttattcagattattaa

SEQ ID NO: 410093 - DNA, 381 bp, Staphylococcus aureus; identical to SEQ ID NO: 408523

SEQ ID NO: 410094 - DNA, 573 bp, Staphylococcus aureus
atgtgcacaacaatagatataaggggttatcatggtacagatagaagttgctatgataatttagaaataaataaggaattccctgttaataaattaccatctgatttaggtaatggtctttatctatttatagacagaaaaaataaggttggagaagcaattaaaaatgctaaaaattatttagatagatggaaaccaaaatatgagaaaaaaatcattgcacaaatagatataaaagtaaaagagaatagattgatggatttagatgatcatgataatcaatatgaatttaattcattcgttgaagaaaatgaagaaacaatatacaatgaattagataagttgattaataataatacaaaaagtcgaggtaatatagacggcttaataattgagattatgattagagagtataatcttgaaattgatgctatccaaaaagaaacttatactcaatttgataaaagcaaaaaaagaaaaagatctaacatacctaacggtaaagaactttgtataagacagaatgatattattaagaataagtgtatttataatgaaaatgtggtaacttaa

SEQ ID NO: 410095 - DNA, 297 bp, Staphylococcus aureus
atgggtttgaaattaaaagagtatataaatgatagtaataggaaattggataaagaaacagttagaaagcacttagtagatatactaaattacactgttgaagaaaatagttttctagatcaaatgacagttggtaaaagactatattcaaatcaatataaaaactcgccctctgtatcattaactgtaaatcataaaattaaaataaatgaagtgacgagtgattttagctataaattttctgataatgaaactcaaacttttaatctttcaaatgagttaggagtagtagcgtaa

SEQ ID NO: 410096 - DNA, 441 bp, Staphylococcus aureus
atggctagtataggtttcaaaacttacaactttaatcatattagttatagtaaaaataaagaattagatattgaaaatgttgatacttttgaagtgaatagtgatttttctgcaaaagtagcctttgaaaatgaagaagcttacattataatggactgccaaataggtaataataaacccaattgtccgtttattataaatatgcaattaacaggagtctttgatatcgaatatgaaaacgatgttgaagataaaaatagtttaaaaatattactcacacaaaatgctattgcaattttatatccttatattcgtagtttagtatctgatctcacatcgaaagcaaatatgtttgatacttttataatgcctgttgttaatgttgctaagatgatggaggaaaataatagaattgaaattgttggcttggataaaaaatag

SEQ ID NO: 410097 - DNA, 315 bp, Staphylococcus aureus
atgaaatcatcatcaacttctccgttaacaaatgattctatccaagaggtaagtaagatatttaaaatgattagtgaccctacacgtctttcaattttatttcttttacagaaagaagaacttagtgttggagtaattgcgcagtctttaagtatggaacaatcagccatttctcaccagttaaaaactttaaagacttcaagattagtaaaatcaaaaagagttggtaaaaatatgatttatagccttgacgatcttcatatttttagtattcttgagcaagtttcaactcatatcggagaacaagaaaaataa

SEQ ID NO: 410098 - DNA, 780 bp, Staphylococcus aureus
atgaaagagattcaagagcaacactcacacgaaaataatagtcacgatcatgaccatgatcatgggaaaatgccaattattttgtactttattggtttagcactagcattgatagctttctttttgagtaaagagtatcaaatcttacaaaatattttgttcttaatcgctactataagcgctgggtaccatgttattgtccttgaaggacttggggagacgatccataactcaaaaagtcaaaaaagatttatacctaattctcatatcttaatggggttagcagcaattggagcatctttgatgggaaattttggagaaggtgcgttattaatctttattttttctggggcacattttctagaagattatgcagaaggaagaagtagacgagaaattacaaaattactcgaaatgaatcccacaactgctcgtttaattctcccagacggtagcacaaaaaatgtggaagttaatgaattaaaagttggaaatcaccttcaagtattaaatggtgatcaagtccctattgatggaattattttgtctggatctacgtctattgatgagtcttctattaatggagagagtataccaaaagaaaagtccaagggagacgaagtttttgggagcacaataaatggaacgggcacttttacaatggaagtcacgaaagaaaataaagatacggtgttttcaaaaattttacaattagtgaatcaaaaccaggataaccaaactaaagctgcaagtattattcaaaaatttgaaccaaaatag

SEQ ID NO: 410099 - DNA, 1173 bp, Staphylococcus aureus
atgacccaagtacattttacactgaaaagcgaagagattcaaagcattattgaatattctgtaaaggatgacgtttctaaaaatattttaacaacggtatttaatcaactaatggaaaatcaacgaacagaatatattcaagcaaaagaatatgaacgaacagaaaaccgacaaagtcaacgaaatggctattatgagcgcagctttacgacacgtgtaggcacgctagaattaaaagtacccagaacacgtgatggccatttttcacccacagtgtttgaacgttatcaacgaaacgaaaaagccctcatggcttcaatgttggaaatgtatgtatcaggcgtttcaactcgtaaagtatcaaaaattgtggaagaactttgtggtaaatccgtctctaagtccttcgtttctagcttaacagaacagctagaacctatggttaacgagtggcagaatcgtttattatcagaaaaaaattatccttacttaatgaccgatgtactctatataaaagtacgagaagaaaatcgagtactctcaaaaagctgtcatatagcgattggaataaccaaagatggcgaccgtgaaattatcggcttcatgattcaaagtggcgaaagcgaagagacctggacaacattttttgaatacctaaaagaacgcggtttacaaggtacggaactcgttatttctgatgcgcacaaaggattagtctctgccattagaaaatccttcaccaacgtaagttggcaaagatgccaagttcacttcctaagaaatatctttaccaccattcctaaaaaaaattcaaaatctttcagagaagctgttaaaggaatttttaagttcacagatattaacttagcgcgtgaggctaaaaatcgattgattcatgattatatcgatcaaccaaaatattcaaaagcttgcgcatcattggatgatggattcgaagacgcctttcaatataccgtacaaggaaattcccacaatcgactaaagagtaccaatctaattgaacgactgaatcaagaagtacgcagaagagaaaagattattcgcatcttccccaatcaaacatcagccaatcgcttaattggagccgttcttatggacctacatgatgaatggatttattcttcaagaaaatacatcaattttgataagtag

SEQ ID NO: 410100 - DNA, 243 bp, Staphylococcus aureus
atgaataataaagctttaaaactttatcagcgactttaccaaattgaagagcttgtcggttcaatattcgtgcgtatttcaaaatcagaaattatcaatctaaattacattgatcacttgaagttagaaacaaatggaatggtccatctcactatgaaaaaattattccacgctgttcaaaaaggtgcgttcactggtcttatgatttctgtcattacttcacttatttttttcaagggataa

SEQ ID NO: 410101 - DNA, 768 bp, Staphylococcus aureus
ttgactattttttcacgagcatacttttatttaccgtttttattaatttactttttgattcaaggttattccataatacaattagaaatattaatggcgtcttatggcattgcagcatttttattctctctatacaaagagaagtgttttaaaatttgtaacttaaaagattctaataaattagttgttagtgaaatattcaaaatcatcggtttattgttgttattatatcaaaatcaatatttaattttagtagtggcacaaatattattagggttaagttactcaatgatggcgggtgttgataccgcaataattaaaagaaatataacaaatgagaaatacgtacaaaataagtcaaatagctatatgttcctatcattattaatttcagggattataggtagttatctttatggaataaatattaaatggcctataataatgactggtatattttcaattctaacaattataattattcgatgcacattagttgaaaatagggaattaaatttaataggagaaacaaagggaaagataaagaaatttctaccggaagagaagttttggatattgcattattcttttttaagagcgttaatattaggattttttataggatttattccaattaatatatataatgatttaaaactgaataatttacaatttatttcagtattaacttgttacacagttatgggttatttatcttcacgttatttaactaaatacttgaactataagtttgtgtcagaaatttga

SEQ ID NO: 410102 - DNA, 675 bp, Staphylococcus aureus
atgaactatttcagatataaacaatttaacaaggatgttatcactgtagctgttggctactatctaagatatgcattgagttatcgtgatatatctgaaatattaagggaacgtggtgtaaacgttcatcattcaacggtctaccgttgggttcaagaatatgccccaattttatatcaaatttggaagaaaaagcataaaaaagcttattacaaatggcgtattgatgagacgtacatcaaaataaaaggaaaatggagttatttatatcgtgccattgatgcagagggacatacattagatatttggttgcgtaagcaacgagataatcattcggcatatgcgtttatcaaacgtctcattaaacaatttggtaaacctcaaaaggtaattacagatcaggcaccttcaacgaaggtagcaatggctaaagtaattaaagcttttaaacttaaaccggactgtcattgtacatcgaaatatctgaataacctcattgagcaagatcaccgtcatattaaagtaagaaagacaaggtatcaaagtatcaatacagcaaagaatactttaaaaggtattgaatgtatttacgctctatataaaaagaaccgcaggtctcatcagatctacggattttcgccatgccacgaaattagcatcatgctagcaagttaa

SEQ ID NO: 410103 - DNA, 204 bp, Staphylococcus aureus
gtgcgaaaacaagtgattattacaaaaacagtagttggctggtacaacattaaagatactcaacataatttaatgttaaatataccgccaaaagtatttgaacagtactttcctgatgttagtaaagatgttcaagttgtgtgtttagaaatggatttatcaaaaattacagaaattaaaaataagaaaaaagtaggtagttaa

SEQ ID NO: 410104 - DNA, 267 bp, Staphylococcus aureus; identical to SEQ ID NO: 410062

SEQ ID NO: 410105 - DNA, 2136 bp, Staphylococcus aureus
atgaaatctttaatattagctgaaaaaccatcagtcgcaagagatattgctgatgctttacaaataaatcagaagcgtaatggttactttgaaaataaccaatatattgtcacgtgggcgttaggtcatctagtgacaaatgcgacacctgaacaatacgataaaaatttaaaggaatggcgattagaaaaccttccaattatacctaaatatatgaaaactgttgttattggtaaaacaagcaaacaatttaaaacagtaaaagcgttaattttagataataaagtgaaagatattattattgcaacagatgctggacgagaaggtgaactagttgcaagattgattttggataaagttggtaacaaaaagccaatccgtcgattatggattagctcagttactaaaaaagctattcaacaaggttttaaaaatttaaaagacgggcgtcaatataacgatttgtattatgcagcgttagcgagaagtgaggcagattggattgttgggattaatgcaacgcgtgcactaacaacaaagtatgatgcacagctatccctgggacgtgttcagacaccaacgattcaattagtaaatacacgacaacaagagattaatcagttcaaaccacaacaatactttacattatcattaacggtaaaagggtttgattttcagctagaatcaaatcagcgatataccaataaagaaactttagaacagatggttaataatttgaaaaatgtcgatggtaagattaaatctgttgctactaaacataagaagtcgtatccgcaatcactgtacaatttaacagatttacaacaagatatgtatagacgttataaaattggacctaaagaaacattgaatacacttcaaagcttatatgagagacataaagtcgtaacctatccaagaacagattcaaactatttaacaactgatatggtagatactatgaaagaacgtattcaggcgacgatggcaacaacatataaagaccaagcacgcccattaatgtctaaaacattttcatcaaaaatgtcgatatttaataatcaaaaagtatctgatcaccatgcaattattcctacagaagtgagacctgtcatgtcagacttaagtaatagagaattaaagttatacgatatgattgtcgagcgttttttagaagctttaatgcctccgcacgagtatgacgcgataactgtaactttagaggttgcagggcacacatttgttttgaaagagaatgtaacaactgttttaggttttaaatctattagacaaggtgaatctattacagagatgcaacagcctttttcagaaggcgatgaagtgaagatttcaaaaacaaatattagagaacatgaaacaacacctccagaatattttaatgaaggttcgttattaaaagcgatggagaaccctcagaactttattcaattgaaggataaaaaatatgcgcaaactttaaaacaaacaggtggtatcggcacagttgcaacaagggccgacattatcgataaattatttaatatgaatgccattgaatcaagagacggtaaaattaaagtaacgtcaaaaggtaaacaaatattagaattagcaccagaagaattaacgtcgccacttttaactgcacaatgggaagaaaaattacttttaattgaacgtggtaaatatcaggcgaaaacattcattaatgaaatgaaagattttacgaaagatgttgtaaatgggattaaaaatagtgatcgtaaatataaacacgataatttaacaaccacagaatgcccaacgtgtggtaaattcatgattaaagttaaaactaaaaatggtcagatgcttgtgtgccaagatccatcttgtaagacgaaaaagaatgtacagcgcaaaacaaatgcaagatgtccaaactgtaaaaagaaattaacgttgtttggtaaagggaaagaagcggtatatcgttgtgtttgtggacattctgaaacgcaagcacatatggatcagcgtatgaagtctaaatcctctggtaaagtatctcgtaaagaaatgaaaaagtatatgaataaaaatgaaggtttagacaataatccgtttaaagatgcattaaagaacttgaatttatag

SEQ ID NO: 410106 - DNA, 309 bp, Staphylococcus aureus
atgaagaaggatacttatcaatcatacctcttttacaacagtgaagaacccgtgcataatggcttacgaattatagtttgtaaggaagaagagggatacatgcgccgagcacatgaaaaaaatcccctaacaactaaaagttgtaaggaagaagagggatacatgcgccgagcgcaagcaaaaaagcccctaacaactaaaagttgtaaggtaaaagagggatacatgcaccgagcacatgaaaaaaatcccctaacaactaaaagttgtaaggaaggagagggatacatgcgccgagcacatgcataa

SEQ ID NO: 410107 - DNA, 255 bp, Staphylococcus aureus
atgttgctatgcgaatctaaaatcatcaataaaaatcctaaatacagaattattaaatataatgatgagtacttaatgatcgatataataagcacttggattagtttattttttccatttatcaattggttcatcccaaaaagatatgtcaaaatcagtaaaaaagaatttgacgatttaaatattgttaaacctgctaaaaaaatgttttttggccagttgcaggtagctctgctttgctgggagttacattaa

SEQ ID NO: 410108 - DNA, 630 bp, Staphylococcus aureus
gtgctttgcgaatctagagtcattaatcaaaaccctaaatatagaattattaaatacaataatgaatatttcatggttgatttagtaagtacttggattgcttattttttgcccatgattaattggtttattcccaaaaagtacgcgaaaattagtagagaagaatttgaaagtttaaatattgtcaaacccgctaaaaataatactttctggcctgttgcaggatttgcagtgttattaacaaccttaacaagaaaatatatctatttgcttaacatccatttagaaaaagaaatagttatattaacatgctgtatgatacttctaggtgttttcgcattgtttatatatataaatacaaaattgaagttacatatttttgataaaaataaaagtaataacgaaaagatcatattaatacctacatttaaaaatatttgtttatccttatttgcttatatattatttggtggattgtcaacaatggctctgagtatgttagtaacttcatcccctcaaaatataatagaatttcttgctttaattggcatgactgcatgcttctttctactgaatatgtcatcggttttagataaaaatattcatgttattttaaaaacaaataagtag

SEQ ID NO: 410109 - DNA, 138 bp, Staphylococcus aureus
atggggccccaacatggagaatttcgaaaagaaattctacagacaatgcaagttggggtggggccccaacatagagaaattggatccccaatttctacaaacaatgccagttgggctgggccccaacatagaagctga

SEQ ID NO: 410110 - DNA, 501 bp, Staphylococcus aureus
atgactttcgaagaaaaattaagtgaaatgtacaacgagattgcaaataagattagcagtatgataccaatagactgggaaaaggtatatgtaattgcatatgtggacgatggaggtgggcaagttatattttattataccaagcccggaaatgatgagctgtgttattattcgagtatcgttgaagattataatgttttagaagaaatctttgatgatttatggatggatttatatgatttgtttgaggaattaagaaatttatttaaagaagaaggactagaaccatggacatcatgcgaatttgattttacaagagaaggtaaattaaaagtttcatttgattatatagattggataaattcagaatttggtcaaataggtcgacaaaattactataagtatagaaaatttggaattttaccagaaacggaatatgaaattaataaagttaaagaaatcgagcaatatattaatgagcaagaagaagctgaacaatag

SEQ ID NO: 410111 - DNA, 492 bp, Staphylococcus aureus
atgactttcgaagaaaaattaagtgaaatgtataatgaaattgcgaatgagatcagtgggatgataccggtagaatgggaaaaggtatatacaatggcttatataaatgaaagaaatggagaagttttctacaattatactgagccaagcagtgatgaattattttactatacgagcgtgttaaataaatataatataccaagatcagaatttatggactcagtatatgaattatataagcaatttgacaaattaagagagttgtttatagaagaaggactcgaaccatggacatcatgtgaatttgactttacaagcgacggtaaattaaacgtatcatttgattatatagattggataaatacagagtttgatcaattaggtcgtgaaaattattatatgtacaaaaaatttggggttataccagaaatggaatatgaaatggaggaggttaaacaaatcgagcaatatattaaagagcaagaagaatag

SEQ ID NO: 410112 - DNA, 699 bp, Staphylococcus aureus
atgaaatttacagcgatagctaaagcgatatttgtattaggaatattaacaacaagtgcaatgataacagaaaatcaatcggttaatgcaaaaggaaagtatgaaaaaatgaaccgtttatatgatacaaacaagttacatcaatactattcaggacctagttatgagttaacgaatgttagtggtcaaagtcaaggttattatgactctaacgttttgctttttaaccaacaaaatcaaaagttccaagtgtttttattgggaaaagatgaaaataaatacaaagaaaaaacgcatggcctcgatgtctttgcggtaccggaattagtagatttagatggaagaatatttagtgttagtggtgtaacaaagaaaaatgtaaaatcaatatttgagtctctaagaacgccgaacttacttgttaaaaaaatagacgataaagacggtttttctattgatgaatttttctttattcaaaaggaagaagtatcattgaaggaacttgatttcaaaataagaaaactgttaattaaaaaatacaaattgtatgaaggggcagctgataaaggtagaattgttattaatatgaaagatgaaaataagtatgaaattgatttaagtgataaattagatttcgagcgtatggcagatgtcattaatagtgaacaaattaaaaacatcgaagtgaatttgaaataa

SEQ ID NO: 410113 - DNA, 123 bp, Staphylococcus aureus
atgaaaatgttgtttttcctatattttttctttttaaaattatataatcatttcctaactcaacctttgataggagatcaaatgattgtgactcaagaacagttaaaagatattatgaagtag

SEQ ID NO: 410114 - DNA, 1674 bp, Staphylococcus aureus
atgaataaattaacaataataagtttatcgatacttgataataaagaaaaaaaagcaaataagtttgaattttcagaaaaatctaatttgataattagcgaaaggaacggggaagggaaatctagccttataaaatcaatacagtattgtttaggatcaaatttaaaagcgtttccaaaaggatgggactacaaaaattatgtttttcaattagaaatagttattgataaaaataagatattgattcagagatataataatataataacagttttagatgatgggaaaattaaaaagtttggatacttaaaagactattctgattggtttcaagataagatggagatgaatttaaaattagttagtaagaataaaaatacttctagtttagcttcactggaagctattttgagcccattgtatattgatcaagataaatcatgggatggaattctatataagaactcatttgagggtttagcacaatataaaagtcaaagttttcctaaagaagtatttgaatactatttaggtatttctaataatataatgaatgataaaataaataaactcaataaatataaagagaaatcgaaagaaaaaaaagtgaaaattgaacaagtagattctgtatataaaaattatagttctcaaaaaaacatttcgaaaacgataccaaaagaatttgaagagtttaaaaaacaagtagatttctatattaaagaaacagatcgattttctcaaatgatcactcaaaaaacagacaagttatctaaagaaaaaatgaagcttgatattttacaacaagacagggaagaattgagaaaattattaacaaaaacaaaaaaaagattatcagaagtaagttatgaatgtacttattgtcattcagtactaacaagaggccaatccttaacaaggatggaattagatgataataagatagaaatattattacgaaaagatagtataaatcaagaaataataaaaacagaaaacaatattcaaaagaaattaatagaaattcaaaatcttgagaatcaatttgaactttatcatgaacgtctttcagaattaaagcaattatcgaatattgataattatgtaaatcaaaaagtattacaagaattagaaatattaaaaattgaagaagttattgaattgaaagaaatagatcaggaaataaaaagcttgaaaaatgaaatttcaaagcttaaaaagagtttaaaaactgatttagaaaatattaatcaaaaatttaaaaaactaaaaaataaaatatcactacaaatggaaactacgggactgtctgaaaaaaaagtattaaactttaataaattaaatggtagcggaacatttctaaataaagatttattaacattatatctggtttatatgaaccttctagatagtatggaagattttggtttgccatttgctattgattcatttgtaaaaaatgagacagactcaatagcattagaaaaaatgtttggtgcaattgataaatattttttgacattaaataaccaaacatttttttcaataataaaagaaaatttaaagtttatagaaaatcctgttaatgagataaaaatagagagacctttattaaaagagaaatttttttctgatatagagaaagaactaattcaaaatttaaatattttatag

SEQ ID NO: 410115 - DNA, 936 bp, Staphylococcus aureus
atggtaagagaaaatggtggagcaaatgctcaaagagggtttaactatcaaaattgtgtaatttctttagtagcaattagaaattataagaaaccaaatttcaaaatttatgttgaagcagatgaagatttcgaagtaaattatggcgatgattatcatgcatgtatacaagttaaaggagaaaaaaatttaacctttaacaagcttttaaaaggtgaaaaagggaagctttcaatatttgaaaaaaatctttcatctgggaaatcagattctgtatataaaatagttgtttttagctttagccgaaaagatatggaaagcatgcaggaacaaacagatgaagaagaactgttttcaaactcttggttactatcaaatgaccaaaaaaataaagtgaataatgatcgtgttgaaaatttttcattggtaaaaacagcatttgataacgatatgaagaatgctaggatatatttaaagggagaattagtacaacaaaatatagttgttgagggtagagccgaagtaatacttaatgaattatttcaacaaattcttcaaaagtctgaaaaaaaagttcaaactgaacaagataaagaactgaaaaaaataacgtcaaaagaattagatttgattttacagaaaataactgcaaaagctcgttttgaaaaagaattaaaaaatttaagatttaattcgttgaaagaagagaaaattaaaaaggaagagaagaaaataattttagaatacatggctgtaaaaaaagctgttataagatttttgaaatctgatgaagaaaagttggaaaataattccattagtacattaatatctgaaacatttaatttgtcagaaatgaattgtttatcagagaatactaaatatgccattgctatatcggcttattgcgatattttagaggagattgcatatgaataa

SEQ ID NO: 410116 - DNA, 1287 bp, Staphylococcus aureus
atgttagacattagattattcagaaatgagcctgacacagttaagagcaaaattgaattacgtggagatgatccaaaagttgtagatgaaattttagaattggatgagcaacgacgtaaattaattagtgcaacagaagaaatgaaagcacgtcgtaataaagtaagcgaagaaatcgcattaaaaaaacgtaataaagaaaatgctgatgatgtgattgctgaaatgcgcacattaggtgacgatattaaagaaaaagatagtcaattaaatgaaattgataataaaatgacaggtatcctttgtcgtattccaaatttaataagtgatgatgtacctcaaggtgaatctgatgaagataacgttgaagttaaaaagtggggtacaccacgtgagttttcatttgaaccaaaagcacattgggatattgtagaagaattgaaaatggctgattttgatcgtgcagcaaaagtttcaggtgcgcgttttgtatatttaacaaatgaaggtgcgcaattagagcgtgctttaatgaactatatgattacaaaacatacaacacaacatggttatacagaaatgatggtaccacagcttgtgaacgcagatacaatgtatggtacaggtcaattacctaaatttgaagaagatttatttaaagtagaaaaagaaggattatatacaattccaactgctgaagtaccattaacgaatttctaccgtaatgaaattattcaaccaggtgtacttcctgaaaaattcactggtcaatctgcatgtttccgtagtgaagcaggatcagcaggtagagatacaagaggattaattcgtttacatcaattcgataaagtggaaatggtacgttttgaacaacctgaagattcatggaatgctttagaagaaatgacaacaaacgcagaagcaattctagaagagttaggtttaccataccgtcgtgttattttatgtacaggtgatattggatttagtgcaagcaaaacatatgatttagaagtttggttaccaagctacaatgattataaagaaattagttcatgctcaaactgtacggatttccaagcgcgtcgtgctaacatccgcttcaagcgtgacaaagcagctaaaccagaattagcacatacattaaatggtagtggtttagcagttggacgtacatttgctgctattgttgaaaattaccaaaatgaagatggaacagtaacaattccagaagcattagtaccatttatgggtggtaaaacacaaatttcaaaaccagttaaataa

SEQ ID NO: 410117 - DNA, 1515 bp, Staphylococcus aureus
atgactttatatttagatggtgaaacactaacaattgaggatattaaatcatttttacaacaacaatcaaagattgaaattattgatgatgcgttagaacgtgtcaaaaaaagtagagcggtagttgaacgtattattgaaaatgaggaaacggtttacggtattactacaggttttgggttatttagtgatgtacgtatagacccgacgcaatataatgaattacaagtgaatctgatacgctcacatgcctgtgggctaggtgagccattctcaaaagaagtagcattagtcatgatgattttacgattgaatacattattaaaaggtcattcaggtgccactttagaattagtgagacaattacaattttttataaatgaacgtattataccgataatcccacagcaaggctctctcggtgcatcaggagatttagcgccattatcacacttagcattagcattaattggtgaagggaaagtattgtacagaggggaagaaaaggatagtgacgatgtattaagagaattaaatagacaacctttgaaccttcaggctaaagaaggtttagcattgattaatggtacgcaagctatgacagctcaaggtgtcattagttatatagaagcagaagatttaggttaccaatctgaatggattgctgcattaacgcatcagtctcttaatggcattatagatgcatatcgacatgatgtgcacgcagttcgtaattttcaagaacagattaatgtggcagcgcgtatgcgtgattggttagaaggatcaacattaacgacgcgacaagcagaaatacgtgtacaagatgcatatacgttgcgttgtataccacaaatccatggcgcgagttttcaagtattcaattatgttaaacagcaattagaatttgaaatgaatgcggctaatgataatccacttatatttgaggaagcaaatgaaacgtttgttatttcaggtggtaacttccatggacaacctattgcttttgcattagatcatcttaaattaggtgtaagtgaattagcaaacgtatcggaacgtcgtctagagcgactagtaaatcctcaattaaatggtgatttaccagcatttcttagtccagagccaggattgcaaagtggcgcgatgattatgcaatatgctgctgcaagtctcgtttctgaaaataaaactttagcgcatccagcgagtgttgattctatcacttcatctgcgaaccaagaagatcacgtatctatgggaactacagctgctagacatggttatcaaattattgaaaatgcaagacgtgtgctggcaatcgaatgtgttattgcattacaagcagcagagttaaaaggtgttgaaggtttatcaccaaaaacacgtcgtaaatatgaggagtttcgaagtatcgtgccatccattacacatgaccgtcaatttcataaagatattgaagcggttgcacagtatttaaagcaatcaatttatcaaacgactgcatgtcactaa

SEQ ID NO: 410118 - DNA, 813 bp, Staphylococcus aureus
atggaaacgttaaattctattaacattcctaagcgtaaagaagattcacataaaggtgattatggcaaaattttattaattggtggatctgctaacttaggtggtgccattatgttagcggctcgtgcatgtgtatttagcggtagtggtttaatcactgtagctacacatccaacaaatcattcagcattacattctcgttgcccagaagcgatggttattgatattaatgatacgaaaatgttgacgaaaatgattgaaatgactgacagtatactaattggtccaggtcttggcgttgatttcaaaggaaataatgccattacattcctactacaaaatatacaaccgcatcaaaatttaatcgtagacggcgatgcgattacaatctttagtaaactgaaaccgcaattacctacatgtcgtgtgatctttacaccacacctcaaagaatgggaacgattaagtggtattcctattgaggaacagacatatgagcgtaatcgtgaagcagttgatcgtttaggcgcaactgttgtacttaaaaaacatggtactgaaattttctttaaagatgaagactttaaattgacaatcggtagcccagcaatggcgactggtggtatgggcgatacacttgctggtatgattacaagttttgttggtcaatttgataacttaaaagaagcggttatgagtgccacatatacacatagttttattggcgaaaatcttgcaaaagatatgtatgtggtgccaccatcaagacttatcaatgaaataccttacgcaatgaaacaattagaaagttag

SEQ ID NO: 410119 - DNA, 684 bp, Staphylococcus aureus
atgattcaaaataccttcggttatttaccagagtatattgtagctgatgcaggttatggtagtgagcaaaactatatggctattatagatgactttaataaaacgccacttattacgtatggcatgtttattaaagataaaacgagaaagtttaaaagtgacatttttaacactcaaaattggaaatattacgaacttaatgatgaatttatatgtcctaataacaaaagaataggttttaaaagatatgcataccgtaatgatagatatggttttaaacgtgacttcaagctatatgaatgcgatgactgttcagcatgttctttgaggcaacaatgcatgaaaccaaattcgaaatccaataagaaaatcatgaagaattataattgggaatactttaaagcccaaattaatcaaaagctttctgaaccagaaacgaaaaaaatctatagtcaaagaaaaattgatgtagagcctgtttttggatttatgaaggctattttgggtttcactcgaatgtcagttcgaggaataaataaagttaaacgagagctaggttttgtattaatggcacttaatataaggaaaatagcagctcaacgagctgtacattataaaatacatatcaaaaaagctgatttctatcaaataattaatagaaatcagcttttttacattgcctaa

SEQ ID NO: 410120 - DNA, 3477 bp, Staphylococcus aureus
atgacattacatgcttatttaggtagagcgggaacaggtaagtctacgaaaatgttgaccgaaataaaacaaaaaatgaaagcagatccgcttggagatccaatcattttaattgcgccaactcaaagtacatttcaattagaacaagcctttgtcaatgatccggaattaaatggtagtttaagaacagaagtgttgcattttgaacgattaagtcatcgtattttccaagaagttggtagttatagcgaacaaaagttatctaaagctgcaacggaaatgatgatttataacattgttcaagaacaacaaaagtatttaaaactttatcaatcacaagcaaaatattatgggtttagtgaaaaattaacagaacaaattcaagattttaaaaaatatgcagtaacgcctgaacatttagaacactttattgctgataaaaatatgcaaactcgaactaaaaataagttagaggatattgctttaatataccgtgagttcgaacaacgcattcaaaacgagtttattacgggtgaggattcattacaatattttattgattgtatgccgaaatcagagtggctaaaacgtgctgatatatatattgatggttttcacaacttttcaacgattgagtatttaataatcaaaggattaattaaatatgcgaagagtgtcacaattatattgacgacagatggtaaccacgatcaatttagtttatttagaaaaccatcggaagtgttacgacatattgaagaaatagcaaatgaactcaatatttctattgaacgtcaatatttcaagcaattatatcgcttcaataatcaagatttaaagcatcttgaacaagaatttgatgcacttcaaatcaatcgagtggcatgtcaaggtcatatcaatattttagaatctgcgactatgagagaggaaataaatgaaattgcgcgacgtatcatcgttgatattcgtgataagcaattacgatatcaagatattgcaattttatatcgtgacgagtcttatgcttatttatttgattccatattaccgctttataatattccttataacattgatacaaagcgttcgatgacacatcatccggtcatggaaatgattcgttcattgattgaagttattcaatctaattggcaagtgaatccaatgctacgcttattgaagactgatgtgttaacggcatcatatctaaaaagtgcatacttagttgatttacttgaaaattttgtacttgaacgtggtatatacggtaaacgttggttagatgatgagctatttaatgtcgaacattttagcaaaatggggcgtaaagcgcataaactgaccgaagatgagcgtaacacatttgaacaagtcgttaagttaaagaaagatgtcattgataaaattttacattttgaaaagcaaatgtcacaagcggaaactgtaaaagactttgcaactgctttttatgaaagtatggaatatttcgaactgccaaatcaattgatgacagagcgagatgaacttgatttaaatggtaatcatgaaaaggcggaggaaattgatcaaatatggaatggcttaattcaaatccttgacgacttagttctagtatttggagatgaaccaatgtcgatggaacgttttttagaagtatttgatattggtttagaacaattagaatttgttatgattccgcaaacattggaccaagttagtattggtacgatggatttggctaaagtcgacaataagcaacatgtttacttagttggaatgaatgatggtacgatgccacaaccagtaactgcgtcaagcttgattacagatgaagaaaagaaatactttgaacagcaggctaatgtcgagttaagtccaacatcagatattttacagatggatgaagcatttgtttgttatgttgctatgactagagctaagggagatgttacattttcttacagtctaatgggatcaagtggtgatgataaggagatcagcccatttttaaatcaaattcaatcattgttcaaccaattggaaattactaacattcctcaataccatgaagttaacccattgtcactaatgcaacatgctaagcaaaccaaaattacattatttgaagcattgcgtgcttggttatatgatgaaattgtggctgatagttggttagatgcttatcaagtaattagagatagcgatcatttaaatcaaggtttagattatttaatgtcagcattaacgtttgacaatgaaactgtaaaattaggtgaaacgttgtctaaagatttatatggtaaggaaatcaatgccagtgtatcccgttttgaaggttatcaacaatgcccatttaaacactatgcgtcacatggtctgaaactaaatgagcgaacgaagtatgaacttcaaaactttgatttaggtgatattttccattctgttttaaaatatatatctgaacgtattaatggcgattttaaacaattagacctgaaaaaaataagacaattaacgaatgaagcattggaagaaattttacctaaagttcagtttaatttattaaattcttcagcttactatcgttatttatcaagacgcattggcgctattgtagaaacaacactaagcgcattaaaatatcaaggcacgtattcaaagtttatgccaaaacattttgagacaagttttagaaggaaaccaagaacaaatgacgaattaattgcacaaacattaacgacaactcaaggtattccaattaatattagagggcaaattgaccgtatcgatacgtatacaaagaatgatacaagttttgttaatatcattgactataaatcctctgaaggtagtgcgacacttgatttaacgaaagtatattatggtatgcaaatgcaaatgatgacatacatggatatcgttttacaaaataaacaacgccttggattaacagatattgtgaaaccaggtggattattatacttccatgtacatgaacctagaattaaatttaaatcatggtctgatattgatgaagataaactagaacaagatttaattaaaaagtttaagttgagtggtttagttaatgcagaccaaactgttattgatgcattggatattcgtttagaacctaaattcacttcagatattgtaccagttggtttgaataaagatggctctttgagtaaacgaggcagccaagtggcagatgaagcaacgatttataaattcatccaacataacaaagagaattttatagaaacagcttcaaatattatggatggacatactgaagttgcaccattaaagtacaaacaaaaattgccatgtgctttttgtagttatcaatcggtatgtcatgtagatggcatgattgatagtaagcgatatcgaactgtagatgaaacaataaatccaattgaagcaattcaaaatattaacattaatgatgaatttgggggtgagcaatag

SEQ ID NO: 410121 - DNA, 162 bp, Staphylococcus aureus
ttgtacaaaatattaataaaaattgaatataatcatgaaaacaatatgcaaaagttaatcatgactaaaatccctttcaatgaagcgaagcatggtaataaattaagtttacaatgtttattgttaagtattgaaggggatttcacttattattatatttaa

SEQ ID NO: 410122 - DNA, 309 bp, Staphylococcus aureus; identical to SEQ ID NO: 406801

SEQ ID NO: 410123 - DNA, 804 bp, Staphylococcus aureus
atgaagtataaaacagagagacgtgaagcgatgggatatttaaaaaggtttgcattgtacataagcgttatgattttaatatttgcgatagcaggttgtggcaaaggtaatgaaacaaaagaagattcaaaggaagaacaaatcaaaaagagctttgcgaaaacattagatatgtatccaattaagaatctcgaggacttatatgacaaagaaggatatcgagatagcgaatttaaaaaaggtgacaaagggatgtggacgatatatacagatttcgccaaaagtaataaaccgggtgaattggatgatgaaggtatggttttaaatctggataggaatactagaacccctaaaggccattattttgttactacattttaccggaatggtaaactaccagatgaaaagaattataaaattgaaatgaaaaataataagattattttattagatgaagtaaaagatgataagctcaagcagaaaatagaaaactttaaatttttcggtcaatatgcaaatcttaaagaattgagaaaatataataatggtgatgtttcaattaatgaaaatgttcctagttatgatgttgaatacaaaatgagcaataaagatgaaatagttaaggaattaagaagtcgttataatatttcgactgaaaaatcacctatattaaaaatgcatattgatggggacctgaaaggcagttctgtaggttatagaaagttagaaattgacttttcaaaacgtgaaaacagcaaattatcagtcattgaatttttaagttataaaccagcgaaaaaatag

SEQ ID NO: 410124 - DNA, 780 bp, Staphylococcus aureus
atgaagttttttcagaaattatacatatttatattaattttaatcgtattaatggcaggatgcgaaagtaataatgatgacaaagattcaaaagaagaacaaatcaaaaagagctttgcgaaaacattagatatgtatccaattaagaacctagaggatttatacgacaaagaaggataccgagatggcgaatttaaaaaaggcgataaggggacgtggacgatatatacagatttcgccaaaagtaataaacaaggtggattgagtaatgaaggtatggtcttatacttagatagaaatacacggacagcaaagggacattattttgttaagacattttatgaaaaggataaattcccagatagaaaaaaatataaagttgaaatgaaaaataataaaattatcttattagacaaggtagaagatccaaaactaaaaaagagaatagaaaactttaaatttttcggacaatatgcaaacctaaaagaattgaaaaactacaacaatggtgatgtctcaattaatgagaatgttccaagttatgacgcaaaatttaaaatgagcaataaagatgaaaatgttaagcaattaagaagtcgttataatattcctactgacaaagcaccggtattaaaaatgcatattgatggtaatttgaaaggaagttctgtgggttataaaaagttggaaattgacttttcaaaaggtggaaaaagcgatttgtcagtaatagattctttgaatttccagccggcgaaggtagatgaagatgatgaatga

SEQ ID NO: 410125 - DNA, 816 bp, Staphylococcus aureus
atgatggagtatataaaaaaaattgctttgtacatgagtgtattacttttaatcatttttattgggggatgtggaaatatgaaagatgaacagaaaaaagaggaacaaacgaataaaacagattcaaaagaagagcaaatcaaaaagagttttgcgaaaacgttagatatgtatccaattaagaatctcgaggatctatatgacaaagaaggatatcgagatggtgagtttaaaaaaggcgataaaggtacgtggacgatatcaacagattttgctaaaagcaacaaaccgggtgaaatggatagtgaaggtatggtactgcatttgaatagaaatacgaggacggcaactgggtattatactataagaacaacttatgatgaagtgggtaagatgacacgcgaaaaaaattatcgtgttgaacttaaaaataataagatagtacttttagataaagtagaagatgaaaaccttaaacataaaatagagaattttaaatttttcgggcaatatgccgattttaaagacttgaaaaattataaaaatggaagaataaccatcaatgaaaatgttccatattatgaggcagagtacaaaattaataatagtgatggaaatgtaaaaaaacttagagaaaattacccaattacagccaaaaagtctccgatattaaaactgcatatagacggagatattaaaggtagctcagttggatataaacagatagaatacaagttttctaaggataaagaggatgagacttttatgagtgattttctaaatttcggaccaactaaaggtggaaataatgactaa

SEQ ID NO: 410126 - DNA, 1323 bp, Staphylococcus aureus
atgactaaacaatttgaagtggattatggcaaactaaatagtgaaacagaagcaacgagtgctgtttcaaaattagcttatgaggttgaaaatgcaaataataataaaatatcaaatcgagaattgaaaacaaaatttgaagtattaaaaaaacggggaaaattcccttctaatcttgagtatatagatagtcacacagataaaaaacacggtgtgacagcatcagctttcctaaacaaagatactgggaaagtgattattggcatgactggtacaaatttcaaaaaggaagctcttgcgaagcaacttttgctaccagattttgcaacaacaaaacaggatagaattgactcagctgagactaaaaaggatttaatttccgatgcccaaattggaacattccctccttctgataacagtaaacattttgaagaaacacaagagttcatcaaaaaaataaaaaataagtatgatattgattttataactgggcattcattaggtggtagagaagcggtaatattaggaatgagtaatggtattccgaatattgttgtttataatccagctcctatagcagctaggtatttaaatcataactcccgattatttaaactatataaaggttataaaggtaacattactagaattgtatctgataaggattggttaactaatattataaagggatatacgaattatacttatttcggtaatgaaattgtggttcataacggcaagtcacatgatatggctggatttttaactgaacaagaacaaaaagctataaaaaaagaacttaaaaaagtacaaggttatgtagaagaaaataataagtcgttcgtaaaaaattctaataatgctatgtctaaattagctagtatagaattacttagagccaatatgatgactacaaatggtggttggttatcttcttcgcaacagaaagttttagaaagtttaacagctttaacaattgcgcagtcattcaatcaactgatagaggacgaaattaatcaaatcaaaaaaatgtataatgaaaagaaaaagaaatttgaaaaaaattgggaagacgcgcaaaaagctggaaacgctgtaggtaaagatataaccgtgaatgaagtgctagaagctttagatgaaggtcatgtgaatgaaagtagtatggtaggggaacctaaacaaatgatatctgcaaaagaaaaacaactttcaacaataggttcatctatatcaaattatattacaagagttagatctagtattaatgaaatcgttgataaagatcaagcacttgcatcgcaaataggtggattactatga

SEQ ID NO: 410127 - DNA, 324 bp, Staphylococcus aureus
atgatgtttaatcaaattaataataaaaatgaattagaagtatcatataattctgagaaaaaacgtatagagaatgaactgcaaaatttgaatgaacttagacacagaactcgaaaagaaaatgaacgtagttatgatgtttttcaatatttgaaacacgaaatgaattatagtgaagatgcccaaaggaaaatgacgagaaatatagaagcgtatgagcaagaaatcaatgagataattagaaagcaagaatggaaattagaagaatataaagaagacttaaaaaaatcttatgaaaagcagttagataaactaagtgattga

SEQ ID NO: 410128 - DNA, 309 bp, Staphylococcus aureus
atgagtccaatgataggaccagttataggaccggatataggaccggatatagtaccggatataaagtcaatgataaagaatgctcaaaaagaaaatattcgcacagttattgcacctgaacataagcataaatacaaagatattgaaaacggattaaaaggtgaagaaaaagtattaattgaacaaatggcacagcattgcgaggcttttaaagctaattttaaaggcgcagctcaaggagattgggttaaaagtgctatgtctgagattgacagcattaaggatgacctgaaaaaaattaatagctaa

SEQ ID NO: 410129 - DNA, 195 bp, Staphylococcus aureus
atgctatttgtcattttagttttatatatcattggtattgcatttattctactcagtgtttttggttcaaagactgaaggattatctacgaaacatacattatataccattggtagtgctattataacgattgctattttcatttcaattggctatgccattcaatacttaactgcagcgctttatggtttgtaa

SEQ ID NO: 410130 - DNA, 3567 bp, Staphylococcus aureus
atggtttatttaaaatcaatagatgccattggatttaagtcttttgcagatcaaaccaatgttcaattcgataaaggtgtaactgcaattgttggtccaaatggaagcggtaaaagtaatattacagatgctattaaatgggtgttgggtgaacaatcggctaaatcattacgtggctcaaaaatggaagatattatcttctcaggtgcagaacatcgcaaagctcaaaattatgctgaagtacagttaagattagataatcattctaaaaagctcagtgttgatgaaaacgaagttattgtaacaagaagattgtatcgaagtggtgaaagtgagtactacataaataatgaccgtgcaagattaaaagatattgccgatttatttttagattctggattgggaaaagaagcatatagcattatctcgcaaggtagagttgatgaaatactaaatgctaaaccaattgatagacgtcaaattattgaagaatcggctggtgtacttaaatataaaaaacgtaaagctgaatcattaaataaacttgaccaaacagaagataatttaacgagagtagaagacattttatatgatttggaaggtcgtgtagaacctctaaaagaggaggcagctatagctaaagaatataagacactttcacaccaaatgaaacatagtgacattgtagttacagtgcacgatattgatcaatatacaaatgacaatagacaattagatcaacgtttaaatgatttacaaggtcaacaagcaaataaagaagctgacaagcaacgtttaagccaacaaattcaacaatataaaggtaaacgtcatcaacttgataatgatgttgaatcgcttaattatcaattagtaaaagctacggaagcctttgaaaaatatacgggacaattaaatgttttagaagaacgtaagaaaaatcaatctgaaacaaatgcacgatatgaagaagaacaagaaaatttaattgagcttttagaaaatatatcaaatgagatttctgaagctcaagatacttataagtctctgaaaagtaaacaaaaagaactcaatgctgtcattcgtgaacttgaagaacaactatatgtttcagacgaagcacatgatgaaaaattggaagaaattaaaaacgaatactatacattaatgtcagagcaatcagatgttaacaatgatattcgttttttaaagcatactatagaagagaatgaggctaaaaaatcaagactagattctcgattagttgaagtttttgagcaattgaaagatattcagggtcaaataaaaacgacaaaaaaagaatatcaacagaccaacaaagaactttctgctgtagataaagaaattaaaaatatagaaaaagatctcactgatacaaaaaaagcacaaaatgaatacgaagagaaattgtatcaagcatatcgatataccgaaaaaatgaaaacacgtattgatagtttggcaacgcaagaggaagaatatacttattttttcaatggcgtcaaacatattttgaaagctaaaaataaagaattaaagggtattcatggtgcagttgcggaaattattgatgtgccatctaaattaactcaggcaattgaaacagcattaggtgcttcattacaacatgtcattgtagattcagaaaaagatggacgccaggctattcaatttttaaaagaacgtaatttaggtcgtgcgacgtttttaccattaaatgttatacagagtagagtggtagcgactgatattaaatctattgctaaagaggcaaacggatttattagtattgcttcggaagcagttaaagtagcaccagaatatcaaaatattatcgggaatttattaggtaatacgattatcgttgatcatttaaagcatgcaaatgaattggcacgtgcgattaaatatcgaactcgtattgttactttggaaggtgatattgtaaatcctggtggttctatgactggtggtggcgctcgtaagtcaaaaagtattctgtctcaaaaagacgagttgacaacaatgagacaccaattagaagattacttgcgtcaaacagaatcatttgaacaacaatttaaagagttgaagataaaaagtgatcaattaagtgaactgtattttgaaaaaagtcaaaagcataatacacttaaagagcaagtgcatcattttgaaatggagctcgatagattaactacacaagaaacacaaataaaaaatgatcatgaagaattcgaatttgaaaaaaatgatggttatacgagtgacaaaagtcgacaaactttgagtgaaaaagaaactcatctagaaagtattaaagcatctttaaaacgactagaagatgaaattgaacgctacacaaaactttctaaagaaggtaaggaaagcgttactaaaacacaacaaaccttacatcagaaacaatctgatcttgctgtggttaaagagcgtattaaaacacaacaacagacaattgatcgattaaataatcaaagtcaacaaactaaacatcaattaaaagatgttaaagaaaaaattgcattctttaattcggatgaagtgatgggcgaacaagcttttcaaaatattaaagatcaaattaatggtcaacaagaaacgagaacacgcttatctgatgaattagataaattgaaacaacaacgtattgagttgaatgaacaaatcgatgcgcaagaagctaaactacaagtttgtcaccaagatattttagctatcgaaaatcactaccaagatattaaagctgaacaatcaaagctagatgtattaattcatcatgcgatagatcatttaaatgatgaatatcaattgactgttgaacgtgcgaaatctgaatatacgagtgatgaatcgattgacgcattacgtaaaaaagttaagttaatgaagatgtcgattgatgaactaggtcctgtaaacttaaatgcaattgaacaatttgaagagttaaatgaacgttatacatttttaagtgaacaacgtacagatcttcgtaaagctaaagaaacattagagcaaattataagtgaaatggatcaagaggttactgaaagatttaaagaaactttccatgctattcaaggacattttacagctgtgttcaaacaattgtttggtggaggcgatgcagaattgcaattaactgaagccgattatttaacagctggtattgatattgtggtacaaccaccgggtaaaaaattgcaacatttatcgttactgagtggtggtgagcgtgcattaactgctattgctttactatttgcaattttaaaagtaagatctgcaccttttgttatattagatgaggttgaagctgcactagatgaagcaaatgttattagatacgcaaaatatttaaatgagttatcagacgaaacacaattcattgttattacacaccgtaaaggaacaatggaatttgcagataggttatacggtgtaacaatgcaagaatcaggtgttactaaacttgtgagtgtgaatttaaatacaatagatgatgtgttgaaggaggagcaataa

SEQ ID NO: 410131 - DNA, 132 bp, Staphylococcus aureus
atgaggttattgttgctaatattaataagttatattggtggaacatgtgcgttagaagtggtaccattcatgtccttacgagataaattaactaaacacgtatgtggtgaaggctactatgattttttataa

SEQ ID NO: 410132 - DNA, 420 bp, Staphylococcus aureus
atgaacaaaaaacatgtttttgtaattattggtgtcatattatgtatatgtatagttgctacagtcatttatttaaaagtgaaatatgacgaaaaagaaaaacaaaaagcaatttactataaagaacaacaggagcgtattacactttatctcaagcataatactaaagaaccaaacacgattaaatctgtgcatttcacaagtttaaaaagaggacctatgggcgatgccgtaattgaaggttacatcaatgaaaacaaaaaagctgattttgttgcatatgggtctccagaacataattatcaatttggtggagatatgatagaaagtgaaaaattaagtgaattactaaaaccagcacaggaattaaaatcaccagaaaaaatcaaagaagaattagacaaaaaagaaggccactag

SEQ ID NO: 410133 - DNA, 192 bp, Staphylococcus aureus; identical to SEQ ID NO: 404921

SEQ ID NO: 410134 - DNA, 795 bp, Staphylococcus aureus
atgattcattcaaaaaggttaaaattgtgtctatgcctgataatactatctgtttttataggcgcttgcggaatgaaaaaagaagaaagtagtaaagataaacaaattaaagaaaatttcaacaaaacattgagcttgtatccaaccaaaaatattgaagacttttatgataaggaaggttttcgagatgaagagtttgaaaagggtgacaaaggcacttggataattcactctaaaatgattattgagacaaataatagcaatatggaatctagaggaatggtgctctatataaatcgtaatactagaacaacgaaaggtaattttgttgttagagaaataaccgaggatagtaaagggtattcacatagtaaagatacaaaatatccagtgaaaatggaacataatagaatcattccaaccaaaccgatagctgatgataaattaagaaaagaaattgaagactttaagttttttgtacaatacggtgactttaaagatattaatgattataaagatggtgacatttcatataatcctaatgttccaagttattccgcaaaatatcaattgaaaaacgatgactacaatgtgaagcaacttcgaaaaagatataatattccaaccaacaaagctccgaaattattaataaaaggtgatggagatttaaaaggttcatcagtaggatcaaaaaatctagaatttacctttgtagaaaataaagaagaaaacatttattttacagattctgtacaatatactccaagtgagggtacaagttatgagtcaaactga

SEQ ID NO: 410135 - DNA, 399 bp, Staphylococcus aureus
atgatgattcactcaagaaagttgaggatttggctgtacttagtattattagctgtttttattagcgcgtgtaacgtgaaagaagataaacaaattaaagaaaatttcaacaaaacattgagtttatatccaaccaagaatctcgatgatttttacgataaggaaggctttcgagatcaagaatttgataaaagagataaagggacttggattattaattctggaatgaatatccaattaaaagggggagccttaaaatccagagcgatggtactttacatcaatcgtaacactagaacagctaagggatattttttaataagtgagacaacagaagacaaaaaaggatacgtccataataaagataaaaaataccctgtcaagatggaacataattaa

SEQ ID NO: 410136 - DNA, 1638 bp, Staphylococcus aureus
atggataaagaattatggatagaaagagctaatgatagtttagttaaacatttttatgagcagcaatctgacattgaacagcgagaaggttttgaaagtaaattaacgtttggtactgcgggtatacgcggaaaattcggtcttggtgaaggtcgacttaataagtttactattgaaaaattggcattaggtttagcgcgttatttaaatgcccaaacaaacaatccaacaatagtcattcattatgatattagacatctttcaactgaattcgcccaaatcattgctaatgtattagcaaaccatcaaataacagtttatttacctgatacatataaaacgacaccggaattatcgttcgcggtgcgcaatcttaatactactgctggcattatgattacagcaagtcataatccgaaagactataatggcattaaagtatatggttctgatggcgcgcaactatcgactgatgcttctgagcttgcaagtcgttatatcgaagaagttggcgatccattacagattgatatacctatttcaaaacaaaatacatcttatatcaagtcttttccgaaatctgtaactgatgactatatgaaacacattcaaaatatgattggctatattcctaaatctgatttacaagttgtgttcactagtttgcatggtacaagtgttccgattgtacctgagttattacaatctttgaatttcaatcaatttaatcttgtagaagcacaatgtaaacctgatccgaatttcagctcagttcaaagtgctaatcctgaagatcatcgcgcttttgatcaagcagtcgaacttgcaaataaaaatcatgcagacttattaatatcaactgaccctgatgcagatcgacttggtattgctgaacgagatgcacacggtcatatcacatattttaatggcaaccaaattggtgcgctgttacttaattatcgtattcaacaaacgtctcaattacgtcaccgcttaatgattcaatccattgtaagtagtgagttaacaaagtcattagcacgctataataatgttgaatacaaagaggtgctgacgggctttaaatttattgctcaggaaataagacaactggatgatcatcaaaatatgattttcgcatttgaagagagttacggttttctatcagagccttttgtacgtgataaagatgccgtacaaattgtgccactcattataaaatacgcttctgagttaaaattatatggcaaaacattgaaagatgaattagaacagatttatcaaactgttggtagacatgaggatacattattctcgcatacgctagaaggattagaagggaaaaagaaaattaatgcaataatgaccaaattccgttcaaatccaccgcaagagattcaaggactgaaagtgaaagcaattgaagattatttaactagcgaggtttatcatttggataaagatacaacgtcacagattaattctcctaaatcaaatgttattcgtgtcttatttgacgaaggatttatcgctttacgtccttctggtactgaacctaaaattaaattatatgtgtcgttaaaatgtccgaattttgatgatgtagctcaaaaaattaatgcgatgatttttagctaa

SEQ ID NO: 410137 - DNA, 1176 bp, Staphylococcus aureus
atgtttattggcaagaatttagaatacgtgagaaagctaaatgctctaagtagaaaagaattatcagaaaaaataaatgtgagtgaacaagcaatttggcaatatgaaacaaaaaatatgatgccagaaattagtaaaatttatgatatgacatctatttttaatgttaaatctagctactttattagcgagcagcccgaagagctcctaataaattctgtcgataaacatagtatagcttttagagcaaaaaattataaagtatctacgaaactattaaataagcaatattatcaagcaatgtatttatctaatttaactaactacttattttcctttgtaaagataccggataatattattttatcgttaataaataatttagatgacttgttgaatggcaatttagaatcactaaataaaaaagaaagcataaaagaaactgctaaagttgtgagggctaaaattcttcaagacgaaagcaatgaagcactattatttatgcttgaaaaagcgggtatagttatatacgaaaagcgaattaatgatagcatagacgcatatagtttttggagtaaagatctgacaccttttattatactgggtacaaataagggggtagcagttagaaggaattttgatcttgcacatgagctgggacatcttgttctacatcgtcatattcaattcgacttattatctcctgaagaatataagacaattgaacatgaggcagatattttcgcctctgaatttttactacctgaagaagcgtttaaaaaggactttgatcaaatgacaaaaaaatcaaatcctgattatttagctgtattgaaagaaaaatggtatgtttctatacaagcaattgcaatgagagcctattatctaggtctaatgtctagtactcagtacagatatttttgggcatcattaaataaaaaaggctataaaagtaaagagcctttagacgacgtgattgaaatgtcacgtcctgtcaaaatgaatagtttattaaagttgtattttgatagaaatatactgacaccacaaaaattattgaattatttaaaagttgatgaaacatttttgaatcatctagcaggtattaatttaaaactctttaaggattatgttaacgaaaatagagaatataatataacgaatctatataaataa

SEQ ID NO: 410138 - DNA, 957 bp, Staphylococcus aureus
atgaaaaattttaagtgtttatttgtattaatgttagcagtcattgtttttgcagcagcatgtggaaactcaagttctttagataatcaaaagaacgctagtaatgattcggattctaaatcaggaggatacaaacctaaagaattaacagtacaatttgtaccttcgcaaaatgctggaacattagaggctaaagcaaaaccattagaaaaattactatctaaagaattaggaattccagttaaagtgtctgtatcaactaactacaatacaattgttgaagctatgaagtctaaaaaagttgatgttggtttcttaccaccaacggcatacacattagcacatgatcaaaaagcagctgatttattattacaagcacaacgttttggtgtaaaagaagatggttcagcaagtaaagaacttgtagatagttataaatcagaaattcttgttaaaaaagactcaaaaattaaaagcttgaaagatttaaaaggtaagaaaattgccttacaagatgtaacatcaactgctggatatacattcccacttgcgatgttaaaaaacgaagcaggtattaatgcaactaaagatatgaaaattgtgaatgttaaaggtcatgaccaagcagttatctcattattaaatggagatgtagatgctgcggctgtatttaacgatgcacgtaatactgtgaaaaaagaccaaccaaatgtatttaaagacacacgaattttaaaattaacacaagctattccgaatgacacaatttctgtaagaccagatatggataaagattttcaagaaaaattgaaaaaagcttttatagacattgctaaatcaaaagaaggtcacaaaattattagcgaagtttattcacatgaaggatacacagaaacgaaagattcaaatttcgacattgtaagagagtacgaaaaattagttaaagatatgaaataa

SEQ ID NO: 410139 - DNA, 774 bp, Staphylococcus aureus
atgagtcaaatcgaatttaaaaacgtcagtaaagtctatcctaacggtcatgtaggcttgaaaaatattaacttaaatattgaaaaaggtgaatttgcagtcattgtcggactatctggtgctgggaaatccacgttattaagatctgtaaatcgtttgcatgatatcacgtcaggtgaaattttcatccaaggtaaatcaatcactaaagcccatggtaaagcactattagaaatgcgccgaaatataggtatgattttccaacattttaatttagttaaacggtcaagtgtattacgaaatgtactaagtggacgtgtaggttatcaccctacttggaaaatggtattaggtttattcccaaaagaagacaaaattaaagcaatggatgcactagaacgggtcaacatcttagataaatataatcaacgctctgatgaattatcaggaggtcaacaacaacgtatatctattgcacgtgcactatgccaagaatctgaaattattcttgcagatgagccagttgcttcattagacccattaactacgaaacaggttatggatgatttaagaaaaatcaaccaagaattaggcatcacaattttaattaatttacattttgttgacttggcaaaagaatatggtacacgcatcattggtttacgtgatggtgaagttgtctatgatgatcctgcatctgaagcaacagatgacgtatttagtgaaatatatggacgtacaattaaagaagatgaaaagctaggagtgaactaa

SEQ ID NO: 410140 - DNA, 816 bp, Staphylococcus aureus
atgacacaggaaatagcaaaatataatgttcacacaaaagcacacaaacgaaaattgattaaaagatggcttattgcaattgtcgtcttagctattatcatctgggcatttgcaggtgtaccaagtttagaacttaaaagtaaatcattagaaatcttaaaatccatattcagcggattattccatcctgacatcagctatatctatataccagatggcgaagacttattacgtggtttacttgaaacctttgcgatagccgttgtaggtactttcatcgccgcaattatctgtattccattagcatttttaggtgcaaataatatggtaaagttacgcccggtttcaggtgttagcaaatttattttaagtgttatacgtgtcttcccagaaattgtaatggcacttatatttatcaaagctgttggcccaggttcattttcaggtgtattagctttaggtatccattccgtaggtatgcttgggaaacttttagctgaagatattgaaggtctagatttcagtgctgtagaatcattaaaggccagtggtgcgaataaaattaaaacactcgtatttgcagtcataccacaaattatgcctgcctttctatcactcatactttatcgctttgaactaaacttacgttcagcttctatactggggctaattggggctggtggtatcgggacaccactcatatttgccattcaaacacgttcttgggaccgtgtaggtattatattaatcggtttagtactaatggtcgcaattgtcgatttaatttccggttcaatccgaaaacgtattgtttaa

SEQ ID NO: 410141 - DNA, 1062 bp, Staphylococcus aureus
atgagtaacgcaaataatgctgataataaacagtttttcagtaagattttaaattctattggtgctggtgttgttattgcacttgttccgaatgctctattaggtgaagtattaaaaatatttaaaagtggtaatgaaattttagaattaacgtatcagttagtgatactaattcaatcatttatggcatttattattggggttttagctgctcatcaatttaaatttaatggcgcaggtgctgctatagtaggtacatcagctatgattggttcaggtgctgttgtatatagtaataatagttttatgttaaaaggtataggtgacattataaatacgagtttggttgttattattgcatgtcttatatatatggtattacaaaacaaacttggatcttttgaattaattatattaccagttttagtacctatcgttagtgggggtatcggtctaatcacattaccttacattcgaaaaattactcaagcaattggaaatgtaattcattcttttacagacttaaatccgttgttaatgtctatacttattagtgtggcattttcattattaatggtaacaccaatatcgttagtagcgattgcaactgcgattagtttaaacggactaggaagtggagcagcaaacctaggtatagtggctgcctgtgttactttcttatttggctcattgcgtgtcaattctattggtgtaaatgcagttttactcataggagctgcaaaaatgatgatcccagtttacttgaaaaatttaattatttcgataccattgactataaatggaataattactggaatcattgcttacgttcttcaggttaaaggaacaccattgtctgctggatttggatatacaggattagttggcccaataaatgcatttaaccgaatgtcaggtgattcaacaatgaatattattttattagcacttggttattttgtcataccatttgtatcggcatttattgttcatgaattgtgtaaaaaattcattcctatatattctaatgatatttataaatttgaagttccaaaacaataa

SEQ ID NO: 410142 - DNA, 600 bp, Staphylococcus aureus; identical to SEQ ID NO: 407084

SEQ ID NO: 410143 - DNA, 522 bp, Staphylococcus aureus
atgtctggagtaattaattatcaattccgtttaaatggtgttttaatatttaaaattgaacttttgatatattactatgtctggtacacaaatcaatgttttatgctttacaaagttatattggcagtagttgactgcagtccacaacatagaggcttcggaatgtcagcttctatttcatgcaagttggcggagctccaacatagtggaattggaacctcaatttctacaaacaatgtaagttggggaaacgggccacaaactcagaagctggcggaaagtcagcttaaaataacatgtaagttggcgaggccccaaaatagtgaaatcggatttctaatttctacaaacagtgcaatttggggaaacgggccacaaactcagaagctggcggaaagtcagcttacaataacgtgcaagttggcggggccacaacatagaaaaattggatcctcaatttctacaaacaatgtaagttggggaaacagccccaacactgaaactggcagaaagtcagcttaa

SEQ ID NO: 410144 - DNA, 654 bp, Staphylococcus aureus
gtgggtcaaaaaattaatccaatcggacttcgtgttggtattatccgtgattgggaagctaaatggtatgctgaaaaagacttcgcttcacttttacacgaagatttaaaaatccgtaaatttattgataatgaattaaaagaagcatcagtttctcacgtagagattgaacgtgctgcaaaccgtatcaacattgcaattcatactggtaaacctggtatggtaattggtaaaggcggttcagaaatcgaaaaattacgcaacaaattaaatgcgttaactgataaaaaagtacacatcaacgtaattgaaatcaaaaaagttgatcttgacgctcgtttagtagctgaaaacatcgcacgtcaattagaaaaccgtgcttcattccgtcgtgtacaaaaacaagcaatcactagaactatgaaacttggtgctaaaggtatcaaaactcaagtatctggtcgtttaggcggagctgacatcgctcgtgctgaacaatattcagaaggaactgttccacttcatacgttacgtgctgacatcgattatgcacacgctgaagctgacactacttacggtaaattaggcgttaaagtatggatctatcgtggagaagttcttcctactaagaacactagtggaggaggaaaataa

SEQ ID NO: 410145 - DNA, 1038 bp, Staphylococcus aureus
atgactgataaaaagtacactgcagccgatatggttattgatactttgaaaaataatggggtagaatatgtttttggtattccgggtgcaaagattgactatctatttaatgctttaattgatgatggtcctgaacttattgtcactcgtcatgaacaaaacgccgcaatgatggcgcaaggtattggaagattaacaggcaaaccgggtgtagtacttgttacaagtggtcctggtgtaagtaatttaactactggattattaaccgcaacatctgaaggggatcctgtattagcgttaggtggccaagtgaaacgtaatgatttattacgattaacgcatcaaagtattgataatgctgcgctattaaaatattcatcaaaatatagtgaagaagtacaagatcctgaatcattatcagaagttatgacaaatgcaattcgaattgctacttcaggaaaaaatggcgcaagttttattagtattccgcaagacgttatttcttcaccagttgaatctaaagctatatcactttgccaaaaaccaaatttaggagtaccgagtgaacaagatattaatgatgtcattgaagcgattaaaaatgcatcatttcctgttttattagctggtatgagaagttcaagtgcagaagaaacaaatgccattcgcaaattagttgagcgcacgaatttaccagttgtagaaacattccaaggtgcaggtgtaattagtcgtgaattagaaaatcatttcttcggtcgtgtgggcttattccgcaatcaagttggtgatgaattattacgtaaaagtgatttagttgttacaatcggttatgatccaattgaatacgaagctagtaactggaataaagaattagaaacacaaattatcaatattgacgaagttcaagctgaaattactaattatatgcaaccgaaaaaagagttgattggtaatattgctaaaacgattgaaatgatttctgaaaaagtggatgagccatttataaatcaacaacatttagacgaattagaataa

SEQ ID NO: 410146 - DNA, 186 bp, Staphylococcus aureus; identical to SEQ ID NO: 409375

SEQ ID NO: 410147 - DNA, 294 bp, Staphylococcus aureus; identical to SEQ ID NO: 408498

SEQ ID NO: 410148 - DNA, 609 bp, Staphylococcus aureus
atgattgttggctatgcgagagtatcatcgaacgatcaaaatttagaaagacaacttgaaaatttaaagacgttttgtgctgaaaaaatatttacagaaaaacagtctgggaaatctattgaaaatagaccagtacttcaagaagcacttaactttttgaggatgggagatcggtttgtagtagaatccattgattgtttaggtcgtaattatgatgaagtgattcataccgttaattatttaaaagacaaagaagtacaattaatgattactagcttacctatgatgaatgaagtggttggcaatccattactggataagtttatgaaagatttaattattcaaatattagcaatggtttcagaacaagagagaaatgaaagtaaacgtcgacaagcgcaaggaattcaagttgcgaaggaaaaaggcgtatataaagggcgccccttactttattcaccaaatgctaaagatccacagaaacgtattatttatcatcgcgttgtagaaatgttagaagaaggccaatcaattagtaaaattgcgaaagaagtaaatataacaaggcagacgatttacagaattaaaaacgataatgatttgatttaa

SEQ ID NO: 410149 - DNA, 708 bp, Staphylococcus aureus
atgagtaatacacaaaagaaaaatgtgccagagttgagattcccagagtttgaaggcgaatgggaagagaagaagttaggggatacactcgaatttataaaagatggaacacatggaactcatgaaaatgttaataatggaccatggttattaagtgcaaagaatatcaagaataataaaattgtaatttcaagtgatgataggaagatatctgaaagtgattataaaaaaatatacaaaaattataaacttgaaaaaggtgatttattattaacaattgtaggtacaattggaagagcagctattgtcaaaaatccgaataatattgcatttcaaagaagtgtcgctattttaaaaacaaaagccacatatgatgtagagtttattttccaactttttcaaacaaaatattttaaaaatttactgttaagaaaacaagttgtatctgcgcaaccaggattatacttaggtgatattcgaaagataaaaatttcaattacaaatataattgaagaacagcgaaaaatcggaaccttttttagaaaaattgaccgccaaatcgagttagaagaacaaaaacttgaattgcttcaacaacagaaaaaaggctatatgcagaaaattttctcacaggaactgagatttaaagatgagaatggtaatgattatccagattgggaagagaagcaattaggggaattatcataa

SEQ ID NO: 410150 - DNA, 411 bp, Staphylococcus aureus
ttggaacaaaaattatcaattgaaggtcaagaaaaaacaagggttttagtaacaacacatttactattaagtattgcggcaagtattggaaaacctgtaatgaattttgtgaaaacgggagttcatgatggatttttaatatttttaaatcctaagtttaatttattctttatgtactattggcttgaatatttcaaggataaatggagtaaatacggtcaaccaggtagtcaagttaatttaaatacagaaattgtcaaatctcaaacactgaatatgccaagcaatcacgaacaagaaaaagtggggcagttttttaatagaaatgaaaaactaattgaattgcagcaagaaaaaataatgtatcttaagcgacgtaagcaggttttacttcaaaaaatgtttatataa

SEQ ID NO: 410151 - DNA, 1614 bp, Staphylococcus aureus
atgttattaagagatagcgatgcaagaatgttatccgaaaattcatatgataagttatcagttgatgaggtatatacattttcaaataaaaaacaatacaaagtcatcgaaaaacgcgacgacacccagaatgggtttagagcatatgttttcgctccagtaatcaaaggtaaagttgataagagtcaacttttaataggttacgctggcactgacccatatagtctaaatgatattcgtactgatttacaacttcccattcatcataacacaaataatctaaaaattaataatcattataaagatttaaaaaactcaactattcacaaaaaatacaatacaataaaagataaaaatgacctttttagtttttcttctaatttaaataataaagcacttttcggtgatctatgggcagctaagtttgcaccgactcaaatggacgaaagtgatgcttttactgaatcagttaaaaagaaatatccagatagtgaaattcacccattaggacatagtttaggtgcgtttttagctcaatataatttaataaaacataatctggataacggtacaacgtttgcagcacctaacgtataccattcatttactggcgactttaaaaaagacattgataatggtgtatatgattcaaaaatacgcaatattggccattttgatgatcctattaataactttaacttcttcgatcatccaattggtgaaaatataattgtaatgccacattatgatggatttataactgctcttcctttaattggtcaacacacaattgaatcatacaatgatttcgatgcggatggtacagtgaaggaaatgccagaacttgaacaatttaatgatgaccaatctcttaataatagatttcaattatttgacccatttggtataaaaagcagatttttcgactctattaaaatcgatagttctatattaaatagaacaagtgaaaatgattttgatccttttgctattctcaataaaaaagataaattattcgaatcaaatgaccttgatatagaaggatttaataataaacaaaaagaagatttaagcattgatttaaatccttttgatgatgaattaaataatgaggacgaaccattaattcccaaaagaggcgatagtaaaaaattaaaagcagaaaagaaaatctctgttaaaaaaaccaaaagtagttccaaaaattcaggcaaaaaagtaaaaattcagcctgatgaagtgcgtaatatcgctagcacaattcgtgatagactatttttgtatacacaaataattactgcattggatgaatatagagaagaaacaatgtcaggggctaatcgtattttagataaatatcaatcagagcttctaagcggttcacatgaatttataacacctaacgatcttgaacagtatatggagattttatcagttgagggaagttcgggtaatttcaagttttataatagtggtttaatggatgacttaattcaggcattagatcaaaacaaaaaagacttgctacaatttgctgaaaaactagaatttgctgcaaataaattcgaagaaaaagatttagaagaaagcgatgtttttggactatttagttaa

SEQ ID NO: 410152 - DNA, 441 bp, Staphylococcus aureus; identical to SEQ ID NO: 409818

SEQ ID NO: 410153 - DNA, 1362 bp, Staphylococcus aureus
atggatttatcacgtggtagagccattagccgtgaaaatgaaacgagtcactcagcatctgcaactgtaatgaaatcattgttgagattaagtgatgccatggatgagtcaacaaaagctaaatataagcaaatcgttaaaacttctgttaaatctgattcaagttataaacaaaacgattatttaagctcttattcagatataagcaaaatgaagtctttaattgaagacagcactatttctactaacggtttaacacaacaacttaaaatatataatgacatggatcgtgtcacctatcacaacaaagaattagactttgcatttggattaagtatgacatcgaaaaatgtcgcacgttacgaaagtatcaatggagagaacttaaaaggttggcacaccggtgcaggcatgtcttatttatataacagcgatgtcaaacactatcgtgataacttctgggcaacagccgatatgactcgtcttccaggtactactactttaaatgatatgccatctacaaatactaagaatgataattcctttgtaggcggaacaaaattcgatgaacaacatgctagcattggtatggattttgaaaatcaggacaaaactttaactgccaaaaaatcatatttcatattaaacgataaaattgtcttcttaggaactggcattaaaagtactggttcatcagaaaatccaattacaacgattgaaaatcgtaaagcaaatgagtataaattatataaagatgatattgaaaatactacttcaaatgataatactcaggaaacccattccgtctttttagagtccagcgatactaaaaagaacattggttaccatttcttagacaagccaaaaatatctgtaaaaaaagaaacacatattggcaagtggaaagatattaacaacagtcaaagcaacactcaaaaaaatgatgattattacgaagtaactcaaacacataatacatcagacagtaaatatgcatatgttttgtatcctgatttaacaaaaagtgattttaaatcgaagaataatattgtaaatattattaaacaagatgaagattttcatgtaataaaagataatgatggcatatttgctggggttaattatagtgatagtactaaaacttttgacattaatggtactaaagtcgaagttaaagccaaaggtatgtttgtaattaaaaagaaagatgataaaacatatgaatgtagcttctataatcctgaaactacaaatacagcttcaaatatagaatcaaaaatttcaattgcaggttacactttaattaataaaagtgtcacaaactctaatgaggccggtgtaaactttgaattaactaaataa

SEQ ID NO: 410154 - DNA, 492 bp, Staphylococcus aureus
atgactttcgaagaaaaattaagtgaaatgtacaatgaaattgcgaatgagattagcagtatgataccggtagaatgggagcaagtatttacaatagcttatgtaactgatcaagctggagaagtaatctttaattatactaaacctggtagtgatgaattgaattattattcagatatacctaaagattgtaatgtctctaaagatatttttaagaattcatggtttaaagtttatcgaatgtttgatgagttaagagaaacttttaaaaaagaaggtcttgaaccatggacatcatgcgaatttgactttacaagagatggcaaattgaatgtatcttttgattatattgattgggtgaatttagaatttggaccattagcaaaagaaaattactatatgtataaaaaatttggggttataccagaaatggaatatgaaattaataaagttaaagaaatcgagcaatatattaaaagccaagaaagttaa

SEQ ID NO: 410155 - DNA, 501 bp, Staphylococcus aureus
atgactttcgaagagaaaataagcaaattatataatgagattgcgaatgagattagcagtatgataccggtagagtgggaaaaagtatatacaatggcttatatagatgatggaggaggtgaagtattctttaattatactaaaccaggtagtgatgacttgaattattacaccgatatacctaaggagtataacatttctgtgcaagtatttgatgatttatggatggatttatatgatttgtttgaggagttaagagatttatttaaagaagaagatttagaaccatggacatcatgtgaatttgattttacaagtgaaggtaaattaaaagtttcacttgattatattgattggataaatacagagtttgatcaattaggccgtgaaaattattatatgtacaaaaaatttggggttataccagaaatggaatatgaaatggaagaaattaaagaaatcgagcaatatattaaagagcaagatgaagctgaactatag

SEQ ID NO: 410156 - DNA, 684 bp, Staphylococcus aureus
atgatttcacacttgataacggatacttcgaagaagatacatcagatagcgactcagattcagatagcgattcagattcagatagcgactcagactcagacagcgactcagattcagacagtgattcagattcagacagcgattcggattcagacagcgactcagactcggatagcgactcagactcagatagcgactcagattcggatagcgactcagactcagacagcgactcagattcagacagcgactcagactcagatagcgactcagactcagacagcgactcagacagtgattcagactcagatagcgattcagattcagacagcgactcagactcagatagtgactcagattcagatagtgactcagactcagacagtgattcagactcagatagcgactcagactcagacagcgactcagactcagatagtgactcagattcagatagcgattcggactcagacagtgattcagattcggacagcgactcagactcagacagtgattcagattcagatagcgactcagactcagatagcgactcagattcagacagcgattcagactcagatagtgactcagattcggacagcgattcagactcagatagcgactcagattcagacagtgattcagactcagatgcaggtaagcacacacctgttaaaccaatga

SEQ ID NO: 410157 - DNA, 156 bp, Staphylococcus aureus
atgagtactactaaagaccatcacaataaagcaaaagcattaccagaaacaggtaatgaaaatagcggctcaaataacgcaacgttatttggcggattattcgcagcattaggatcattattgttattcggtcgtcgtaaaaaacaaaataaataa

SEQ ID NO: 410158 - DNA, 183 bp, Staphylococcus aureus
atgactttcgaagaaaaactaagtgaaatatacaacaagattgcgaatgagattagtgggatgataccagtagagtgggaaaaagtatatacgatagcctatgtaaatgatagaggtggagaggtcgtttttaattatactaaaccaggtagcgatgaattgaattattacacatatatctag

SEQ ID NO: 410159 - DNA, 3432 bp, Staphylococcus aureus
atggaaaatcaagaaaattacaatgcttctagttttgatgatttaattagccaaattaatgagacagcacaagatgttcaaagagagcgaggaacactttttgaaagattagtattagcctatttaaaaaacgaacctacgtataaaaatctttataaaaatgtatggttactaaaggatgtaccttcagaatttaatatttcaaaaaaagatttaggcgtagatttagttgctgaacaacaaaatggtgatttagtggctatacaagcgaaatttaataaaggaaaaataggtaaaagtgaaattaattctttcgtcgcagaacttggatcaacatattatactagaggattaattatagcaactgttgacgagtggaatagtaatgcaagagcgacgattgataagaatgaaaaagggatagagataattgggctatcagatttgagaaactcacaaattaattgggctgattttagttttgagaggccagaacaaacaacaattaaacagcctaaatcattacgtccataccaattagatgctttagatagtgcaataagttattttaaaactaaagatcgtgggcagttaatcatggcacctgggacaggtaaaacgttcacaagtttaaaaattgctgaagcattatctaaacaatcaaatcgacaatttaaagttctttatttagtaccaagtattcaattgcttacgcaaacattaagaggatggaataacgatactgaatatactatgacaagtatggcagttacttcagatagagatgcttctagaggtgatgatggtactgaagatattaaagctacagatatcggatatccagcaacgacatctaaagatcagttgcttaaaaattggaatgatgtacaaaaaaaagaatcaaatactgatttatttgtagtatttagtacttatcaaagtattgaagtaatcggaaaagctcaaaaagaaggattcccagagtttgatttaataatttcggatgaagcacatagaacaacgggcgcacatgaaatgaataaggatgctagtgtatttacaaaagttcatgataatgaaaatgtaaaaggaaaactgcgcatgtatcaaacagcaacacctaagatttatggtgataatgctaagaagaatgcaaaagataaaagtatcttattatcttcaatggatgatgaatcaaaatatggtgaagttatttatcgcatgggatttggacaagcagtatcacgtggcatattaacggattataaagtgatggtcttggcagtagatgaaacagctattcaaagagatatgcaacgaacattagctgattctgaaaatggtttaaatatagatgatgttggtagaatcgtaggtatttggaacggtatgatgcgtagaaatggatataaaaatccaattaaaaatagcccttttgatggtgcaccattagagagagccattgcatttaccagaacaattgaagattctaaaaaagtatcacatcaatttgaagaagttgttaatgaatatattggtgcggatattgaagaacaatcgaaaaagctatcaatgagacacgcagatggaacaatgaatgcattacaaaaaggtgaattattggattggttagcagatccaaataaatcatctgatgaagcacgaatagtttcaaacgtacgattcttaacagaaggtatagatgtaccgacattagatgctgttatcttcttagcacctaaaaaatctcaagttgatattgtacaagcagttgggcgtattatgcgtaaatctgaaaataaagattatggctatatcatattacctatagttatcccagcaggtgaaaaacctgagacgatactagataataataaaaactatgaagcagtatggcaaataataaatgcgttacgctctgttgatgaacgtttcgaagcaatggttgataaaattaacatagctaagccaaaacagttaaaagtcattggtgttggaagcgcacctaataaagaaaatgacttagaagataatgttggaaatgctgatacgccaaaccctaaagaatttgaacctactcaattagaattccaatgggataagtacgaaaaagcaatatttggtaaaatcgtagaaaaagtagggaatcgtaaatatttagagaactggtctgatgatgtagcaaaaatagcgcaaaggcaaattagttggataaagacaaaattagaaaataaaaatgatcctatttcaatagaatttaaaaagtttgtgtcttctctacaacataatatcaatgaaagtatagatgaaagccaagctgctgaaatgttatctcaacatttaatcacaaaacctatatttgaagcattatttagtaagtatagctttgtaaataataatccagtatcctcagctatggaaaacatcgttctagaattagagaaagctggttttgccaaggaacaagaaaatcttgcacctttatatgagtctgtaaaaatgagagcagaagatgtagaaaaagcagaagataaacagaaaataattataactttatatgataagttctttaaaacggcatttaattcaactacaaaaaaattaggtattgtattcactcctgtagaagttgtggattttatagtaaagtcagttgatcttacattagagagacattttggcaaaaatcttgctagtgagagtgttcatattttagatcctttcacagggactgggacatttatggttagaacactagaatacttaaaagaacaaatgaaagaaggagaaatttcgttagcggatattacacgtaaatttacacaagaattacatgcaaatgaaattgtattgttaagttattatattgctgcaattaatattgaagcaacatttgatgatattaatggtaatgaacaaggatatacaccatttgaaggtatagtattaactgatacatttgaaactactgttcatgaatattcaatagatgaatattttattggaaatgatgaaaggcttaaaagacaattaaaagaaaatattacagcgataattggtaaccctccctattcagtaggacaagactcggaaaatgataataatcaaaatatcaaataccctattttagaagaaagaattaagaatacttattccaaatactctaaagcgaaattgaaacaagcattgtatgattcatatgttcaagcgataagatgggctacagatagaatagggagtaagggggttataagttttgtaactaatggagcttttatcgataatcaaagtttcgatggatttagaaaatgtgtttatgaagaatttaactatatttatatttataatttacgaggtgatcaacgaacacaaggtgaaaaatctagaaaagaggggggaaaatatttggctctggaagtagaacaccaatag

SEQ ID NO: 410160 - DNA, 684 bp, Staphylococcus aureus; identical to SEQ ID NO: 409367

SEQ ID NO: 410161 - DNA, 684 bp, Staphylococcus aureus
atgacaaatgaaaaatttgaaatttttaaagaagtattaaagcacacagataaatcaacaatagaagaacagtatttattttcagaagaggattataaaaggtttgatttgtatataaagaaattagaaaaagatgattttaaaaacgctaaagaaaaaggggaatattttgaagaatttattattttcattttaacatgttctaacatatttgaatgtactaaaaatatacgtacaaatacaaacgaaatagatattagagctgagttcagtcctccagctaaagatattgctaaatattatgatataaaagatactagcccgatttattttgaatgtaagaactataggacaagcaaaattaacgttacttatgttggtaagtttttttctcttttatcaacaacgaataaaaatcttggagtgatggtatctcctcaaggtattactggaacgcctaaagaatggacagacggatatggtttatgtaaaaaaattagacttaaatataatataaatataatatctataagttatgaagatttatttaaacttaaagagaaaagtatgtttcaaattataaatgaaaaattaacttttttagcggaagattttgatataactcaacatataactcaacaccctttagaagatgaatttaaaaaatatgaaaaaatttattaa

SEQ ID NO: 410162 - DNA, 324 bp, Staphylococcus aureus
ttgcaaaaaacaaatctgaagaaacctctctctcgggaatttgaacaaagtttgattaaaaatttaaaaccgggaaatagaatttatccaggagtatacaacagaagatttaatataagtattaaagagatagttttaattatgaacgcgttcatcgataaagatattattaatctaaggtttcaaattcagatcgatgatgatttaaagcctgagatgtatactttaaaaacattaccgcatttttattatgatgacgaaaatgatattgacattgaactagatgaaagaaattatatacctgtatacgaggttgtaagatga

SEQ ID NO: 410163 - DNA, 1050 bp, Staphylococcus aureus
atggagataaataacgacatattaaacaagacaattagtgaattctcaaaaggacgtaaagatttacttatatctgaatatacacaaattattgataacgatgaaataaaagaattgcaaatgaaagaaatagaaaatgtaattgaatatgcacttgataaagattttgacaaattgttaacttcatttagaaatacagaatatgaccaaagttataaatatagcgctttatttaaaattataaataaagatgtcggagaattattaagtgttttagaagaaaagcgcaatttaaaaattaacgaaaatgactattttgggcattataatagtgaaaaaagatactttattttgaatttttttagaagaggtacaactttagtgggtaatgaagctatcactaaagaaagaatacaaagtgcaattatagttttgcacgaagtggataaagaattatattttgagatatctgtagatagcatccagaattattatagaaaagatagtacaaattattatttgtccataattgatagaattgttaattggatatcacaaaagctcttaattacttgtcaaccagttaatttgaactttactattgataaaatgaggaaaaatcaagaatctgattttttagttagtgcacaattaatgaatacaaataatggtgcgaaggctacgttggattcggctagctctactactatcatattgcctattttaggtgaactaaaagaattaatagcaacaaataaaaatttgtttaaaaactctgaagaagggcttgaaaaaattaacgacttcattatagagttagaagaagagtctgacttgccttgggtttccttgattaataaaacaaaaaaaatatcaatcaagtttttatttgaaagttataccggtaaagattatactttgttaaactactattatcacgaaaagaaaagggagggtatggattatgttacaagaaaattattgtcggaatacaatcaggtcaatattgcaaaaaacaaatctgaagaaacctctctctcgggaatttga

SEQ ID NO: 410164 - DNA, 396 bp, Staphylococcus aureus
atggaaggtaattttaaaaatgtaaagaagtttatttacgaaggtgaagaatatacaaaagtatatgctggaaatatccaagtatggaaaaagccttcatcttttgtaattaaacccttacctaaaaataaatatccggatagcatagaagaatcaacagcaaaatggacaataaacggagttgaacctaataaaagttatcaggtgacaatagaaaatgtacgtagcggtataatgagggtttcgcaaactaatttaggttcaagtgatttaggaatatcaggagtcaatagcggagttgcaagtaaaaatatcaactttagtaatccttcagggatgttgtatgtcactataagtgatgtttattcaggatctccaacattgaccattgaataa

SEQ ID NO: 410165 - DNA, 174 bp, Staphylococcus aureus
atgattaaacaaatagtaagactattattcttactagcaatgtatgagctaggtaagtatgtaactgagcaagtatatattatgatgacggctaatgatgatgtagaggcgccgagtgacttcgcaaagttgagcgatcagtgtgatttgatgagggcggaggtgtcagaatag

SEQ ID NO: 410166 - DNA, 933 bp, Staphylococcus aureus; identical to SEQ ID NO: 407755

SEQ ID NO: 410167 - DNA, 975 bp, Staphylococcus aureus; identical to SEQ ID NO: 409380

SEQ ID NO: 410168 - DNA, 444 bp, Staphylococcus aureus
atggaacaaatcacattaactaaagaagagttgaaagaaattatagcgaaagaagttagagaggctataaacggcaagaaaccaatcagttcaggttcaattttcaacaaagtaagaatcagccataacgattttgatgaaatcaataaaaaactcaatttcgcaaaagatttgtcactaggaagattgaggaagcttaataatccgattccactaaaaaagtatcagcatggcttcgaatcaattcatcaaaaagcttatgtacaagatgttcatgatcatattagaaaattaacattatcgatttttggagtgacgcttaattcagatttgagtgaaagtgaatataacctagcagcaaaattttacagagatatcaaaaattattatttatatatctatgaaaagagagtttcagaattaaccatcgatgatttcgaataa

SEQ ID NO: 410169 - DNA, 249 bp, Staphylococcus aureus
gtgaataaagttagatatcagaatttgaggaacttcattgatgagagcgaatatacacacaaacaagttgcagatatgattggtatgaaccctgctagattcagtcaaaagataaataaaaataaaagcaactttactattgatgaagctagtgcaatatgtactgttttaaaaataagtatggatgattatttttttaatcaaaacgtctcaaaaatgaaacgtataaaagaaaaacaaacaacataa

SEQ ID NO: 410170 - DNA, 330 bp, Staphylococcus aureus
atgtcaaatttccctagtaacttaaatactttacgaaagtctcgaaacttgtctttacaagaattagcaaccagactaaatgaaaaatacgaagttaaattttcaaaagcatcaatcgacagatgggaaaaaggtctaactagcccttctatggaacacgcaagtgctttagcaaattattttaatgtatctttagatgaattaagcggactgaaagctatggaacctgacaaacatcaaactatggcagctcatcttgagggggaattaaaacaagaagatgtagactatattatgggattaattgacagatttaaaaagaaagattaa

SEQ ID NO: 410171 - DNA, 465 bp, Staphylococcus aureus
atgtcgagatatgaaaaaatattaattgaaaatgaccacatagaagtaaaagattttgtagagcttccagagggatatgcaggtttttattcagatggaattgtgcttatagacaataaattgtcagaaacacgcaaggctgaagtattatatgaggaacttgcccaccataagttgacgtatggcaacattttagatcaatcaaatttcaacaatcgcaagttcgaaaattacgcacgtagacacggctttatctcagctgtaccgttacgtgaaattgtagaagcttataattatggcgtacgtaacttgtatgagttgtctgagtatctacaattaagcgaagaatacatattagaagcgatagaacaatataaaaagatatatggtattggaactcactatggcgagtattcaattacatttgagccgttgagagtttttaaattgcatcacattgattaa

SEQ ID NO: 410172 - DNA, 933 bp, Staphylococcus aureus
atggaagaaaataaaactttaaaagaatacttgcgtaaatttttagaaggctacaaatatgtagttgaaaacagatacaattatcagtttagtagcaatccagaagctttcccattcatgagaaaagaccattacaagatttcgatattttatctaaatcaatctttttttgaagaaccttgcatcgtcgttatctcaaatgacagtaaattaaaagaaatatataattttcgtaatattgatatcaaatatttgtctaaacactttacttcatacatatatgattctaaaaagtatgtagaagaacaatccggattattagattttaataattacatttattacacatctatttactacggaaaatatatcgggaccgtaatattacaaaacaatttagatttattttttaattatggcaaaagattagctaacgatcattacaatacattgatatcgaagtcgaaagaaaaattgataaacaaagcacatgatgaaatacaaccgttcaaccacttagatttaaatagtatgaaagagattgttgatgatataactttttcttatcaaatagaacaaggattacaagcttataaaagggaattgtatttgccagctgcagcaacctttgctgttgctatagaaacgtttttaatcaaattaaaaaaagttaataaaatcaaacataaagacaccgattcaactatgtacacaaaattattaggagaattaactaaagaaggtaaagtaaattatagaaccaaaaaacgggtagaaattgcgtatagtatgagaaacataatcaaccattcacaagctggtgcagtagccaaaggtgattgtgactttcttttaaacacactaaaagacattgttgatgaaaacgaaaaaatattaagagaatataccaaatcaattaataagacggaataa

SEQ ID NO: 410173 - DNA, 414 bp, Staphylococcus aureus
gtgttaactacgatcactgtagtatttgcactgtgtaacctttattattttgcagctgtacaaaaccattatgatttattcaattattggttaatgggtacgatttcaatcataattagctatttattattagtaattggcggaatgtttacgttgttaaaattacctaaagtaacaaaacgctggggtggtaaaactaaaacacatttcggtttattattaactgcgttgagctcatttatatatattgaaaaaattatcgaatatatattgattcctaatgtcgtagaatccaagtttataattattgtgagcatgttggttatcgctggagcacaatttgtggcatttcaatttattatgcaatacagtagattctatatttttgaattaaatacagaagatgatgactaa

SEQ ID NO: 410174 - DNA, 150 bp, Staphylococcus aureus
atgaagaataaaaaactgctacttgcgccaacaagtaacagtgacaaacgattaacaaaattaattcgtgttcaatataaaacgaaaaacggaggaagtcaaggtgtattacgaaataagcgatatcatacgcaaaaatattcatgttaa

SEQ ID NO: 410175 - DNA, 162 bp, Staphylococcus aureus
atgagtaacatttataaaagctatctagtagcagtattatgcttcatagtcttagcaatttgtttaatgccacttttgtacttcactacagcatggtcaattgcgggattcgcaagtatagcaacattcatattttataaggaatacttttatgaagaataa

SEQ ID NO: 410176 - DNA, 222 bp, Staphylococcus aureus
atgataaaaaatagtttgcaagctaaagaacttgcggtaattttatctgtttcaaaatccaaagcaggacaaataataagagaactgaataaagagcttgaagatgaaggatacattgcgatacgaggcagaataccagtccaattagctaggaaaaaattcccttatcacgacttatcagacgagagaataatggaggagttgaaaaaagaaaatgagtaa

SEQ ID NO: 410177 - DNA, 444 bp, Staphylococcus aureus
atgaaaaagaaatatattttaataatagttagtgtaattttaataggtatgatagttattgcatatgcacataataaacaaaaaaaagaccattacattgaaacacaagaaaagagaatagatttatattttaagtataaccttaatcattatagctcaatgaaagttactagttttaaaaagacgcctatgggtggctatattgtagatggatatgttaatcataacaaaaattatgattttaaggttctcatctctgcaactgacaatcatcaatttgaagatagcataggatacgatgataagacatttggtaaattatttaaagaaaaagaccataaaaatgaattaaaacctaaagatattataaaaaaagaacacttggataaaaatgaatatgaagcagaaccaccactgttcttcttttcagggagattagagtga

SEQ ID NO: 410178 - DNA, 246 bp, Staphylococcus aureus; identical to SEQ ID NO: 407772

SEQ ID NO: 410179 - DNA, 414 bp, Staphylococcus aureus
gtgattggtttgccagcgaatattttctatgggacaagtattccaacatgtatccttgtatttaaaaaatgtcgccaacaagacgataacgtattatttatcgatgcatccaatgattttgaaaaaggaaaaaatcaaaaccatttaagcgatgcccaagtcgaacgtattattgacacatacaagcgtaaagaaacaattgataaatacagttacagtgcgacattacaagagattgccgataacgattacaacctaaacataccgaggtatgtcgatacattcgaagaagaagcaccaattgatttagatcaagtccaacaagatttgaaaaatatcgacaaagaaatcgcagaaattgaacaagaaatcaatgcatacctgaaagaacttggggtgttgaaagatgagtaa

SEQ ID NO: 410180 - DNA, 231 bp, Staphylococcus aureus
atgattataacttttacagatgtttcctctgttgaaccatctggatatgttactttcactggaatatctacttctgttcctggtgttacgtccgccggtggcgttactgatactttcccatctggatctactgttactgtccatccttctggtactcgatcttttggaatctcaaagttcgttcctggtggtaagtctttatctcctgtttgcggaatatctactttttga

SEQ ID NO: 410181 - DNA, 2451 bp, Staphylococcus aureus
atgacatatagaatgaagaaatggcaaaaattatccaccattacgttattaatggctggtgcgattactttgaatggtggtgaattcagaagtattgataaaaatcaaatcgctgtggctgatacgaatgttcaaacgccagattatgaaaagttgaggaacacatggctggacgttaactatggttatgataagtatgatgagaagaatgacgcaatgaagaagaagtttgaggctacggagaatgaggcaaagaaattacttagtgagatgaaaactgaaagtggaaggacttacttgtgggatagtgcaaaagatttagataataagtctgcggatatgactcgtacctatcgtaatattgagaaaatcgcagaagcaatgaagcatcctaaaaccactttaaatactgatcaaaataaaaacaaagttaaagatgcccttgagtggttgcataaaaatgcctatggaaaagaaccgactgataaagtaaaagaactaactgagaattttaaaataactgattcatcaaagaaaaaagctttaaattggtgggattatgaaattggaacacctaaatcattaacaaatacactaatattactgaatggtgatatttcaagtgatgaaaagaaaaaatacactgcccctattaaaactttcgctccagatagtgacaaaatattatcgtcagtaggacaacctgaacaagctaaaggcggaaatttagtagatattactaaggtgaaacttttagaaagtattatcgaagaagataaagatatgatgaaaaagtctatagattcatttaataaagtcttcacttacgttcaagattctgccactgataaagatcggaatggattttataaagatggttcatatatcgaccataaagatgtcccatacactggtgcttatggcgttgtactcttagaggggatttctcaaatgatgcctatgataaaagaaacaccttttaatgataaaacccaaaataatacaaccttaaaatcatggattgacgacggatttttaccactcatttataaaggtgaaatgatggatttatcacgtggtagagccattagccgtgaaaatgaaacgagtcactcagcatctgcaactgtaatgaaatcattgttgagattaagtgatgccatggatgattcaacaaaagctaagtataaaaaaattgtcaaaacttcagttaaatctgattcaagttacggccaaaatgatacattaagctcttattcggatataagcaaaatgaagtctttaatggaagacagcactatttctactaacggtttaacacaacaacttaaaatatataatgacatggatcgtgtcacctatcacaataaagacttagactttgcatttggtttaagtatgacgtcgaaaaacgtcgcacgttacgaaagtatcaacggagagaacttaaaaggttggcacactggtgctggaatgtcttatttatacaatagcgatgtgaaacactaccgtgataacttctgggcgacagctgatatgaaacgtttagcaggtacaacaactttagaaaatgaagaacctaaaggtacggatgttaaaaagtcgagtaaaacttttgtaggcggaacaaaattcgatgaccaacatgctagtatcggaatggattttgaaaatcaggacaaaactttaactgccaaaaaatcatatttcatattaaacgataaaattgtcttcttaggaactggcattaaaagtactgattcatcaaagaatccagttacaacgattgaaaatcgcaaagcgaatgggtatacgttatatacagacgataaacaaacaaccgcttccgataatcagggaaccaattccgtctttttagagtcaaccaataaacctaaaaacaatataggctatcattttttaaacaaatctaaaatctccataaaaaaagaaactcatactggaaattggaaagaaataaataaaagccaaaaggatacacaaaaaactgatgagtattatgaagtaactcaaaagcattctaattctgacaataaatatggatatgtgttgtatccaggcttatctaaagatgtctttaaatccaaagcaagccaagtaactgtcgttaagcaagaagatgacttccacgttgtgaaagataatgaatcggtttgggctggtgttaattacagtgatagcgctaaaacttttgaaattaatggtactaaagtcgaagttaaaaccaaaggtatgtttatacttaaaaagaaagatgataaaacttatgaatgtagcttctataatcccgaatctacaaataccgcttcagatattgaatctaaaatttcaatgactggatactctattacaaacaaaaatacgtcgacttctaatgaatccggcgtgcgctttgaattacaacaaacattaaataaagatgataattaa

SEQ ID NO: 410182 - DNA, 138 bp, Staphylococcus aureus
atgtactttgatataaataatttggatataaaaaagttgaattttagaaaggtaaaaaacgcaattcatttaagtttaagtggcgataaataccagtttttggaggacggtaaaactatcaataatacttatttttag

SEQ ID NO: 410183 - DNA, 819 bp, Staphylococcus aureus
gtgtatcgttatttcggacaagaacgtaacaataccacatacaacttggcgcgtatgaatatgttattacatgatgtacgatatgaaaatttcgatatccgtaatgatgacacgttggaaaatccagcctttttaggccatacatttgatgcggttatagcgaatccgccatacagtgcaaaatggacagcagattcaaaatttgaaaatgacgaacgcttcagtggttacggcaaacttgcgccaaagtctaaagcagactttgcctttattcaacacatgatacattacctagacgatgaaggtaccatggccgttgtactcccacatggtgtcttattccgtggtgctgcagaaggtgtcattcgtcgttatttaattgaagaaaagaactatttagaagctgtgattggtttgccagcgaatattttctatgggacaagtattccaacatgtatccttgtatttaaaaaatgtcgccaacaagacgataacgtattatttatcgatgcatccaatgattttgaaaaaggaaaaaatcaaaaccatttaagcgatgcccaagtcgaacgtattattgacacatacaagcgtaaagaaacaattgataaatacagttacagtgcgacattacaagagattgccgataacgattacaacctaaacataccgaggtatgtcgatacattcgaagaagaagcaccaattgatttagatcaagtccaacaagatttgaaaaatatcgacaaagaaatcgcagaaattgaacaagaaatcaatgcatacctgaaagaacttggggtgttgaaagatgagtaa

SEQ ID NO: 410184 - DNA, 1698 bp, Staphylococcus aureus
ttgaattatcaagccttatatcgtatgtacagaccccaaagtttcgaggatgtcgtcggacaagaacatgtcacgaagacattgcgcaatgcgatttctaaagaaaaacagtcgcatgcttatatttttagtggtccgagaggcacggggaaaacgagtattgccaaagtgtttgctaaagcaatcaactgtttaaatagcactgatggagaaccttgtaatgaatgtcatatttgtaaaggcattacgcaggggactaattcagatgtgatagaaattgatgctgctagtaataatggcgttgatgaaataagaaatattagagacaaagttaaatatgcaccaagtgaatcgaaatataaagtttatattatagatgaggtgcacatgctaacaacaggtgcttttaatgcccttttaaagacgttagaagaacctccagcacacgctatttttatattggcaacgacagaaccacataaaatccctccaacaatcatttctagggcacaacgttttgattttaaagcaattagcctagatcaaattgttgaacgtttaaaatttgtagcagatgcacaacaaattgaatgtgaagatgaagccttggcatttatcgctaaagcgtctgaagggggtatgcgtgatgcattaagtattatggatcaggctattgcatttggtgatggtacgttaacattgcaagatgcgttgaatgtcacaggtagcgtacatgatgaagcgttggatcacttgtttgatgatattgtacaaggtgacgtacaagcatcttttaaaaaataccatcagtttataacagagggtaaagaagtgaatcgcctaataaatgatatgatttattttgtcagagatacgattatgaataaaacatctgagaaagatactgagtatcgagcactgatgaacttagaattagatatgttatatcaaatgattgatcttattaatgatacattagtgtcgattcgttttagtgtgaatcaaaacgttcattttgaagtgttgttagtaaaattagctgagcagattaagggtcaaccacaagtgattgcgaatgtagctgaaccagcacaaattgcttcatcgccaaacacagatgtattgttgcaacgtatggaacagttagagcaagaactaaaaacactaaaagcacaaggagtgagtgtcgctcctgctcaaaaatcttcgaaaaagcctgcgagaggcatacaaaaatctaaaaatgcattttcaatgcaacaaattgcaaaagtgctagataaagcgaataaggcagatatcaaattgttgaaagatcattggcaagaagtgattgatcatgccaaaaacaatgataaaaaatcactcgttagtttattgcaaaattcggaacctgtggcggcaagtgaagatcacgtacttgtgaaatttgaggaagagatccattgtgaaatcgtcaataaagacgacgagaaacgtagtagcatagaaagtgttgtatgtaatatcgttaataaaaacgttaaagttgttggtgtaccatcagatcaatggcaaagagttcgaacggagtatttacaaaatcgtaaaaacgaaggtgatgatatgccaaagcaacaagcgcaacaaacagatattgctcaaaaagcaaaagatcttttcggtgaagaaactgtacatgtgatagatgaagagtga

SEQ ID NO: 410185 - DNA, 318 bp, Staphylococcus aureus
atgcgcggtggcggaaacatgcaacaaatgatgaaacaaatgcaaaaaatgcaaaagaaaatggctcaagaacaagaaaaacttaaagaagagcgtattgtaggaacagctggcggtggcatggttgcagttactgtaactggtcataaagaagttgtcgacgttgaaatcaaagaagaagctgtagacccagatgatattgaaatgctacaagacttagtgttagcagctactaatgaagcgatgaataaagctgatgagcttactcaagaacgtttaggtaaacatactcaaggcttaaacatccctggaatgtga

SEQ ID NO: 410186 - DNA, 597 bp, Staphylococcus aureus; identical to SEQ ID NO: 406843

SEQ ID NO: 410187 - DNA, 1146 bp, Staphylococcus aureus
atgaatacgaatattagatattcaataaacttaaaaggggcgtcattatttttgagactaggagctcggatttttaaaactggtatagccattattttagctatgtctatcgcttctttactaccggatgatgttggtctgaaagccttagctggtgtcagtgctgttgttgcaatgcaacctagtatttatcgttcatttaaaacagtttctgatcaagcattgggtaacattataggtgccatattatctgttacaatggtaacaatttttagtgataattttatcattatgggtgttaccgtcatagtacttattgctattttatttaaatttaatttagcacatgttgctactttggcgagtgtaacagcattaatcattatgggacaacataccggttctttctatattaccgccttttacaggtttgtacttgtaatgattggtgtcataagttcatctctagttaactttgtgtttctaccacctaaatttgaaacaaaaatttactataattcattaaatatatcctcagatatttttatgtggtttaaattagtattaaatgatacgacggagtttaataatattaaacaagatagtcataatttaaaacaacgtgtcgaaaagttagagaaaatttatgattactatagcgaagaacgtcctattacaaaaaaacatattcaccaacagaatagaaagaaaatacttttcagagaagtagttcagacgactagacaagcttatgaagtattaaacaaattgtcgcgttatcaaaacgacttatatttacttaataacaatttcctattacaaatcaaattagatttagattcattaactgcttttcacgagcaaattttagctagcctttctaaaaaagcacgttataatgtgacacatgttgattatgagttagataatccgcagaaaaaagatttattgtctacatttcagcatgagttaataaatcatccttatcaaacggaatattcgtttgccaatgttatgcaaattgttgcagccatcgaagagtatcgacaccatttagagcatttagaccgcataagaattagctttttcacatatcatagatctgatgcagacattgaaattgttgaagaagactttgatttataa

SEQ ID NO: 410188 - DNA, 942 bp, Staphylococcus aureus; identical to SEQ ID NO: 406629

SEQ ID NO: 410189 - DNA, 993 bp, Staphylococcus aureus
atgacaaaaattatgttctttggtacgcgtgattatgagaaagagatggcattaaattgggggaaaaagaataatgtcgaagtaactacttctaaagagctattatcaagtgctacagtcgatcaattaaaagattacgatggcgtaactacaatgcaatttggtaagttagaagatgacgtttatcctaaattagaatcttacggtattaaacaaattgcacaacgtactgctggatttgatatgtatgatttagatttagctaaaaaacacaacattgtgatatctaacgttcctagttattcacctgaaacaattgcagagtattctgtttctatcgccctacaattagtgcgtcgcttcccagatattgaacgccgtgtacaagcacatgattttacttggcaagcagaaatcatgtctaaaccagttaaaaatatgactgttgcaattatcggtacgggtcgtatcggtgctgctactgctaaaatatatgcaggatttggtgctacaattacagcttatgacgcttatcctaataaagatttagactttttaacttataaagatagtgttaaagaagctattaaagatgccgatattatttctttacatgttccagcgaacaaggaaagctatcatttattcgataaagcaatgtttgatcatgtgaaaaaaggtgcaattttagttaacgcagcacgtggtgcagtcatcaatacacctgatttaatcgctgcagtgaacgatggtactttgttaggtgctgcgattgatacttatgaaaatgaagcagcatacttcacaaatgactggactaataaagacattgacgataaaacattattagagttaatcgaacatgaaagaattttagtaacaccacatattgctttcttctctgatgaagcagtacaaaaccttgttgaaggtggtttaaacgcagcattatctgtcattaacactggtacatgtgaaacacgtttaaattaa

SEQ ID NO: 410190 - DNA, 672 bp, Staphylococcus aureus
atgagcaatatgaatcaaacaattatggatgcatttcatttcagacatgcgactaagcaattcgatccacaaaagaaagtttcgaaagaagattttgaaacaatattagagtcaggtagattgtctccaagttctcttgggttagaaccttggaagtttgtcgtgattcaagatcaagcgttacgtgatgaattaaaagcgcacagttggggcgcagcaaaacaattagatacagcgagccattttgtgctaatttttgcgcgtaaaaatgtaacgtcaagatcaccgtatgtacaacatatgttaagagatattaaaaaatatgaggcacaaacgatcccagctgttgaacaaaaattcgatgcattccaagcagatttccatatttctgataatgatcaagccttgtatgactggtcaagtaaacaaacgtatatcgcattaggcaatatgatgacgacagccgcattgttaggtattgattcatgtccgatggaaggttttagtctggatacagtgacagacattttagcaaataaaggtatcttagatactgagcaatttggtttatcagtgatggttgcatttggctacagacaacaagatccaccgaaaaataaaacacgccaagcatatgaagatgttattgaatgggttggaccaaaagaataa

SEQ ID NO: 410191 - DNA, 807 bp, Staphylococcus aureus
atggcatttcacgataaaacagcaacacaagtgacaaacattgaactgaacgtaagagacttagacttaatgacaacattttacaaaaacattttaggactatccgttaaaagttctgacgataatacaaccgtattatctgttgggactggtggccatactctaacgttacatttattagaagacggccgtcagacttccccacgtgaagcagggctttttcatatagcatttttattaccaactactgaggatctagctaacttcttatatttcgtggcacaaaaaaatatgggcatcggcgctggtgatcatttagtaagtgaagctttatatttcaacgaccccgaaggtaatggtattgaagtctatcgcgatagaccttcatcttcatgggaatggcaaaatggcaaagttaaaatggatactttagaagttgatagccaaactttattaacacatcgtactgatgaaggttggcaaggaatgccagcaaaaggcatgattggacacttacatttaaaaacacatgatttagacgcagcatatcaatgttacattgaacaattaggattccaacatgtgtctgattttccacgtgcgctatttatgtcaacgaatcattatcaccatcatattgctgctaatacttggcaatccaatcaagcaagacaaaacaatgcacaaagttatggattaacacatgttgatatttatcaacccgacgcctcaacacatacatttacggcaccagaagggtttggcatcacagttcattcaaatactgaccttgttccagaaaaataa

SEQ ID NO: 410192 - DNA, 285 bp, Staphylococcus aureus
atgagtaaccttgaaatcaaacaaggcgagaacaaattctatattggtgatgatgaaaataatgctttagctgaaatcacataccgttttgtggataataatgaaattaacattgatcatacaggcgtatctgatgaacttggtggtcaaggtgttggcaaaaaactagttaaagcagttgttgaacatgctcgcgaaaatcatttaaaaatcattgcctcgtgttcatttgccaaacatatgttagaaaaagaagattcatatcaagatgtatatcttggttaa

SEQ ID NO: 410193 - DNA, 435 bp, Staphylococcus aureus
atggatcgaacgaaacaatcgctcaatgtctttgtcggaatgaatagggcgttagacacattagagcaaattacaaaagaagacgtaaagcgatatggcttaaatattactgaatttgcagtgctcgagttgctttataataaaggtccgcaaccaattcaacgtattagagaccgcgtattaattgcaagtagcagcatttcatatgttgtaagtcaattagaggacaaaggttggattacacgtgaaaaggataaagatgataaacgtgtatatatggcttgtttaactgaaaaaggtcaaagtcaaatggcagatattttccctaagcatgctgagacattaacaaaagcgtttgatgtgttaacaaaggatgaattaacaatcttacaacaagcgtttaagaaactaagtgcacaatctacagaagtgtaa

SEQ ID NO: 410194 - DNA, 960 bp, Staphylococcus aureus
atgataaataatcatgaattactaggtattcaccatgtcacagcaatgacagatgatgcagaacgtaattataaattttttacagaagtactaggcatgcgtttagttaaaaagacagtcaatcaagatgatatttatacgtatcatacattttttgcagatgatgtaggttcggcaggtacagacatgacgttctttgattttccaaatattacaaaagggcaggcaggaacaaattccattacaagaccgtcttttagagtgcctaacgatgacgcattaatgtattatgaacagcgctttgatgaatttggtgttaaacacgaaggtattcaagaattatttggtaaaaaagtgttgccatttgaagaagtcgatggccaagtgtatcaattaatttcagatgagttaaatgatggggtagcacctggtgtaccttggaagaatggaccggttccagtagataaagcgatttatggattaggacccattgaaattaaagtaagttattttgacgactttaaaaatattttagagactgtttacggtatgacaactattgcgcatgaagataatgtcgcattacttgaagttggcgaaggaggcaatggtggccaggtaatcttaataaaagatgataaagggccagcagcacgtcaaggttatggtgaggtacatcatgtgtcatttcgtgtgaaagatcatgatgcaatagaagcgtgggcaacgaaatataaagaggtaggtattaacaactcaggcatcgttaatcgtttctattttgaagcattatatgcacgtgtggggcatattttaatagaaatttcaacagatggaccaggatttatggaagatgaaccgtatgaaacattaggcgaagggttatccttaccaccatttttagaaaataaaagagagtatatagaatcagaaataagaccatttaatactaagcgttaa

SEQ ID NO: 410195 - DNA, 594 bp, Staphylococcus aureus
atggaacatatttttcgtgaaggacaaaaaggtgcgccaacgctaatattgttgcatggtacaggtggcgatgaattcgatttattgccattaggcgaagcattgaatgaaaattatcacttgttaagtattagaggacaagtttcagaaaatgggatgaaccggtatttcaaacgtcttggtgaaggtgtttatgatgaagaagatttggaatttcgtggacaagaattgttagcgttcattaaagaagctgctgaacgttatgaatttgatattgaaaaagcagtacttgttggattttcaaatggatcaaatatagcgattaacttaatgttgcgttcggaagcaccatttaaaaaagcattgttatatgcaccgttatacccagttgaagtaacgtcaacaaaggatttatcagatgtaagtgtgttgctttctatggggaaacatgatccaattgtgccattagctgcaagtgaacaagtcattaacttgtttaagacacgtggggcagtagtcgaagaagtttgggtgaatggtcatgaaattacagaaactggattaacggctggtcaacaaatacttgggaaataa

SEQ ID NO: 410196 - DNA, 1080 bp, Staphylococcus aureus
atgcgtatcttaaaagagtccattattgtggcatttgcctttgtgggtgttgtcgttggtgccggctttgctactggtcaagaaattttccagtttttcacaagtcatggcgcatatagcatttcaggcattattgtaacaggactattgattactttaggtggaatgattgtcatgcatacaggtcatcatctaaagtctagaaatcattctgattcaattaactatttcttatacccctctattgcaagaggttttgatattattttgacaatgtttatgttgtctttagctattattatgactgcaggtggtgcgtcaaccattcatcaaagtttcaacttaccgtattggctgagcgcactcatattagtcgcctttattttagcaacactgtttctaaaattcgatcgtttaattgctgtgcttggcggtgttaccccatttttaattgcgattgtcattatgattgcggtctactatttcacaacaagtcatcttgattttactgccgctaataatgatgctcagattcataagcagaaatcattatcacctggatggtggtttgatgcgattaactatgcaagtttgcaaattgctgctgccttcagcttcttatcagtgatgggtagcaaagttaaatatcgtgactcaacgttatatgggggcttgattggcggtttaatcattacatttttactcatgatgattaatctaggtttaatttctcaattcgataaaattaaacacgtcgatttacctacattaaaattagcgacacaaatgtctccgtcaattggtattattatgtctgtcattatgatacttgtcatctacaatactgttgttggattaatgtatgcatttgcgtcacgtttcagcgttccattcagcagacgttacttcatcattattattacaatggctgtcatcacttatattagtacatttatcggtttcatttcattaattggaaaagtattccctattatgggattgttcggtttcatcttactcatacctgtactctataaaggtttaattaagcgtattaccggcaaatctcatatcgattaa

SEQ ID NO: 410197 - DNA, 1965 bp, Staphylococcus aureus
atgactcaaattactgaaaaagaattaaaaaagaagtatttagatttactatcccaaaattttgatactccagaaaaacttgcaactgaaattatcaatttagaatcaattttagaattacctaaaggtacggaacatttcgtcagcgatttacatggtgaatacgaagctttccaacacgtattacgcaacggttctgggaatgtgcgagcgaaaatcaatgatattttcaaagagagactttcaactaaggagcttaatgatttaactgctcttgtctactatccagaagacaaattaaaattgattaaaagtgatttccaaagttgcggtcaacttaatgtctggtatatcacaacaatcgaacatttaattgagttgattaaatattgttcttcaaaatatacgcgttcaaaactgcgtaaagcattgccaaaacaatacgtttatattattgaggaactactgtataaaagtaatgaatatcaaaataaaaaatcatattacgaaacacttgttaaccaagtaattgaacttaaacaggcagatgatttaattattggactcgcttattccgtacaacgcttagtcgtcgatcatttacacgttgtcggtgatatttatgatcgtggaccacaaccagataaaattatggatacactgattaattatcattccctagatattcaatggggtaatcatgatgtgctttgggttggagcctatgctgggtcaaaagtatgcttagcaaacttacttcgaatttgtgcacgctatgataatttagatattatcgaagacgcttatggcattaatttaagaccactgcttactttagctgaaaaatactatgacgcagataatcctgcttttaagcctaaaaaaagacctgacaaacatgaacgtttaactcaacgtgaagaaagtcaaattactaaaattcatcaagctattgcgatgattcaattcaagttagaaataccaattattaaacgtcgtccaaatttcgaaatggaagaacgtcttgtgcttgaaaaggttaattatgatacaaatgaaattacagtttatggtaatacatacccgttgaaagacacatgtttccaaactatcaatcgtaataatccagcagaattactacctgaagaagaagaagtcatgaataaactattattgtcattccaacaatctgaaaaattacgtcgtcatatgtctttcttgatgcgtaaaggttcgctttacttaccatataatggtaatttactcattcatggttgtattccagttgatgaaaatggtgagatggaatcatttgaaattgatggtcatacttacagcggccaagaattattagatgtgtttgagtatcatgtccgtaaatcatttgatgaaaaagaaaatactgatgacttatcgacggatttagtttggtatttatggactgggaaatattcgtcattatttggtaaacgcgcgatgactacgtttgagcgatattttattgcagataaagcttctcataaagaagaaaaaaatccatactatcatttacgtgaagatgtgaatatggttcgtaaaatgctcagtgatttcggattaaatccagatgaaggacgcattattaatggtcacacaccagtgaaagaaatcaatggcgaagatcctatcaaggctgatggaaagatgcttgtcattgatggtggtttttcaaaagcttatcagtcaacaactggcattgcaggctatacattgttgtataattcattcggaatgcaactcgttgcacaccaacaatttaacgctaaagaaaaaatactttccgaaggtatcgatgaactttctataaagcgcgttgtagacaaagaattacaacgtaagaagattcgtgataccaatattggtaaagagcttcaagctcaaatagatattttgaaaatgttaatgcatgatcgttacttagactaa

SEQ ID NO: 410198 - DNA, 771 bp, Staphylococcus aureus
atgggaactttaattaaacaagaatgtttcaaattatttaaaaagaaatcaacttttatcgcacctattgtctttattctactaatggttgctcaaggttatcttgctacaaaatacaataaaatttttacgccacaggaatctttcacatctgcttataatggtttttcatggtttgcatttttattaattattcaagcaagtacaatcatttcaatggaatttcattacggtacgattaaaaatttactctatcgtgaatattcaagaacaactatgattgttagcaaaatcatcacattatttattatttctttaatttattttgttattacaattattgcttcaattgttattgggtctttattctttaatgatttaaatatatttgaaagtagcggtaatcaattatctttattgaatcaattattattagttagtttaggcacatttgttggcgtttggttagttttaagcttaacgttgctattatcatctgcaactaattcaacgggagtagccattgctgtaggtattgttttttattttgcaagttctattttagcagttattcaaacggcacttttagaaaaaatagactggctaaagtggaatcctattaatatgatgaatattatgcttcaaacagttgaaaaaggctttagtaagtcgacgaaattagaacttcatgaattgtttattggtaatattgcttatatttctattttcttaatacttgtagtatttattttcaagaagaaaaatatttag

SEQ ID NO: 410199 - DNA, 696 bp, Staphylococcus aureus
atggatgttttaacaatagaacatttaacaaagaagataggcaacaaaacgattctcgaagatgtatcatttaagctgaaacgcggacaaatagttggtctcgttggagcgaatggtgcaggtaaaacaactttaatgaaagttatattaggttactctagtttccaaagcgggaattttaatgttattaacagcaaggacagcaaaagcaatatcggcgcattgattgaaaatccaggaatatatccttttatgtctggatatgaaaacttgaagttattgaatgaatcaaaaaacactcaagatatcgataaaattgtctcacaacttcatatggatgaatacattcataaaaaagctaaaacgtattctcttggtatgaaacaaaaattaggaattgctatagcatttttaaatgaccctcaatttattatcttagatgaaccaatgaatggcttagatccaaaagctgtgcgagatgtacgtgaattgattgtccaaaaagcgcaagaaggtgttactttcttaatttcgagtcatattttaagtgaattagttaaaatcacaaactctatccttattattaacaaaggtaaaattgttacagaaacatcggaagaagaacttaaacaatttaaagataatgatttagaaaatgtattactagaaatcatagaaagggaggaccaagcataa

SEQ ID NO: 410200 - DNA, 612 bp, Staphylococcus aureus
atggaacaaattatcactgaatttattagtcgttttgggtatgcagccatttttatattaattttattagaaaatgttttacctatcgtaccatcggaaattattctgacatttgctggccttatgtctgttaaatcacatttatcaattttaaccttatttattattgcaaccatcgcatcgtttatagggctgttaattttatattatatctgtcgtttaatttcagaagaacgtctatatcgctttattgatcgacacggtaagtggattaaattgaaaagtaaggatttaaagcgagcaaatgattggtttaaaaagtatggcgtatgggctgtatttatctgtcgtttcatacctgtattacgtgtattgattaccattccagccggtgtaaaccgcatgaatgttgtgacatttaccgttatttcattaataggtacaacaatttggaatttcggtttaattttactaggacgcacgttgagcgatagctttggtatgttgatgactggtcttcatacatattcacgtattatgtatgttgtcatcattatcgcagtcatttactttgctatacgttacattggcaaacgtaagagagtaaaataa

SEQ ID NO: 410201 - DNA, 1278 bp, Staphylococcus aureus
atgaaggaaaaacgaactaacgtaaggtggatgttcgcgcttgcgttcttctttattggggttattgcgtatatggatagagcaaacatttcatatatcgctaagcaaatgatggatgatttagggatgacaaaaccacaatttggtttattggcatcattcttctctctaggttatgcattaatgcaagtaccatcggggatgttggctgaaaaattcggtccacgtaagatgattactattgcattagtttggtggagtgcatttacaatcttaacgggtatgattaagaaccacggtttaatttatttagtgagattcttatttggtgtgggtgaggcgccaatgtacccttctaatgctgtgtttaactcattttggttctctaaaaatgaaaaaggtagagcatcaagtgcattattagcaggatcatatttcggacctgtattagcaccaatagttacaattgctattgttaacgcatttaactggcaagcagtattttacatttttggtgcagtaggtattttaatggctgtattatgggcgattattgccaaagacttacctgagcaacatagaatggttaatgaagcggagaaacgtttcattatggaaaatcgtgatatcgtagctactgaaaagtcatcaccaccatggaatgatttctttaaacgttttagcttctatgcaattgcaattcaatactttgttgtacaatttatcattacattattcttaatttggttaccgacgtatttaacagaagtattccacgttaactttaaagaaatgagcattagttcattaccttggttattaatgttcttcttaatcttatcagcaggtgcaatttctgaccgtgtattaggattaggtcgttcaaaattcgtagctagaggtgtaattgcaatcgcaggatttattgtatttgcagtttcaattatctttgctgtacgtacaggaaatttatatgtaagtattttctggttatcactaggtcttggtggtatcggtatttcaatgggtatgagttgggctgcagcaactgacttaggacgtaacttctctggtacagtatcagggtggatgaacttatggggtaatataggtgcattaatcagtccgctattagcaggtctattcgtagaacatttaggttggacaatgacattccaattgttaatcgttccagcagtaatcgctgtgattatgtggttctatgtgaaaccagatcaacctttaattgttagtgatgataaagcaatagaaaaataa

SEQ ID NO: 410202 - DNA, 417 bp, Staphylococcus aureus
atgccctttacaatgaaaggttaccccgaaaaatggaaagattttgaagtaattaaacggcaaaaagcgatagaaattgcgaatgcaatgttaaaagaaggatatcttgaaaaagatgttgttcctattgcggcgaaaaaagcgaaagattggtatcgagcgttatcgaaagaagaaatcaaagcattagaagaagagaacttcgtacaattccatacagcaacaatggaaaaaacagaggtggatagtgaatatgcaacaactgataatgaagaacatattcaagaacaatcaaatcaagataaatcgtactttgatagcgaatcaattggcaaccaaagtggtggcgttcgacaaagagaaccgcttatggatggtccacatccaaaagttgtggaatcatttaaagacgtataa

SEQ ID NO: 410203 - DNA, 693 bp, Staphylococcus aureus
atgtatgtagatcgaaaaccatcattatatttagaggatttgcgacatgattttaaaaatagtttaagtaaatttgaaaatggtgatgaagcatttgatacgttattaggtttcgtagagttagatcatatttattcgtcagcactaaaggaaataagcactaaactgagtattttagatgacaatttcaatcacatttataaacacaatcctatacatcatatggagcgacgtgtgaaagaaatgcgtagtttaatagaaaagcttaatcgtaaaggattacagattagtgcagaaactgccaaagaacacatactggatattgcgggaattcgcgtagtatgtaattacttagatgatatttatttgattgaagagatgttgcttaaacaagaagacgtacaattgataaaacgtaaagattatattcagcaccctaaagaaaatggttaccgcagtttacatatcgttgtatccattccagtctttttagcagaacgcgttgaggtattgcctgttgaaattcaaattagaacgataggtatggatatgtgggcaagtttagaacataaaatacgttataaaaacaatgcagagacggaaaagtatcgagatttactgaaagaatgtgcgacagagattactgaagttgaagataaattacaacaaattcattctgaaataacagagtag

SEQ ID NO: 410204 - DNA, 765 bp, Staphylococcus aureus
atgtctaactattcgactggagaactcgcaaaattatgcaatgtgacaacacgaacgattcaatattatgatcgcaaaggtattttgaaaccacaaggatttacagaaggaaagcgtcgtgtgtatacagaacaacagcgacaaacattagagttaatcttattgcttaaagatttaggttgtgcgttaagcgatatagatatgttgctaaaaggtgaaggtactttgaagacactcaataccttactaaccatgaaacaacaagaaattaaccaacaagtcaaacagcaacaagcggtattaaacaaaattaaaaatgttcaatattacgtaaatgaagcgtcgacgtctccaatcacacacttaaaagacatagagcatgtcatgagtaaatcagctgaaatgaaaagtattcgtcgtaacatttggattagtgctggtattataggaataattcaatattctagcattataagtgcaattttgatgaaaaataaatggccgtttttaattgctttaccatttatgatttgttatggcattggtgttactttttattaccaacaaaaggttgcctatttatgtcctaactgccagcatatattctcaccatctttatggcaagttatcaaagcgaaacatactgcgacaacacgacgattcgaatgtccaaactgtcatgaaacgcattattgcattgaagtacctaaagcgcataagagtacagaacaattagaaatatcccacatacaacataacaattaa

SEQ ID NO: 410205 - DNA, 1554 bp, Staphylococcus aureus
atgaaatatatgattggtgtcgacattggaacgacgagtaccaagtcagtcttatatgatgaaaatggaactttcatcatgaaacatcaaatcggctatgatttactcacaccaaacgttgatgtctcagaagaaaacccagatgaattatttgatgcagtactaatgactattaaatatgttatgagagaatcgaaagttaataaagacgacattaagtttgtgtcatttagtgcgcaaatgcatagcttgattgcgatggatcagcaacatcaaagattaacaaataatattacttgggcagataaccgcgctgcaaaatatgcaacagtaataaatgaagtgcatgatggcaatgcgatttaccagcgaacaggtacgcctattcatcctatgtcgcctttagtgaaaattttttggatgaaacatgaatggcaagatgtgtttcaacgtactgctaagtttgcagatattaaaacatacattttctatcatttgtttgatacatatatcattgattattcaatggcttccgcaacaggtatgtttaatttagaaacattagattgggatgttggggcattagaattgcttggtatttccgaggaaatgttgccggaattagtgccaacaacgtatgtgatgaaaggtatgaaagaacgttatgcaacattaatgggacttaatgaagatacaccgtttgttattggtgcgagtgatggggtcctttctaatttgggtgtcaatagtgttggtaaaggagaagttgctgtcacaatcggtacatctggggcgattcgtactgtgatagataaaccgcgtactgattacaaaggtagaatattttgttatgtcttaacagaggaccactacgtcattggaggccctgtaaataatgggggtgtcgtattgagatggttgcgcgacgagttgttagcaagcgaagtcgaaactgcgaaacgtctcggtgttgatccatatgacgttttaactcaaattgcaaagcgtgttaaaccaggtgcagatggtttaatattccatccctatttagctggagaacgtgcaccgctttggaacgcaaatgcaagaggttcattcttcggtttaactttatctcataaaaaagaacatatgattcgcgctgcattagaaggtgttctttacaatttgtataccgtctatcttgcgcttattgaagtaatgaatgaaacacctaagatgataaaagcaacaggtggttttgcgaaaagtgaagtatggcgtcaaatgatgtcagatatatttgacacagagttagtggttcctgaaagttatgaaagttcatgcttaggtgcctgcgtactcggacttaaagctgtaggtggcattgaagatttttcaatcgtttcatcgatggtcggtgccacaaacaatcatacgccgattaaagaaaatgtcgctgtttatcaagagctcgtatccatttttatcaatttaagtcgttctttaacagagaattatgaacaaattgcagattttcaacgccaacatatggctgaaaataaaacacaataa

SEQ ID NO: 410206 - DNA, 1359 bp, Staphylococcus aureus
atgtttaacgaaatatggccgttaatcagtgttgttttaggtatcgttattttattagtattaatcattgggtttaaattaaatacatttatttcattaattatcacatcgatgattacagcgttaatgctaggtataccattgactaaaattatggagacgattgagaaagggatgggcagtacgctcggccacattgcactgatattcggtttaggtgccatacttgggaaattacttgctgatggtggtggtgcaactcgaattgcagacacgttgattcaaaaatttggtcaaaaacatgtacaatgggcaatgcttgttgcagcatttatcgtcggtattgcattgttctttgaagtaggtttagtcttactgattccattagtatttacagtagcaaaacgcgcaaatgtttcagtgttaaaactaggactacctatggtaacagctttatctgtgacacatggctttttaccaccacatccaggaccggtagtcatcgcaaaagaattaaaggcaaatgttggagatgtattactgtacggtatgattattgccattccagttacactcattgcaggacctatatttaacaaagttgcacaaaaaatgattccgtctgcgtatacacgagaaggcgatatttcagcgttaggtgcacaaaaagaatttacggatcaagagatgccaggatttggtatgagtttattaacagcaacattaccagttatattaatgttagtgtctacgataacgcaacttgtaactgggcacgacaaacctacaaatctatttgaatctatcatttatatgataggaacagcagggacagctatgcttattgcagtaatgtttgcaatcgttacgatgggattaatgagaaagcgtaagatgaatcatattatggaatcagtgacgaatgcgatttatccaatcggaatgatgttattgattattggcggtggcggtacatttaaacaagtattaattgacggtggtgtcggaaatacaattgctaaaatgtttgaaggtacagagatgtctccaattttactagcatggattgttgcagctgtgctacgtatcgcattaggttcggctacagtagctgcgatttcaactacaggtattgtcttaccattattacaatcatcagatgtaaatgttgcattagttgtacttgcgataggtgcaggtagtgtgattttgtctcatgtaaatgacgcaggattttggatgtttaaagaatattttggtttaactgtaaaagaaacattcttaacatggtcattattagaaacaattatttccgtttcaggtatcatcttcattttattcatcagcttatttgtttaa

SEQ ID NO: 410207 - DNA, 867 bp, Staphylococcus aureus; identical to SEQ ID NO: 409360

SEQ ID NO: 410208 - DNA, 747 bp, Staphylococcus aureus; identical to SEQ ID NO: 409359

SEQ ID NO: 410209 - DNA, 351 bp, Staphylococcus aureus; identical to SEQ ID NO: 409358

SEQ ID NO: 410210 - DNA, 498 bp, Staphylococcus aureus
atgaaaagaaactttccaaaattaatagctttaagtttaatactttctttaagtgttacccctattgcaaacgctgagagcaattcaaatatcaaagcaaaagataagaagcatgtgcaagttaatgtcgaggacaagagtattcctactgaagtacgtaatttagcgcaaaaagactatctttcttatgttacttcacttgataaaatctataataaagagaaagcctcgtatacacttggtgaaccttttaaaatttataaattcaacaaaaagagtgatggtaattattattttccagttttgaacactgaaggtaatatcgattatatagttacaatttcaccaaaagtcactaagtattctagttcatcttctaaatacacaatcaatgtttctccatttttatctaaagtcttaaatcaatataaagatcaacaaattactattttgacaaactcaaaaggttactatgtggttacaacgagcaatatgtaa

SEQ ID NO: 410211 - DNA, 684 bp, Staphylococcus aureus
atgactactaaggaaaatatagacattcttcgaaagccaggtgcacaagccttaagtttaatatcattgtttttgatacttttttcatgtctaactttcttttttggtttagattatgaaaggtttccaaactatttaaagataacgacaattatagaattaataattattgtaattagtttacttcaatggattaggtttatagatttcgaaaaagaaagtgcacagaaatataaaaaaatatatgctcgatttttagttattataaatgtgttaactacgatcactgtagtatttgcactgtgtaacctttattattttgcagctgtacaaaaccattatgatttattcaattattggttaatgggtacgatttcaatcataattagctatttattattagtaattggcggaatgtttacgttgttaaaattacctaaagtaacaaaacgttggggtggtaaaactaaaacacatttcggtttattattaactgcgttgagctcatttatatatattgaaaaaattatcgaatatatattgattcctaatgtcgtagaatccaagtttataattattgtgagcatgttggttatcgctggagcacaatttgtggcatttcaatttattatgcaatacagtagattctatatttttgaattaaatacagaagatgatgactaa

SEQ ID NO: 410212 - DNA, 492 bp, Staphylococcus aureus
atgactttcgaagaaaaacaaagtgaaatgtacaataaaattgcaaatgagattagtggaatgataccggttgagtgggaaaaggtatatacaattgcttatgtagataatcaaggtggagaggtcatttttaattatactaaacctggaagtgaagaattgaattattattcagatattcctaaagatttcaatgtctcaaatgatatttttatggatttatggatgaaagtttatcggatgtttgatgagttaagagaaacttttaaaaaagaaaggtttgaaccatggacatcatgtgaatttgattttacaagagagggtaaattgaaagtatcatttgattatatagattggataaatacagagtttgatcaattgggccgtgaaaattattatatgtacaaaaaatttggggttataccagaaatggaatatgaaatggaggaggttaaacaaatcgagcaatatattaaagagcaagaagaataa

SEQ ID NO: 410213 - DNA, 630 bp, Staphylococcus aureus
gtgtataagagacagggtatatatggtatcaataacattaatagattattacaagcaaataataaaaatgattctgtaatttggggtgtgaaagaatataaagttggtgatcctattctatttaatgaaactaataagtactcaccaatactttttaataatttaaaagggtcaataattgaaatatatgtttttgaagaatatatattgtttgatttagaaataaataaagttataaatgaacttgatattattttgttagaaattgatttaataagttcttctgaaaatagttcggtgattaggattagagtagaaaaaagtgatgggttgaatgatgatgataatgattcatctgatagtatagttccttttcaagtgagttatgcaatttcaatacataaagctcaagggttagagtttaattcagtaaaaattgttatatctgatgatttagacgaacaaatcactaacaatattttttatactgcaattacacgagctagagaaaatttaaagatttattggtcaccacgaactgaaaagaaaattattgataatataatttctaaaagaaacttgaaggatctttctatattaaaatctcgaataaaaaaacaaaatgcttag

SEQ ID NO: 410214 - DNA, 813 bp, Staphylococcus aureus
ttgagttttgtgtcagataagacgttagaaaaacagaaattgtataaatctaatttgtgtaaaaatcgattttgtcctgtatgtgcatggcgaaaagcgagaaaagatgcgttaggtttatcattgatgatgcaatatattaagcaaaaggaagataaacaattcatctttttaacacttacgacgccaaatgtaacagttgagcatttggaagatgaaataaaacattataatgagtcgtttagacgattaagtaatcgtaaacactttaaatctatagctaaaggttacgtaagaaaattagaaatcacttataacaaaaaacgcgatgattataatccacattttcatgtattaattgcggttaataaatcatattttacagataagcgatattatataagccaaaaagaatggcttgaactatggcgtgatgtgacaggtaatcaagctattacacaagttcatgttcaaaaggttaagcaaaacaataataaagaactttatgaaatggctaaatattccggtaaagatagcgattatctcgttaatcaaaaagtattcgacgcattttataaagcattaaaaggcaaacaggtacttgtctattctggattgtttaaagatgcacgcaaaaagctaaaaaatggcgagttggattatctcaaagaaagtgatccgacagaatatatttaccaaatcttttatgtgtggaatcaaaaagagtatctagcaagtgagatttacgacttaaccgaagaagaaaaacgagaagtaaacaaccaaatgattaacgaaattgaagaagagtaa

SEQ ID NO: 410215 - DNA, 393 bp, Staphylococcus aureus
ttggaaaacactaataatctattcgaaagattagaaatattaacaaaaccagaaaatatagaaactacattttttattatccttaaattcattatttttatcatcattctaatgataggagcgttaatagttttaggaatattgaatagcagaagaaattacaaccctgaaaaaatttggaacaaaagaaaaattcgcactcttaaatcagaaattggcggaggacaggaatactattttagatactggatctggcaaagaaataaaagaaaaaatattctaatcgctttaagagattactctccatatgaagaatattatccaagtcaaaaatggctaaaaaaagataaatctaaattaccattccgaagagaaatatgggttataaaataa

SEQ ID NO: 410216 - DNA, 324 bp, Staphylococcus aureus
atgccttatatttatttaataatagccataagtactgaagttattggaagtgcatttcttaaatcttcagaaggcttttcaaaatttataccatccttaggaacaataatttcatttggaatttgtttctattttttaagtaaaacaatgcaacacctaccactaaatataacttatgcaacttgggcgggactaggtttagtcttaacaaccgtagtctcaataattattttcaaagaacaaataaatctaataactatagtatctatagttttaatcatagtcggcgtagttttgttaaacattttcggaacatcgcattaa

SEQ ID NO: 410217 - DNA, 390 bp, Staphylococcus aureus; identical to SEQ ID NO: 409396

SEQ ID NO: 410218 - DNA, 339 bp, Staphylococcus aureus
atggctaaaggtgaagaccctgaaaaagttattaatgaaggttatggctttgaattttcacaagatgatatgaaaaaggttaaaaaagagaataaaaagttgcaaaaattacttaaaaaaaataaagatgaaaaatctgcaaatgtagaaaaacaaacaaaagccttacaacacgcaattcagaagccagtaaatgataaatcttatacaggatggacttccgatggacatacaggcgaagatgttaatacctacgcttatggacctagatcagaatcatttagtggtaatatcgaaaatacagaaagcgcaaaaataatatttgatatattcaagtaa

SEQ ID NO: 410219 - DNA, 237 bp, Staphylococcus aureus
atggataaaaatatattaaaaacaaccataaaagaaatgaataaagatgaattagtacaattgttaaataaatatgtggaaatttcaaatcaagttaaatttcaagatattttaaaaagtaaaactgattatgaaaatcttttgattaaaaatttagaagaagatacaaaaattttggaaaatgcttacattaaatttatgtttaataggttttataagaaaatcaaagcattttaa

SEQ ID NO: 410220 - DNA, 693 bp, Staphylococcus aureus
atgttggaagaacaaacaggtattaaattgattgatgaaaggatcgataattctaaaagattaagcggtaccttgatttcaaagataacacttgataaaaaagattacttatgtatttctactgaaaatataccgcctcaatacagagaaaatgcatctacaagcttttatataaaaaaaatagatggtataagaaagtggcttgaatctgaattattaactaacctgttagctttagattttgaatatacaattcagtgtataagaaaagatgccgaagaaactgatttaatagttagcgctcagtcaatgaatataaacggcggagccaaagcaactttagattcaacaagctctcaagtattaatacttcctattttagacgaaattaaaaatctattagaagataattctgaactatttaaggaatcacaagaaggttataaaatacttaatgattacattgatgaattggaaaaagaatctgagttaccatgggttaccttaagttttaataaaaaaactcaagtcaagtttttatttgaagtatcaacaagaaaggattatactttattaaattattacagtggagactatataaaaagacaaggaagggaagaaatgaaaaatgttacaaaaaccatattatcaagatataatacattcagtaatctcttctcaagaggtgtctaa

SEQ ID NO: 410221 - DNA, 561 bp, Staphylococcus aureus
atgtctcgaaaaacggcgctattagttttggatatgcaagaaggtatagcgagtagtatacctagaataaaaaatattattaaagcgaatcagagagcaattgaagcagcaagacaacatcgaataccagtcattttcatacgtttagtgttagataagcattttaatgatgtctcctcgagtaataaagtgttttcaacaattaaagctcaaggatatgcgattactgaagcagatgcatctacacgaatacttgaagacttagcaccactagaagatgagccgattatttctaagcgacgctttagcgcatttacaggtagttacttggaagtttatttacgtgcaaatgatattaatcatttagtattaacaggtgtctctacaagtggcgctgtattgagcacggcattagaaagtgtagataaagactattatattactgttttagaagatgctgttggtgatagatcagatgataaacatgactttattattgaacaaattttatcacgctcatgtgacattgaatccgtagagtcatggaaaagtagtttatag

SEQ ID NO: 410222 - DNA, 1896 bp, Staphylococcus aureus
atggctaaatatcgagggaaaccgtttcgattatatgtaaagttatcgtgttcgacaatgatggcgactagtatcattttaacgaatatcttgccgtacgatgcccaagctgtatctgaaaaggatactgaaatttcaaaagagatattatctaagcaagatttattagacaaagttgacaaagcaaatcgtcaaattgagcaattaaaacagttatcggcttcatctaaagcacattataaagcacaactaaatgaagcgaaaacagcatcgcaaatagatgaaatcataaaacgagctaatgagttggatagcaaagacaataaaggttctcacattgaaatgaacggtcaaagtgatatagacagtaaattagatcaattgcttaaagatttaaatgaggtttcttcaaaggttgataggggtcaacaaagtgacgaggacgatcttaatgcaatgaaaaatgatatgtcacaaacggctgcaacaaaacatggagaaaaagataataaaaatgatgaagcaatggtagataatgcgttagaagacttagaccatttgagtcaacaaatacgcaaatcgaaagatacatcgaaagatccagaagtgtctacaacagataataatcatgaagtggctaaaacgccaaataatgatgattctggacatggtgtgttaaataaatttctttcaaatgaagagaatcaaagccatagtaatcgactcactgataaattacaaggaagcgataaaattaatcatgctatgattgaaaaattggctaaaagtaatgcctcaacgcaacattacacatatcataaactgaatacgttacaatctttagatcaacgtattgcaaatacgcaacttcctaaaaatcaaaaatcagacttaatgagcgaagtaaataagacgaaagagcgtataaaaagtcaacgaaatattattttggaagaacttgcacgtactgatgataaaaagcatgctacacaacgcattttagaaagtatatttaataaagacgaggcagataaaattctaaaagatatacgtgttgatggtaaaacagatcaacaaattgcagatcaaattactcgtcatattgatcaactatctctgacaacgagtgatgatttattaacgtcattgattgatcaatcacaagataagtcgctattgatttctcaaattttacaaacgaaattaggaaaagctgaagcagataaattggctaaagattggacgaataaaggattatcaaatcgtcaaatcgttgaccaattgaagaaacattttgcatcaactggtgacacgtcttcagatgatatattaaaagcaattttgaataatgccaaagataaaaaacaagcaattgaaacgattttagcaacacgtatagaaagacaaaaggcaaaattactggcagatttaattactaaaatagaaacagatcaaaataaaatttttaatttagttaaatcggcattgaatggtaaagcggatgatttattgaatttacaaaagagactcaatcaaacgaaaaaagatatagactatattttatcaccaatagtaaatcgtccaagtttactagatcgattgaataaaaatgggaaaacaacagatttaaataagttagcaaatttaatgaatcaaggatcaaatttattagacagtattccagatatacccacaccaaagccagaaaagacgttaacacttggtaaaggtaatggattattaagtggattattaaatgctgatggtaatatatctttgcctaaagcgggggaaacgataaaagaacattggttgccgatatctgtaattgttggtgcaatgggtgtactaatggtttggttatcacgacgcaataagttgaaaaataaagcataa

SEQ ID NO: 410223 - DNA, 387 bp, Staphylococcus aureus; identical to SEQ ID NO: 407651

SEQ ID NO: 410224 - DNA, 570 bp, Staphylococcus aureus
atgagtgagttaacggcaaaacaagcgcgttttgtgaatgagtatataagaacacttaatgtaacacaaagtgccataaaagcaggctatagcgcaaatagtgcacatgtgacaggatgtaggttattaaagaagccacacatcaagcaatatatacaagaacaaaaagataagattatagatgagaatgtattaaccgcaaaagagttactacatgtgcttacgaatgcggcagtcggtgatgagacagaaacgaaagaagttgtagtcaagcgaggggaatataaagagaatccacaaagtggcaaagtacagctagtctataacgaacatgttgaactgatagaggtaccaataaaacctagtgatcgtttaaaagctcgtgatatgttgggtaaataccataagttatttacagataagcatgatattaacgggaatgtgcctatattcattaatattggtgaatgggatggcgatgatgaagatttagataagacggtacaagaggtatctaacgctaatcctaatcatactgtgattgtggatgatataccgttagaggattga

SEQ ID NO: 410225 - DNA, 573 bp, Staphylococcus aureus
atgaaattaaaatcattagcagtgttatcaatgtcagcggtggtgcttactgcatgtggcaatgatactccaaaaggtgaaacaaaatcaacagagtcaaatactaatcaagacactaatacaacaaaagatgttattgcattaaaagatgttaaaacaagcccagaagatgctgtgaaaaaagctgaagaaacttacaaaggccaaaagttgaaaggaatttcatttgaaaattctaatggtgaatgggcttataaagtgacacaacaaaaatctggtgaagagtcagaagtacttgttgctgataaaaataaaaaagtgattaacaaaaagactgaaaaagaagatacagtgaatgaaaatgataactttaaatatagcgatgctatagattacaaaaaagccattaaagaaggacaaaaagaatttgatggtgatattaaagaatggtcacttgaaaaagatgatggcaaacttgtttacaatatcgatttgaaaaaaggtaataaaaaacaagaagttactgttgatgctaaaaacggtaaagtattaaagagtgagcaagatcactaa

SEQ ID NO: 410226 - DNA, 264 bp, Staphylococcus aureus
atgaatatgcatattttatataacttacgaactaaacataatttagaaattgacgaattagcacaacaattaaatgagaaatatggtactaaatatgaagcacatcaaatttgggaatgggagaatcatcaccatgaacctaaatttaaagatgccatgcatttagctgacttctttgatgcaccatatgaaatgtttttagaaagtaaggttaaagaatatcagaaacatttagaagaagtcgatattcgaatggataaatag

SEQ ID NO: 410227 - DNA, 252 bp, Staphylococcus aureus
atgtttggatttattggaatgttaattgtcggtggcttaattggatgggctgctggtgctattatgggtaaagatatcccaggtggtattttaggtaatattatcgcaggtattattggatcatggttaggtggaacattattaggacattggggtcctgaactaggaagcatttacatcttaccagctttaattggttcaattatcttaattgcactggtaactttaattttaagagctatgcgtaaataa

SEQ ID NO: 410228 - DNA, 387 bp, Staphylococcus aureus
atgatgaaagttcgaatcacttttattattttagcaattttatcgacgattgtttgcttgttcttagcagcaatgcatccaacaggaccaaacacagtaacttttgaacagccatatttattcaccctcaacatcattataatggtattagtcgcattaccttcacttgttttagctatatatgattatatgagttttagaatttcttctgctattttacaatttctaggggctatctcttggttctttttatcattgatattatcgctcacacaatttacaccttttacattagcgtcatttataacttcaattattttgttcgcaagcgcaattatcacattagctattggtggtaagtcttttgataagaatgattcccattaa

SEQ ID NO: 410229 - DNA, 384 bp, Staphylococcus aureus
atggaaatcaaacaaaaatatcaattatcaaaagtggttaaaatattagaagtagtattatacgaggaagataagtttcaatccgataaggactatcattatcaggataaagcattatatgaatatgctttaaagttagttcataatggattgttcaatattcttgctgaattagattttgaagatgaagcatttttaattcttgatgaagtaacaatgacgctaagtgatgtcatgaaagaaacacaacacgtttaccgttatagtgtcatagatgaaaaaggtgaacacaaacatacaacagatcgcaaaggacacgtgattggaatgttagagtgggcattagattacattgcgggaaatattgaagtggaggaattataa

SEQ ID NO: 410230 - DNA, 204 bp, Staphylococcus aureus; identical to SEQ ID NO: 410103

SEQ ID NO: 410231 - DNA, 123 bp, Staphylococcus aureus
atgcttaatcaatatactgaacatcaaccgacaacttcaaatattattattttattatactctttaggacttaaagcgtttagtaaatatttactaaacgctttaagtcctatttctgtttga

SEQ ID NO: 410232 - DNA, 210 bp, Staphylococcus aureus; identical to SEQ ID NO: 407600

SEQ ID NO: 410233 - DNA, 642 bp, Staphylococcus aureus
atgaacatagaaactgtagtaaatgaatttgaaacacgagcaggcacgttactaaggtactacactggattattagaacatagtaaagtacaaccgtattgctttaagttatacaatgatccgtttgatatggtttatgtgatgatgaacgggaagttattcggtcatgtatatattaaagattgtaaagtaaggcaatcatttgaattagcgtcacctaagcacactgaggggcttataagaagtatagaaggtcattatgtaggttatgaattacatgacggtaaacagctttctattagtgatatgatggccagtcaattatttgaagatgagtattttatgtatggattacaaacatatgcagaatcaaataatagtgatgtgtttgagtacctagaaaatggatttgataccgatacacttgagggcattcaatcgagtaatactgatgtgatatcgaatattgaaatgttgtatcagatagctacgggaatcaatgaaccagcaccagagttagttgagtgtttgagattagtaactgagtttgtacaagatgagaaggctgcacaagaggattacacggggttagaacgtaaattgaatgatctaaaagcgtcttattatagtataagtaaataa

SEQ ID NO: 410234 - DNA, 1458 bp, Staphylococcus aureus
ttggaagatgttacaaacgaagaagtatttgaaatgattgatagcagaaccggtgttttaaatgctaatgattggaaaagtcaattaaggcgttctgctactacacaagcattgaaaaaaacgactacaaatgctgaaatcatattgtgtaatgatgagagtttaaaagggctagtacaatatgacgcttttgaaaaagtaaccaaactgaaacgtctaccgtattggaggtcaaaaggggatgcgaattattattgggctgatatagataccacacatgtgatttcacatattgatagattgtataatgtgcagtttagccgtgatcttattgatactgtgattgaaaaggaagcttatcaaaatagattccaccctattaaatcgatgattgaatctaaatcatgggacggaatcaaaagaattgaaacgctcttcattgattatttaggtgctgaagataaccattacaatagagaagttacaaaaaaatggatgatgggtgcagttgctagaatctatcagccaggtattaaatatgattccatgattattttatatggtggtcaaggtgttgggaaatctacggcagtgagtaaattgggaggtcattggtataaccaaagtattaaaacgtttaaaggtgatgaggtctataagaaattgcagggttcttggatatgtgaaattgaagaactatcggcatttcaaaagtctactattgaagatattaaggggtttataagtgccattgtagatatttatagagcttcgtatggtaaacgcacagagcgtcatcctagacagtgtgtgtttgtagggacaaccaataactatgagtttttaaaagaccaaacaggcaatcgtcgttttttccctattacgacagataaaaataaagcaactaaaagcccatttgacgatctaacaccagatgttgtgcaacaaatgtttgccgaagctaaagtatattttgatgagaatccgacggataaagcattgttgctagataaagaagcgagtgaaatggctttaaaagtccaagaagctcattctgaaaaagatgctttagttggagaaatagaagaatttcttgaacgtcctattccgtcagactactggtatagaacgttagaagaaaaaagagtgtctgcgcatggtgttatagaccaagactatattaaattatatggtgatggtaaattgattgaattaccgaatacaaaaccaggtgcttatgtatggcgtgacaaggtatgtagcatggaaatttggaaagtgatgatgaaacgagatgaccaaccacaacaacaccatttaagaaaaattgataaagcgttaagaaatacaaattattgtgacattgtgaaaaagcaaacgcgatatggtgaaggtattggtaagcaatatggctttagtgtagatttagcttcttattatcagaaacttaaagtttag

SEQ ID NO: 410235 - DNA, 219 bp, Staphylococcus aureus
atggaaacaaaatacgagttaaataatactaaaaaggtcgcaaatgcatttggtttaaatgaagaagatacaaatctattaataaatgcagttgatttggatattaaaaacaatatgcaggagatttcaagtgagttacaacaatcagaacagtctaagcaaaagcaatatggtacaacgctacaaaatttagctaagcaaaacaggattattaaatag

SEQ ID NO: 410236 - DNA, 210 bp, Staphylococcus aureus
gtggaacaaggtaaggtagtaacacctgttattgaaatcaatgaaaaggttaaaccagtggcaccaactaaacaaaaacaatctaagaaatctgaactacctgaaacaggtggagaagaatcaacaaacaaaggtatgttgttcggcggattattcagcattctaggtttagcgttattacgcagaaataaaaagaatcacaaagcataa

SEQ ID NO: 410237 - DNA, 1038 bp, Staphylococcus aureus
atgaaaacacgttgttacgatggtaaaaaatggcaatatgaatttaagcatgaaggaaaaagataccgtaagaaaggttttagaacaaagcgtgaagctaattctgctggactagacaagttaaatgagttaagaagtggttttaatatagataactatataactcttgcagaatacttcgaaaattggattaaaacatataaacaacctgttgttaaagaaaatacctaccgtcattatagaaatgcattacaacatatacaaaaacataaaataggtaaaatggagttatcaaagataaatagacaagtttatcagaaattcataaacgactattcaaaagaacacgcaaaagaaactataagaaaaacaaacggtgctattcggtcagctttagatgacgcattatatgatggacttatttttaaaaaccccgcttataaagttaattataaagccggaaaacctacgaagtcagaacaagaaaaattcatctcggtaactgaatatgaaatactaaaagatcacgtcagaaagaagagaactcgttcatcattagcgctattcataatgatttgtacgggttgtcgtgtcagtggtgcaagaaatataaagattgagcatatcaaccaagtgaaaaacactatatttattgacgagcgaaaaaccgatacttcccctagatatatcagtatcgctaaatctgatatgaaacacattatggacgtcataagtacatttgcaattagctatgatggttacattttcaaagaagccggatctataattaaccttcaggctatcaataatgctttgaaatcagcctgtagagtcaataatataccaattattacatcgcacgcattaagacacactcattgttcttatttactagcaaaaggtgtatctatacattacatttctaaaagattaggtcataaaaatatagcaataactacatccgtgtattctcatttgttagaagaaaaatttaatgaagaggacaaaaaaacaactaaaattttagaaagtatgtaa

SEQ ID NO: 410238 - DNA, 849 bp, Staphylococcus aureus
atgggaaattatttggtattgcaatcagattttggacttagtgatggcgctgtaagtgcaatgtatggagttgcatatactgtaagtgatgatatacgtgttgaaaacttaacgcatgatataccaccgtatgacatttgggtagcgtcatatcgtttatatcaaactgtaaaatactggcctaaaggcacagtttttgtatcagtggtagacccgggtgtaggtagtgataggcggagcattgcttgcttaacatattcaggtcattacattattacacctgataatggttctttaagtcatattaaacattacgaaggtattaaaaaagttatcgaaattgatgaagtgaaaagccgattgcctcattcggaagaaagtcatacttttcatggtagagatgtttatgcatacaatggtgcgagattagctgcaaataagatagcgtttgaacgtctcggtcaggcaattaatgttgatagtattgaggcattagaaataagagaagcgacaaaaaatgaggattctgttacaggaagcattgatattttagatatcagatttgggtcattatggacaaatattccattggcattcttaaaatccttggaaattgttcatggtaataatttggtggtaacaatttatcatcaagataagaaagtctatcaaaatattattaaatttgcgcgatcgtttgcagatgttaatgtgggtgaacctcttgtgtatgttaactcgctagtaaatattggtgtagcggtcaatcaagactcattttcagatttatatcatattggtactggaaatgattggacgattcatttatctaaagcaccatcaatttaa

SEQ ID NO: 410239 - DNA, 207 bp, Staphylococcus aureus
atgataaatactgaaagattaaatttaatgattccaagttcctcgcatttaattgaactttataatatttgtagtcatccacaagcaaatatatacactcccaaaggtttacataattccaaattagacacacaacggtggattgaaaaatggcgaaaccattggcaacaatatcaatttggttactttgtattggtaaaaaaatag

SEQ ID NO: 410240 - DNA, 519 bp, Staphylococcus aureus
atgtattcaaatgttcaaccattcattaatagtgatttaactaattgttttcaatcacaatacactgaaattgaatcattattattcaacctcttagacagcccagtaaaatatacaaaacatattggcggtacgcatcattttaaatattcaacagagccaattttagatattttagtaggtgtagaaaatttgcatgatattacttccttagatgaaaaacgtttaaattatgttgggttttatcgcttgcatcataaatataataagaaagttatgatggcgaagtttaacaattttcatgaactaaaacaacaggtgcgtctacatatcattcaaatgaatacccaaacattcgaatcttatcttgcacttgattacctcttatcaactaatgatgatattgctttgcaattcaatacaaaaaagcaccaaatattgcaacatagcttaacaattagacaatatgagatgcaaaagcaacaatactttgaaaaactatgtaaaaaatacttataa

SEQ ID NO: 410241 - DNA, 240 bp, Staphylococcus aureus
atgattcaagttgaaaatttaactaaaactataaataatcaaatgatattggaagatattagcatagatatcgaaaaaggtaaattgacttctttaattggacctaatggtgcgggtaagagtactttactttcagcgatatgtaggttaattcgttttgataacggtgaagtgaaaatagatggacagctcatgtctgattataaaaataatgacttgtcgaaaaaatatctatattaa

SEQ ID NO: 410242 - DNA, 957 bp, Staphylococcus aureus
atgcgcaacaataataaaaaaataatgcttttaattgcagtaacgttattaattagtatgctgtacttatttgtaggtattgattttgaaatatttgaatatcaattttcaagtcgtttaagaaagttcatattaattattttagtaggtgctgccattgcaacttcagtggtgatttttcaagcgattacaaataaccgtctattgacaccatcaataatggggttagatgcagtttatttatttatcaaagtattgccagtctttttatttggaattcaatcggtatgggttactaatgtatatttgaactttatattaacacttataacgatggtgttattcgcactaatcctattccaaggtatctttaaaattggacatttttcaatttattttatcttacttattggtgtccttttaggaacattttttagaagcataacaggttttattcaactgattatggatcctgagtcatttttagcaatacaaagtagtatgtttgctaattttaatgcttctaattcgaatttagttactttctcagcagtgctattagtaatcttattagtcattacaattttactattgccttatttagatgtattgcttttaggtcgtgctgaagcaattaatcttgggatatcgtatgaaaaattaacgcgaattctacttgtaatagtctcagttttagtttctgtgtcaactgcattagtaggaccaattacatttttaggtttattaactgtaaatctagcgcatgaactaatgaagacgtatgaacataagtatattttaattgcgacaatttgcttgaattggattagtttatttagtgcgcaatgggtagttgaaaatgtgtttgaagctacgacagaaatgagtatacttattgatttgattggtggaagttatttcatttatctattagttagaaggagaaatgcgcaatga

SEQ ID NO: 410243 - DNA, 1014 bp, Staphylococcus aureus; identical to SEQ ID NO: 406875

SEQ ID NO: 410244 - DNA, 1545 bp, Staphylococcus aureus
gtgaacgaagaacaaagaaaagcaagttctgtggatgttttagctgagagagataagaaagcagaaaaagattatagtaaatattttgaacatgtttatcaaccgcctaatttaaaagaagcgaaaaaaagaggtaaacaagaagttcgttataatagagatttccaaattgatgaaaaatatcgcggtatggggaacgagcgtacatttttaattaaaacatatggatgtcaaatgaatgcacatgacactgaggtcattgctggtatacttaaagcattaggctatcaagcaacgactgatattaacactgcagatgttattttaattaatacatgtgcgattagagaaaatgccgagaacaaagtgtttagtgaaataggtaatttgaagcatttgaaaaaagaacgacctgatattttaatcggtgtttgtggttgtatgtcacaagaagagtcagtagtgaataaaattttaaaatcgtatcaaaatgtagatatgatatttggtacacataatattcatcatttaccagaaattttagaagaagcatacttatctaaagcaatggttgttgaagtatggtctaaagaaggagacgttattgaaaatcttccaaaagtccgtgaaggcaacattaaagcatgggtcaatattatgtatggttgtgataagttttgtacatattgtattgttccatttacaagaggtaaagaacgaagccgcagacctgaagacattatagatgaagtacgtgaacttgctcgtgaaggttacaaagaaataacgcttttaggtcaaaatgtaaattcttatggtaaagatttacaggatatagaatatgacttaggagatcttttacaagcaatttctaaaatagcgattccaagagttcgtttcacaacaagtcatccttgggactttacagatcacatgattgatgttatttcagagggtggtaatatcgttcctcatatccacttgccagttcaatctggaaataatgcagtattaaaaataatgggtagaaaatatacacgagaaagttatttggatttagtaaaacgaatcaaagatagaattcctaatgtagcattaactacagatattattgtagggtatccaaatgaatcagaggaacaatttgaagaaactttaactctgtatgatgaagttggttttgaacatgcatatacgtacttgtattcacaacgtgatggtacgcctgctgctaaaatgaaagataatgtacctttagatgtcaaaaaggaacgattgcaacgtttgaataaaaaagttggtcattattcacaaatagctatgagtaagtacgaaggacaaactgtaacagtactttgtgaaggtagtagtaaaaaagatgatcaggttcttgctggctacactgataaaaataagctagttaatttcaaagcgcctaaagaaatgattggtaaactagtggaagtacgaatagatgaagctaaacagtattcattaaatggcagttttgtaaaggaagtagagccggaaatggtgattcaataa

SEQ ID NO: 410245 - DNA, 870 bp, Staphylococcus aureus
atggcagaaaatcaaaacgatgagatagttataaaaaaagattcatataatccattcgtaacgaaaacatctgaaagtttaatagctgatgatgaatcttctggttataataatacacgtgaaaaagatgaagactacttcaaaaaacaacaagaaattttacaagaaatggatcaaacatttgattcaaatgacgatgcatctgtgcaaaattatgaaaataaagcgtctgatgattattatgatgtaaacgatattaaaggaacaaaaagtaaagaccctaaacgaagaattccatatatggaaattgttggccaagtacatgggacgtatattattgctcaaaatgaatttggcatgtacatgattgaccagcatgcagctcaagaaagaataaaatatgaatattttcgagataaaataggtgaagttaccaatgaagtacaagatttattaatcccgttaacatttcatttttcaaaggatgaacaattagtcattgatcaatataaaaatgagcttcaacaagtaggtatcatgttagaacattttggtggtcatgattatattgtaagtagctatccagtttggttccctaaagatgaagtagaagaaatcattaaagatatgattgagctaattttggaagagaaaaaagtagatattaaaaaattacgtgaagatgtagcaatcatgatgtcatgtaaaaaatctattaaagcgaatcattatttacaaaaacatgaaatgtctgatttaattgatcaattaagggaagcggaagatccatttacatgtccacatggtcgtccaataatcattaatttttcaaaatacgaattagaaaaattatttaagcgtgtgatgtag

SEQ ID NO: 410246 - DNA, 3531 bp, Staphylococcus aureus
atgattatgggtaatttgagatttcaacaggaatattttcgtatatacaaaaataatacagaatcaacgacacaccgtaatgcgtattgggttaaactcgctaaaaatgttgaagctactaaaatgatgtatgcattatcgacaattgtgcaacaacatgcatctataagacatttttttgatgttactaccgatgacaatttaacaatgatacttcatgaatttctgccttttattgagataaaacaagttccatcttcttccgcaaactatgatttagaagctttttttaagcaagaattaagtacttaccattttaatgattcacctttattcaaagttaaattgtttcagttcgctgatgctgcatatatactattagattttcatgtgtccattttcgatgatagtcaaattgatattttcattgatgatttatgcaatgcatatcgtggcaatactgttattaacaatactcgacagcatgcacatttaaatagaaatgatgataaagacaatcaagatgcatcgcatatagcattagactcaaactattttcggttagagaataactctgacatccaaattgatagttatttaccaattaagcatccatttgaacaagctttatatcaaacgtatttgattgatgatatgacatcaatagatatggcatcgttggctgttagtgtgtatttagctaatcatataatgagtcaacaacatgatgtcacattaggtatacatgtaccatcacatttaccaaatgatttacacggaaatattgtgccgttaacgttaacaatcgatgcaaaagatgtatgtcaacgttttacaacagattttaacaaatgtgtgttgcaaaatatgtcgcaattacagtgcgcgaagtcttcgctttcactagagactatttttcattgttatcatcatatgatgtcttgttgtaatgatgttattgaggatgtacatcaaatacatgatgcacatacatctttagcggatattgaaatttttccacatcaacacgggttcaaaattatatataacagtgcagcatatgatttgctctcaatcgagacgctgagtgacttagttcgaaatatttatttgcaaattactgaagaaaatggaaataaacgaacaactgtagatgaacttaatttgatgacagaacgtgatattcaattatatgacgatatcaatttaagtttgcctgagatagatgatgcgcaaacagttgttaccttatttgagcaacaagttgaagcaacgccgaatcatgtcgctgtgcaatttgacggagtgtttataacatatcaaacattgaatgcacgcgcgaatgatttagcacaccgtttgagaaaccagtatggtgttgaacctaatgatcgtgtcgctgtcatagctgaaaaaagtattgagatgataatagcgatgataggtgtgttgaaagctggtggggcttacgtgccaattgatccgaactatccaagtgatcgtcaggagtacattttaaaagatgcaacgcctaaagttgtaataacgtaccaagctttatatgaaaatggtaaacaaaatattaatcacattgatttgaataagatagcgtggaaaaatattgataatctttctaaatgtaacacgttagaagatcatgcttatgttatttacacgtcggggacaactggtaaccctaaagggacactaattccgcaccgaggtattgttcgcttggtccatcaaaatcattatgtaccattaaatgaagagacgacgattttgttatcaggaactatagcctttgatgctgcaacatttgaaatatatggtgcattgctcaatggtggaaagctgattgttgctaaaaaagaacaattattaaatccaatagcggtagaacatttaatcaatgaaaatgacgttaatactatgtggttaacctcctcattatttaatcagattgctagtgaacgaatagaagtattggtaccgttaaagtatttattaattggtggagaagtattgaatgctaagtgggtggatttgcttaatcaaaaaccgaagcatcctcaaattattaatggttatggaccaactgaaaatacaacatttacaacgacgtataatatacctaacaaagttccaaatcgtattcctattggtaaaccgattctgggtactcatgtttatatcatgcaaggcgagcgtcggtgtggcgttggtattcctggagaattatgtacaagtggctttgggttagctgcaggttatttaaatcagccagaattgacagcagataaatttatcaaagattcaaatataaatcagctgatgtatagaagtggtgatatcgttcgtttgttacccgatggcaacatagattatttatatcgaaaggacaaacaagttaagattcgagggtttaggattgagttgtcagagattgagcatgcgctcgagcgtatacaaggtattaataaagcggttgttattgttcaaaatcatgatcaagatcagtatatcgttgcttattatgaagcgatgcatacattatcacataataagattaaatcacaattacgtatgaccttaccggagtacatgataccagttaattttatgcatattgagcaaattcctattactattaatgggaaattagataagaaggcattgccaatcatggactatgtcgatacggatgcctatgtagcaccgagtacagataccgaacacttgctatgccaaatttttgcagatattttacatgtgaatcaagtaggtattcatgataatttctttgaattaggtggccattcattaaaagcaacgttagtggtgaatcggatagaggcatctactgggaaacgattacaaattggtgatttattacaaaagccaactgtatttgaactagcacaagcgattgctaaggttcaagaacaaaactatgaagtgattccagaagctatagttaaagatgattatgtgctgagctctgcacaaaagcgtatgtatttattatggaaatcaaaccataaagatacggtgtataacgtaccttttttatggcggttatcatcaggacttaatgtagctcaattgcaacaagcagttcagcatttgatagcgcgacatgagattctacgaacacaatatattgttgtagatgatgaggttcgacaacgtattgtggcagatgttgtagctgactttgaagaagttaacacgcattttacggatgaacaagaaattatgcgccaatttgtggcaccttttaatttggaaaagccaagtcaaattagagtgagatacattagaagtcccttacatgcatacctgtttatagatacacatcatatcattaatgacggtatgagtaatatacaattaatgaatgatcttaacgcactttatcaacataaattattgttaccacttaaattgcaatataaagactatagtgagtggatgtcgcatcgtgataatattggttatctcaattcaaagatgaagtacctattttaa

SEQ ID NO: 410247 - DNA, 495 bp, Staphylococcus aureus; identical to SEQ ID NO: 407884

SEQ ID NO: 410248 - DNA, 390 bp, Staphylococcus aureus
atggacttgttcaaagatatacgtgatgtttcaaatgaaattggagaaggtatacacgatgctacagatgctatcaaaaaagaagctgaaaaagatgccaaaatcgcaatggagaaagcacgtttatttgctttaaagcatgaattgaaaagtgaaattcaaagtatgattagcgatgaaaaagaagatatagaaaattgcatctctagcttagatgaaattgaatcaattttaaaagatcaaagtagtaagttagaaggcgcatttgaaggtaaaacaagtgatgctattgcttttaatttagctacagagcagtctaaattaatggatctcacagagtcttacgatgattgtaaaaaaagctgtaaaacatatgacggctggttttaa

SEQ ID NO: 410249 - DNA, 1194 bp, Staphylococcus aureus
atgacaaaatatttttttagcagttcttttctactatttctaggtaattggattggacaaatagggctaaattggtttgtacttaccacttatcataacgcagtttatctggggattgtcaatttttgcagacttgtaccaatattattactaagtgtgtgggcaggggcaattgccgataaatatgataaagggcgattgctgagaattacaatttcatcatcatttttagtaactgcaattttatgtgtgctcacgtatagtttcactgcaattccaattagcgtcattattatatatgcgacattaagaggaattttaagtgcggttgaaacacctttaagacaagcaatcttaccagatttatcagataaaatatctactacacaagctgtatcatttcattcattcatcattaatatttgtcgttcaatagggcctgccattgctggtgtcatattagcagtctatcatgcgccaacaacatttcttgcacaggcaatttgttattttatcgcagttttattatgcttaccattacattttaaagtaactaaaatacctgaagatgcaacaagatacatgccgttaaaagttattatagattacttcaaattacatatggaaggtcgacaaatatttataacatcattattgattatggcgacaggtttttcatatacgacacttttaccagttttgacaaacaaagtatttccggggaaatctgaaatatttggtatcgctatgacgatgtgtgccattggtggtattattgcaacgctagttttacctaaagtacttaaatatattggtatggtaaatatgtattatttaagttcacttttatttggcattgctttgttaggtgtggtatttcacaatattgtcatcatgttcatttgtattacattgattgggttatttagtcaatgggcacgtacgacaaatcgcgtttattttcaaaataatgttaaagattatgaacgtggtaaagtactgagtattattatgatggatagaggtatgattccattgggaagtctgttaatgagtatatgtgcagatgtgtttggcattgttagaactttttcaataatgggaataagtactatatgcattacaatggtattctattttataaatagaaagttgaagttaaagttggaggaaagtaatcatggtatatcttga

SEQ ID NO: 410250 - DNA, 969 bp, Staphylococcus aureus
atgatgacaacgaaaattatacgtcgttatagtttaatcacaatccttttaattgtgagtatattcataagtttatgtgtagggtctgtcatgattcatccgattgatgctattaagggaatctttgcacaagatgattttattttaaatgagtatcgtatacctagaacattacttggtattattatcggtagtagcttggctatttcaggtgcaattatacaagctgtaataagaaacccgttagcctcacctgatgttataggtatttctaaaggtgccagtttagctgctgtgattattattatgatttttccaacagcaccattgtttgtattacctataggttcattcttaggtgcctttgcagtaagtttatttttatcatttttaatttcaaaatatgatgttaaaggttcaaagcttgccttaattggtttagcaataggcgcaatatgtacggcgattgtgcagttcttattaatcagaaatccactggaagcaaacaaagcgcttgtttggttgacaggtagtctatatggacatgatatgtcgaatatttatactatattaccttggtttttaataacgataccaatcatcattttattgagttatcaattagatgtattgaatctaggtgatgctgttgcaaccgcactcggtttaaaagttaaaactattaaaatgctatcgctaattttagcagtaatattagcaggatccgcaatttcagttgtcggtggtattagctttttaggattaattgcacctcatattgcgagacaattaataggaaataaaacattacacgttattatcatgtcggggttaattggtgctatattgttaacatttggagatggtttagcccgtggccttcatccgccactggatattcctgttggggttatcattgcaattatcggtgcaccatacttcttaatattattacgaagaatgaaataa

SEQ ID NO: 410251 - DNA, 1293 bp, Staphylococcus aureus
atgatgacaactttagcgacactcatttttctagtaactttattatttgtattatggcaacctaaaggcctagatattggcattaccgcactaactggtgcctttattgctgttattactggtgttgtaagtttttccgatgttttcgaagtaacaggtattgtttggaatgctactttgacttttgtctcagtcattcttatttcattaatattagataaagttggattattcgaatggtcagctattcacatgcttcatgcttcaaaaggcaatggtttaaaaatgttcgtttatatcatattattgggtgccattgttgttgcatttttcgcaaatgatggcgcagcgttaatcttaacgcctattgtattagcgatggttaaaaatataggttttagtaagcgggccatattcccttttattattgcgagtggttttatagctgacacaacttctttacctttaatcgtgagcaatctagtgaatattatatctgctgattattttcatgtaggattcattcgatattttagtagaatgattatccctaatttattctcacttttagcaagtattatagtattgtggttatattttagaaaggcgatacctaaaacgtttgatgataataatataaagcatcctaaagatgccattaatgatttaaagctatttaaaatttcatggattgttctagttatattacttttcggctatctaatcagtgaatttactaaaattccggtatcaattttcactggaatcattgcttttatttttctaatgttggctcgtaaatcaaatgctgtaaatattaagcaagtcattaagggcgcaccttggaatatagtattattttcaattggtatgtatatcgtcgtattcggcttaagaaatgctggcattactttaatattggctaaaatattagaatatatttccaattacggtctatttagcactattttgggaatgggcttcatttcagcgtttttatcatcaataatgaataatatgcctacagttttaatagatgcgattgctattggtcaatcaaatgtccatggcatgttaaaagaaggcctaatttatgcgaatgttatcggttctgatttaggtccaaaaattacaccgataggctctttagctacattactgtggttacacgtcttaacacaaaaagatgttaagatttcttggggcacatactttaaaactggtatcatcattacaattccagtactatttataaccctcataggattgtatctaacacttatcatattttaa

SEQ ID NO: 410252 - DNA, 846 bp, Staphylococcus aureus
atgaataaaattaatgatagagacttaacagaattgagtagttactgggtttatcaagacatcaataaagataatgattttacagttaacggaaaacgatttaagcaggttgatgaatataatgataatggaaataaaaataaaaaaggtgcctcagatttaaaaatttatgaattgttggatgaaaaaggaaaaccaactggtgaacaaaccatgatttatcaaggaacatctaatgaggcaataaaccctaataatccattaaaatctttagatatcggagatgattggttacaaaatgcgaaattaatggataatagtaataagtcaacggattatcttaagcaatcagacgaatttgcagatttatatagagacaaactaaatgacgctaataaattaagtaagtataactttacacaaaaatatggtgttagtccaaataattacaaaaacaaaaccattgtggcggatggcggtaattcggaaggcggtgcaggagcaaaatatcaaggagcgaaacatccaaatgaaaaagttgttgctactgacccagcaatggtaccttatgctgcttggcagaaatttgctagaccacgctttgataatatgattagttttaatagtaccaacgatttattaacatggttacaagatccattcatcaaagatatgccaggaaaacgcgttaacattagtgatggtgtgcccaggttagatgctttaatagacagccatgtaggttataaaaggaagttaaatagaaaagacaacacatacgatactgtaccactaatcaaaattaagtcggtaaaagatacagaaattaaaaatggaaaaaagtaa

SEQ ID NO: 410253 - DNA, 225 bp, Staphylococcus aureus
atgtatgaatcaactggtaaagtgctatcagtgaatgggaatatagtgtcatcggatgcaattattcagcctggtagctctggttcacctatattaaatagtaaacacgaagctattggtgtaatctatgcaggtaataagccatcaggtgaaagcacaagaggattcgctgtttatttctctcctgaaattaagaaattcattacagataatttagataaataa

SEQ ID NO: 410254 - DNA, 846 bp, Staphylococcus aureus
ttgttacgtgttggtaaagaaacacaagtgtatcgttatttcggacaagaacgtaacaataccacttacaacttagcacgcatgaacatgttgttacatgatgtacgatatgaaaatttcgatatccgtaatgatgacacgttggaaaatccagcctttttaggacatacatttgatgcggttattgcgaacccaccgtatagtgcgaaatggacagcagattcaaaatttgaaaatgatgaacgatttagtggttacggcaagcttgcgccaaaatccaaagcagactttgcctttattcaacacatggtacattacctagatgatgaaggtaccatggccgttgtactcccacatggtgtcttattccgtggtgccgcagaaggcgtcattcgtcgttatttaatagaagaaaagaactacttagaagccgtgattggcttaccagcgaatattttctatgggacaagtattccaacatgtattttagtatttaaaaaatgtcgccaacaagacgacaacgtattatttatcgatgcatccaatgattttgaaaaaggaaaaaatcaaaaccatttaagcgatgcccaagtcgaacgtattatagacacatataagcgtaaggaaacaattgataaatatagctacagcgcgacactacaagagattgccgataacgattacaatctaaatataccgagatatgtcgatacattcgaagaagaagcgccaattgatttagatcaagtccaacaagatttgaaaaatatcgacaaagaaatcgcagaaattgaacaagaaattaatgcatacctgaaagaacttggggtgttgaaagatgagtaa

SEQ ID NO: 410255 - DNA, 360 bp, Staphylococcus aureus
ttgtatccaggcttatctaaagatgactttaagacaaaaaaagatgaagtaactgtcgttaagcaagaagatgacttccacgttgtgaaagataatgaatcggtttgggctggtgttaattacagcgatagcactaaaacttttgaaattaatggtactaaagtcgaagttaaagcaaaaggtatgtttatacttaaaaagaaagatgataaaacttacgaatgtagcttctataatcccgaatctacaaattccgcttcagatattaaatctaaaatttcaatgaccggttactctattacaaacaaaaatacatcaacttctaatgaatccggcgtacactttgaattaactaaataa

SEQ ID NO: 410256 - DNA, 492 bp, Staphylococcus aureus
gtgttgagtggctttgaatatcgagcgcaaaaagaaaagtatgataatttatataaatttttaaaagaaaatgaaaagaaataccaatatacaggatttactaaagaggcaattaacaaaacacaaaatagtggatatgaaaatgaatatttttatatagttgctaatataccgacgctccaagaatataggaaatattacgaacccctaataaagaaaaataatctgaattttaaaaaaggtatgaaacaagcaaggaaaggagtaggctataaagctgcaatagaagtacatacaacattgttttcgagaagtagtaacttttcaaaggacaaaaaattagatgatgttttagatttgtctgaaagtacgaaaaagttacaccttaattttgaaaatacgaaaatatttttacaactagcaaaatctactattagcactaatcgagttaattacagtgataatgagtctataaggattgaggtcgaatga

SEQ ID NO: 410257 - DNA, 225 bp, Staphylococcus aureus; identical to SEQ ID NO: 408037

SEQ ID NO: 410258 - DNA, 357 bp, Staphylococcus aureus
atgactttcgaagaaaaactaagtgaaatgtacaacaagattgcaaatgagattgttggcatgatacctgtagaatgggaaaaagtatatacgatagcctatgtaaatgatagaggtggagaggtcatttttaattatactaaaccaggtagcgatgaattgaattattacacgaatatatctagagattataatgtttcggaagaaatatttgatgatttatggatggaactttatagatcatttaaaaaattaagaaatatatttaaagaagaaggacatgaaccatggacatcatgcgaatttgattttacaaacgaaggtaaattaaaagtttcatttgattatattgattga

SEQ ID NO: 410259 - DNA, 501 bp, Staphylococcus aureus
atgactttcgaagaaaaactaaatgaaatgtacaacgagattgcgaatgagattagtgggatgataccagtagagtgggaaaaagtatatacgatagcctatgtaaatgatagaggtggagaggtcatttttaattatactaaaccaggtagcgatgaattgaattactattcagacatacctaaagattgcaatgtctcaaaagatatttttaagaattcatggtttaaagtttatcgaatgtttgatgagttaagagaaacttttaaagaagaaggacatgaaccatggacatcatgcgaatttgattttacaagagacggcaaattgaatgtttcatttgattatattgattgggcgaattcagagtttgggccaatgggaagagaacattattatatgtataaaaaatttggaatttggcctgaaaaagaatatgccataaattgggttgaaaaaataaaagattatgttaaagagcaagaagaagctgaactatag

SEQ ID NO: 410260 - DNA, 501 bp, Staphylococcus aureus; identical to SEQ ID NO: 408346

SEQ ID NO: 410261 - DNA, 219 bp, Staphylococcus aureus
atggaaaaccaaaaacaaggcaatggcttaaaaattgcaacatgggtatttattgtattaacagtagttacaccgctatttggtattggaagtattgtttgtagtattaattacaaaaaatacgatgcagaaaaaggttcgaagttattgaaaattgcaattatcgtaacaataattgtttttgttttaaatttattagcatatttaggtttaagataa

SEQ ID NO: 410262 - DNA, 414 bp, Staphylococcus aureus
atgttgatgaatagcgtgattgctttaacttttttaacagcatctagcaataatggcggacttaatattgacgtgcaacaagaagaggaaaagcgaatcaataatgatttaaatcaatatgatacaacgctatttaataaagacagcaaagcggttaatgatgcgattgttaagcagaaaaaagaacgacaacaacaaataaaaaatgatatgtttcaaaatcaagcgagtcactcgactcgcttgaatgaaactaaaaaagtgttattttccaaatctaacttagaaaagacttcggagagtgataaaagcccctatattcaaaacaagcaggagaaaaaaatattcccgtacattttgatgtctgtagggggcttttttgactttaggatttgtcattttttcaattcataa

SEQ ID NO: 410263 - DNA, 285 bp, Staphylococcus aureus
atgttaaaattaaacttacaattcttcgcatctaaaaaaggggtaagttctacaaaaaacggacgtgactctgaatcaaaacgcttaggtgctaaacgtgctgacggtcaattcgtaacaggtggttcaattttatatcgccaacgtggtactaaaatttaccctggtgaaaatgtaggtcgtggtggcgatgatacattattcgctaaaatcgacggcgttgttaaattcgaacgtaaaggtcgcgacaaaaaacaagtttctgtatatgcagcagctgaataa

SEQ ID NO: 410264 - DNA, 834 bp, Staphylococcus aureus
atggaggttaaaacattttataatggaaacacgatgccacaaattggtttagggacatttcgtgtggaaaatgatgaaaattgcatggaaagtgttaagtatgccattgaacaaggatatcgtagtattgataccgcaaaagtttatgggaatgaagaacaagtaggtgctggcattcgtgccggattggaatcaactggtattgctagagaagacttatttattacttcaaaattatattttgaggattttggtcgtgaaaatgtagcagctgcctacgaagctagtttatctagattaggtttaaaatacttagatttgtatctagtacattggccaggtacgaacgaagccgtaatggttgatacatggaaaggtatggaagatttatataaaaataataaagttaaaaatataggtgtcagcaattttgaacctgaacatttggaagctttgttggcacaagtgtcaattaaacctgtaattaatcaggttgaatatcatccatatttaacgcaacataaattgaaattatatttggcagcacaacatatcgtgatggaatcttggtcaccattgatgaatgcacaaattttaaatgatgagacaattaaagacattgctcaagaattaggaaagtcacctgcccaagttgttttaagatggaatgtgcagcatggagtggttacaatccctaaatcggtgacaccaaacagaatctctgaaaacttccgaatatttgatttcgaattatcagatgaacaaatgacgcgaattgatggtttaaatcaagataagagaattggacctgatccaaaaacttttgaaggatag

SEQ ID NO: 410265 - DNA, 453 bp, Staphylococcus aureus
atgattgttgaagaaatccaaggcaatattgccaatttgtcaaattcagaaaaacaaaagcacgtcgaaaaagtataccttgaaaattcagatctcgttaaacgtattcaaagagtcgtaacagatcatggcactgaaattggcattcgtttaaaacaacctattgacttacaatatggagatattttatacgcagatgaccataatatgattgttgtggatgttaattcagaagatcttttagtgattcaaccaagaacattgcaagaaatgggagatatagcccatcaattaggaaatcgtcatttgcaagcacaatttacagagactgaaatgctagtacaatatgattatttagttgaagatttattaaaaagtttaggcatcccatatgttcgagaagaccgtaaagttaataaggcttttagacatataggacattctcatgattga

SEQ ID NO: 410266 - DNA, 2073 bp, Staphylococcus aureus
atgaaaaagcaaataatttcgctaggcgcattagcagttgcatctagcttatttacatgggataacaaagcagatgcgatagtaactaaagattatagtaaagaatcaagagtgaatgagaacagtaaatacgatacaccaattccagattggtatctaggtagtattttaaacagattaggggatcaaatatactacgctaaggaattaactaataaatacgaatatggtgagaaagagtataagcaagcgatagataaattgatgactagagttttgggagaagatcattatctattagaaaaaaagaaagcacaatatgaagcatacaaaaaatggtttgaaaaacataaaagtgaaaatccacattctagtttaaaaaagattaaatttgacgattttgatttatatagattaacgaagaaagaatacaatgagttacatcaatcattaaaagaagctgttgatgagtttaatagtgaagtgaaaaatattcaatctaaacaaaaggatttattaccttatgatgaagcaactgaaaatcgagtaacaaatggaatatatgattttgtttgcgagattgacacattatacgcagcatattttaatcatagccaatatggtcataatgctaaagaattaagagcaaagctagatataattcttggtgatgctaaagatcctgttagaattacgaatgaaagaataagaaaagaaatgatggatgatttaaattctattattgatgatttctttatggatacaaacatgaatagaccattaaacataactaaatttaatccgaatattcatgactatactaataagcctgaaaatagagataacttcgataaattagtcaaagaaacaagagaagcagtcgcaaacgctgacgaatcttggaaaacaagaaccgtcaaaaattacggtgaatctgaaacaaaatctcctgttgtaaaagaagagaagaaagttgaagaacctcaattacctaaagttggaaaccagcaagaggataaaattacagttggtacaactgaagaagcaccattaccaattgcgcaaccactagttaaaattccacagggcacaattcaaggtgaaattgtaaaaggtccggaatatctaacgatggaaaataaaacgttacaaggtgaaatcgttcaaggtccagatttcccaacaatggaacaaaacagaccatctttaagcgataattatactcaaccgacgacaccgaaccctattttaaaaggtattgaaggaaactcaactaaacttgaaataaaaccacaaggtactgaatcaacgttaaaaggtactcaaggagaatcaagtgatattgaagttaaacctcaagcaactgaaacaacagaagcatcacattatccagcgagacctcaatttaacaaaacacctaagtatgtgaaatatagagatgctggtacaggtatccgtgaatacaacgatggaacatttggatatgaagcgagaccaagattcaacaagccaagggaaacaaatgcatacaacgtaacgacaaatcaagatggcacagtatcatatggcgctcgcccgacacaaaacaaaccaagcgaaacaaatgcatacaacgtaacaacacatgcaaacggccaagtatcatatggcgcccgcccaacatacaagaagccaagcgaaacaaacgcatacaacgtaacgacaaatcaagatggcacagtatcatatggcgctcgcccgacacaaaacaaaccaagcgaaacaaatgcatacaacgtaacaacacatgcaaacggccaagtatcatatggcgcccgcccaacatacaagaagccaagcgaaacaaacgcatacaacgtaacgacaaatcaagatggcacagtatcatatggcgctcgcccgacacaaaacaagccaagcgaaacgaacgcatataacgtaacaacacatgcaaacggtcaagtgtcatacggagctcgcccaacacaaaacaagccaagtaaaacaaatgcatacaatgtaacaacacatgcagatggtactgcgacatatggtcctagagtaacaaaataa

SEQ ID NO: 410267 - DNA, 666 bp, Staphylococcus aureus
atgaataatataaatctcactcaacgacagttagatttaataaagaaaaatcaagctatcttgtctaaattgcctgtcgaagcttacgctaaagccgcaaatactatgaataattcgtatgttatgaacgctctggaaattcaatcgacggttaataatgttatgaatagcattagaattaaccaatcgaaattatctgattgggcttcctatatgcatcaagtaactaagaatcatccaatgttcaaatctaatttattttctgaaaaaattcttgatgaattcataagttctaacagctttccggagaatgaagtccgcaaagttagcactcatttgagaaagtcttttgtcgatactgtcgatgtccctgttcttggtaaaaccgtcaattctgcccatccaatagatgacgtaaataccaaagaaagtgataagatattctataaatctatcaatcaatattttttggctccttcctcatcgtttgtacacgatgtttcattaactgttgctaaaagtgttgctgttaatatgtttgtcaggactgctaatgatgattacgtgaattacttcttttcaactgcggtaatagctgtatgctatgtcgcttcgtgtcttgctaatgcttttgatttaaagaataaaagaaaagattttaaatag

SEQ ID NO: 410268 - DNA, 681 bp, Staphylococcus aureus
atggaagagaacgcacctttagaaacagcagttaataattttaaaaagattcaaaatagcgagatttacaaatttaaatatatgaattcatggtgtcttgaatattcagagtttttattggatgaagttagattgttaaaagaaaacaaaagttacaccagatataaaaaaggcactataatttatgtaaagttaggtgttaatgttggcagagagttttctggaaaccatttttgtatggtacttaataatcacgattcaaataaaaatccaatattaacggtagttccacttacatcttccagaagtaaattcaatgtgcatatcgaagaagatttgttacctttagtattggaaaaaatggacgtaacgggtaaggatttagctaaaaaaatcatgaacaatcttgaaaaggtgtcaaaagcagaaaacccatacgatcaaaaattacttgatgaaaacaaatcgctgaatgacgacttcaaaaaatattcgaaggttcgcaaaagatatgagcgattcaagtataaaaagacctatgctaacgttttaaatatcactacaatcagcaaggatagaatatcgaaaattaataggtatgaccctgccggagaaatatcatattcaaaagaaacagtagataaaattgaaaatagtataaaaattagatttcttagttaa

SEQ ID NO: 410269 - DNA, 888 bp, Staphylococcus aureus
ttgtatagtactttctcatgtgtaaaagataagatatatcctctaattaatcaagaaaaaaataatagacaaagacagtatcaattgtatggtaatagacattgtaaaaatattagagatgtttctagacaaattaatagaattataaaaattaatagtaaggatatttttgaatataaagtatctaaaaatatgggttttgaagtttattatttagctaatgaaaatgaatttactgatgatcctttctatgaggacgtgaagattcaagagtggttagtaaatgcgcctattttttcatttgaaggaaaaagtaaacattttaggcaagatggttatagcgataattatataaacttcttgaataaagcatctgtttttgtagtttggatggatgagcaagaagaagatgttttagaaaaatgttctcaaatggcactttatttcaatagttctgctaatttctttttcttagaaactatgttaaatgaattacaattgtatgggtatcaacaatataatttaaatggaaaaaaagaagccctatattttagacaatggatactaaatttcaagagatctattgcaattatttatagaacagagcttttacctagtttatatttatatttgtatctaaagaataataatgattttaaatctccacaatatattgaagaattaaacaaagaagaattatcactaattgaattggagcagtcatataaggaagaagaaagaagcgaaaaattaaataaacttttgttaataataagtcttttatcaattttccaagtagtagaaatttttttcagtgataaaaataatatatttaatatcagtatgatacttataatgattttgctagaagtatttcgaaaaaggtaa

SEQ ID NO: 410270 - DNA, 405 bp, Staphylococcus aureus
atggacaataaaattgaaaagattctagaagatattaataaattacaaggctataaagtaacatatcaatatgctactgctataaatataaaagataataacatgaacccttggtttgaaaaaattgaggaaattctattgaatgtaaaaggagttatacgcattttatctcctgacaaccccccggtaaattatgattattggattttacctggaagatataaaagacatacaaaagaatatcacgaaaaactagaaaaatttttagaaaaatttgctactaatgcaaatattaatgatggattgtttgatcaaaataatatacatggatacaaatataaaaaatatatattcactccacatattgaaattactcatgagaacactttgaatttatttttttaa

SEQ ID NO: 410271 - DNA, 492 bp, Staphylococcus aureus
atgctcaaaagaggtttattatttttaactgttttattgttattattctcattttcttcaattactaatgaggtaagtgcatcaagttcattcgacaaaggaaaatataaaaaaggcgatgacgcgagttattttgaaccaacaagcccgtatttgatggtaaatgtgactggagttgatggtaaaggaaatgaattgctatcccctcattatgtcgagtttcctattaaacctgggactacacttacaaaagaaaaaattgaatactatgtcgaatgggcattagatgcgacagcatataaagagtttagagtagttgaattagatccaagcgcaaagatcgaagtcacttattatgataagaataagaaaaaagaagaaacgaagtctttccctataacagaaaaaggttttgttgtcccagatttatcagagcatattaaaaaccctggattcaacttaattacaaaggttattatagaaaagaaataa

SEQ ID NO: 410272 - DNA, 156 bp, Staphylococcus aureus
atgaaaatctacttaacttatatctgcttagtttcattgttaacaattttattactagcaatatctaacatgtatgtcgcttttagtgtgtacggcatgatggtaacttatggatttaatttaacaggagagattacaacgtgcgaaaacaagtga

SEQ ID NO: 410273 - DNA, 870 bp, Staphylococcus aureus
atgaatgaaattaaattagaatatgacacacatgtttcagtggtacattatgaaagtttagactcacgttcatttaatagcttttcaaaacctaaatggagtaagttagttaataaactatctgtacctatagaagcgaattataagtatgctcgtggtgttgctatatacggtgatatgaaagacgatactgatgaaaatggtaatgaatataagaaatatcgtaaagacgaaaatgttatttatcgtgatgtcctagtgctggactacgatgatatacctaagttaagaatactacatgatgcaattacggagactttaaaaggtgtttcctggatgtaccacactacatttaatcatcgaacagaaagtcctagagtacgtttatatattgctttgaatgagcatataagtgcagatgaataccgtaaatatacaaaagtgttagagagcaagataggtcatccagtggacgagggaagttatcaacctagcagagcgatggcgttaccagtaaagaaatcaaacgattcaatttacatctttaaatataatgatgcaccgattttgagtgttgaaacgctagaagaatggtcaaaagagcttaaatcacaatataaagaatcaaataaattcaaatatcctaagcgtcgtgataatgaattttggaagtcaattgcttttggggtctcaacaggtaaccgaaaccaaatgttaacatcgttaattggtgtattgctaaatagacgtgtacccgatccgttagtatatgcatattgctttatgtggaatgaaaattgtaatcctccattgaattctagagagtttaacgccacatttgaatctatatacaaacgagaacatcgataa

SEQ ID NO: 410274 - DNA, 1371 bp, Staphylococcus aureus
atgacaatatttccagactttttggaaaataaaacaatgtttgatgaaaaagatttctttgacggtaataaatttaaattttatgaatttgccttgtttttatatgaagaatatcacggttgctatattgataaccgtccacatgtgttcactggtaagaaatatgaaccactaaatatagatgttgtccgtaagattaccattaaatatattccatccttgagagaacaacaaaataaagaagtgtttcagaagttaaaaactttatgtttaggtaatcatcaagaacaatgtccagcacgttatataggtttaaagaatggaatatatgacactgttgaagaaaggttaaatccttttagtcctcaatactatataaccaatattatagatgttgattttgataaaggtgctcaaagtgatttgatagaaagattcatcaaagatatttcaaatgaagatgaagaagtagaacaattaatatatgaaatgatcggctacggtttataccgtgataatttcctacaagttgctttcttctactatagtcctggtggtaatggtaaaacaacattacttaaattattgcaccatttctataatccagagaatacgacggcgttatcttttaatgatttaaacgataagttcaaaccggccaacttacaagggaaattagtgaatattgcggatgatattgatccaaatagaataaaagatacaggtaactttaagattattgtgactggtaactacattacacttgagtttaaaggacaagacgcatttgagtttaagccttatgtaaaacttatatttgctagtaatgaattaccaatgagtaatgataagagtgaaggtttttatagacgtatggtaattattcctatgttgcgtaagttcggcaaaggtgggcagaaaaaagatccaatgttattgaacaaattgataacaccgcataatatgtcagccttacttaatttagctttaaaaggtttaaaaagaacattagaaaataacgagattatcgaaccgaaaattgctagaaagacaaaagaggaatatcaatttgagaataatccagttttgcagttcatagaagatgcgacagacaaggattatagacaattgccagtagtagaagggcgtaatactgataaagcatacgaaatatatcaaatatggtgtgtgaataacggttatcatcatcttaataagttcaatttttctaaagaattggcgaaaattggttataaaacagttagctattattcaagagtagaagaaaaaagtaaaagattttataaaaaagaaaacaccataaatatatatgatgttgatggtagcatattgaaaaagctcacagaataa

SEQ ID NO: 410275 - DNA, 357 bp, Staphylococcus aureus
atgaacaatataaaaggtgagttagtaaattatattaaaaacaatgctggtacatcatttgtagaaatagaaaaagtgtttgatgaaaacgcctttgattataaaggtcaaggagcatacacaagtgcagtgaataataatattgtgtattggtatgggtggaataaacaagcatttaatttagtaagtgatctagtgaatgatggtgttatagaaatgaatatttgtgaatcaattatttatatagttgatggtaaagggcttaatttccctattttaaagtcagatgatgtagacacatatcattggttacctgtcacgtttactattagtaagaaagaaatggagtgtgtttaa

SEQ ID NO: 410276 - DNA, 264 bp, Staphylococcus aureus
gtgaatgaaaaacataatattttcaatagatttggtagaaacacttctattcaaactgtagcagttaaagatacttactttattgaatatcgaaagggagacgaaataaagtatttcccaatagaacttgctacggtagtaaaagcattaaacattgatttacatgacagtgatactgtttcaaattatgagaatgggccaaaatttgatattaaaaaattgaacctctatacaggtgacatggaccaaataggagatgaataa

SEQ ID NO: 410277 - DNA, 642 bp, Staphylococcus aureus
atgaatatagaaattatcgcaaatcaatttgtaacaagagcaggcacgctattaaggtactacacgggattattagaacatagtaaagtgcaaccatgttgctttaagttatacaatgatccatttgatatggtttatgtgatgatgaatgggaagttattcggtcatgtatatattaaagattgtaaagtaaggcaatcatttgaattagcgtcacctaagcacactgaggggcttataagaagcatagaaggtcattatgtaggttatgaattacatgagggtaaacagctttctattagtgatatgatggccagtcaattatttgaagatgagtattttatgtatggattacaaacatatgcagaatcaaataatagtgatgtgtttgagtacctagaaaatggatttgatactgatacacttgagggcattcaatcgagtaatactgatgtgatagcgaatattgaaatgttgtatcagatagctacgggaatcaatgaaccagcaccagagttagttgagggattaaaattagtaactgagtttgtacaagatgagaaggctacacaagaggattacaaggctttagaacgtaagttaactgagttgaagtcatcttattacagtttgaataagtaa

SEQ ID NO: 410278 - DNA, 570 bp, Staphylococcus aureus
atgagtgatttaacagcaaaacaagcgcgttttgtgaatgagtatataagaacacttaatgtaacacaaagtgccataaaagcaggctatagcgcaaatagcgcacatgtgacagggtgtaggttattgaagaagccacacatcaagcaatatatacaagaacaaaaagataagattatagatgagaatgtattaaccgcaaaagagttactacatgtgcttacgaatgcggcagtcggtgatgaaacagaaacgaaagaagttgtagtcaagcgtggagaatataaagagaatccacaaagtggcaaagtacagctagtctataacgaacatgttgaactgatagaggtaccaattaagcctagtgatcgtttaaaagctcgtgatatgttggggaaatactataagttatttacagataagcatgatattaacggcaatgtgcctatattcattaacattggtgaatgggacggagacgatgaggaattagataaggcagtgaaagatgtatctaacactaatcctaatcatactgtgattgtggatgatataccgttagaggattaa

SEQ ID NO: 410279 - DNA, 123 bp, Staphylococcus aureus
atgaagataactaatataagattaaaaagtgcaaataaaaaaagtgttaaaaaactttactttcttgaaggtatagatgctatagaaaaaatagagaataattacgaaaaaaagtttttttag

SEQ ID NO: 410280 - DNA, 342 bp, Staphylococcus aureus; identical to SEQ ID NO: 408510

SEQ ID NO: 410281 - DNA, 528 bp, Staphylococcus aureus
atgttcaaatcattgataggaaaagatatttttgaagaggatgcaaattatgcatctggtcttacagctgtatgttcgattataaatggcggtaaacaatttaactctgtaccagatgaagcttcacttgaatttaacgtaagaccagttcctgagtatgataacgactttatagaatcgtttttccaaaatatcattaataatgtggatagcaataagctttcactcgatattccaagcaaccatcgacctgtaacaagcgataaaaatagcaaattaattactacgattaaagatgtagcttctagttatgtagacaaagacgatatatttgtttcggcgcttgtaggtgcaacggatgcttccagcttcttaggagataataaggacaatgttgatttagccatttttggaccaggtaatccattaatggcacatcaaatcgatgaatatattgaaaaagatatgtatctgaaatatattgatattttcaaagaggcttccattcaatatttaaaggagaaataa

SEQ ID NO: 410282 - DNA, 825 bp, Staphylococcus aureus
atgtatccaaactgggggcaatataaacgcgctgatttaatcggacaatcttcttatattaaaaataatgatgtcgtaatattcaatgaagcatttgataatggtgcatcagacaaattattaagtaatgtgaaaaaagaatatccttaccaaacacctgtactcggtcgttctcaatcaggttgggacaaaactgaaggtagctactcatcaactgttgctgaagatggcggcgtagcgattgtaagtaaatatcctattaaagaaaaaatccaacatgtattcaaaagcggttgtggattcgacaatgacagtaataaaggctttgtttatacaaagatagagaaaaatggtaagaacgttcacgttatcggtacacatacacaatctgaagattcacgttgtggtgctggacatgatcgaaaaattagagctgaacaaatgaaagaaatcagtgactttgttaaaaagaaaaatatccctaaagatgaaacggtatatataggtggcgaccttaatgttaataaaggaactgaagagttcaaagatatgcttaaaaacttgaatgtaaatgatgttttatatgcaggtcataatagcacatgggaccctcaatcaaattcaattgcgaaatataattatcctaatggtaaaccagaacatttagactatatatttacagataaagatcataaacaaccaaaacaattagtcaatgaagttgttactgagaaaccgaaaccatgggatgtatatgccttcccttactactatgtatacaatgatttctcagatcattatccaatcaaagcctatagtaaatag

SEQ ID NO: 410283 - DNA, 969 bp, Staphylococcus aureus
atggagaatttaagtgaaaaactagttgataaaagcatcgagtcatttattttaggtttagagatatacaacaaaccgactataaagtatagaatagaaggcttttcgtttttcatttgtaatgcatgggaattaatgttaaaagctgaactgttgaatcgtggagaaaatatttattatgaagataatcctgatagaactattagtttaaataaagtcatcaaactaacctatcctgattacaatactagaattagattgaatttagaaaaaattgtagatttacgaaatattagcactcattttataacacaggaatatgaggttaagtatgccccattattccaagcgtgtgtaatgaattttattaatgaaactatgagattccataaaaaagatgtttctgaaaatatttctcaaaactttttaactattactgctagttatgaaccattatctaatgaacaaataaaattgaaatatccacctgaaattgcagaaaaattaattaaagaatccaatgatatagatgttttaagtaatgaatataattctgataaattttcaattggtatcaaacaaaatttgtatattacaaagaagacagaagatgctgatttcctagtagctgttcataaagatgcagataacaaagtagattttgtaaaagaatataaagatccatcagatacacataaatattcatttaaaaacgtgattacagcagtaaacgaaagacttaagaagaaaagcataaacatgtcttattctaaagggttcaatcaatatgtattgaatttaataattgatttttatgatatcaaaagtgatgaaaaatatgcatataagcatacaatagggaaacaagagtctttcacgtattctcaacaattcattgagtttattattagtctaataagaaagaatccaacaaagtttgttgatagtttaagaaataaaaaaagataa

SEQ ID NO: 410284 - DNA, 210 bp, Staphylococcus aureus
atgaaacttctagttactttaaaggatggttcaaaaaaacatgtttcggatttaaagaaaattgtttttccaggatatgaaggaattgaaactgttacaaaagaggaaatcgaaacattttttctagaccctactaaaacttatgtgtttgttggatctcaaactctaagtgtggaggcagggcaaatccttaccgttgaatttagctaa

SEQ ID NO: 410285 - DNA, 261 bp, Staphylococcus aureus
atggaacaaatcacattaaccaaagaagagtgtgtcgaacaatgcatcaataaagacttaaaacttttagattatcgagttcaacaaattttagaaggtgttctatcagaaagtaccacatacggtgatgcaagaaataaattagaaacattgaaaattattgctgaatctcattttaaaaccgaacatgcttcagttatttacaaattagcattgaaaaagttagacaaaaaaatcaacgccactccaattaaagagtga

SEQ ID NO: 410286 - DNA, 138 bp, Staphylococcus aureus
atgtttaagattttaaatgatataaaaacttctttaaaaaaccatccttggggttggaaagagcacttaccttatttactgatgttaactctgtcacttgtggctctgattttcggtgttctgtccgcgattctatga

SEQ ID NO: 410287 - DNA, 1695 bp, Staphylococcus aureus
atgacaaaaacgaaacaagcaatacatattgataacatatactgggaacgtgttcagttatatattgaaggacatagtgaaggcgtagatttaacatcaggacaatttgttctgaggaatttaaccgaaacaaaaacattagaagcaaatgaaatgaaaatagacggtaatacatttctatgtagattcaatgtcgcaatattagacgatgggtattatttaccaatggataaatatttatttgtttatcatgaccagttagagtatattggacaacttaatccaaatattattgatcaagcttatgcggcattaaatgaagagcaaattgaagaatacaatgagctgactacacaaaatggaaaagcaaactatgtgttagccaacgaagctaaagttttccgcaaaggtggcgtatcacaacatacggtttataccattactccagaaatagcaagtgacgttaacgaatttgtatttgatattgacatcaccttacctcaagagaaatcaggggtcattgcgacaagcgcacactggcttcataaacaaggccataaagcttcatttgaaagtagaagtttcttatttaaagctatttttaatattacaaagttactacatattaaaagaagcaaaacaatattattcacatcagattcacgtccgaatttatcaggtaactttaaatatgtatatgatgagttactacgccaaaaagtagattttgattatgatattaaaacggtatttaaggcgaatattacggatagacgtaaatggagagacaagtttagattgccatatttacttggtaaggctgattatatttttgtcgatgatttccatccattaatttatacggttcgctttagaccatcacaagaaattattcaagtgtggcatgccgttggtgcttttaaaacagttggctttagtcgtacaggtaaaaaaggtggtccgtttattgattcattaaatcatcgtagctatacaaaagcttatgtatcatcagaaaccgatattccattttatgctgaagcatttggaattagagaagaaaatgttgtaccaacaggtgtaccacgtactgatgtactatttgatgaagcttatgcaacacaaattaaacaagagatggaaaatgaattaccacttataaaaggtaagaaagttattctattcgcaccgacatttagaggtaatggtcacggtacggcacattatccattttttaaaattgattttgaacgtttagcaagatattgcgagaagcataatgcagttgtgttattcaaaatgcatccgttcgtaaaaaatagactcaatatttcacgtgaacatagacaatactttatcgatgtgtcagattatcgtgaagttaacgatattctctttgttacagacttgttgattagtgattattcatctttaatatatgaatatgcagtatttaaaaaaccaatgattttctatgcatttgacttagaagattatattacgacgcgtgatttctatgaaccatatgaatcatttgttccaggtaaaattgtacaatcctttgatgcattaatggatgctttggacaatgaagattatgaggttgaaaaagttgtaccattcttagataaacattttaaatatcaagatggtcgctcaagtgaacgtttagtcaaagatttgtttagacgctaa

SEQ ID NO: 410288 - DNA, 1458 bp, Staphylococcus aureus
atgaagtgtttaattaggtttatattagtattagggttgttaattagcagtgctatggtgtatatcaatcccgcagcatatgctgaacaagatcaaaaatgggagaagattaaagaacgcggtgaacttagagtgggtctttctgcagattatgcaccaatggaatttgagcatacagttaatggtaagactgagtatgcaggtgtagatattgatttagctaaaaaaattgcgaaagataataatttaaaattaaaaatcgtcaatatgtcatttgatagtttgttaggagctcttaaaactggaaaaattgatattattatttccggaatgacttcaacgcctgaacgtaagaagcaagttgatttttcagattcatatatgatgactaaaaatatcatgcttgtaaagaaagataaagttaatgattataaagatatcaaagactttaataataaaaaagtaggggcacaaaagggaactgaacaagaaaaaatcgctcaaaccgaaattgaaaatgcatctattacttcattaagccgtttaccagacgttatattagctctgaaaagtggaaaggttgaaggtgttgtagttgaaaaacctgtagcagaagcatatttaaaacaaaatcctaaattaggaatttccaatgtgaaatttaatgaagaagaaaaagaaacagtgatagcagtaccaaaagattcaccaaaattattgtcacaaattaataaaacgattaaagaggttaaagataaaggattaatcgataaatatatgactaatgctgcaaatgcgatgaatgatgacagtggttttatttctaagtatggtagttttttcttgaaaggaattaagattacaatattaatttcacttatcggtgtagcattaggttctattttaggtgcattcgttgcgttaatgaaattaagtaaaataaaaattatttcatggattgcctctatctatatcgaaatattaagaggaacaccaatgttagttcaagtatttatcgtattctttggtataacggctgcattaggactagacatttcagctcttgtttgtggaacaattgcattagttattaattcctcagcttacattgctgaaattattcgtgcaggtataaatgctgttgataaaggccaaatggaagccgcacgtagtctaggtttgaattatagacaaacgatgaaaagtgtaattatgccacaagcaattaaaaacattttaccagctttaggtaatgaatttgtcactttaattaaagaatcatctattgtgtcaacaattggagttggcgaaattatgtttaatgcacaagtggttcaaggtatttcatttgacccattcacaccattactagtggcagcagcattatactttgtcttaacatttgtacttacacgcattatgaacatgattgaagggagattgaatgccagtgattaa

SEQ ID NO: 410289 - DNA, 1062 bp, Staphylococcus aureus
atgagtaacgcaaagaatgctgataataaacagtttttcagtaagattttaaattctattggtgctggtgttgttattgcacttgttccgaatgctttattaggtgaagtattaaaaatatttaaaagtggtaatgaaattttagaattaacgtatcagttagtgatactaattcaatcatttatggcatttattattggggttttagctgctcatcaatttaaatttaatggcgcaggtgctgctatagtaggtacatcagctatgattggttcaggtgctgttgtatatagcaataatagttttatgttaaaaggtataggtgacattataaatacaagtttggttgttattattgcatgtcttatatatatggtattacaaaacaagcttggatcttttgaattaattatattaccagttttagtacctatcgttagtgggggtatcggtctaatcacattaccttacattcgaaaaattactcaagcaattggaaatgtaattcattcttttacagacttaaatccgttgttaatgtctatacttattagtgtggcattttcattattaatggtaacaccaatatcgttagtagcgattgcaactgcgattagtttaaacgggctaggaagtggagcagcaaacctaggtatagtggctgcttgtgttactttcttattcggctcattgcgtgtcaattctattggcgtaaatgcagttttactcataggagctgcaaaaatgatgatcccagtttacttgaaaaatttaattatttcgataccattgactataaatggaataattactggaatcattgcttacgttcttcaggttaaaggaacaccattgtctgctggatttggatatacaggattagttggcccaataaatgcatttaaccgaatgtcaggtgatccaacaatgaatattattttattagctcttggttattttgtcataccatttgtatcggcgtttattgttcatgaattgtgtaaaaaattcattcctatatattctaatgatatttataaatttgaagttccaaaacaataa

SEQ ID NO: 410290 - DNA, 996 bp, Staphylococcus aureus
ttgcctaacaaaaacactcaagaatattgggaagaacgcggacgcaaagcaatcgagaatgagttgaagcgtgataaaactaaagctgaagaaatagaacgtatattgaatatgatgattaagcgcattgaaaaagagatcaatgcgtttattgtcaagtacggagattttgcaggcgttacattacaagaagcacaaaagattattgatgagttcgatgtaaaagcgtttcaagaagaagcaaaaagattggtcgaaaacaaggagtttagcgatagagcaaatgaagaattaaagaagtataacacgaaaatgtatgtatctagagaacagatgttaaagattcaaatagaattcttaattgcttatgcaacagctcaaacagaattatcgatgagggaatatttcgaatcaacagcttatcgtgtgttcagtgatcaagcgggtattttaggtgaaggtgtacaagtagctaaagaagttatagatacaatcgttgatacacaatttcatggtgtcgtttggtcagagcgattatggactaataccgaagcaatgaaacaagaagtagaagaaataattgctaatgtagttattagaggtcgacatcctaatgaatatgttaaagatatgcgcaagcacttaaataaattcgaaggcacagcacgacaaaagaccgcagcaattaaatcattgctttatacggaatcggcacgtgttcacgcacaatcaagcattgacagcatgaaagaaatttcaccggaaggatattatatgtatattgcaaaaatcgataatagaacaactaaagtatgcaaagggcttaatggagaaatattcaaagttaaagacgctaaaattggtgttaatttctatcctatgcatatcaattgtcgttcagattgcgctttactacctaaatctatgtggccgaaaaaaccaagcaagaaacgaaaaacaaaatacttcggagggaaagtgaaaagcggtgattga

SEQ ID NO: 410291 - DNA, 420 bp, Staphylococcus aureus
atgagtttgagaaaatcaacgcaaagatatttagaaagtgaattaagcaattacaattacttcgataaagatatagcgcgtgtaagagatgaagttttaaacccgtggagtcaacaagatactaatatcggtggagatagggtgcaaagcaatgtaagtgtaactgaaataaaagctattagagttgttaatgatagaagattatcgcaattggccagaatgaaatcggctatagaggttgtatataatcatagcactacagaaactcaaaaacttatggaactttattattttaaaaagcctagaacattaaatttaactggtgtagctcaagaaataaatgtaagtaagtctactgcttatgatatgaggaaagacatactagttagattagcagatgaattaggtataatacattaa

SEQ ID NO: 410292 - DNA, 393 bp, Staphylococcus aureus
atgagtatcgtaaagattaacggtaaaccgtataaatttaccgaacatgaaaatgaattgataaaaaagaatggtttaactccaggaatggttgcaaaaagagtacgaggtggctgggcgttgttagaagccttaaacgcaccttatggcatgcgcttagctgagtataaagaaattgtgttatccagaattatgcaacgagaggctagagaacgtgaaatagctagacaacgacgtaaagaagctgagctaagaagaaaccacatttgtttaatgtacctcagaaacattcacgtgatccgtactggtttgataatacttataaccaaatgttcaagaagtggcaggaagtataaatgcctaaaaccgatagcgcatgtaaagaatacttaa

SEQ ID NO: 410293 - DNA, 312 bp, Staphylococcus aureus
atggatcaatgggtatctaaatacaatagtgtaggcgatgttagaggtaaaggcctgagcattggtattgatattgtttccgacaaaaacctcaaaacacgtgatgccagtgcggcacttaaaatttgtaattactgctttgagcatggcgtagttattatagctgtagcaggaaatgtgttgcgattccaaccgccattggtaataacatatgagcaattagacacggcgttaaacactatagaagatgcactgactgctttggaagcaggaaacttagatcaatatgacatatctggacaaggttggtaa

SEQ ID NO: 410294 - DNA, 237 bp, Staphylococcus aureus; identical to SEQ ID NO: 409168

SEQ ID NO: 410295 - DNA, 252 bp, Staphylococcus aureus
atgaataatcgtgaacaaattgaacaatccgttataagtgctagtgcgtataacggcaatgacacagagggattgctaaaagagattgaggacgtgtataagaaagcacaagcgtttgatgaaatacttgagggtttacctaatgctatgcaagatgcactcaaagaagatatttatcttgatgaagcagtagggattatgacggggcaagttgtctataaatatgaggaggaacaggaaaatgagtattag

SEQ ID NO: 410296 - DNA, 177 bp, Staphylococcus aureus
atggctacaaaaagttttactacagattataaatttaataacaaagcagctgaaaaattagtgaatgccatgaataaaagtgaagatgcccaagtcaatagacctaatgtttttgctcaacgtttaaaaacaacagaagaattacaaaattttatgagtaaagtaaaggttaaatga

SEQ ID NO: 410297 - DNA, 615 bp, Staphylococcus aureus
atgagtttagaagttgtttcgttatcgacattattgaggaattttacagaaaaagaggttcaattattactagatcaatttgaatctaaagatttttctggtaagaatgaagctcatgaagtagaagattttctcaaaaacaaagcgatttactatgataaaaatgatttttctaaaacacatttagtatatagtagttataaaggtgcaaaagttttagttggttattatgcaataggtataaattcactgagatttacaaaaagacagttggataaatattcaagtaaaatcaagggtcaattaaagcataaagcttcaaaaaaagataaaatgactggggatatcgaactaacttgttatttaatagggcaaataggtaaaaactttaaggaagatgctttgaagacaaaagagataacaggatacaaattattagaattagcttatcagactattctagaagcacaagagctaaccggtggttcgtttgcatatttggaatatgaagatgtagataaattaagagacttgtataagaggtttggttttcgagaactgactgattacaggacgcaaaataacttatgtatggctattttacgaatcaaataa

SEQ ID NO: 410298 - DNA, 1092 bp, Staphylococcus aureus
atgactttaaaaaaccagtgtaccccccttactaataggggggtagagcgtacaaataaaagtgctgtggaggcagttgttgactgggttcaggtcactttccatatagcccctatttcagcagtaattgaggacgttatcggtttgcctataacgttgttcaaaaaacgaaatagtggcatttacttttataatcgcggttatgaattttcaaacattaaattgtattattcaagtgatgatgaatcaatgggcattcacttacagttaactggtacaggttgtagagagtttgaacatcatttacagcagttgaataaaacttggcaagatttttttgacaaatgtttatcagttaatgcaaattttacaagaattgatattgcaattgatgattataaaacatatttaaaagtgcctttattaattaaaaaggctgaaaaagctgagtgtgtttcacgttttagagctggaagcgcaataaacggttttaatttgtcagacggaagaagtaaaggcgctactttttatattggttctaaacaaagcaatttatattgtcgtttttatgaaaagaattatgaacaagcgtttaaacgtcattgtgatgtcgaagacattgggctatggaatcgttatgaaatacaaatgcgaaaggcatatgcagttaattgtgcgaaagtgttgagtagaacagataatataagcgaaattgtaaagtctatattgcataataatttgcgttttatctctcctcctaaagatggaaatgataaaaatcgtaagcggtggccattatatagaccttgggcgttatttattaaagatactgaaaaattgaatttaactactagaccaacattaaagtccattgaggataatcttgattggttatgtaaacaagttgctactactttagatacagtgttaactgccgaaagtatggcgcaatctgaggggttgcttacagatactgattttttagataaaattttagcgcattcacaatttaatgatgagcatacgaatagaattaatcattatttggaggctttaaaacaaaaaaagcacttatcaaaagataagtgttaa

SEQ ID NO: 410299 - DNA, 1359 bp, Staphylococcus aureus
atggcaatgaatgaaattgctttatttaaaggcgtacgtatacagccttatcagaagtatattgattttatgtttgcaggtgtattagcatttatttttttggtatatcgtatatacattttgtttattgattataaatcagttaataaaaaattggatatattgacgttgtttgcatattttaaaccgcatttattgtatttattaattggtacagcaattatatttgttatatgtaaacttattgctcagtttttaatacgttttaaaacgaaagatttggctgaaatgattgagacacaaggctttcataatcgtacagtaatcaagaaaacaactgagtatattcctattgattataaacaaactgaatatgactattatccaacaatgttttataagcgtggtaaaaaatcttttgttattcatattaagaaagacggttcgaggtttcaagataattatttagagttagaaacgattattgaaccaatgtttaattctgaattagtagaaaaaaagcatattggtcgttatttgagatatgaatttatgccacttaaatataaaaagcgtattgttatgaatggcgaacaagaatcaaatacaattttttatgatacaaaaattgctattacgcatcaaattacttgggattttgtgaaagcacctcatggattggttacaggtataaccggaggtggtaaaacatattttttattttatgtgattcgtgagttattccgtagacattcagaagtacgtttattagacccaaaagtttcagatttgagctttatgaaacgcgttattggtgatgataaagttgcagatactaaaggtcaaatattaaaacaattgagagaagctaataatgaaatggaagagcgttttagattaatgaatgatagttcggattataaaatcgggaatgatttccgtaattttgatatgcgcccctatttcattatttttgatgaggtaacggcttttacttcaactttagataaaaaagaattacaagaaatgaatgattatttaattaatattattatgaaaggtcgtcaagctggtgtatttatgtttttaacagcacaaagaccagatgcagatgtgattaaaggtaatgtgcgtgaccaattagggttacgtgtgtctttaggtaatttgtcaaatgatggttatcgtatgacttttggtcaaactgataaagaatttcaaacgattcatgatagtgatatcggccgaggttatatttctatacttggacaatataatgaaccaattttatttgatgcacctttaatggaacaatatgattttgtggaagatgtgaaacaaatattaaataaggagtga

SEQ ID NO: 410300 - DNA, 504 bp, Staphylococcus aureus
atgaaaaaaagaaaaaaacgtaaagaattagattataaaacacgtctagctatcgcaaagtatttaaatgatggtttaaacatcattcagatttctaagattttaggtcgtgatgatgcggttctttatagagaagtaaataagcgttctgttgatggtgtttataatcctttattagctgaggaagatgctataaaatcgcgtagtatttcagatgaacaagttgctaaacgtagacgtttgaatgatgaaacaaaagcatatattgaagaaaaactttcattaaaatggtctcctagacagatagcaagtcaaattgaaaaagatacagggcattatataagttatcctactatatatagatatattcgcaatggattggtaaaagttgatgttaagcgtgatatgagacaagcaggcaaaaaatataataagtcttctgaaaagcgtggcaaattagacgtagggtctcgtgttataaagtatcggctcaaaaagtattaa

SEQ ID NO: 410301 - DNA, 168 bp, Staphylococcus aureus
atgggtgaaaatgtaagatatatgctaagaagtcaaaataaaactaactataaaacgtctagtacgattattaaagtgacagataataaaattgaattattaagagaaggagatataaagtttgaagaaataaaagaaagactaggtacaggtattatttatgaataa

SEQ ID NO: 410302 - DNA, 501 bp, Staphylococcus aureus
atgactttcgaagaaaaactaagtgaaatgtacaatgaaattgcaaatgagatttgtggaatgataccggttgagtgggaaaaagtatatacgatagcctatgtaaatgatagaggtggagaggtcgtttttaattatactaaaccaggtagcgatgaattgaattactattcagacatacctaaagattgcaatgtctcaaaagatatttttaagaattcatggtttaaagtttatcgaatgtttgatgagttaagagaaacttttaaagaagaaggacatgaaccatggacatcatgcgaatttgattttacaagagacggcaaattgaatgtttcatttgattatattgattgggcgaattcagagtttgggccaatgggaagagaacattattatatgtataaaaaatttggaatttggcctgaaaaagaatatgccataaattgggttgaaaaaataaaagattatgttaaagagcaagaagaagctgaactatag

SEQ ID NO: 410303 - DNA, 333 bp, Staphylococcus aureus
ttgaattattacacgaatatatctagagattataatgtttcggaagaaatatttgatgatttatggatgaatctttattacttgtttaagaatttaaggaatttatttaaaacagaagaacatgaaccatggacatcatgcgaatttgactttacaagagacggaaaattgaatgtatcttttgattatatagattggatcaatacagagtttgatcaattggaccgtgaaaattattatatgtataaaaaatttggggttataccagaaatggaatacgaaatggaagaaattaaagaaatcgagcaatatattaaaagccaagaaagttaa

SEQ ID NO: 410304 - DNA, 765 bp, Staphylococcus aureus
atgttaaatgtattattattaattataaatttaattgcaatatgtagtgtaaacaatgcatatgcaaatgaagaaaatcctaaaattgaggatttgtgtaagaagtcaagtgtagacgatattgctctacataatattgataaagactatatgactaatcgctttacaataaatgagtcaactgtattaactacagaaaaatttttagatattgatttattatttaaaaattttacttggttagatggaaaatctgctgaatttaaagatttaaaagtggaatttagctcatcggaaatttccaaagagtattttggaaaaactgtagatatttatggtgtctattataaagcgcattgtcatggtgagcatcaagtgaaaactgcctgtacttatggcggggtaacacctcatgaaaataataaattaagtgaacctaaagaaataggagtagctgtgtataaggataatgtaaatgttaatacatttatcgttactacagataaaaagaaagttactgcacaagaacttgatattaaagtaagaacaaaattaaataatgtatataaattatatgatcgaatgactagtgatgtacaaaaaggttatattaaattccattctcattcggagcataaagaatcattttattatgatttattttatattaaaggaaatttaccagatcaatatttgcaaatttataatgataataaaacaatagattcatcagactatcatattgatgtttatttatttacataa

SEQ ID NO: 410305 - DNA, 756 bp, Staphylococcus aureus
atgaaaacatacagtgaagcaagagcaaggttacgttggtatcaaggtagatatattgattttgacggttggtatggttaccaatgtgcagatttagcagttgattacatttattggttgttagaaattagaatgtggggaaatgcaaaagatgcaatcaataacgattttaaaaacatggcaacagtatatgaaaacacaccatcgtttgttccacaaataggtgatgtggctgtatttaccaaaggaatatataaacaatacggtcatattggtttagtgtttaatggtggtaatacaaaccaatttttaattttggaacagaactatgacggtaacgcaaatacacctgcaaagttacgttgggataattattacggctgtactcactttattagacctaagtataaaagtgagggcttaatgaataagatcacaaataaagttaaaccacctgctcaaaaagcagtcggtaaatctgcaagtaaaataacagttggaagtaaagcgccttataaccttaaatggtcaaaaggtgcttattttaatgcgaaaatcgacggcttaggtgctacttcagccactagatacggtgataatcgtactaactatagattcgatgttggacaggctgtatacgcgcctggaacattaatatatgtgtttgaaattatagatggttggtgtcgcatttattggaacaatcataatgagtggatatggcatgagagattgattgtgaaagaagtgttttaa

SEQ ID NO: 410306 - DNA, 255 bp, Staphylococcus aureus; identical to SEQ ID NO: 407390

SEQ ID NO: 410307 - DNA, 948 bp, Staphylococcus aureus; identical to SEQ ID NO: 408533

SEQ ID NO: 410308 - DNA, 234 bp, Staphylococcus aureus
atgagtgagtcttcttttaagaagcctgaaaaaagtaatagtgattttaaagtatatgaagatggtaaatttataactatttcttttgtttatgataaagatggtacagtgtggacaagtttatataaaaaaaatgagacaacagataaatatgtaaaagttgaagatatgaatgaaaaagaatatcaaagtaatcataaaccagtttatgaagaaaataatatgaaaaaataa

SEQ ID NO: 410309 - DNA, 243 bp, Staphylococcus aureus
gtgggctcggagatgtgtataagagacagaatatgtatctatcaaaattcgtcttatttattcactctgacatatccaaatacgcaaaaagactatttctaccttgcatcgatagaaatagtctttttatacttaattggtttaatttttcataaaattttatacttttttaaaaatgggatgaaatatattttcctgaaacatgtaattcatgttcgttacaaattgataaaatatgattaa

SEQ ID NO: 410310 - DNA, 690 bp, Staphylococcus aureus
atgattgacgcattttcacgtgcacgtgatgatcaaaacgtttcagttatcgtattaactggtgaaggtgatttagcattctgttctggtggtgaccagaagaaacgtggacatggtggttatgtaggtgaagaccaaatccctcgcttaaatgtattagatttacagcgtttaattcgtattattccaaaaccggttatcgcgatggtaaaaggttatgctgtaggtggcggtaatgtactaaatgttgtttgtgacttaacgattgctgctgataatgctatttttggacaaactggtcctaaagtaggttcatttgatgcaggttatggttcaggatatttagcacgtatcgttggacataagaaagcacgtgaaatctggtacttatgtcgtcaatacaatgcacaagaagctttagatatgggcctagtaaatacagtggtacctttagataaagttgaagatgaaactgtgcaatggtgtaaagagattatgaaacactcaccaacagctttacgattccttaaagcagctatgaatgctgacacagatggtttagctggtttacaacaaatggctggggatgcaacattgctttattacacaactgatgaagcgaaagaaggccgtgatgcgtttaaagaaaaacgtgatcctgacttcgatcaattccctaaattcccataa

SEQ ID NO: 410311 - DNA, 798 bp, Staphylococcus aureus
atgagaataatgtttataggggatatcgtaggtaaaattggacgagacgcaattgaaacgtacatacctcaactgaagcaaaagtataaaccaacagttacaattgtaaatgctgaaaatgcagcacatggtaaaggtttgactgaaaaaatatataaacaattactaagaaatggtgtagatttcatgactatgggtaatcacacatatggtcaacgtgaaatttatgattttatagatgaagcaaaacgactagtaagaccagcgaattttccggatgaagcgccgggaattggtatgagatttatacaaattaatgatattaaacttgcagttattaatctgcaaggaagagcgtttatgccagatattgatgatccttttaaaaaggcagatcaattagtcaaggaagcacaagaacaaactccgtttatatttgttgattttcatgcagaaacaacttctgaaaagtatgcaatgggatggcatttagatggtagagctagcgctgttgttggaacgcatacacacattcaaacagcagatgaacgtattttaccaaaggggacagggtatataacggatgttggtatgacaggtttttatgacggcattttaggaataaataaaacagaggtaattgagcgttttatcactagtttgccacaaagacatgttgttccaaatgaaggtagaagtgtattatctggtgttgttattgatttagacaaagaaggtaaaacaaagcacatcgaacgtatattgataaatgatgaccatccattttcaacattttaa

SEQ ID NO: 410312 - DNA, 2832 bp, Staphylococcus aureus
gtgaaatttgcagataactggctagcaccgaatcctggttcagatgctgcaattgctcaagcaatgacacatgttattttacaagaacattatgttaatcaacctaatgaacgctttataaattacgctaaacaatatacagatatgccgtttcttatcatgctggatgaagatgaaaatggatataaagcgggtcgatttttaagagcgagtgacttaggtcaaacaacagagcaaggcgaatggaagccagttattcatgatgcaatcagcgatagtttagtagtacctaatggcacaatgggtcaacgttgggaagaaggtaagaagtggaacttaaaactagaaacagaagatggttctaaaattaaccctacattatcaatggcagaaggtggatacgaattagaaacaattcaattcccatactttgatagtgatggagatgggatattcaatcgtccaattccaactcgacaagtcactttagcaaatggtgacaaagtccgtattgctacaatttttgacttaatggcaagtcaatatggcgtgcgtcgttttgatcataaattagaatcaaaaggatacgacgatgcagaatcaaaatatacacctgcttggcaagaagccatttcaggcgtaaaacaaagtgttgtcattcaagtagcgaaagaatttgcgcaaaacgctatcgatactgaagggcgttcaatgattatcatgggtgcgggtattaaccattggtttaactcagatacgatttatcgttcaatcttaaacttagttatgttatgtggctgtcaaggtgtgaatggtggcggttgggctcactatgtgggacaagaaaaatgtcgtccgattgaaggatggagtactgtcgcatttgcgaaagactggcaaggaccaccacgtttgcaaaatggaacaagttggttctattttgcaacagaccaatggaaatatgaagagtcaaatgtagatcgtttaaaatctccattagctaaaacagaggatttaaagcatcaacacccagctgattataatgttttagcagctagacttggttggttaccatcatatccacaatttaataaaaatagtttgttgtttgcagaagaagctaaagatgaaggcattgagtcgaatgaggcaattttaaaacgagcgataaatgaagttaagtcaaaacaaacgcaatttgcgatagaagatccggatttgaaaaagaatcatccgaaatcactgtttatatggcgctcaaatctaatctcaagttctgcaaaaggtcaagaatactttatgaagcatttacttggcacaaaatcagggttattagctacaccaaatgaagatgaaaagccagaagaaattacgtggcgtgaggaaacaacagggaaattagatttagtcgtttctttagatttcagaatgacagcaacacctttatattctgacattgttttgccagcagcgacttggtatgagaagcatgatttgtcatctacagatatgcatccatatgtacatccttttaatccagctattgatccattatgggaatcgcgttcagactgggatatttataaaacgttggcaaaagcattttcagaaatggcaaaagactatttacctggaacgtttaaagatgttgtgacaactccacttagtcatgatacaaagcaagaaatttcaacaccatacggcgtagtgaaagattggtcgaagggtgaaattgaagcggtacctggacgtacaatgcctaactttgcaattgtagaacgcgactacactaaaatttacgacaaatatgtcacgcttggtcctgtacttgaaaaagggaaagttggagcacatggtgtaagtttcggtgtcagtgaacaatatgaagaattaaaaagtatgttaggtacgtggagtgatacaaatgatgattctgtgagagcgaatcgtccgcgtattgatacagcacgtaatgtagcagatgcaatactaagtatttcatctgctacgaatggtaaattatcacaaaaatcatatgaagatcttgaagaacaaactggaatgccgttaaaagatatttctagcgaacgtgctgctgagaaaatttcgtttttaaatataacttcacaaccacgagaagtaataccgacagcagtattcccaggttcaaataaacaaggtcgacgatattcaccatttacaacgaatatagaacgtctagtaccttttagaacattaacaggacgtcaaagttattatgtggatcacgaagttttccaacaatttggggagagcttaccagtatataaaccgacattgccgccaatggtatttgggaatagagataagaaaattaaaggtggtacagatgctttggtactgcgttatttaacgcctcatggaaaatggaatatacactcaatgtatcaagataataagcatatgttgacactatttagaggtggtccaacggtttggatatcaaatgaagatgctgaaaaacacgatatccaagataatgattggctagaagtgtataaccgtaatggtgttgtaacggcaagagcagttatttcgcatcgtatgcctaaaggtacaatgtttatgtatcatgcacaagataaacatattcaaacgcctgggtcagaaattacagatacacgtggtggttcacacaacgcgccgactagaatccatttgaaaccaacacaactagtcggaggatacgcacaaattagttatcactttaattattatggaccaattgggaaccaaagggatttatatgtagcagttagaaagatgaaggaggttaattggcttgaagattaa

SEQ ID NO: 410313 - DNA, 2886 bp, Staphylococcus aureus
gtgaaaagcaatcttagatacggcataagaaaacacaaattgggagcggcctcagtattcttaggaacaatgatcgttgttggaatgggacaagaaaaagaagctgcagcatcggaacaaaacaatactacagtagaggaaagtgggagttcagctactgaaagtaaagcaagcgaaacacaaacaactacaaataacgttaatacaatagatgaaacacaatcatacagcgcgacatcaactgagcaaccatcaaaatcaactcaagtaacaacagaagaagcaccaacaactgtgcaagcaccaaaagtagaaaccgaaatgaaatcacaagaagatttaccatcagaaaaagttgctgataaggaaactacaggaactcaagttgacatagctcaaccaagtaacgtctcagaaattaaaccaagaatgaaaagatcagctgacgttacagcagtttcagagaaagaagtagcggaagaagctaaagcgacaggtacagatgtaacaaataaagtggaagttactgaaagctctttagaaggacataataaagattcgaatattgttaatccgcataatgctcaaagagtaactttaaaatacaaatggaaatttggagaaggaattaaggcaggagattattttgatttcacattaagtgataatgttgaaacacatggtatatcaacactgcgtaaagttccgaagataaaaagttcaacagaagataaagttatggcaaatggtcaagttataaatgaacgtacaattcgctatacatttactgattatataaataacaaaaaagatttaactgctgaattaaacttaaacctattcattgacccaacaacagtgacaaagcaagggagtcaaaaagttgaagtaacactaggtcaaaataaagtctcaaaagaatttgatatcaaatatttagacggcgttaaagatagaatgggtgttactgttaatggtcgtattgatactttgaataaagaagagggtaaatttagccattttgcatatgtgaagcctaacaaccagtcgttaacttctgtcacagtaactggtcaagtaacatctggatataaacaaagtgctaataatccaacagtcaaagtatataaacacattggttcagatgaattagctgaaagtgtttatgcaaagcttgatgataccagtaaatttgaagatgtgactgaaaaagtaaatctatcttacacaagtaatggtgggtacacattgaaccttggcgatttagataattcgaaagactatgtaattaaatatgaaggtgaatatgatcaaaatgctaaggatctaaatttccgaacacatctttcaggatatcataaatactacccatactatccttattacccgtattatccagttcaattaacttggaacaacggtgttgcattttactctaataatgctaaaggcgatggtaaagataaaccaaatgatcctatcattgagaagagtgaaccaattgatttagacattaaatcagagccaccagtggagaagcatgaattgactggtacaatcgaagaaagtaacgattctaagccaattgattttgaatatcatacagctgttgaaggtgcagaaggtcatgcagaaggtattattgaaactgaagaagattctattcatgtggattttgaagaatctacacatgaaaattcaaaacatcacgctgatgttgttgaatatgaagaggatacaaacccaggtggtggccaagtaacaactgagtctaacttagttgaatttgacgaagagtctacaaaaggtattgtaactggcgcagtgagcgaccatacaacagttgaagatacgaaagaatatacaactgaaagtaatctgattgaattagtggatgaattacctgaagaacatggtcaagcacaagggccaatcgaggaaattactgaaaacaatcatcatatttctcattctggtttaggaactgaaaatggtcacggtaattatggcgtgattgatgaaatcgaagaaaatagccacgttgatattaagagtgaattaggttatgaaggtggccaaaatagcggtaatcagtcattcgaggaagacacagaagaagataaacctaaatatgaacaaggtggtaatatcgtagatatcgatttcgacagtgtacctcaaattcatggtcaaaataatggtaaccagtcattcgaggaagacacagaagaagacaagcctaagtatgaacaaggtggtaacatcattgatatcgacttcgacagtgtgccacaaattcatggattcaataagcataatgaaattattgaagaagatacaaacaaagataaacctaattatcaatttggtggacacaacagtgttgattttgaagaagatacacttccaaaagtaagtggtcaaaatgaaggtcaacaaacgattgaagaagatacaacgccgccaacaccgccaacaccagaggtaccaagtgagccggaaacaccaacaccaccaacaccagaagtaccgagtgagccaggcgaaccaacgccaccaaaaccggaagtaccaagtgagccggaaacaccagtaccaccaacaccagaggtaccatctgaacctggtaaaccagtaccacctgctaaagaagaacctaaaaaaccttctaaaccagtggaacaaggtaaggtagtaacacctgttattgaaatcaatgaaaaggttaaagcagtggcaccaactaaacaaaaacaatctaagaaatctgaactacctgaaacaggtggagaagaatcaacaaacaaaggtatgttgttcggcggattattcagcattctaggtttagtattattacgcagaaataaaaagaataacaaagcataa

SEQ ID NO: 410314 - DNA, 744 bp, Staphylococcus aureus; identical to SEQ ID NO: 404905

SEQ ID NO: 410315 - DNA, 357 bp, Staphylococcus aureus; identical to SEQ ID NO: 408044

SEQ ID NO: 410316 - DNA, 3348 bp, Staphylococcus aureus
atgagagataagaaaggaccggtaaataaaagagtagattttctatcaaataaattgaataaatattcaataagaaaatttacagttggaacagcatctattttaattggctcactaatgtatttgggaactcaacaagaagcagaagcagctgaaaacaatattgagaatccaactacattaaaagataatgtccaatcaaaagaagtgaagattgaagaagtaacaaacaaagacactgcaccacaaggtgtagaagctaaatctgaagtaacttcaaacaaagacacaatcgaacatgaagcatcagtaaaagctgaagatatatcaaaaaaggaggatacaccaaaagaagtagctaatgttgctgaagttcagccgaaatcgtcagtcactcataacgcagaggcacctaaggttagaaaagctcgttctgttgatgaaggctcttttgatattacaagagattctaaaaatgtagttgaatctaccccaattacaattcaaggtaaagaacattttgaaggttacggaagtgttgatatacaaaaaaacccaacagatttaggggtatcagaggtaaccaggtttaatgttggtaatgaaagtaatggtttgataggagctttacaattaaaaaataaaatagattttagtaaggatttcaattttaaagttagagtggcaaataaccatcaatcaaataccacaggtgctgatggttgggggttcttatttagtaaaggaaatgcagaagaatatttaactaatggtggaatccttggggataaaggtctggtaaattcaggcggatttaaaattgatactggatacatttatacaagttccatggacaaaactgaaaagcaagctggacaaggttatagaggatacggagcttttgtgaaaaatgacagttctggtaattcacaaatggttggagaaaatattgataaatcaaaaactaattttttaaactatgcggacaattcaactaatacatcagatggaaagtttcatgggcaacgtttaaatgatgtcatcttaacttatgttgcttcaactggtaaaatgagagcagaatatgctggtaaaacttgggagacttcaataacagatttaggtttatctaaaaatcaggcatataatttcttaattacatctagtcaaagatggggccttaatcaagggataaatgcaaatggctggatgagaactgacttgaaaggttcagagtttacttttacaccagaagcgccaaaaacaataacagaattagaaaaaaaagttgaagagattccattcaagaaagaacgtaaatttaatccggatttagcaccagggacagaaaaagtaacaagagaaggacaaaaaggtgagaagacaataacgacaccgacactaaaaaatccattaactggagaaattattagtaaaggtgaatcgaaagaagagatcacaaaagatccgattaatgaattaacagaatacggaccagaaacgatagcaccaggtcatcgagacgaatttgatccgaagttaccaacaggagagaaagaagaagttccaggtaaaccaggaattaagaatccagaaacaggagacgtagttagaccaccggtcgatagtgtaacaaaatatggacctgtaaaaggagactcgattgtagaaaaagaagaaattccattcgagaaagaacgtaaatttaatcctgatttagcaccaggaacagaaaaagtaacaagagaaggacaaaaaggtgagaagacaataacgacaccaacactaaaaaatccattaactggagaaattattagtaaaggtgaatcgaaagaagagatcacaaaagatccgattaatgaattaacagaatacggacctgaaacaatagcgccaggtcatcgagacgaatttgatccgaagttaccaacaggagagaaagaagaagttccaggtaaaccaggaattaagaatccagaaacaggagacgtagttagaccaccggtcgatagcgtaacaaaatatggacctgtaaaaggagactcgattgtagaaaaagaagaaattccattcaagaaagaacgtaaatttaatcctgatttagcaccagggacagaaaaagtaacaagagaaggacaaaaaggtgagaagacaataacgacgccaacactaaaaaatccattaactggagaaattattagtaaaggtgaatcgaaagaagaaatcacaaaagatccgattaatgaattaacagaatacggaccagaaacgataacaccaggtcatcgagacgaatttgatccgaagttaccaacaggagagaaagaggaagttccaggtaaaccaggaattaagaatccagaaacaggagatgtagttagaccaccggtcgatagcgtaacaaaatatggacctgtaaaaggagactcgattgtagaaaaagaagaaattccattcgagaaagaacgtaaatttaatcctgatttagcaccagggacagaaaaagtaacaagagaaggacaaaaaggtgagaagacaataacgacgccaacactaaaaaatccattaactggagaaattattagtaaaggtgaatcgaaagaagaaatcacaaaagatccagttaatgaattaacagaattcggtggcgagaaaataccgcaaggtcataaagatatctttgatccaaacttaccaacagatcaaacggaaaaagtaccaggtaaaccaggaatcaagaatccagacacaggaaaagtgatcgaagagccagtggatgatgtgattaaacacggaccaaaaacgggtacaccagaaacaaaaacagtagagataccgtttgaaacaaaacgtgagtttaatccaaaattacaacctggtgaagagcgagtgaaacaagaaggacaaccaggaagtaagacaatcacaacaccaatcacagtgaacccattaacaggtgaaaaagttggcgagggtcaaccaacagaagagatcacaaaacaaccagtagataagattgtagagttcggtggagagaaaccaaaagatccaaaaggacctgaaaacccagagaagccgagcagaccaactcatccaagtggcccagtaaatcctaacaatccaggattatcgaaagacagagcaaaaccaaatggcccagttcattcaatggataaaaatgataaagttaaaaaatctaaaattgctaaagaatcagtagctaatcaagagaaaaaacgagcagaattaccaaaaacaggtttagaaagcacgcaaaaaggtttgatctttagtagtataattggaattgctggattaatgttattggctcgtagaagaaagaattaa

SEQ ID NO: 410317 - DNA, 792 bp, Staphylococcus aureus
atgcattcaaagaaattaatgctcggtatatgtttggtattactcattatattgattgtaggttatgtcattatgacaaaaataaatagtcgaagcgcccaaattaaagacacatttaatcaaacattaaaattatatccaaccaaaaatcttgaagacttttatgataaggaaggctttcgagatcaagagtttgaaaagggcgacaaaggcaattggattgttgattctgagatggtaattgagctgaaggataaaaaaatggaatctagaagtatggtgctctatataaatcgtaatactagaacaacgaaaggtaattttattgttagagaattgtgggaagatagtaaagggtatgcacaaagtaaagatacaaaatatccagtgaaaatggaacataatcgaattatcccaacgaaaccgatagctgatgataaattaagaaaagaaatcgaaaactttaaattctttgtacaatacggtgactttaaagatattaatgattataaagatggtgacatttcatataatcctaatgttccaagttattccgcaaaatatcaattgaaaaacgatgattacaatgtgaagcaacttcgaaaaagatataatattccaaccaacaaagctccgaaattattaataaaaggtgatggtgatttaaaaggctcatctgtagggtcaaaaaatctagaatttacctttgtagaaaataaagaagaaaacatttattttacagattctgtacaatatacttcaagtgaggatacaagttatgagtcaaactga

SEQ ID NO: 410318 - DNA, 768 bp, Staphylococcus aureus; identical to SEQ ID NO: 408060

SEQ ID NO: 410319 - DNA, 960 bp, Staphylococcus aureus
atgctgaaaaacaaaacatttaaagttacttggaattatatttcacaaactacatttatgtatggctctaaagtatcattttcaaatggtgaagtgacttttataaatcctttgatgccctctggattaccgattcatgagtggttgatgttaaagcaattttcaaaatataaaagtgcgccaagtttaccaattttgcgtagaggacagcattataaattgcattttgattttgatgcaacgcctgctggttcagtgtattttatcatcattttttataataaaaatggcacaaaactaagtactgagattgtaaagtcaaatagtattacgattcaatatcctgatgaagcctatgcttataaaataaaaatgatgaatgcagcatcgacgagtctaatatttagatgtttaacaattacagagatgacgcatcaagatgatttagagtataaaagcatgcgggtgacgaagatagacgataaccaatatggaaatgataggatcaatgtcattattgcagaaccatctgacacctatccaactatttcgaatgattttttgaaactgtttggtcatgtttggctcgttgaacgttggatggacgacgatatcaaggaaaatattaagcaactaaaggatgatttgcaaagtcaagataccctaacggctattaatttgattagttatgggtcaaagtcaaatgtttttgcaacttatgtcgctcagcatttagattgcaaagtatatcgtacaagccatgaagatgatgatttaaaagaatggcttacagaacatgtcccaggaaataatgaactaaaagatacaaatgtcgagttttattttaaagaagagcaagacaaccatctaaattatatgtcacgtttaatgaatccagtacgatttttagattacttagatgtatcgaaactgaatggtggggaagtaaatgaaacataa

SEQ ID NO: 410320 - DNA, 705 bp, Staphylococcus aureus
atgattgaattatggccagcgattgatttgattgggtcaacaagtgtgaggttaacagagggtaaatatgatagtgaagaaaaaatgtcgcgttcggctgaagaaagtattgcttactatagtcaatttgaatgtgtgaatcgtattcatatcgtcgacttgataggtgctaaggcacagtatgcccgagagtttgattatattaagtcattgaggagattaacaaccaaagatattgaagtaggtggtggcattcgtacgaagtcacaaatcatggactactttgccgcagggattaattattgcatagttggaacgaaaggcattcaagatactgattggcttaaagagatggcacatacatttccaggtcgtatttatctgtcagttgatgcttatggagaagatattaaagtgaacggatgggaagaggacacagagttaaatttatttagttttgtgagacagttatcggatatacctcttggaggcattatatatactgatattgctaaagatggcaaaatgtccggacctaactttgaattaactggtcaattagtaaaggcaacgacgattcctgtcattgcttccggtggtattagacatcagcaagatattcaacgattagcgtcgctaaatgttcacgctgctattataggaaaggctgcacatcaagcatctttttgggaggggctagaatga

SEQ ID NO: 410321 - DNA, 1143 bp, Staphylococcus aureus
atgcaattacaaaaaattgtcatcgctcctgactcatttaaggaaagtatgaccgcacagcaagttggcaatattataaaacaggcatttactaatgtttatgggaatacccttcattatgatatcattccgatggctgatggtggtgaaggtaccacagatgctttaatgcatgcaacaggtgccactaagtatacagtcatcgttaatgaccctttaatgcgacctattgaagcatgttatgcacgcgcagacgaacaacaaattgcaattattgaaatggcggcagcgtcaggtttggatttattagaaaaagaggaacgtaatcctttatacacatcatcatatggtaccggtgaactaattaaagatgcattaaatcatggtgctaagaccattattttagggattggtggcagtgcaacaaatgatggtggtacaggtatgctaagtgcactaggcgtaaagtttactgatgtaaacggggacttattacaaatgaatggtgctaatcttgctcacattgcacaaatcgatataaccaatctagattcgcgattaaaagaggtgacctttaaagtggcctgtgatgtttcaaatcctttattgggtgaaaatggtgctacctatatttatggtcctcaaaaaggcgctgatgcaaagatgataccaaagttggatttcgcaatgtcgcattatcatgataagataaaaatgtgcacaggaaagtccgttaatcaaataccaggttctggtgcagctggcggtatgggcgcagcattattagcgttttgtgagacaactttaacaaaaggtattgatgtcgtctttgacattacagattttcatcaaagaattaaagatgcagacctcgttattactggagaaggacgcatggattatcagaccatctttggtaaaacacccgtaggcgttgcgttagctgcaaaacaatatcatattcctgtcatcgcgatttgtggcagtctaggcgaaaattatcaacatgtttacgatttcggtattgatagtgcctattctataatctcttcacctagcactttagaagatgtcctacaaaatagcgaacaaaatttattaaacactgcaactgacattgctcgtattctgaaattacaataa

SEQ ID NO: 410322 - DNA, 537 bp, Staphylococcus aureus
atgacaaaaacgatgattcgactcgcaagtgaacaagatgcagaaaaattgcaacaactcatgcatgaagcatttacgcctctaagagaactaggtattgattggccttcagttaatgctaatttagatgctgttaaagaaaatatagataaaaatactacatttgtcatgacaattgatgatgaaattatatctacgattacggttagatatccttggggaagtgtgaaaagtatttcgggctatccttttgtctggtggtttgcgacaaatcctgagtatgaagggaaaggctatggtagccaattacttacttatgttgaagaagcatttttgcgagatacgttaaagtcagcggcagttactttaggtacatctgcaagattgcatccgtggttacttaaaatttatgaaaaaagaggttatgaaatatacagcgaacatgaaaatgatgatggcgatttaggtgtgatcatgcgcaaagtattgatacccgagcgctttgacgaaacaatattaggccaaccaccattttaa

SEQ ID NO: 410323 - DNA, 1038 bp, Staphylococcus aureus
atgaaaacacgttgttacgatggtaaaaaatggcaatatgagtttaagcatgaaggaaaaagataccgtaagaaaggttttagaacaaagcgtgaagctaattctgctggactagacaagttaaatgagttaagaagtggttttaatatagataactatataactcttgaagaatacttcgaaaattggattaaaacgtataaacaacctgttgttaaagaaaatacctaccgtcattatagaaatgcattacaacatatacaaaaacataaaataggtaaaatggagttatcaaagataaatagacaagtttatcagaaattcataaacgaccattcaaaagaacacgcaaaagaaactataagaaaaacaaacggtgctattcggtcagctttagatgacgcattatatgatggacttatttttaaaaaccccgcttataaagttaattataaagccggaaaacctacgaagtcagaacaagaaaaattcatctcggtaactgaatatgaaatactaaaagatcacgtcagaaagaagagaactcgttcatcattagcgctattcataatgatttgtacgggttgtcgtgtcagtggtgcaagaaatataaagattgagcatatcaaccaagtgaaaaacactatatttattgacgagcgaaaaaccgatacttcccctagatatatcagtatcgctaaatctgatatgaaacacattatggacgtcataagtacatttgcaattagctatgatggttacattttcaaagaagccggatctataattaaccttcaggctatcaataatgctttgaaatcagcctgtagagtcaataatataccaattattacatcgcacgcattaagacacactcattgttcttatttactagcaaaaggtgtatctatacattacatttctaaaagattaggtcataaaaatatagcaataactacatccgtgtattctcatttgttagaagaaaaatttaatgaagaggacaaaaaaacaactaaaattttagaaagtatgtaa

SEQ ID NO: 410324 - DNA, 234 bp, Staphylococcus aureus
atgatggcacttaaaacgaaagtattacctaaaacagttgttataattactgtaataagtgcactaaccccgaaagattgtattgatttattccataaaacgatacctggtatggttgcaaataatgcaaatattagtcccaaaccaggcactagatataaagctaaagcgacaaataccaacgtaatcgttgcaattattgttgctttaggttgtatttttgaaaacacataa

SEQ ID NO: 410325 - DNA, 1287 bp, Staphylococcus aureus
atgttagacattagattattcagaaatgagcctgacacagttaagagcaaaattgaattacgtggagatgatccaaaagttgtagatgaaattttagaattggatgagcaacgacgtaaattaattagtgcaacagaagaaatgaaagcacgtcgtaataaagtaagcgaagaaatcgcattaaaaaaacgtaataaagaaaatgctgatgatgtgattgctgaaatgcgcacattaggtgacgatattaaagaaaaagatagtcaattaaatgaaattgataataaaatgacaggtatcctttgtcgtattccaaatttaataagtgatgatgtacctcaaggtgaatctgatgaagataacgttgaagttaaaaagtggggtacaccacgtgagttttcatttgaaccaaaagcacattgggatattgtagaagaattgaaaatggctgattttgatcgtgcagcaaaagtttcaggtgcgcgttttgtatatttaacaaatgaaggtgcgcaattagagcgtgctttaatgaactatatgattacaaaacatacaacacaacatggttatacagaaatgatggtaccacagcttgtgaacgcagatacaatgtatggtacaggtcaattacctaaatttgaagaagatttatttaaagtagaaaaagaaggattatatacaattccaactgctgaagtaccattaacgaatttctaccgtaatgaaattattcaaccaggtgtacttcctgaaaaattcactggtcaatctgcatgtttccgtagtgaagcaggatcagcaggtagagatacaagaggattaattcgtttacatcaattcgataaagtggaaatggtacgttttgaacaacctgaagattcatggaatgctttagaagaaatgacaacaaatgcagaagcaattctagaagagttaggtttaccataccgtcgtgttattttatgtacaggtgatattggatttagtgcaagcaaaacatatgatatagaagtttggttaccaagctacaatgattataaagaaattagttcatgctcaaactgtacggatttccaagcgcgtcgtgctaacatccgcttcaagcgtgacaaagcagctaaaccagaattagcacatacattaaatggtagtggtttagcagttggacgtacatttgctgctattgttgaaaattaccaaaatgaagatggaacagtaacaattccagaagcattagtaccatttatgggtggtaaaacacaaatttcaaaaccagttaaataa

SEQ ID NO: 410326 - DNA, 840 bp, Staphylococcus aureus
atggctgtattatatttagtgggcacaccaattggtaatttagcagatattacttatagagcagttgatgtattgaaacgtgttgatatgattgcttgtgaagacactagagtaactagtaagctgtgtaatcattatgatattccaactccattaaagtcatatcacgaacataacaaggataagcagactgcttttatcattgaacagttagaattaggtcttgacgttgcgctcgtatctgatgctggattgcccttaattagtgatcctggatacgaattagtagtggcagccagagaagctaatattaaagtagagactgtgcctggacctaatgctgggctgacggctttgatggctagtggattaccttcatatgtatatacatttttaggatttttgccacgaaaagagaaagaaaaaagtgctgtattagagcaacgtatgcatgaaaatagcacattaattatatacgaatcaccgcatcgtgtgacagatacattaaaaacaattgcaaagatagatgcaacacgacaagtatcactagggcgtgaattaactaagaagttcgaacaaattgtaactgatgatgtaacacaattacaagcattgattcagcaaggcgatgtaccattgaaaggcgaattcgttatcttaattgaaggtgctaaagcgaacaatgagatatcgtggtttgatgatttatctatcaatgagcatgttgatcattatattcaaacttcacagatgaaaccaaaacaagctattaaaaaagttgctgaagaacgacaacttaaaacgaatgaagtatataatatttatcatcaaataagttaa

SEQ ID NO: 410327 - DNA, 432 bp, Staphylococcus aureus
atggatttgaaaaacgttactaaagtatttaaaccttcacaatatactttagtaacgtgtaatccgccttattttaaagagaatcagcaacaccaacatcaaaaagaagcacataagatagcgagacatgagattatgtgtacacttgaagattgcatgattgcagcccgtcatttattaaaagaaggtggcaggctaaatatggtacatcgtgcagatagactaatggatgtcttgtttgaaatgagaaaagtgaatattgaacctaagaaagtcgtttttatatatagtaaggtagggaaatcagcacaaacgatagtagtagaaggtcgaaaaggtggaaatcaaggtttagaaatcatgcccccattttatatttataatgaagatggtaattatagcgaagaaatgaaggacgtatattatggatag

SEQ ID NO: 410328 - DNA, 816 bp, Staphylococcus aureus
atgacagcagggttcaaccgaaatgatttaattatccttgcagcgcgtccatctgtaggtaagactgcgttcgcacttaatattgcacaaaaagttgcaacgcatgaagatatgtatacagttggtattttctcactagagatgggtgctgatcagttagccacacgtatgatttgtagttctggtaatgttgactcaaaccgcttaagaacgggtactatgactgaggaagattggagtcgttttactatagcggtaggtaaattatcacgtacgaagatttttattgatgatacaccgggtattcgaattaatgatttacgttctaaatgtcgtcgattaaagcaagaacatggcttagacatgattgtgattgactacttacagttgattcaaggtagtggttcacgtgcgtccgataacagacaacaggaagtttctgaaatctctcgtacattaaaagcattagcccgtgaattagaatgtccagttatcgcattaagtcagttatctcgtggtgttgaacaacgacaagataaacgtccaatgatgagtgatattcgtgaatctggttcgattgagcaagatgccgatatcgttgcattcttataccgtgatgattactataaccgtggcggcgatgaagatgatgacgatgatggtggtttcgagccacaaacgaatgatgaaaacggtgaaattgaaattatcattgctaagcaacgtaacggtccaacaggcacagttaagttacactttatgaaacaatataataaatttaccgatatcgattatgcacatgcagatatgatgtaa

SEQ ID NO: 410329 - DNA, 570 bp, Staphylococcus aureus
atgaaagctaaatacaaaaatcatcaaatagaaactaatgaaaaacgaattaaaaatcatttgaatcgcgcttttaatagagaacaaccaatggagacattagtaagtgatttgacatatgtaaaagtcggaggaacatggcattacatatgtttatttatagatctatttaatagagaaattgttggttacagtgcaggtaaaaataaggacgccaatttagtatcaaaagcaatcagcagaataaatcataatcttgaacaaatcaaactattccacactgatagagacaaagaatttgataatcatttgatagatgaagtcctagaaacatttaaaataaaacgttcattaagtaccaaaggttgtccttatgataacgcagttgcggaagcaacgatgaaagcaatgaaaacagaatttgtaaaacaaatgcaatttgaaaacttagaacagttagaaacagaattatttgattatgtaaattggtacaacaattttagaccacattcttcattacagtatttgacgccagtggcatttaaaaatatacacatgaaaactgtctaa

SEQ ID NO: 410330 - DNA, 492 bp, Staphylococcus aureus; identical to SEQ ID NO: 408559

SEQ ID NO: 410331 - DNA, 612 bp, Staphylococcus aureus
ttgaaagttcaaggtaaaggtggtcatggttcatcaccacatatggccaatgatgccattgttgcaggtagctacttcgtcacagcgttacaaacagttgtatctagacgactaagtccatttgaaaccggtgttgtcacaatcggttcatttgacggtaaaggtcaattcaatgtcattaaagatgttgttgaaattgaaggtgatgtacgtggattaacagatgctacaaaagcaacaattgaaaaagaaattaaacgtttatcaaaaggattagaggatatgtatggtgtaacttgcaccttagaatataacgatgattatccagcattatataatgatccagagtttactgagtacgtggctaagacgttgaaagaagcaaaccttgattttggtgttgaaatgtgtgaaccacaaccaccttcagaagactttgcatattatgctaaagaacgtccaagtgcctttatttatacaggtgcagctgtggaagatggtgaaatttacccacatcatcatcctaaatttaacatttcagaaaaatcattacttatttcggcagaagctgtagggacagttgttttagattaccttaaaggagataactaa

SEQ ID NO: 410332 - DNA, 615 bp, Staphylococcus aureus
atgttaagaatcgccatagccaaaggacgtctaatggatagtttaattaactatttagatgtaattgaatatacgacattatcagaaacattaaaaaatagagaacgccaattattattaagtgtagataatattgaatgcattttagtaaaaggaagtgacgtgccaatctatgtggaacaaggaatggccgacataggcattgttggtagcgacatattagatgagcgccaatataatgttaataatttgttgaatatgccttttggagcatgtcattttgcggttgcagcgaaacctgaaacgaccaattatcgtaaaatcgcaacgagttatgttcatactgctgaaacatattttaaatcaaaaggtattgatgtcgaattgattaaattgaatggttctgttgaattagcttgtgtcgtagatatggtagacggaattgtcgacatcgttcaaacaggtactacgctaaaagcgaacggactggttgaaaagcaacatattagtgatatcaatgcaagattaataactaataaagcagcttattttaaaaaatcacaattaatagagcaatttattcgctctttggaggtgtctattgccaatgcttaa

SEQ ID NO: 410333 - DNA, 834 bp, Staphylococcus aureus
atgaatcaatataatactataggttttcacccgggaaatagtcgtattcatcaattaaatgcgactgttaaacttttattcttattagttgtttctatttctgcaatggtgacttatgacacaagatatttaattttaattagtgcttcatctattttattgttcaaatatgctcatattgaatggaaacaagttcgctttgttgttaaattcattctgtttttcacaatattaaatattattgccgtatacatatttgaccctgaatatggtgtgaagatttataatcagcgtacagagttagtcaatggtattggtcgatttacgctaacatcacaggaattattctatctttttaatctaatattaaaatatattagtacagttcctttagcgttaatatttttattcacaacgaatccgagtcattttgctgcaagtttaaatcagctaggtgtgaattataaaatcagttacgcagtctcactagcattaaggtatattccagatattcaagaaacatattttaatatttcacaagcgcaacaagcaagaggatatgataattcgaaaaaagcgaaatttactagccgtgttaaaggtatcaaacgcattgtgttacctttaatattttctagtatcgaaagaattgacactattagtactgctatggagttaagacaattcggacagtataaaaggagaacctggtacgtcaaaaaacaattaaaaaaagatgattatgttgttttgtgtttgacgttaatacttctgatgttagtagttacattattctttttaaataatagtcgatatttcaacccgtggcattag

SEQ ID NO: 410334 - DNA, 1107 bp, Staphylococcus aureus
ttgccagcatttttaattataggtagaataattcaaggtttgtctgcagcatgtattatgccatccacacttgctattattaacgaatattatattggtacaagaagacaacgtgccttaagctattggtctattggttcttggggtggtagtggtatttgtacgttgtttggtggcttaatggctacatatataggttggcgttcaatatttgttgtttcaattctattaacattattagcaatgtacttaatcaaacatgcacctgagactaaagcagaaccaatcaaaggtatgaaagcagaagctaaaaagtttgacgttattggtttagtcattttagtagtgacgatgttaagtttaaatgtaatcatcacacagacgtctcattttggtttagtttcaccgttaattctaggtttaattgttgtgtttatctgttcattagttggttttgtatattacgaaaataaaataaagcatccacttgttgatttttcaatttttaaaaatagaggatacagtggtgcaactatttcaaacttcttattaaatggtgtagcaggtggtgcacttatcgttattaacacgtattatcaacaacaattaggatttaattcttcgcaaacgggttatatttcattaacgtatttaatagcagtgttgtcaatgattcgtgtaggtgaaaagattttatctcaacatggtccgaagcgcccactattactaggaagtggctttacagtgattgggttaatcttattgtcgttaacatttttaccagaagtgtggtatatcatatctagtatagttggatatttattgtttggtactggtttaggattatatgctacaccatcaactgatacagcagttgctagtgcgccagatgataagtcgggtgttgcttcaggcgtatataaaatggcgtcatcattaggaaatgcatttggagtagcagtatctggtacagtttatactgtgttagcagctaatttaaatttgaacttaggtggtttcacaggtatgatgtttaatgccttgctagcaattgttgcatttttagtcattttactattagttcctaaaaatcaaacgaatttgtaa

SEQ ID NO: 410335 - DNA, 1077 bp, Staphylococcus aureus; identical to SEQ ID NO: 406661

SEQ ID NO: 410336 - DNA, 564 bp, Staphylococcus aureus; identical to SEQ ID NO: 406647

SEQ ID NO: 410337 - DNA, 540 bp, Staphylococcus aureus
ttgacaccagcaataccgaatgtcgaagacaatgacgatgaattaaataacgctttttcaaaagataacaaagggcttattacaggcatcgatttagacgaattgtatgacgaattacaaatcgccgaatttaatgacaaagcaaagactgctgacggtaaacctttagcattaggtaacggtaaaatcattgatcagcctcttatcacaagtaagaacaacttatatactgctggacaatgtacatggtatgtctttgataaacgtgccaaagatggacacacgattagtacattttggggagatgctaaaaactgggcaggccaagcttcaagcaatggcttcaaagtagatagacacccaacacgaggatcaattttacaaacagtaaatggtccatttggtcatgtagcctacgttgaaaaagttaatattgatggaagtattctaatttcagaaatgaactggattggtgaatatatcgtttcatcaagaaccatctctgcttcagaagtttcatcatataattacatccattaa

SEQ ID NO: 410338 - DNA, 450 bp, Staphylococcus aureus
ttgacagcattattaggtttaacgggtgtacctatggctattggtgccatggcagcatttagttcggcatttatgaatgggacgctattccatcgcttaaaattaggtgatcgtaagtctacgattgcagtaagtattgaacctttatcacaagcagatattgtatcagccaatccaattccaatctatattacaaatttctttggtggtgcgattgctggtttaattattgctatgtcaggtttaattaacgatgcgacaggtacagctacaccgattgcaggatttttagtaatgtttggatttaatcatccaatgactattgtaatttatggtgtagtaatggcgattgtaggtgcgcttgcaggttatcttggttcaatcgtatttaaaaaatatccaattgttactaagcaagacatgattaatcgaggtgcagttgacgcatag

SEQ ID NO: 410339 - DNA, 495 bp, Staphylococcus aureus
atgagcggtgccgatgcgaatatgacccaaatattagaagaagggtttagacaagcgaccgttcaattaccaggtttcatcattatcattacatttttaatcgtcttaattaacttaatcgttacatttccggttttacgaaaatttaaaatcgctacacctgtatttaagccacttttcgcgtggcaaatgagcggtattttattatggatatacattattgttatcatatgtttattatttacaggtcaaccgagtgtgttccagagcattcttttaaacttccaacttgtgttatcattagtaatgtatattcaaggtttaagtgttattcatttctttggtaaagcgaaaggtttgccgaatgcagtaacgattttactattgattatcggtacaatactgacacctacgacacatattgtaggactacttggtgttatcgatttaagtttgaatttgaagcgaatcatgaaaaataattctaaaaagtga

SEQ ID NO: 410340 - DNA, 2454 bp, Staphylococcus aureus
ttgtggcgtgtcttagttacacaattgaaaaaattagaacttaattatgacgtctatttagagcgattgaaatatgagtataaagttattactaatatgggttttgaagattatttcttaatagtaagtgatttaatccattatgcgaaaacgaatgatgtgatggtaggtccaggtcgtggttcttcagctggctcactggtcagttatttactaggtattacaacgattgatcctattaaattcaatctattatttgaacgttttttaaacccagaacgtgtaacaatgcctgatatagatattgactttgaagatacacgccgagaaagggttattcagtacgtccaagaaaaatatggcgagctacatgtatctggaattgtgactttcggtcatctgcttgcaagagcggttgctagggatgttggacgaattatggggtttgatgaagttacattaaatgaaatttcaagtttaatcccacataaattaggaattacacttgatgaagcatatcaaattgacgattttaaaaaatttgtacatcgaaaccatcgacatgaacgctggttcagtatttgtaaaaagttagaaggtttaccaagacatacatctacacatgcggcaggaattattattaatgaccatccattatatgaatatgcccctttaacgaaaggggatacaggattattaacgcaatggacaatgactgaagccgaacgaattgggttattaaaaatagattttctagggttgagaaacttatcgattattcatcaaatcttaatacaagtcaaaaaagatttaggtattaatattgatatcgaaaagattccgttcgatgatcaaaaagtgtttgaattgttgtcgcaaggagatacgactggcatattccaattagagtcagacggtgtaagaagtgtattaaaaaaattaaagccggaacactttgaagatattgttgctgtaacttctttgtatagaccaggtccaatggaagaaattccaacttacattacaagaagacatgatccaagcaaagttcaatatttacatccacatttagaacctatattaaaaaatacttacggtgttattatttatcaagagcaaattatgcaaatagcgagcacatttgcaaacttcagttatggtgaagcggatattttaagaagagcaatgagtaaaaaaaatagagctgttcttgaaagtgagcgtcaacattttatagaaggtgcaaagcaaaatggttatcacgaagacattagtaagcaaatatttgatttgattctgaaatttgctgattatggttttcctagagcacatgctgtcagctattctaaaattgcatacattatgagctttttaaaagtccattatccaaattatttttacgcaaatattttaagtaatgttattggaagtgagaagaaaactgctcaaatgatagaagaagcaaaaaaacaaggtatcactatattgccaccgaacattaacgaaagtcattggttttataaaccttcccaagaaggcatttatttatcaattggtacaattaaaggtgttggttatcaaagtgtgaaagtgattgttgatgaacgttatcagaacggcaaatttaaagatttctttgattttgctagacgtataccgaagagagtcaaaacgagaaagttacttgaagcactgattttagtgggagcgtttgatgcttttggtaaaacacgttcaacgttgttgcaagctattgatcaagtgttggatggcgatttaaacattgaacaagatggttttttatttgatattttaacgccaaaacagatgtatgaagataaagaagaattgcctgatgcacttattagtcagtacgaaaaagaatatttaggattttatgtttcgcaacacccagtagataaaaagtttgttgccaaacaatatttaacgatatttaaattgagtaacgcgcagaattataaacctatattagtacagtttgataaagttaaacaaattcgaactaaaaatggtcaaaatatggcattcgtcacattaaatgatggcattgaaactttagatggtgtgattttccctaatcagtttaaaaagtacgatgagttgttatcacataatgacttgtttatagttagcgggaaatttgaccatagaaagcaacaacgtcaactaattataaatgagattcagacattagccacttttgaagaacaaaaattagcatttgccaaacaaattataattagaaataaatcacaaatagatatgtttgaagagatgattaaagctacgaaagagaatgctaatgatgttgtgttatccttttatgatgaaacgattaaacaaatgactactttaggctatattaatcaaaaagatagtatgtttaataattttatacaatcctttaaccctagtgatattaggcttatataa

SEQ ID NO: 410341 - DNA, 486 bp, Staphylococcus aureus
gtgataaatattgatgcgcattttgatacacgtgctgaacaacaatctacatctggaacgagctttagacaaattttagaagaagatgaaaacacagattatttagtgcttggtattgctcaaggtggtaatacgcaaagtttatttgattatgctaaagagaaaaagattgattatgtctttgcagatgaattattgagtcacgtatcaccaacaattaaagatatgattgaacgttttgtacatgaacatgatgtcattatgtttacgatttgtatggatgtcattgatagtgcgtttgcgcctggggtaagtgcgccggcagtgttaggtttgtatccacatactgttcttgaattagcaaaacgtattattccaagtgataaggtgtcttcagttagtattgctgagatgaatccaacatatgacgctgacaatagaactgctaagctcgttgctaatttagtgcatcattttttaaaataa

SEQ ID NO: 410342 - DNA, 885 bp, Staphylococcus aureus
atgaaaattattcagttagaatacttcttggctatcgtgaaatataatagttttactaaagctgcacaatttttacatattagccagccatctttaactgctacgattaaaaaaatggaagcagatttaggttatgacttatttacacgttcaacaaaagacatcaagattaccgaaaaaggaatacagttttatcgttatgcgagcgaattagttcaacaatatcgatccacgatggaaaaaatgtatgatttaagcgttacatcagaaccaaggataaaaattgggactcttgaatctacgaatcaatggattgcgaatttaattcgaaagcaccattccgactaccctgaacagcaatatcgtttatatgaaatacatgacaaacatcaatctatagagcaattactgaattttaatattcatttagctataacaaatgaaaaaataacccacgaagatataagatccattcctttatatgaggaatcttacattttattagcacccaaggaaacatttaaaaatcaaaattgggtagatgttgaaaatttgccactcatattaccaaacaaaaattctcaagtgcgcaaacacttagatgactattttaatagaagaaatattcgtccaaatgtcgttgtagaaacagatcgattcgaatcagcagttggatttgttcatctcggcttaggttacgctatcattccgagattttattaccaatcatttcacacgtctaatttagaatataaaaaaattcgtccaaacttaggccgaaaaatttatatcaattaccataaaaaacgcaaacactccgaacaagtacatacattcgtacaacaatgccaagattatttatatggacttttagaggctctttaa

SEQ ID NO: 410343 - DNA, 492 bp, Staphylococcus aureus
gtgtgcttacctgcatctgagtctgaatcactgtctgaatctgagtcgctatctgagtctgaatcgctgtccgaatctgagtcactatctgagtctgaatcgctgtctgaatctgagtcgctatctgagtctgagtcgctatctgaatctgaatcactgtctgagtctgagtcgctgtccgaatctgagtcgctgtctgaatctgaatcgctatctgagtctgagtctgaatcgctatctgaatctgagtcgctgtctgaatctgaatcactgtctgaatctgaatcgctgtctgaatctgaatcgctatctgagtctgagtcgctatctgagtctgaatcgctgtctgagtctgagtcgctatctgagtctgaatcgctgtccgaatctgagtcgctatctgagtctgagtcgctgtctgaatctgaatcgctgtctgagtctgaatcgctatctgaatctgagtcgctatctgatgtttcttcttcgtag

SEQ ID NO: 410344 - DNA, 189 bp, Staphylococcus aureus; identical to SEQ ID NO: 407433

SEQ ID NO: 410345 - DNA, 225 bp, Staphylococcus aureus
atgtatgaatcaactggtaaagtactatcagtgaatggaaatatagtgacatctgatgcggttgtccaacctggcagctctggttcacctatattaaatagtaagcgagaagcaattggtgttatgtatgctagtgataaaccaacaggtgaaagtacaaggtcatttgctgtttatttctctcctgaaattaagaaatttattgcagataatttagataaataa

SEQ ID NO: 410346 - DNA, 189 bp, Staphylococcus aureus; identical to SEQ ID NO: 407433

SEQ ID NO: 410347 - DNA, 189 bp, Staphylococcus aureus; identical to SEQ ID NO: 407433

SEQ ID NO: 410348 - DNA, 201 bp, Staphylococcus aureus
atgagtaaacgtttttcaaatattcaagattacatatttgaatattgtaactttggttgtccttactttgtattaagacatttgtctaaacaagaggttaaaaagttaatcgaagaagttcatccgtctgatgtgatagatgacgacaataaacttcaagatgtgaagattaagccaaccattcaagatactgaacattaa

SEQ ID NO: 410349 - DNA, 246 bp, Staphylococcus aureus
gtgagcgacatgttagaaatatttttaatagggtttggcgtttatctcttttatcgcatagcaattatttttcttaagagtaaaaagactatacacacaaacatatatgaaatgttaatgcttgctactatctttatgatatctacaattgcttataaacatcaaaagacgcatatcttaatagcatttttagtaatgttttttatgagtaagctcaaacaagttcaagggagctatgaggaatga

SEQ ID NO: 410350 - DNA, 297 bp, Staphylococcus aureus
gtgattattgagacggtattgttggaccatgacgaaatcgtaaaagcgagtgaattaacaaaagtggctggggcggacttcgttaaaacttcaacaggttttgcaggtggcggtgcgactgcagaagacgttaaattaatgaaagatacagtaggtgctgatgtagaagtaaaagcatcaggtggcgtacgtaatttagaagatttcaataaaatggttgaagcaggtgcgacacgtattggtgcgagcgcaggcgttcaaattatgcaaggtttagaagcagattcagattactaa

SEQ ID NO: 410351 - DNA, 225 bp, Staphylococcus aureus
atgtatgaatcaactggtaaagtattatcagtgaatgggaatatagtgtcatcggatgcaattattcagcctggtagctctggttcacctatattaaatagtaaacacgaagctattggtgtaatctatgccggtaataagccatcaggtgaaagcacaagaggatttgctgtttatttctctcctgaaattaagaaattcattgcagataatttagataaataa

SEQ ID NO: 410352 - DNA, 723 bp, Staphylococcus aureus
atgaatatgaaaacaattgctaaaaccagtttagcactagggcttttaacaacaggcgcaattacagtaacgacgcaatcggtcaaagcagaaaaaatacaatcaactaaagttgacaaagtaccaacgcttaaagcagagcgattagcaatgataaacataacagcaggtgcaaattcagcgacaacacaagcagctaacacaagacaagaacgcacgcctaaactcgaaaaggcaccaaatactaatgaggaaaaaacctcagcttccaaaatagaaaaaatatcacaacctaaacaagaagagcagaaatcgcttaatatatcagcaacgccagcgcctaaacaagaacaatcacaaacgacaaccgaatccacaacgccgaaaactaaagtgacaacacctccatcaacaaacacgccacaaccaatgcaatctactaaatcagacacaccacaatctccaaccataaaacaagcacaaacagatatgactcctaaatatgaagatttaagagcgtattacacgaaaccgagttttgaatttgaaaagcagtttggatttttgctcaaaccatggacgacggttaggtttatgaatgttattccaaataggttcatctataaaatagctttagttggaaaagatgagaaaaaatataaagatggaccttacgataatatcgatgtatttatcgttttagaagacaataaatatcaataa

SEQ ID NO: 410353 - DNA, 501 bp, Staphylococcus aureus
atgactttcgaagaaaaactaagtcaaatgtacaatgaaattgcaaataaaattagcagtatgataccggtagaatgggaaaaggtatatgcaatggcttatgtaaatgaaagaagtggagaagtgttctacaattatactgaaccaagaagtgatgaattattttactatacgagcgtgttaaataaatataatatatcaagatcagaatttatggactcagtatatgaattatataagcaatttgataaactaagagatttatttaaagaagaaggactcgaaccatggacatcatgtgaatttgactttacaagagacggcaaattgaatgtttcatttgattatattgattgggcgaattcagagtttggacaaatgggaagagaacattattacatgtataaaaaatttggaatttggcctgaaaaagaatatgccataaattgggtaaaaaaaataaaagattatgttaaagagcaagatgaagctgaactatag

SEQ ID NO: 410354 - DNA, 501 bp, Staphylococcus aureus
atgactttcgaagaaaaattaagtcaaatgtacaacgagattgcgaataagattagtagcatgataccagtagagtgggaaaaagtatatacaatggcttatatagatgatgaaggtggagaagtgttctactattacacagaacctggaagcaatgaattatactactatactagtgtattaaataaatatgatatatcggaatcagaatttatggactcagcgtatgagttgtataaacaatttcaaaatttaagaaatatatttaaagaagaaggatatgaaccatggacatcatgcgaatttgattttacaaaagaaggtgaattaaaagtttcatttgattatatagattggatcaatacagagtttgatcaattgggccgtcaaaattattatatgtacaaaaaatttggggttataccagaaatggaatatgaaatggaagaagttaaagaaatcgaacaatatattaaagagcaagaagaagctgaacaatag

SEQ ID NO: 410355 - DNA, 492 bp, Staphylococcus aureus; identical to SEQ ID NO: 410111

SEQ ID NO: 410356 - DNA, 219 bp, Staphylococcus aureus
atggaaaaccaaaatcaaggcaatggcttaaaaattgcaacatgggtatttattgtattaacaatagttacaccgttatttggtattggaagtattatttgtagtattaattacaaaaaatacgatgctgaaaaaggttcgaagttattgaaaattgcaattatcgtaacaataattgcttttgttttaaatttattagcatatttaggtttaagataa

SEQ ID NO: 410357 - DNA, 1470 bp, Staphylococcus aureus
ttggaaagttatttgacaaaacaagccgtacataatcgcgcaaaagaagctgttggtaaaagtgtattagaattaaatggtggtgaatcgattaaacaaagtaagagttcagttggtgatgcatttgaaaattggtttggtaagaaaaaagacagtgatagtaaaccagatatggcagaagctggggtggaacttaaggcaacgccatttaaaaagttgaaaaacggaaagtatagctccaaagaaagattagtattaaatattataaactatgagaaagtggcaaatgaaaattttgaaactagtagttttttatctaagaataatactatagaattagctttctatgaatatatcaagggaacacctagtgataattggattattaaagaagcggtgctttatgaaatgcataaaaacccgattgattatgaaataattaaacaagattgggaaataataaatcaatatattaatgaaggaaaggcacatgaattgagtgaaggtttgacaagttatttagcgccatgtacaaagggtgcgaatgctagttctttaagaaatcagccttattcagacataaaagcaaagcaaagagcattttctttgaagtctgggtatatgacatctattttacgcaaatatgttctaggtgatgaaaaaatagattcaattgtcaaagacccatttgaaataaaagaaaaatcaatagaggacatagtctttgaaaaatttcagccatatataaactggtcaatcgataaattatgcgaacatttttctatcaataaaggtgagaaaggtttaaattatagaatagcctctgccattttaaatctaaaaggtaaaactactaaaagtaaaccattcccggaagttgaagagtttgaaaaatcatctatagtagtcaaaacagttcattttaataaaaagaatgtgaataaagaaagtatgtcatttggagcttttaaatttgaagaactagctaatgaggaatgggaagatagtgaaggatatcctagtgcacaatggcgaaactttttgttagaaacaaggtttttattttttgttgttaaagaagatgaagatggtgtagacatattcaaaggaataaaattttttagtatgcctgaagaagacataaacggacctgtcaaaagaatgtgggatgatacagtgaagaaattaaaagagggtgtcacattagaagctgtaccggacaaaagtacaaaggatggttggagaataaaaaataattttgtagataaaagtgatgatttaatttgccatgttagaccacacactaataacagagactatcgtggaggaagtaatgcagataagcttcctaaaaagattaactggattaatagacctgactcagatgattattcggatgagtggatgactaaacaaagtttttggataaataatgactacataaaaaagcaagttgaagatttattgtag

SEQ ID NO: 410358 - DNA, 897 bp, Staphylococcus aureus
atgtcatatacttctgtattgtttaataagaactttactttttatttaatagggatagctttttctaacatgggcagtgcttttactacgtttgtttttccattaatgattttaaagcttactggatctgcatttcaagttggcatagtttctgcactaagttttataccttatgcaattttaggattgccagctggtgctttaattgacagattgaataagaagaccataatgaaatgtgctgatataattaggttcgtttcatatttaagtataccagtattaagttttttcaatatgttaagcatctttcaaatttatgtagttgcaatcatttcaggtattggattagtatttcacagtatttctgaggtttcgataatcccaagtattgtaaaagaagaagatttggcgagcgcaaacagttatatatacgctactcaaaatgtttcggaatttttgggccctataattggaggtttactttatacatatatgggatattcaatattgatttttatagattctatgacttttttactctcatttttcagtttgatattaattaaaattgaaacaaagagtatattcaatcaagaaaagttgagtggaaaaaattttttgagcgatgttaaagttggatttgattatctattatctaattcaactattagagtaatggctgttgttgtaagtttatccaatctaattatctcaccttattatatttatatagtaatgtttgtaaaggaagacatgaatcaatcatctcaagcattggggttagttttaggtatctcatcattaggtgcgctaatcggttcattatctgcaagttttctcttgaaattatttaatttcggaaaactaattgtaattatattatttttagattaa

SEQ ID NO: 410359 - DNA, 444 bp, Staphylococcus aureus
atgaaaaagagatgtgtatttgtggtagttgttgcaatattaataggcctaattgttattgcttatgcgcataataaacaaataaaggctcattacattgagacacaagaaaaacgaatcgatttgtattttaagcataatcttaacaattataaaaatatgaaggtgacagattttcataaaactccgatgggtgggtatttcattgtaggttatataaatgatgataaaaaatataaattccaagcaagtatagattcgggaagcaataatcaatatcagaaagatattggttaccatgaagataaattaggcaaattattcaaagaaaaagaccctaaatataaactctcagtcgatgaaataattgaaaaagaacacttagacaaaagtgaatatgaagccgatccaccgttattcttcttttctgggagattagagtga

SEQ ID NO: 410360 - DNA, 1284 bp, Staphylococcus aureus
atggaaacaataaacaacttagctatggccacttttcaattagtaatactttttacagtagccaaatttatttcctttgttaaatttaatttaagggattattttattatagttggaattataattccaaccatgtttttgtattacttctatggaagtagagccgtattgattccaactttttcatctatcatatttttattctttaaattaaagtactatgcaatagtaacaattttagtgaccatgatcataatgtatttgagtaattttgcaacagtaggtttgtttttaactttaagaaaatacactactgatcctgcaatactcttaccattatatatactttctttttcatcagtttcattattagcgacatatttggtaagaatatctctaaagaaatttaaaaaatcatacttatctttaaataaaacttatatgattataatttcattcgtattatttgcaacatttgcatttttttatatttattctacaaatacaagttcaaacggtgatagcttaattccatatgcacttgtatttataggattaataatttttatctctgttgtaatacttataatgtcgcttttcacccttaaagagatgaaatacaaacgaaaccaggaagaaattgaaacctattatgaatatacattgaagattgaagctatcaacaacgaaatgcgcaagttccgtcatgattatgtcaatatcttaacgacactttcagaatacattcgcgaagatgacatgattggtctacgcgcttatttcaataaaaatattgtacctatgaaagataatttgcagatgaatgctattaaattaaatggtatcgagaatcttaaagtacgtgagataaaaggcttaattactgcgaaaattttacgtgcacaagaaatgaatattccgattagtatcgaaatacccgatgaagtaagtagcattaacttgaatatgatcgatttaagtcgcagtattggtattattcttgataatgcaattgaggcatcaactgaaattgatgaccctatcattcgcgttgcatttattgaaagtgaaaattcagtaacgtttattgttatgaataaatgcgctgatgatataccacgcattcatgaattgttccaagaaagtttttctactaaaggtgaaggtcgtggtttaggtctatcaactttaaaagaaattgctgataatgcagacaatgtcttattagatacaattatcgaaaatggtttctttattcaaaaagttgaaattattaacaactag

SEQ ID NO: 410361 - DNA, 717 bp, Staphylococcus aureus
atgaaaattttcatttgcgaagacgatccaaaacaaagagaaaacatggttaccattattaaaaattatataatgatagaagaaaagcctatggaaattgccctcgcaactgataatccttatgaggtgcttgagcaagctaaaaatatgaatgacataggctgttactttttagatattcaactttcaactgatattaatggtatcaaattaggcagtgaaattcgtaagcatgacccagttggtaacattattttcgttacgagtcacagtgaacttacctatttaacatttgtctacaaagttgcagcgatggattttatttttaaagatgatccagcagaattaagaactcgaattatagattgtttagaaactgcacatacacgtttacaattattatcaagagataatagcgttgaaacgattgaattaaaacgtggcagtaattcagtgtatgttcaatatgatgatattatgttttttgaatcatcaacaaaatctcacagactcattgcccatttagataaccgtcaaattgaattttatggtaatttaaaagaactgagtcaattagatgatcgtttctttagatgtcataatagctttgtcgtcaatcgccataatattgaatctatagattcgaaagagcgaattgtctattttaaaaataaagaacactgctatgcatcggtgagaaacgttaaaaaaatataa

SEQ ID NO: 410362 - DNA, 960 bp, Staphylococcus aureus
atgagacgtctattttcaataggagaagcgttaattgattttattccaaacattacaaatgcgaatttaaaagatgttcaaacatttacgaagcaaattggtggcgcgccatgcaatgtagcttgtacagttcaaaagttaggacaacaagcgcatatgattacacaattaggtaatgatgcatttggagatagcattattgaaacgatatcaagtattggtgtagatgtatcaaaagtgtatcgcacgaatgaagccaacactgcgttagcttttgtaagtttgactgaagcgggcgagcgagatttttctttttatcgtaagccctctgctgatatgttatttgaaccaagttttgtgaatgatattgatgtgaatgaaaatgatgtggtacatttttgttctgttgatttgatcgatagtccgatgagagaagcacattatcaattgattaccaaaacattaaattcaaatggtactgtcgtatttgatcctaatgtaagattgccattatgggataacgctgaagatttaagacaaactattcatacctttttgccattggcgcatattgtaaaagtttcagatgaagaattagaatttattacaggtattcatgatgaaaatgaagccattcaatcattatttacaggtaatgttactgtagtcatttatacgaagggagcagatggtgctgccgtatatttgaaaaatggtaataatcattatcatagtggctataaggtaaaacctgttgatacaactggggcaggggatgcttttattggtgcagttattagcaggattttagcaaccgatgtgttaaatttaactcagttatttgaaaatgaaggtgaggaaattttagcgtttagcaatcgcgttgctgcaatagtgacaacgaagtatggtgccattaatagtttgccaacattacaagaggttgaacaagcattttaa

SEQ ID NO: 410363 - DNA, 720 bp, Staphylococcus aureus
atgatttcacacttgataacggatacttcgaagaagatacatcagatagcgactcagattcagatagcgattcagattcagatagcgactcagactcagacagcgactcagattcagacagcgactcagactcggatagcgattcagattcagacagtgattcagattcagacagcgattcggattcagacagcgactcagactcggatagcgactcagactcagatagcgactcagattcggatagcgactcagactcagacagcgactcagattcagacagcgactcagactcagatagcgactcagactcagacagcgactcagacagtgattcagactcagatagcgattcagattcagacagcgactcagactcagatagtgactcagattcagatagtgactcagactcagacagtgattcagactcagatagcgactcagactcagacagcgactcagactcagatagtgactcagattcagatagcgattcggactcagacagtgattcagattcggacagcgactcagactcagacagtgattcagattcagatagcgactcagactcagatagcgactcagattcagacagcgattcagactcagatagtgactcagattcggacagcgattcagactcagatagcgactcagattcagacagtgattcagactcagatgcaggtaagcacacacctgttaaaccaatga

SEQ ID NO: 410364 - DNA, 288 bp, Staphylococcus aureus
gtgggacttgattttagtggtttaccagatttagcagtattggaacaaatgaaggaaaaagaacagattagtgaggttattgcgcctgaacatgttcgtatgcatcatgatcatcaaaataagctgaaaagtgatgagaaaatattacttgaccaaatggtaagtcatttcaaaaaatttgaagatgattttaaaaatgcggcacaaggggattgggttaaaaaggcgaagaatgaactggatgatattagtaagaaattaaaaaacattcaaagaactgaaatttaa

SEQ ID NO: 410365 - DNA, 1920 bp, Staphylococcus aureus
atgattacccaatcattaaagacagttatcaatttttcaaatgaaaatttttttcaagattacttaaataaaaataatatgtctttaaaaaaaacagaaattgaagatataaaaaaatttgtggcattattaaatggaaaattagaaaaaaatagtaacttatttagggggtatatccttggatattcttttcaagatttaacaggagaatttgatttattaagatttactgaaacacatattattaacattgaacttaaatcacgcgataccactgaaaaagaaatagaagatcaattaaaaagaaataagttttatttaggaagtactaattacacacttttacagtatgggtttttatcatcagaaaataaattatataaattaaatgaagaggacttattgcgagaaataaatgtagaagaatttatcagtgaatgttcgaacttaaaaaataaattatttataaatgtagaagagttatttagaccagaaaaatttattatttctccatttaataatactcaagaatttttagaaggaaagtattttttaaatgacgaacaagttaaaataaagaaatgtttaacccaatttttgaataatgatgactcaattgttaaattaacaggtgtgcctggttgcggaaaaagtttgattctttatgatttttacaaagagtgcttaaaaattgataagaaagttgccttaatgcattgtggtgctgagttgaatgacggacagctagatttaataaaaggtcatgattggaatatatatcccccaaaggcaaacgaagagtttatatctttagatgctgacatctatatgattgatgaagctcaacgtaagtatcctcatcagttagagaaaatttattcttatattaaagaaaatgataaaaagttaattatttcttatgatcctgaacaaacattggtgaaaagagaaactaaatggaatatttctaaaactatagcagaagattacgaaggtaaaacattaaatctagaatccaggatacgtaataacaaagaaattagtagttttattaggttattattaaataaaaatcaatctaactatattcgggattttaaaaatattgaaatagtatatgcgaatgatattagtgaatcaaaaactattttaaaatttttagataatacatataccgttattgattacaccgctcctaattttaatagaaaaggctataatgaaatatctaacatgagatacggaaatactatattgaattctcataacgtcataggtcaagaatttgataatgtgtgtttaatcttaggtaatgaatttttttatgataatgatgggttcttaagagcgaatgatgttaatgatcaacttgatcttatgaaattactttatcaaaatgtgactagaacaaaacataaacttgttttagtagttaataggaataaagagttatatattgaccttttaactatactaaaacccagaattcagaagtcaataaaattaaaagaaattgaaaatataggttacaatacaataccaaattcaaaaggtatgttttatatatttaagcataataacaatattttaaaaaacgaaaatactggtgaagatattaatgttaaaggaaatatattatatgtagagagttgtaaagacttgagaaaggcaattaaaagtttaataaccaatattataaccaaaaaattaaaaaaatttgaagatattgaaatcgctgatttacttaatctaaaagtatcgtggattgatagcaaaaataaggaacaaatattttcttatattgttgagcaacatatagaaaagtacggagaaattccttttttaaatatacctttaaaattaaaaggttattcagataatattattagaaattatagctatattgttgaatatgattaa

SEQ ID NO: 410366 - DNA, 1071 bp, Staphylococcus aureus
atggcacacgttaatataaatatatcgaagattaaatataacgccaaagtacttcaaacagtttttcaaagtaaaaatatgcaatttacaccagtaattaagtgcatagctggtgaccgtacaattgtagaaagcataaaagcgttaggtatcaatcatgttgcagaatccagattggataacataattagtattgcagatcaggatttaacatatacgttattgcgtacgcctgccaaaaaagagatttcagatatgatagaaaaagttgatatgagtatccaaacagaattatctaccatacatcaaataaatgaagtagcagaagttttaggaaaaaaacataagattttattaatggtagattggaaagatggccgtgaaggtgttctgacttatgatgttttagattatattaaagagattattcacttgaaaaatatccattttgtaggtttagcattcaattttatgtgttttaaatctgatgcgccaagtgatgatgatatctttatgattaatcgattcgtctcagctgttgaaagagaaataggatatcgattgaaaattatttcaggtggtaattcgagcatgttaccacaacttttatataatgatttgggtaaaataaatgaattgcgaataggtgaaacgttgtttagaggtgttgatacaacgacaaatcaagcgatagctatgttatatcaagatgcgattacattggaggctgagattttagaaattaaacctcgagttaatacacaaacgcatgaatcattcatacaagctattgtagacattggttatttagatacaaaagtcgataatatttcacctatggatcagcatatcaatattttaggtgcttcgagtgatcatttaatgcttgatttaaatggtcaaggacactatcaagttggagatcatatatctttttcattaaattatgaagcactttctcattcgatgtatatgaaaaatttacataaggtatatattgatgattcaaatattgatacgctacttcaaaattttgatgtgaaatctcctgctatggtaaaccaatattaa

SEQ ID NO: 410367 - DNA, 1758 bp, Staphylococcus aureus
atggtatatcttgaatgggcaaaggcagatagaaatattcaatatcgtgtaattaacgccattattaaagaacgtatttaccccgagcaaacatttatttcgcaaaaaggatctttaattgaaattcagtatcatatgcatgtgttgactattgaagttgttagaaaaagtgcattagaacgctatgagtttacaggtgatattacttatttaaataaaggtgaaacctcgctaatcatgacattagaagggctactagatgtattgaacgatgactttgatatccctatttcagagcgactacgcgaagaattaatacatagtcgggatagtttagttgaaacttataagcaaatgtcacatagacaaactttgataagtcagagttttaaattttcaagattgccacaagatattaatttttttgcatggctacaacatgtgaaagatagtgataagacagatgatttaacttattctgagagtttggtaccagaagggcatccaacacaccctttaaccaaaacgaaattgcccttaactatggaagaagtacgagcatatgcacctgagtttgaaaaagaaatccctttgcaaattatgatgattgaaaaagaccatgttgtgtgcacagctatggatggtaatgatcaatttattattgatgaaataattcccgaatactacaatcaaattcgtgtgtttttgaagagtttaggtttgaaaagtgaagactatagagcgattttagtacatccttggcaatatgatcatacgatagggaaatattttgaagcatggattgctaaaaaaatattaattccaacgccgtttacaatactttcaaaagcaactttatcattcaggacgatgtctttaattgataaaccatatcatgttaagttgcccgtcgatgcacaagcaacaagtgccgttagaacagtctcaactgtgactactgtagatggaccaaagttaagttatgctttacaaaacatgttgaatcaatatccaggatttaaagttgctatggaaccgttcggtgaatatgcaaatgttgataaagatacggcgcgtcagcttgcttgtattataagacaaaagcctgaaattgatggaaaaggtgcaacagtagttagtgcaagtctagttaataaaaatccaatagatcaaaaagttatcgtggatagttacttagagtggttaaatcaaggagttactaaagaaagtattacgacatttattgaacgatactctcaagcattaatcccgcctttaattgcttttattcaaaattatggaattgcattagaagcacacatgcaaaatacagtagtgaacttggggccacattttgacattcaatttttagtgagagatttaggtggttctagaattgatttagaaacattacaacatcgtgtatcagatattaaaattacaaatgatagtttaatagctgattctaaagatgcagtgattgcaaaattccaacatgctgttattcaaaatcaaatggcagaattaatccatcattttaatcagtatgattgtgttgaagaaaccgaattatttaacatagtacagcaagtagtagcgcatgccattaacccaacactaccacatgcaaatgagttaaaagatattttgtttggaccaacaattactgtcaaagcgttgttaaatatgagaatggaaaataaagtaaagcaatatttaaatattgagttagataatccgataaaaaaagaggtgtag

SEQ ID NO: 410368 - DNA, 429 bp, Staphylococcus aureus
ttggttaaaaaactgtacgatagatacagcaaaaatacaataaacggaaaatctaataaatctaggaattgggtttattcagagaggcctttaaatgaaaaccaagttcgtatacatttagaaggaacatacagagttgctgatagagtatatacacctaagagaaatattactcttaataaagaagttgtcactttaaaagaattgaatcatatcataagatttgctcatatttcttatggcttgtatatgggagaacatttgtctaaaggtgacatcgtcataaatacaaaagatggtggtaaatatacattagagtcgcacaaagagttacaaaagaatagggaaaatgtaaaaatcaatacagctgatgtgaaaaatgtaactttcgaacttgtgaaaagtgttaatgacattgaacaagtctga

SEQ ID NO: 410369 - DNA, 999 bp, Staphylococcus aureus
atgaaaaaagtgtcaattaaagatgttgctagagaagctggtgtatcagttacaactgtgtcacatattttaaatcataatgatagtcgtttttccgcaacaacgataaaaaacgtacatgccgtttcagaacgtttaggctatgcccctaacaaacatgcaaaacaattgcgcggcagtaaaattcaaactattggcgtcattttgcctagcttaacaaatccgtttttctcagcactgatgcaaagtattcatgaccacaaaccatctgatgttgatttatgctttttaacatctacagcaactgatttgtatgacaatattaaacatttaattgatcgaggtattgacggattaattatcgcacaatacatttcatccccggatgccctaaataactatctaaagaaacatcatgtaccttatgtcgtactggatcaaaatgaccatcaaggctatacagattttgttcggacaaatgaatatcaaggcggacaacttgcagcacaacatttagtagaactcggtcacaacaatatgatgattgttgcaccatatgacatgatggcgaatatgtcgactcgtgtcgctggatttgttgatactttgcgcgcgaatcaattgcccgaaccacaaatcgtccatactgaattatctaagcacggtgggctaaccattgttgatgacatcatggttcaatctgccactgcaatcttcgccattaacgatgaactcgctattggtattttacgaggattaattgaacatggcatcagtatcccgaaagatatctcattaataggttatgacgacattgattatgcagcgtacgtctcaccacctttaactactgtggcacaacctataactgatattggcaaaacatctttaaccttattacttcaacgattacagcacttagataaatccattgatatgattgaattatcaacgactttaaaaattcgtgcaacaactggctatcatctttcaaactaa

SEQ ID NO: 410370 - DNA, 915 bp, Staphylococcus aureus
atgaccaacaaagttgttattttaggttcaacgaatgtcgatcaatttttaacagttgaaagatatgcacaaccaggcgaaacattacatgttgaagaagcacaaaaagcattcggcggaggtaaaggtgccaaccaggctattgccactgcacgcatgcaagcagacacaacatttattactaaaattggcactgatggcgttgctgatttcatcttagaagattttaaagcggctcatattgatacatcatttattatcaaaacaactgaagcaaaaacaggccaagcctttatcactgtgaatgcagaaggacaaaacaccatctatgtttatggtggtgcgaatatgacgatgacacctgaagatgttattaacgcaaaagacgctataatcaatgcagactttgtcgttgcacaattagaagtgcccatcccggctattatatctgcatttgaaattgccaaggcacatgatgtgacgacagtattaaatcctgcaccagcgaaagcattacctaatgaattattatcactaatcgatattattgtgccaaacgaaacagaagccgaattgttatctgggattaaagtaactaatgaacaatctatgaaagacaatgctaattactttttatctttaggcattaagactgttttgattacgctaggtaagcaaggtacatattttgctactaaaaatcaaagccaacacatcgaagcttataaagtaaatgcgattgatacaactgctgcaggcgacacatttattggtgcatttgtcagtcgcttaaacaagtcgcaagataacttagcagatgctattgattttggtaataaagcgagctcactcactgtacaaaaacacggcgcgcaagcatctattcctctactagaagaagtaaatcaggtttaa

SEQ ID NO: 410371 - DNA, 1161 bp, Staphylococcus aureus
atgtattatcatcaaccgttgttattaacacctggcccaacccctgtacctgatgccattatgagagaaattcaagcacctatggttggtcatcgttctaaagattttgaagacatcgcacaacaagcatttcaaggtctaaagccaatatttgggagtcaaaatgatgtacttattttaacatctagcggtacaagcgtcttagaagctagtatgttgaacattgtaaaccctgaagatcacttcgttgtcattgtttcaggtgcctttggtaaccgatttaaacaaattgcacaaacttattacaaaaatgtgcatatttatgacgttacatggggagaagctgtagatgtcaaagatttcatcaattacctttcaactttaaatgttgaagttaaagcagtatttagtcaatattgcgaaacatctacgacagtgctacaccctattcatgagttaggaaatgccatcaatcaatttaatagtaatatttattttgtagttgacggcgtaagttgcattggtgctgttgatgttgacattaacaaagataaaattgatgtacttgtttctggtagtcaaaaagcaattatgttacctccaggattagcttttgtagcttatagccaccgtgcaaaagaacgtttcaaagaagtaactacaccaaaattttatctagacttaaataaatacatttcgtcacaagctgacaattctacaccgttcacaccaaatgtgtctttatttagaggtgtaaatgcatacgttgaaaccgtaaaagcagaaggtttcaatcacgtaatagcacgacactatgcaattagaaatgcattaagaagcgccttaaaagcattagatttaactttattagtcaatgataaggatgcatctccaacggttacggcattcaaacctaatacaaatgatgaagtgaaaataatcaaagatgaacttaaaaatcgctttaaaataacaattgctggtggtcaaggccatcttaaaggtcaaattttaagaattggtcatatggggaaaattagtcctttcgatattttatcggtagtatctgctttagaaattattttaactgaacaccgtaaagttaactatatcggtaaaggtatatcaaaatatatggaggttattcatgaagcaatttaa

SEQ ID NO: 410372 - DNA, 873 bp, Staphylococcus aureus
atggcatcaggatttttccttggcgtaggtggcgcaattttctctgttggtgttacatcagttcctaaatatttccctaaagaaaaagtaggtctagcaaatggtatttatggtatggggaatatcggtacagcagtttcttcatttttagcaccaccgatagcgggtattattggttggcaaacaacagttagaagttacttaattattatcgctttatttgcattaattatgttcatttttggtgacacacaagaacgtaaaattaaagtgccattaatggcccaaatgaaaacattatctaaaaactacaaattatattacttaagttattggtatttcattacttttggtgcttttgttgcatttggtattttcttacctaactacttagtaaatcattttggaattgacaaagtagatgctggtattcgttcaggtgtattcattgcgctggcaacattcttgagaccaataggaggtatactaggtgataaatttaatgcagttaaagtactgatgattgattttgttattatgattatcggtgccgttattttaggtatttcagaccatatcgcattatttactgtaggttgtttaacaataagtatttgtgcaggtattggtaacggcttaatttttaaattagtaccatcatacttctcaaatgaagcaggatcagcaaatggtatcgtatcaatgatgggtggtttaggaggattcttcccaccgttggtcatcacatacgtagctaatttaacaggttcaagccatttagcatttattttcttagcggtattcggatgcattgcattatttacaatgcgccatttatatcaaaaagaatatggttcattgaaacacagttga

SEQ ID NO: 410373 - DNA, 267 bp, Staphylococcus aureus
atggaacaattacctcaagtaggttttatgaaatcattcgtattattttggaaaaattatgtaaattttaaggggagatcaagacgtagtgaatattggtatatgatgttgtggcatttaatatttatacttcctgctttcttcgtgttctttatgggagcagtatttgtgggtataggtgatgaaatagatgctaaagtattatctatgtttggtgtgatgatattaatacttacagttatatatatatgcttctttattctttag

SEQ ID NO: 410374 - DNA, 240 bp, Staphylococcus aureus
ttggcttttgtatttgttattttacaaatgatgttcgcgttctttggctatggaattagtaaattgccataccttttatatccgtttgtaaaaattacagatgcttatgttaatccagaaatgggctggacattagtgattgtctttattttaggtttacttttattacttccatcgttaatattattattaagattatttgttttcgacaaagaatatgttgaaggaaagaaatcataa

SEQ ID NO: 410375 - DNA, 1461 bp, Staphylococcus aureus
ttgaaagatttcgatagtttaattcctggatggtttaaagaatttgtccatgttggtaccgatctaatatggtctcaatatttaattggtctattattgacagctggattcttctttacaattagttctaaattcgtccaattacgaatgttacctgaaatgtttagagctttagtagaacgtccagaaactttagaagatggtaagaagggtatttcgccattccaagcatttgcgattagtgctggttcgagagttggtactggtaatattgctggtgttgcgactgcgattgttttaggcggtccaggtgcagtgttttggatgtggattattgcatttataggtgcagcgagtgcatttatagaagcgactttggctcaggtttataaagtacatgataaagatggtggattccgtggtggtccagcttactatattactaaaggtttaaatcaaaaatggctaggtatcgtatttgcgattttaattacaattacatttgcatttgtatttaacacagtgcaatctaatacaattgcggagtcgttaaatacgcaatataatattagtccagtaatcacaggtattattttagcaatcgtaacagctattattatatttggtggtgtacgtagtattgctacgttatcttcgttaattgtaccgattatggctatcatttacattggtatggttttagtaatattgttatttaatttagatcaaattgttcctatgataggtacgattattaaaagtgcatttggtatcgaacaagtaactggtggcgctgtaggtgctgcggttcttcaaggtattaaacgtggtttattctctaacgaagctggtatgggttctgcgccgaatgcagctgctactgctgcagtgccacacccggtcaagcaaggtttaatccaatcattaggtgtgttctttgatacaatgttggtttgtacagcaactgcaatcatgattttattatattcaggattaaaatttggtgataacgcacctcaaggtgttgcagttacccaatcagcacttaatgaacatttaggttctgccggaggtattttcttaacaattgcagttacactgtttgcattttcatctgtggtaggtaactactattatggtcaatctaatattgaatttttatcaacaaaccgtgtaatattatttatctttagatgtcttgttgtagtacttgtctttgtcggtgcagttgtaaaaacagaaacagtatggaatacggcagacttatttatgggcttaatggcaattgtaaacattatttccattataggactgtccaatgtagcttttgcattgatgaaagattatcaaaagcagaaaaaagaaggcaagaatcctgtttttaaacctgaaaacttagaaattaacttatttggaattagtgcttggggcgctaacaaatataagaactctgataaataa

SEQ ID NO: 410376 - DNA, 1284 bp, Staphylococcus aureus
atgttcataataaggtctattttgtacagactaattcaaatggtagttgttttatttgttatttcaacactaactttcattttgatgaaattatctccaggaaatcctgttgataaaatacttcaccttgatgtgtcacatgtgtcggcagaacaaataaatgcaactgaagaaaaattgggtttaaagaattcaatcatatcgcaatggtggcaatggatgcaacaattgcttcaattaaatttaggacgtagtttcgaaactaaagaaccagttacacagtcactatttgagtatgcaccaccaactttgcttatatctttttcaacattagttttgtcattagcgatatcgataccactaggtgtgctttcagcaagacactatcacaaactgactgataaagtgattagaactgtatcaacattgtcaattagcttgcctgcgtttttcatcggcattattttattattcattttcaccaatttattaaatattgatagtgccttatggaatcagattgatatacaaaatttaattatcaagaatcaaaaaggtaaatctttaataaatggcatcaatttgaaaatttatcaacaaaaggttaacgctttaattggagaaagtggtgctggtaagagtttaacggtaaaagctttgctaaattttttaccatctgatttaaattgtcagtatgatcattattacttcaataataaaaacgtaaacaacatgcaacaattttatggtcgcactgttggatatatttcacaaaattatgctgaaagttttaatgatcactcgaaattaggaaaacaattgattgcaatttatcgtactcattttaaagttagtaaagaagcagcattatctcaaattgataaagcattgtcgtgggttaacttaagtagcgaagaaatattaaagaaatacagttttcaactttctggtggtcaacttgaacgcgtatatattgcaagtgttttaatgttagaacctgagttaattattgcagatgaaccagtagcatcattagatgttattaacggctataaaattatggatttacttcaacacattgtaaaagaacacggtcaaacattatttataatcactcataacttaagtcacgttttaaagtattgtgactatattaatgttataaaagacggtgacattgttgagcgcggtgacataaagcactttaagtacgatacattacaaccttataccgaatttttaattaaatatcgaacacaattaaagagggatcataatgattga

SEQ ID NO: 410377 - DNA, 837 bp, Staphylococcus aureus
ttggaaaagcttttttttaagaatttcgatttgataaaattaattaatttaatagagggacatattaataaaaaattaactactgacaacgacatagaagagtttaaagaaaattatctttttttatctgtttacgaaattgttcattcattttatcttaactatatagatataaataattgtataactataagcagtactcggacattagttagaaaatcatacgaattattacttcaattaaaatacattttggaatatcaagaagagtctaatattagggctaaaaggtattttttatataaaaattatcaaaaaatcgatttattaatatcaaatggaaaagacagtacatttgatgaacaaactttaaataagttaaaaatggaaaagaagcatattgagaagtcatatgtagatagttttataaattctaatataaaagtaaacaaattcaaggacataaaagcttggtatatggaaaaatctaatgattgtacaaaaactggaaatttatacgaattatcagaatacttgaatatgaattatcaatataaacatatttataaaaacttttgtaaagatgtgcattcaactgacagtataattaatgatactataagattttttggtaaaaatattgctattagaaatggagaaatagaagaactactaaatgaagaacctttaacgagtgaaatagaaatttcttcttttacaaactatatagttagtgagttcttgaaatgtagtagtttatttttaaatgataaaaaattgtgggaagattactcggcggaatttgaaaaatattataatcaaaaatggtattcatag

SEQ ID NO: 410378 - DNA, 1215 bp, Staphylococcus aureus
atggaaaaacctgcagaacttgcattaccgttacaagcagacgaacaatcatttacgtttgatcatttgaaagaaataaatgatgcattgttaacatatccggatggctttaacattttgaaaaagttaaacaaagttcttgagaagcgtcatgagccatttaataaagaagatggtttagttgattgggcacaagcagaacaacttgcatttgcgacaattttacaagatggtacaccgattcgcttaactggtcaagatagtgaacgtggtacattcagtcataggcatgccgtgttacatgatgaacaaacaggtgaaacatatacacctttacatcatgttcctgatcaaaaagcgacatttgatatacacaattctccgctttcagaagcagcagtagtaggttttgaatacggctataatgtggaaaacaaaaaaagcttcaatatttgggaagcgcaatatggtgattttgcaaatatgtcacaaatgatttttgacaacttcttattcagttctcgctcaaaatggggagaacgttcaggattaacattattcttacctcatgcatatgagggtcaagggcctgaacattcttcagcaagattagagagatttttacaattagctgctgaaaataattgcacagttgtcaacttatctagttcaagtaattatttccacttattgcgtgcacaagcagctagtttagattctgaacaaatgcgaccattggttgttatgtcaccaaaaagcttactgagaaataaaacagttgcaaaaccaattgatgaatttacttctggtggatttgagccaattttgacagagtcatatcaagcggataaagttacaaaagttattttggcaactggtaaaatgttcattgatttaaaagaagcattagccaaaaatccagacgaatcagtattactcgttgcgattgaaagattgtatccattcccagaggaagagattgaagcattactagcacaattgccaaaccttgaagaagtgtcatgggtacaagaagaacctaaaaaccaaggtgcatggttatatgtttatccatatgttaaagtgctagttgcagataaatatgatttaagttatcatggcagaattcaaagggctgctccagctgaaggcgatggagaaattcataaacttgttcaaaataaaattatagaaaatgcattaaaaaataactag

SEQ ID NO: 410379 - DNA, 468 bp, Staphylococcus aureus
atgatatatagtattacagaaatagaagcgcgttatgctgaaactgataagatgggtgtaatttatcatgggaattatgcaacttggtttgaagttgcgcggttggattatatatcgaagttaggttttagttatgctgatatggaaaaacaaggaatcatttcacctgtgactgacctcaatgtcaattataaaaagtctattttttatccagaaaaagttaaagttaaaacttgggttgaaaaatattcgagattacgttcagtgtataaatatgagatttttaatgaaaaaggtgaacttgcaactacaggttccacagaattgatttgtattaaagaagatacttttaagactatacggttggatcgttatttccctgattggcatgaagcctatagcaaagtgcaaacgctcaataatgaagggaaaacagtagagataatggatggtattgattctttataa

SEQ ID NO: 410380 - DNA, 654 bp, Staphylococcus aureus
atgataccaggtgtgaatgcgccacctatgcatccttggtgtagaagtaccacagtgccacatgtcggcaattggcgagacaagttctttaaagagcgcgaaggtaaatatcaagtagaagatgacacaaccaaagatgaattacaacaagctaaagtattaggaaagaaaatatatattactgatcaagcaattgataaagtcagatatgttgatattccaacacataccaaagaagaaaatcaatttatacaagaacaacataaagccttgcttaaagatgccaaagaaaacaatgatagcaatgaagtagcttatttattaaaagatggtaaagttacaaaagtatatggtgatcaagatagtgtatcttttgcaccaggggaaaaagcaacagaattgttatttaacagtaaacctaatacaattattatgttacataatcatcctgggcagtctagtttttctcttacagacttgtatttatttatatttaataattctattaaaacactgacaattgttacaaataaaggtcaaacaaagtacttaactaagacaaaagaatattgcaaatcaacttgtattgattgtattaaaaaatataataaaaataagaatataaaaaattcaatcataaggatattgatatga

SEQ ID NO: 410381 - DNA, 1275 bp, Staphylococcus aureus; identical to SEQ ID NO: 407483

SEQ ID NO: 410382 - DNA, 897 bp, Staphylococcus aureus
atggaaaatagtacgaccgaagcgcgtaatgaagcgacgatgcatcttgatgaaatgactgtggaagaggctttaattacgatgaataaagaagatcagcaagtcccgttagcagttcaaaaggcaataccacaattgacaaaagtaattaaaaaaacaattgcacagtataaaaaaggtggacgattgatctatatcggtgcaggtacaagtggacgattgggtgtcttagatgcagcggagtgtgtacctacattcaatactgatcctcatgaaattataggtattattgctggtggacaacatgctatgacgatggctgtagaaggtgcggaagatcacaaaaaattagcggaagaagatttgaaaaatatagatttaacatcaaaagatgtcgttataggaattgccgcgagtggcaaaacgccatatgttataggcggtttaacatttgctaacacaatcggtgctacaacagtatctatttcatgcaatgaacatgcagttataagtgaaattgcgcagtatccagtagaagttaaagttggtccagaagtattaactggttcaacgcgtttaaagtctggtacagcacaaaaattaattttaaatatgatttcaaccataacaatggttggtgtcggaaaagtttacgataacctcatgattgatgttaaagcaaccaatcaaaaactgatcgaccgttcagtgcgtattattcaagaaatatgtgctatcacatatgatgaagcaatggcgttatatcaggtatctgagcatgatgtgaaagttgcgacagttatgggtatgtgtggcatttctaaggaagaagcaacaagacggttattaaacaatggtgacattgttaaacgagcaatcagagatagacaaccttag

SEQ ID NO: 410383 - DNA, 981 bp, Staphylococcus aureus
ttgattgaaaaaagtcaagcatgtcacgattcattgttagattctgtagggcaaacacctatggttcaacttcatcaactatttccgaaacatgaagtgtttgcaaagttagagtatatgaatcctggaggcagcatgaaagatcgacctgccaagtacatcattgaacatggtattaaacatggtttaatcactgagaatacacatttaattgaaagtacttctggtaatttaggcattgcgttggcaatgatagctaaaatcaagggattaaaactcacgtgtgttgttgatcctaaaatatcaccaacaaatttgaaaattattaaaagttatggtgccaatgtagaaatggttgaagaacctgatgcacatgggggttatttaatgactcgtattgcaaaggtgcaagaactgttagccactattgacgatgcatattggattaatcaatatgcgaatgagttaaattggcaatcccattatcatggtgcaggcacagagattgttgaaacaattaagaaacctatagattattttgtcgcgccagtcagcacgacaggtagcattatgggtatgagtagaaaaataaaagaagtgcatccaaacgcacaaattgttgctgttgatgcgaaagggtcagtcatttttggtgacaaacctattaatagagaattacctggtatcggcgctagtcgtgtacccgaaatattgaatagatcagaaattaatcaagtgatccatgtagatgattatcaatctgctttgggctgtcgaaaactgattgattatgaaggcatatttgctggaggttcaacaggttcgattattgcagcgattgagcagttgataacgtcaattgaagaaggtgcaacaattgtcacgattttaccagatcgaggcgatcgttacttagatttagtttattcagatacatggttagaaaaaatgaaatcaagacaaggagttaaatcagaatga

SEQ ID NO: 410384 - DNA, 273 bp, Staphylococcus aureus; identical to SEQ ID NO: 407792

SEQ ID NO: 410385 - DNA, 258 bp, Staphylococcus aureus
atgcaagttggggtggggccccaacatagagaatttcgaaaagaaattctacagacaatgcaagttggggtggggccccaacatagagaatttcgaaaagaaattctacagacaatgcaagttggggtggggccccaacatagagaatttcgaaaagaaattctacagacaatgcaagttggggtggggccccaacatagagaaattggacccccaatttctacaaacaatgtaagttgggctccaacatttgtgtga

SEQ ID NO: 410386 - DNA, 180 bp, Staphylococcus aureus
atgatagagaacttaaatatcgtgtatattaaaacagtacctattgaatcacatataacagtgcgctttggcatactagacgtcggaagaaacttcgccaaaatagaagtgaacatgcatagtcaaaacgacaaagtagcgagtgctctcgtgatatgccaaatgtttgacgaagtatag

SEQ ID NO: 410387 - DNA, 417 bp, Staphylococcus aureus
gtgattccgattcagcgagtgactccgattcagatagcgattccgactcagacagcgattcagattccaacagtgactcagactcagatagcgattcagactcagacagcgactcagattccgacagcgattcagattcggatagcgattcagattcagacagcgattcagactcagataatgactcagactcagacagcgattcggattcagcgagtgattccgactcaggtagtgactccgattcatcaagtgattccgactcagacagtgactcagactcagcgagtgattccgattctgattcaacgagtgacacaggatcagacaacgactcagattcatcaagtgattccgactcagacagtgattccgactcagacagcgactccgagtcaggttctaacaataatgtag

SEQ ID NO: 410388 - DNA, 348 bp, Staphylococcus aureus
atggataaaaatatattaaaaacaaccataaaagaaatgaataaagatgaattagtacaattgttaaataaatatgtggaaatttcaaatcaagttaaatttcaagatattttaaaaagtaaaactgattatgaaaatcttttgattaaaaatttagaagaagatacaaaaattttggaaaatgcttacattaaatttatgtttaataggttttataaatattctgcaatttttgaagtagatcaagatgtattttctgaaagatttaaacaattaaaggataagttagaagaaactcaaaaaggaactgtttttttgatgaagaaattgaaaatcaaagcattttaa

SEQ ID NO: 410389 - DNA, 1107 bp, Staphylococcus aureus; identical to SEQ ID NO: 407595

SEQ ID NO: 410390 - DNA, 1014 bp, Staphylococcus aureus
atggcgattaaatattcagcattaaaccttgtccctattcgagaaggtgacgatgaacgaacagcaattaatgatatggttaagctcgcacaacatttagatgaattatcatatgaaagatattggattgctgaacaccataacgctcccaatctagtaagttcagcaactgctttattaattcaacatacgttagaacatacgaaacacatacgtgtaggttctggaggaatcatgttacctaaccatgctccattaatcgttgcggaacaatttggcacgatggcaacattatttccaaatcgtgtcgatttaggattaggacgtgcacctggaacagatatgatgaccgcaagtgcattaagacgagatcaacatgatggtgtttataaatttccggaagaagtttcattattacaacaatatttcggccccgctcaccaacaagcatatgttcgtgcttatccagcagtaggtaaaaatgtgcctttatacattcttggttcttcaacagattctgcacatctagctgcacgcaaagggcttccatatgtgttcgctggacattttgcacctcaacaaatgaaagaagctatcgaaatctacaaaacgttatttgaaccttctgatgtattagacgaaccttatgttattgtatgtttaaatacaatcgttgctgaaaatgatgacgaagcacaatatttagcttcatctatggcacaagtaatggttagtatcactcgtggcagaatgcagcccgttcaaccgccaacacatgaactacaaaatatattaacgccgagagaatatgcgatggctatggaaagacagaaaatatcattaataggttcagaaaatactattcaacaaaaaattcaagattttatggaaacttatggtgaagtcaacgaaattatggcaataagttatatttatgataaagatatgcaattagactcttatcgtcggttcaagaatgttataaatcagataaatgaaaaaaacactttatag

SEQ ID NO: 410391 - DNA, 423 bp, Staphylococcus aureus; identical to SEQ ID NO: 405865

SEQ ID NO: 410392 - DNA, 1275 bp, Staphylococcus aureus
gtgagtacagaaccattagcatcgagaatgcgcccaaaaaatatagatgaaatcatttcccaacaacatttagttggaccaagaggcattatcagaagaatggttgacacaaaaaaattaacttcaatgattttttatggtccacctggtataggcaaaacaagtatagccaaagcaatttcgggcagtacgcaatataaattcagacaattgaatgctgtaactaacactaaaaaagatatgcaacttgttgttgaagaagctaaaatgtctggtcaagttatcttgttattagatgaaatccatcgactagataaagccaaacaagattttttattacctcatttagaaaatggcaaaatcgtcttgatcggtgctacaacttcaaatccttatcatgctatcaatccagcgattcgttcaagagcgcaaatttttgaattatatcctttaaatgacgaagatgtgcgccaagcgttaactcgtgcaatagaagatgaagagaatggtttgaaaacatatcaacccaaaattgatgaagatgccatgacctacttttctacacaaagtcaaggtgatgttcgtagtgcgctaaatgcattggaattagctgtattaagcgcagataatgacaaggacggttatcgacatgttacattgcaagatgctaaagactgtttacaaaaaggtgcatttgtaagtgataaggatggtgacatgcattacgatgttatgagcgctttccaaaaatccatccgtggtagtgacgtcaatgccgctttacattatttagcacgattaattgaagctggagatttacctacaatagttcgacgattacttgtaattagctatgaggatataggcttagcctcacctaatgctggtcagagaacacttgctgctattgaatcagcagaacgtctaggtttaccagaagctagaatcccactaagccaagcagtaatcgaactatgcttatcacctaagtcaaattcagcaatgagtgccattgatagtgcattgtccgatattagaaacggtcatgtgggccaaattccaaaccatttaaaagatggacattatcaaggtgctaaagatctaggccgatctattggttacaaatatccacaccaatatgttaatggctatgtttcacagcaatatttacctgataaacttaaaaacaaaatttattatgaaccaaaaacgacatctaaaagtgaacaacaactcaaagaaatatataacaacttacttaaacaaagaccgtaa

SEQ ID NO: 410393 - DNA, 945 bp, Staphylococcus aureus
gtggcagtattcttatttgcagctctatttttaccgctattaatggaatacggtttgttagagatgttgggtcctatttttagaccggttatgagacctttatttacattgccaggacgttcgacggtagataatttagcatcatttattggagacggaactgttggggtcttaattacaagtagacaatatggtgaaggatattattctcgtcgtgaagcaacagttatttcaacgacatttagtgtagtttctatcacttttgcaattgtagttgctgaaacagtgcacatgcaaaatcaattttttgctttctatttatcagtgatagtatcctgccttgttgcagcagtcattatgccaagaatttggcctttaaataaaattcctgatgagtatgctaaggaggtacccgaaagtgcgcgtactgaggcattgccagaaggaaagacggcattgagacacggctttgatactgcaacagaagttggtattaaagcaccgggcgttattgacttttttaagtcaggattaaaaacagtcgttgatatgtggtttgttattttgcctgtagtgatgagtattggtactattgctaccattattgcgaactacacgcccttttttgtcatattgggtaaaccttttgttccatttttagagttaatgcaaatacctgaagcggcacaagcttctcaaacgattattatcggttttgccgatatgtttttaccttctatattaattgaaggtgtacaaaatgatataactcgctttgttattggtgcactaagtatttcacagttgatatacttgtctgaagtaggtggcgtcatacttggttccaagattcctgtaagcatcggcaaattatttatgattttcttaattagaacaatcattacactaccgattatttctttgatggcacacttgttattgtaa

SEQ ID NO: 410394 - DNA, 1344 bp, Staphylococcus aureus
atgcgtttaaaatcaattgtaactgtaatagctttaatactaatcatgtttatggctgcaatcgaatcatcaattatttctttagcgttaccaacaattaagcaagatttaaatgcagggaatttaatttcattaatatttacggcttactttattgcattagtgattgcgaatccaatagtaggtgaattattaactcgttttaaaattatttatattgctatcgcaggtcttacactattcacggttggtagtttaatgtcaggtttaagcacacattttagtatgttgattatatcacgtgtaattcaagggtttggatctggtgtcatgatgtccttgtcacaaattgtacctaaattagcgtttgaaattccattacgctataaaattatgggtatcgttggtagcgtttgggggatttcgagtatcattggaccacttctaggtggtggcatattagaatttgcaacatggcattggttattctacataaatataccgattgcgattattgcaataatattggttgtctggacatttcattttccagaagaaaaaactgtggctaaatcaaaattcgatactaaaggtatcaccctgttttatattttcattggtttaattatgtttgcattgttaaaccaacaacatttatatttaaatatcataggttttgtcttagcaatattagttgcacttcgattatttaatgttgagaaaaaagtttcatccccattcttaccagtagcagaatttaatcgaatgattactttggtctttattacagatcttcttacagctgtttgtttaatgggctttaatttatatattcctgtgtatcttcaagaacaactggggttatcgccattgcaaagtggattagttatttttccactttctgtagcgtggattacattgaattttaatttgcaccatattgaagcgaagttatcaagaaaagttatctatttgtcgtcttttacattattattattaagtagtataatcattgcgtttggtataaaattaccaattcttatagcatgtgtcttaattttaagtggactaagctttggatatatttatacaaaagatagtgtaattgtccaagaggaaacaagtccaatacaaatgaagaaaatgatgtcgttttatggattaacaaaaaaccttggcgcatcaataggttcgacgattatgggatacctttatgcattaaaatcaggattgtttggtgcaaacttgcataatattttaggcgttgtatccttgataagtgtagggctcatcgttgtatggctcatattttatagagaagcggcgtcacaaacaaaagaatag

SEQ ID NO: 410395 - DNA, 1203 bp, Staphylococcus aureus
atgtcaaaattaatcttggctatcaatgctggtagttcatcattaaaatttcaattaattagaatgcctgaagaggaattagtaacaaaaggtttagtagaaagaatcggattgaaggattcaatttttacaattgaagtcgacggggaaaaagttaaaacagtacaagatatcaaggatcacgttgaggcagttgatatcatgctggatgcttttaaagcgcataatattattaatgatattaacgatatcgatggaacaggtcaccgtgttgtacatggtggtgaaaaattccctgaatcagtagctattactgatgaggttgaaaaggaaattgaagaattaagcgaattagcaccgcttcacaacccagctaacttgatgggtattcgtgctttccgtaaattattaccaaatatccctcatgtggcaatttttgatacagcattccatcaaacaatgcctgaaaaagcatatctatatagcttgccatatcattattataaagattatggcattcgtaagtatggtttccatggtacaagccataaatttgtatcacaaagagcggcagaaatgttagataagccaattgaagatttacgtattatttcatgtcacattggtaatggagcatcaattgcagctatcgatggcggtaaatctattgatacatcaatgggcttcacaccacttgctggtgtaacaatgggtactcgttctggtaatattgaccctgctttaattccatttattatggaaaaaactggcaaaactgctgaacaagtattagaaatcttaaacaaagaatctggtttattaggattatcaggtacatcaagtgatttacgtgacttatctgaagaagctgaatcaggtaaagcacgttcacaaatggctttagatgtatttgcttctaaaattcacaaatacattggatcatatgctgcgagaatgcatggtgttgatgttatcgtatttacagcaggtatcggtgaaaactcagttgaaattcgtgcaaaagttcttgaaggcttagaatttatgggtgtttactgggatcctaagaaaaatgaaaacttactacgtggtaaagaaggatttattaactatcctcattcaccagttaaagttgtcgttattccaacagatgaagaaagtatgattgcccgtgatgttatgacattcggtggtttaaaataa

SEQ ID NO: 410396 - DNA, 501 bp, Staphylococcus aureus
atgattacttacaaaaatattttaatcgcagttgacggttcacatgaagcggaatgggcatttaacagagcagttggtgttgctaaacgtaacgatgcgaagttaacaattgtgaatgtaattgattcaagaacatattcttcttatgaagtttatgatgctcaatttactgaaaaatctaagcattttgcagaagaattattaaatggttataaagaagtagctactaacgctggtgttaaagatgtagaaacgcgtctagagtttggctctcctaaatctatcattccgaaaaagcttgcacatgaaattaatgcagacttaattatgagtggtacgtctggcttaaatgctgtggaaagatttattgttggttctgtatcagaatctatcgttcgtcatgcaccatgtgacgtgttagttgttcgtactgaagagttaccagcagacttccaaccacaagttgcaacaactcaattacgtgaaaaatatcaaaattaa

SEQ ID NO: 410397 - DNA, 981 bp, Staphylococcus aureus; identical to SEQ ID NO: 410383

SEQ ID NO: 410398 - DNA, 996 bp, Staphylococcus aureus
atgctacttaaaccaaaataccaaatcgttattgctggtttatgtcttgcaatagtagctatcttaagtttaatgattggaaatacgcttgtgtcaccaggtacggtgatacaggcgttattcaactttgatagtgaaaacgatttacatgatgttgtcactggcgcacgtgcatcgagaacaatcattgcgctattgacaggcgccgcactagccgtctcaggtttgttgatgcaagcacttacacgaaacccaatagcatcgccagggcttttcggtgtcaatgcaggcgcagtattttttgtcatctttagtattacatttatccaaattcaatcttttaaaatgattgttgtcatcgcgtttttgggggctattgttgttacagtcttagtcgttgcactaggtatgtttagacaaaccctattctcacctcaccgtgtcattttagcgggtgccgcgattgcgatgttatttacagcttttactcaaggcattctcattatgaatgaaacagacttgcaaggcctattattctggttaagtggttccgtttcattacgtaatatttgggatatcccatggattattccgcttgtattgatacttattttaattgcgtttagcatggctgcacacatcaatattttgatgacaagtgacgacattgcaaccgggctcggtcaaaacataaaattaatcaaatggatgattattatgctcatcagtatgttagccggtatttcggtagcagtagctggatcaatcgtctttgtgggtcttatcataccgaatattagtaaacgattattgccaccaaactataagtatttaattccttttactgcattagctggagcaatcctaatgatcatttcagacattgttgctcgtataataattaagccactagagttgcctatcggtgtcgttaccgctgtcattggcgctattgtcttaatctatcttatgaagaaaggacgtcaacgcttatga

SEQ ID NO: 410399 - DNA, 999 bp, Staphylococcus aureus
atgaccgaaaagattaataaaaaagacaattaccatctcatcttcgcgttaatctttttagccatcatttcagtggtaagtatgatggttggttcaagctttataccattacaacgcgtattgatgtactttataaatccaaatgacagtgtagatcaattcactttagaagtgttacgcttacctcgcattacacttgcgatattagctggtgctgcactagggatgagtggtttaatgttacaaaatgtattgaaaaatccaattgcctcaccagatattatcggtatcacaggtggtgctagcttaagtgctgttgtctttattgcatttttcagccatttaacgatacatttacttccactatttgctgtattaggtggcgcagttgcaatgatgatactattagtgtttcaaacgaaaggacaaatacgcccgacaacactcataatcatcggtatttcgatgcaaacattgtttattgcacttgtacaagggctacttattacaacaaagcaactatctgcagccaaagcttatacttggttagtcggaagtctttacggtgctacgtttaaagatacaatcattttgggtatggttattttagctgttgtgccgttgttatttcttgttataccaaaaatgaaaatatctatacttgatgaccctgtagcgattggcttaggcttacatgtacaacgtatgaaactaatccaattaatcacttctactatactcgtatctatggcaatcagtttagtaggtaacattgggtttgtcggtttaatcgcaccacatatcgcgaaaacaatcgtccgcggaagttatgctaaaaagttactaatgtcagcaatgattggtgccatatcaattgttattgcagacttaattgggcgtaccttattcttgcctaaagaagtgccagcaggtgtatttattgctgcgtttggcgccccattcttcatatacttattattaaccgtgaaaaagttataa

SEQ ID NO: 410400 - DNA, 753 bp, Staphylococcus aureus
atgaaatataataaccatgacaaaattagagattttataatcattgaagcatatatgtttcgttttaagaaaaaagtcaagcctgaagtcgatatgagtataaaagaatttatattactgacttatttatttcatcagcaagaaaacacacttccatttaagaagattgtttcagatttatgttataaacaatcggatttagtacagcatataaaagtacttgtgaaacattcatatattagtaaagttcgaagtaaaattgatgagcgtaatacttacatttcaatatctgaagaacaacgagagaaaattgcagaacgtgttacattgtttgatcaaatcattaaacaatgtaaccttgcagatcaaagtgaatcacagatgataccaaaagatagtaaagaatttctaaacttgatgatgtatacaatgtatttcaagaatattatcaaaaagcatctaacattaagttttgtagaattcacaattctagctattatcacttctcaaaataaaaacatcgttcttcttaaagatttaattgaaacaatccaccataaataccctcaaactgttagagctctcaataatttaaaaaagcaaggctatctaataaaagaacgctcaactgaagatgaaagaaaaattttaattcatatggatgacgcgcagcaagaccatgctgaacaattattagctcaagtgaatcaattattggcagataaagatcatttacatcttgtttttgaataa

SEQ ID NO: 410401 - DNA, 738 bp, Staphylococcus aureus
atgaaagcggagattaaaggcgtcatcgtttccaacgaagataaatgggtttacgaaatgcttggtatggattcgacttgtcctaaagatgttttaacacaactagaatttagtgatgaagatgttgatattataattaactcaaatggtggtaacctagtagctggtagtgaaatatatacacatttaagagctcataaaggcaaagtgaatgttcgtatcacagcaatagcagcaagtgcggcatcgcttatcgcaatggctggtgaccacatcgaaatgagtccggttgctagaatgatgattcacaatccttcaagtattgcgcaaggagaagcgaaagatctaaatcatgctgcagaaacattagaacatgttggtcaaataatggctgaggcatatgcggttagagctggtaaaaacaaacaagaacttgtagaaatgatggctagggaaacgtggctaaatgctgatgaagccattgaacaaggttttgcggatagtaaaatgtttgaaaacgacaatatgcaaattgtagcaagcaatacacaagtgttatcgaaagatgtattaaatcgtgtaacagctttggtaagtaaaacgccagaggttaacattgatattgacgcaatagcaaataaagtaattgaaaaaataaatatgaaagaaaaggaatcagaaatcgatgttgcagatagtaaagtatcagcaaatggattttcaagattccttttttaa

SEQ ID NO: 410402 - DNA, 1188 bp, Staphylococcus aureus
atgagtattctagaaaagatatttaaaactaggaaagatataacatatatgcttgatttagatatgatagaagatctatcacaacaagcgtatgtgaaacgtttagcgattgatagttgtattgaatttgttgcgcgagctgtcgctcaaagtcattttaaagtattggaaggtaatagaattcaaaagaatgatgtttactacaagttaaatataaaaccaaatactgacttatcaagcgatagtttttggcaacaagttatatataaactaatttatgataacgaggttttaatcgtagtaagtgacagcaaagaattacttatcgcagatagcttttacagagaagagtacgctttgtatgatgatatattcaaagatgtaacggttaaagattatacttatcaacgtactttcacaatgcaagaggtcatatatttaaagtacaacaacaataaagtgacacactttgtagaaagtctattcgaagattacgggaaaatattcggaagaatgataggtgcacaattaaaaaactatcaaataagagggattttgaaatctgcctctagcgcatatgacgaaaagaatatagaaaaattacaagcgttcacaaataaattattcaatacttttaataaaaatcaactagcaatcgcgcctttgatagaaggttttgattatgaggaattatctaatggtggtaagaatagtaacatgcctttttctgaattgagtgagctaatgagagatgcaataaaaaatgttgcgttgatgattggtatacctccaggtttgatttacggagaaacagctgatttggaaaaaaacacgcttgtatttgagaagttctgtttaacacctttattaaaaaagattcagaacgaattaaacgcgaaactcataacacaaagcatgtatttgaaagatacaagaatagaaattgtcggtgtgaataaaaaagacccacttcaatatgctgaagcaattgacaaacttgtaagttctggttcatttacaaggaatgaggtgcggattatgttaggtgaagaaccatcagacaatcctgaattagacgaatacctgattactaaaaactacgaaaaagctaacagtggtgaaaatgatgaaaaagaaaaagatgaaaacactttgaaaggtggtgatgaagatgaaagcggagattaa

SEQ ID NO: 410403 - DNA, 1662 bp, Staphylococcus aureus
atgattagtaataaatacgttgatgaatatataaatttgtggaaacaaggaaagataattttaaataaagaaagaattgatctctttaattatctacaaaaacatatatattcacgagatgatgtatattttgatgaacagaaaatcgaggattgtatcaaatttattgaaaaatggtattttccaacattaccatttcaaaggtttatcatagctaatatatttcttatagataaaaatacagatgaagctttctttacagaatttgctattttcatgggacgtggaggcgggaaaaacggtctaataagtgctattagtgattttctttctacgcccttacacggagttaaagaatatcacatctccattgttgctaatagtgaagatcaagcaaaaacatcgtttgatgaaatcagaaccgttttaatggataacaaacgaaataagacgggtaaaacgccaaaagctccttatgaagttagtaaagcaaaaataataaaccgtgcaactaaatcggttattcgatataacacatcaaacacaaaaaccaaagacggtggacgtgaggggtgtgttatttttgatgaaattcattatttctttggtcctgaaatggtaaacgtcaaacgtggtggattaggtaaaaagaaaaatagaagaacgttttatataagtactgatggttttgttagagagggttatatcgatgcaatgaagcacaaaattgcaagtgtattaagtggcaaggttaaaaatagtagattgtttgctttttattgtaagttagacgatccaaaagaagttgatgacagacagacgtgggaaaaggcgaacccaatgttacataaaccgttatcagaatacgctaaaacactgctaagtacgattgaagaagaatataacgatttaccattcaaccgttcaaataagcccgaattcatgactaagcgaatgaatttgcctgaagttgaccttgaaaaagtaatagcaccatggaaagaaatactagcgactaatagagagataccaaatttagataatcaaatgtgtattggtggtttagactttgcaaacattcgagattttgcaagtgtagggctattattcagaaaaaacgatgattacatttggttaggacattcgtttgtaagacaagggtttttggatgatgtcaaattagaacctcctattaaagaatgggaaaaaatgggattattgaccattgtcgatgatgatgtcattgaaattgaatatatagttgattggtttttaaaggctagagaaaaatatgggcttgaaaaagtcatagctgataattatagaactgatattgtaagacgtgcgtttgaggatgctggcataaaacttgaagtacttagaaatccaaaagcaatacatggattacttgcaccacgtatcgatacaatgtttgcgaaacataacgtaatatatggagacaatcctttgatgcgttggtttactaataatgttgcagtaaaggttaaacccgatggtaataaagaatatattaaaaaagatgaaaatagaagaaaaaccgatgggttcatggcttttgttcacgcattatatagagcagacgatatagtagacaaagacatgtctaaagcgcttgatgcattaatgagtatagatttctaa

SEQ ID NO: 410404 - DNA, 687 bp, Staphylococcus aureus
ttgggatataaaaatattttgatagactttgatgatacaattgttgatttttatgatgcagaagaatgggcgtttcactatatggcgaatgtttttaatcataaagcaacaaaggatgattttttaacatttaaaaaaatcaatcaccaacattgggaagcttttcaacaaaataaattatcgaagtctgaagtattatcagaacgatttgtgaattacttcaaacatcatcaaatggaagttgatgggcatcgtgcagatgtgttatttagaaatggattagcagaagctaaagttaaatactttgatcaaacattagaaacaattgtcgagttatcgaaaagacatgatctatatattgttactaatggtgtaaccgaaacgcaaaagagaaggttaaatcagacgccgttgcataaatatattaaaaagatatttatatctgaagaaacaggatatcaaaaacctaatccggaattttttaattatgtttttaatgatattggtgaggatgaaagacagcgctcgattatagttggagattctttaacatctgacattctaggtggaatcaatgcgggtatagctacttgctggtttaattttagaggatttgatcataatccaggaattatacctgattatgaaattaattcatggaaacaattaaatgatattgtacgttaa

SEQ ID NO: 410405 - DNA, 153 bp, Staphylococcus aureus
atgtctaaagacaaagatccaaaattaaattatcatgaagaagaaaacagtatggtaactgattttgaagatttaaaagaattaggtaaagaaatggaacaaatttctgatcaaaatgatcaagaaaagaattctgaagaagagagtcagtaa

SEQ ID NO: 410406 - DNA, 156 bp, Staphylococcus aureus; identical to SEQ ID NO: 407814

SEQ ID NO: 410407 - DNA, 744 bp, Staphylococcus aureus
atgaaaagtgtaaaaaggttgagtgaagaattaggggttagtaagcaaacgatttttaataatattaagagattgaatatagagacaataaaacaggaaaacacttcgtttattaaagaagataccgatatagaaaaaatcattcaaagagtaaatgaaaataaaaagaaatatggttttgaaagtgctactgaagacaaacaaaaaaaagagtcggataatattaattttgaatctaaaagcgatgctcaaatagtagaaatacttaaaaatcagattaatactttaaataatcaaattgaaaaacaagaaagtcgtcatgaaacaacaattgaattttacagaaaagagttgcaagaaagatcaaaattgcttgagaatcagcaagttctggcattagagagtaataaaaagattcaaaaattagaaaatcaattagaaaaagaaaaacaccttaattatccctttgatacatctactaacgctagacaaaacgttgatgcacaagaaaaaacatatactactagtcctgtaaatattaaccgagatcaggaagaaactaaagaaacagagattcaatataaggatatatctggaagtcaaagcgacgaaagtacacaaggtgaagaagcacaaagagaagacgtttcagctaatccaaatgacaatgatagtgatatagaagaaaagagtgaagaaacggaagctaaaaaggggttttggagtcgtctatttggtaactaa

SEQ ID NO: 410408 - DNA, 276 bp, Staphylococcus aureus; identical to SEQ ID NO: 409377

SEQ ID NO: 410409 - DNA, 669 bp, Staphylococcus aureus
atgaaaaacaaggagaagtatctaactaatttttctgaagccaaacgtaaaaaagctactcaaaagtacaatattataaaaccttttatcctaggcgaacaatctttatcaagtatttctaaaagtaaagggattgcgttaagcaccctttataggtggaataagtcatataaagaacaaggacttaaaggactaatctatgcgacaagagctgataaaggaacacgtaaaatagaaccaaagataattgatgaaattgaacgccttgcgcttatgaataaaagaaatagtatagccacaattcataggaaaatcactaattactgtaaagaaaataattttgatataccaagttataaacaaatttatagtgttattaaagcgatgcctaagtctgttattgatttctctcatcagggtgaaaaatactatcaaaataagtacgatttaatacaaattagagaatcctcgagacccaatgaaatatggcaagcagaccatactttgctagatatctttatattagaccaaaaaggtaatatcaatagaccatggctaactattattatggatgactatagtcgtgcaattgcaggctatttcttaagttttgatgccccccaatgctcaaaacacagcattaacactacaccaagcaatatggaataa

SEQ ID NO: 410410 - DNA, 831 bp, Staphylococcus aureus; identical to SEQ ID NO: 409382

SEQ ID NO: 410411 - DNA, 816 bp, Staphylococcus aureus; identical to SEQ ID NO: 409381

SEQ ID NO: 410412 - DNA, 444 bp, Staphylococcus aureus; identical to SEQ ID NO: 409437

SEQ ID NO: 410413 - DNA, 1707 bp, Staphylococcus aureus; identical to SEQ ID NO: 407819

SEQ ID NO: 410414 - DNA, 1320 bp, Staphylococcus aureus
gtgttagaattgtcacctgatgatctggaaattcaaattgattatgcacaatgtctagtgcaacttggtattgctaaaaaagcagaacatttattttatgacaatattatttataataggcatctagaagatagcttttatgaattgagtcagctcaacattgaagttaacgaaccaaacaaggcattcttgtttggtattaattatgttattgttagcgacgaccaagattatagagatgaattagatcaaatgtttgatgtgaaatatcaaagtgaagaacaaattgaacttgaagctcaattgtttgtagttcaaatactattccaatatcttttttctcaaggtcgattaaaagatgcaaagaattatgtcttacatcaaccacaagaagttcaagatcatcgtgtcgtacgtaatttactggcaatgtgttatttatatctcggcgaatatgatacggctaaagcattgtacgaagcactattacaagaggatagtacagatatatatgcattatgccattatactttgctactttataacactaaggaaaatgaacaataccaaaagtatttaaaaatattaaataaagttgtacctatgaatgacgatgaaagttttaaattaggtattgttttaagttatttaaagcagtatcgtgcatcacaacaattgttgtaccctttatataaaaaagggaaatttttatcaattcaaatgtacaatgctttagcatataattattattatttaggtgaagaagacgaaagtcattactactgggataaattgaagcaaatttctaaagtggaaattggacatgctccttgggtaattgaaaatagtaaagaagtttttgaccaacatattttgccattacttcaaagtgatgacagtcattatcgtttatatggtatttttttattggatcaattaaatggcaaagaaattgtgatgacggaaagtatttggcaggttctggaaaatctaaataattatgagaaattgtatttaacgtatttagttcaaggtttaacactcaataaattagatttcattcatcgcggcttgttaacgctttaccataatgaattatttgtaagtgaaaatgatttaatggttgcatggattaatcaaggtgaactcataattgctgaaaaagtagatttaactgatgttgagccatatatcggtgcgtttatttatttgtattttaaaaatcaacctcgaaacgttacaaagaagcaaattacaacatggttaggcataacacaatataaactgaacaaaatgattgaatttctcttgagcatatag

SEQ ID NO: 410415 - DNA, 684 bp, Staphylococcus aureus
atgaatacaggtgataaagcggttaaatctgaaagtggtttattaacaacaattgcttatggtattgatggaaaagtaaattatgcgcttgaaggttccatctttgtttcgggttcagcaatccaatggttacgtgatggattaagaatgattaattcagcaccacaatcagaaagttatgcgacacgagttgactctactgagggtgtttatattgttccagcatttgtaggtttaggaacaccatattgggattctgaagcacgtggtgcgattttcggtttaacacgtggaactgaaaaagaacactttatccgtgcaactttagaatcattatgttaccaaactcgtgacgttatggaagcaatgtcaaaagactctggtattgatgtccaaagtttacgtgtcgatggtggtgcagttaaaaataactttattatgcagttccaagcagacattgttaatacttctgttgaaagacctgaaattcaagaaactacagctttaggtgctgcatttttagcaggtttagcagttggattctgggaaagtaaagatgatatcgctaaaaactggaaattagaagaaaaattcgatccgaaaatggatgaaggcgaaagagaaaaattatatagaggttggaaaaaagctgttgaagcaacacaagtttttaaaacagaataa

SEQ ID NO: 410416 - DNA, 861 bp, Staphylococcus aureus; identical to SEQ ID NO: 408477

SEQ ID NO: 410417 - DNA, 330 bp, Staphylococcus aureus
atgtcaccacgtgcaaccattaaaccatcagacacttcaagaatttcctcaatattatcaataccttcttggttttcaattttagggaatactgaaatgttagctttttgttcttctaaaatttcacgaatttctaaaacatcactaggacgacgtacgaaacttgctgcaatgaagtcaacattttctttaataccgaaacggatatcttcagcatctttttctgtaataccaggtaaactaactcttacaccaggtaagttaacaccttttttgtttttaagctcaccagagtttaaaatatcacatttaacttcttttttagcatga

SEQ ID NO: 410418 - DNA, 309 bp, Staphylococcus aureus
atgacgttcaccttatcagatgaacaatataaaaatctttgtactaactctaacaagttattagataaacttcacaaagcattaaaagatcgtgaagagtacaagaagcaacgagatgagcttattggggatatagcgaagttacgagattgtaacaaagaactggagaagaaagcaagcgcatgggataggtattgcaagagcgttgaaaaagatttaataaacgaattcggtaacgatgatgaaagagttaaattcggaatggaattaaacaataaaatttttatggaggatgacacaaatgaataa

SEQ ID NO: 410419 - DNA, 624 bp, Staphylococcus aureus
atgaattacacacaacaacttaaacaaaaagactcagaatatgtttggcatccatttacacaaatgggtgtatatagcaaagaagaagcaatcatcattgaaaaaggaaagggtagttacctttacgatacgaatggcaataaatatttagatggttatgcatcgttgtgggtcaatgtgcatggtcataataacaaatacttaaataaggtaattaaaaagcaactcaataaaattgcccattctacgctgctaggatcatcaaatattccgtcaatagaacttgcggaaaaattaatcgaaatcacgccaagtaatctaagaaaagtattttattctgatacaggcagtgcgtctgttgaaatcgcaataaagatggcatatcagtattggaaaaatattgatagagaaaaatatgccaagaaaaacaagtttataacgctaaatcacggttatcatggggatacgattggtgcggtaagtgttggtggtatcaagacctttcataaaatatttaaagacttaatatttgagaatattcaagtagaaagcccatctttctatcgcagtaattacgatactgaaaatgaaatgatgacagctattttaacgaatatagagtaa

SEQ ID NO: 410420 - DNA, 696 bp, Staphylococcus aureus
ttggaaccgttgattcaaggtgcgacaggcttgtttgttcatcctaaaggctttttgaaagaagtcgagaaattgtgcaaaaaatacgatgtcttattaatttgtgatgaggtagcagttggttttgggagaactggaaagatgtttgcatgcaatcatgaagatgttcaaccggatattatgtgtttaggtaaggcgattactggtggctacttactacttgcagctacattgacatctaaaaaaatatacaatgcatttttaagtgattcgcatggtgtgaatacctttttccatggtcatacatacaccggaaatcaaatcgtttgtacggttgcattagaaaatataagactttatgaaaaacgtaagttattgtcacatattgaaacgacatcatcaacacttgagaaacagttacatgcgctgaagcgtcatcgaaatgttggtgatgtaagaggacgaggcttaatgtttggagttgaattagttacagataaagatagtaaaacgccgttagaaattgaaaaagttgaacgtattgtacgtaattgtaaagaaaacgggctaatgattagaaatttagaaaatgtcattacgtttgtgccagtgttaagtatgtcaaataaagaagtgaaaacgatggtacgtatttttaaaaaggcagtacataacattttagataggaagtgttaa

SEQ ID NO: 410421 - DNA, 231 bp, Staphylococcus aureus
ttgtattcagctatggtatcacaaccaaaaggcgagagtttaaaatcacgaggaatgatattaaagttagatagaaataagagaactgctaaaggaagttatattattagagaattgaaagaagataaaaatcatgatgttcaaaaaaatgaaaagaaatatccagtgaaattggtgaataataggatagttttgataaaagatgttaaagacaaaaagttaaaaaaatga

SEQ ID NO: 410422 - DNA, 237 bp, Staphylococcus aureus
gtggtcaataaaaagaattggaatgtacacaaatgttataattttgagcgttttataataggttgtgatagttcaagcaataatgcagaaaatcaaagagaagactcaaaagaagaacaaatcaaaaagagctttgcgaaaacgttagatatgtaccctattaagaatctcgaggatttatatgacaaagaaggatatcgtgatggtgagtttgaaaaaggcgataaggggacgtag

SEQ ID NO: 410423 - DNA, 180 bp, Staphylococcus aureus; identical to SEQ ID NO: 408994

SEQ ID NO: 410424 - DNA, 402 bp, Staphylococcus aureus; identical to SEQ ID NO: 407373

SEQ ID NO: 410425 - DNA, 771 bp, Staphylococcus aureus; identical to SEQ ID NO: 407372

SEQ ID NO: 410426 - DNA, 945 bp, Staphylococcus aureus; identical to SEQ ID NO: 407371

SEQ ID NO: 410427 - DNA, 222 bp, Staphylococcus aureus
atgataaaaaatagtttgcaagctaaagaacttgcggtaattttatctgtttcaaaatccaaagcaggacaaataataagagaactgaataaagagcttgaagacaagggatacattgcgatacgaggcagaataccagtccaattagctagagaaaaattcccttatcacggcttatcagaccagagaataatggaggagttgaaaaaagtaaatgagtaa

SEQ ID NO: 410428 - DNA, 789 bp, Staphylococcus aureus; identical to SEQ ID NO: 407148

SEQ ID NO: 410429 - DNA, 168 bp, Staphylococcus aureus
atgaaagtaacaaatacaattagatttgaagaagaaaagaaaaacttaattgataatgtagtaaatacactagaagaatataaagatgttatcgacagtgaattgcgtactattagaaacactaatcatttagttatgagaaataatttggttctgttgcaaagttga

SEQ ID NO: 410430 - DNA, 393 bp, Staphylococcus aureus
atgataaacaaagtaatatatagtggacgtatcgcaactgatttaaaattaagaaaaagtaaaaatgaaaagtcttatgttttctttaacatagctgtacctaggcagtttgataatgatagaacagattttattaattgtgttgtatggggaaaacaagcagaaagtttagttgattatcaaagtaaaggtaatctaattattattgaaggttcaactgaaacatataaaaaagacaatattaatatgtctagatgtttggttgaaaagactatctttttagaaagcaaaaaagaaaacaaaaaacatgacgtgtcagaagatgacgctataagcccagcagaagatagtggcaacgataaatctatctctgatgatgacttaccattttaa

SEQ ID NO: 410431 - DNA, 918 bp, Staphylococcus aureus
atggattggattaaagacgctattaaagaactgaccgaaggtattgcagacggtatgatgaattttatatttcagtttctttatacgttattttacgaacctttaaaattctttatatggttgttagataaaatacttattgatcctaatagtatttcaagtgattacatttcaaacgcctctgtattagttaatagcttaatcacttcaatagcaatatgtgtgtttgcttttaaaatggttcaagttatgaaacaaaatgcagaaggtaatgctgaaagtccaggctattatgtagcacaattattaccaagttctttattggtagcagttttaccatggctagttgatataatgactaaattatcttattcagcgactagggcatttttagatgtaggtcaaaaaagttatttagaaactattaaagaatggagttctttaaaaaaaggtcaagacggatttaaagaaatgctaggttctatggggactatggcaggtagtcaaattatgtttattctatttattctattgattttagtatttactgtagtatttattttccaatttgttagtaggatagctgatttagtaataatgaaagttgttgccccgttagtagcagtttctttattagcagatgaaaataattatataggtgtatggtggcgtgaattattagcaattagtattcaattaccattacaagtgtttactttctttggaggaataaatttattctttggtgcaaagctagacgtaggcacattattattaggtataggattctttattattacagttaaatcgccttcctttattagatcaatggtttactctactggaagtgggcgcatggcaactggaatggctggaagtggtgcaaaacttctagttagaaaaatgttatctaaataa

SEQ ID NO: 410432 - DNA, 1641 bp, Staphylococcus aureus
atgactacacttttaggcgaattagaaagtaaagcaacttctataaataaaaagaatctagtaatacaagattttgatactaaatgccctaatagaaatatatttgtggtaggagggccaggttcctataagtcagctgggtatgttattcctaatgttattgttaaaaatcaacaatcaatagttgtaactgaccctagtggcgaagtttatgaaaaaacatctaatattaaacgcatgcaaggttttgatgttagagtagtaaatttcaaaaactttttagcctctgatagacaaaacttttttgattatattgataaagattctgattgttcaatagttgctgaattaattattaaatcagctggggattctaaaataaataaagacgtatggtataaagcctctgtaggattattaaattcattgcttttatacgctaaatatgaatttgaaccagaaaaacgaactataggaaacattattaaatttattcaaaataacaaacctaatcaagatgaagaaggatcagttgaattagataaacgctttaatgaattatctaaagaccacccagctagagaaagttatgaatttggttttgcagtatcagaaggaagaacaagagcaagtattatactaacctttgtagccgatttacgaaattacattgataacgaaattagaagttatacaagcgattctgattttgatttacgagatgtaggattaagaaaaactattatatatgtaatgttgccagttttggggaacactgttcaatcactttctagtttattcttctctcaaatgttccaacagctatataggttaggggacgaaaacggtgctagacttccagtcccagtagattttttactagacgaatggccaaatatcggcgcaataccagactatgaagaaactttagcaacttgtcgtaagtatggtattagtatcacaacaattgttcaatctatatcacaagcagtagataaatataataaagataaagctaacgctattataggtaaccacgcagttattttatgtttaggtaatgtgaataatgatacagcaaaatatataaaagaagaattaggtaatgctactgtagagtttgaaacaagtagtgaaggttcttctagtggtaaagatagcagaagtaaatcatcaaataaaaatgtaagctacactggaagggcattactaaatgaagatgaaataagtaatatgcaacaggataaagctattcttataactaaaaatagaaatcctaaaattattaaaaagttagcatattttaaaatgttccctaatttaacagaaacgtatatagcacctcaaaacgaatacaaacgtaaaaaaaaccagtctatgattgataagcataatagattaagagaagaatgggataaaaaacaagagaaaaataaacagcaaaaactagaagaatataaagaagaacaaagacagaaagagttagagaaagaacaacaaccacaagaagaacaacaaaatgagaaagtaaaagaaagtaaagacaaaaacgatcaagaagataagaaagacgagcaacaaaaaattaatgattctaagaaagcattctacgaaaaattaaaacaaaaacaagctaaataa

SEQ ID NO: 410433 - DNA, 465 bp, Staphylococcus aureus
gtgaaaaaaggaatattcattttaactggtattatttggctagtattaatatatttagcgcaaatattagcatatgctttaaatacactaagtaatactagcaataagcaaaagatatttagtgatatatcacagttgtttatacctccagctaaacacccaataagcactattatcggttttgtatctgataaaaatacagtgttttttgtaataggtgtaatagcaacaattatttgtatatatattcttataaaacaattatttgagagcaaagacggaaacgaaaaaaatcaagactataaaattgctaaacatggttctcatggatcagctaaatttgccgaagatagcgaattgttttcagaaggacattataaaaaaatgaaagaaaacgacattacgaactatgtttataacagtttagataaatcattaatagaagaaagaagtgataaggaatga

SEQ ID NO: 410434 - DNA, 2103 bp, Staphylococcus aureus
atgaacactttaattctatgtgaaaaaccttcacaagcaatggacttaagcactgtttttgcaaaaaagaaaaagcaaaatggatatatggaaatttcagatgaacaattaaatgtaagtggctttttaacttgggcagttggtcatttagtcgaattgaaggaaccacaagaatatgacgaaaaatataaaaattttagcacatatcctatattgttagaaaaagacgattttcaatttaaagtatctgacaaaacgaaagatcaatttaacaacattaaaaaaatatttaaagaaaacaagattgatgaagttattattgctactgactcagctagagaaggcgaaaatatagcatataaaattttaaatcaattgaaagtaacagataaagttactataaaaagattgtggcttacttctaaagtagaaagcagtataagaaaggcttttaaaaatatattacctaaagaaaaaacttatggattttacaaagagggcagggctagagaattaagtgattggttagtaggaattaacttatcacgtcatttcactaaaatttcacgagaattaggaaatgacggtgttattcatatcggtagagtatctagtcctacattaaacatggtttacaacagagagaataacattaaaggttttaaaggtaaaaagttttataaagtttcagcgactattaacaaagatgaacaagaagtgaaaacagagttaaaaaacaaatttgacagtgaagatgaattgcacgaatttttgtttgaaaatgatattacagatttaacacaaaaagggttagttactgatattgaaaaagaaataggctatacaatgccacctaaattttatgacttatcagctttacaagaagatatgaatgataaatataaaataagtgcgaaacgaacattagaaatcgcacagacattatatgagaagaaattaatcacatatccaagaactgattcaagatatatcacagaagatgaaaaagaaatgttattagaaaatatagactatttaaaagaaataacaaagattaatttgaataatgaattaactaataacagcttgattaatccttctaaaatagaagatcattacgcaatattaataactggaaatgattttaacaaagtagatttaaaagaagaagaaatcaatgtttataaaagtatattacaaaatgtggccatgaattttatggataaagaacaatatgaaacgactactatagaaatcgctgttaaaaagcttatgtttgaagtgaaaggtaaaattattcaagataacggatttaaagctttgttaaataaacaaaaaacttccgaagaaacaattcctaattttgaaaaaaatgaagaagtagacattgaattagatttgttagaaaaagaaacgacacctccaaaaagatatacagaaaaaacattgttaaaagcaatggccaatcctatagaaacactagaagatgaaggcttaaagtctacacttaaagaagttaaaggtttaggcacaccagcaactagagccgatattatagaaaacttgaagaaaaataaatatattcaagtacaaaaaaacaaaatttatattactaaaaatggtatattagcttgtttattattggaaggacatttactttcaaaaccagacttaacaggacaatgggaaaaatatttgaatggtattagtaaaggcgaaaaagatgatgattcatttataaataccattaatgaaatgattaaaaaaacaattaatgaagaagttaaaaataaagaaagtatacaaaaagtggccaaagagaaagtatcgactaacaatatagcaaaatgccctgcttgcgataatggctatttaatagatagaaaaggtttttatggttgtacagagtacaataacggttgtgaatttactattcctaaaaaattgttagaaaaaagtatacctccaactgtagtaaaagcattatgtgaaagtaagacaacaaaaaaattgaaaggctttaaatcaaaaaaaagtggaaagtcatttgattgtaagttgatattaacaaaagaaaacaaacttcaattttcattcgattaa

SEQ ID NO: 410435 - DNA, 486 bp, Staphylococcus aureus
atgaaaaaattattaactatagttattttattcactttggttctggctggttgtggccaaaatcaaagtgagaaaaatagtgaaaaacataatgaagaaaaaacagtagatactacagaagaaagaaacgatatgataaaaggtctaattgaatatggttatgaaaatgatgattataaaggttataagcatatgaaagatatattatctgaaaagttgcaaaagcaagcagaattgcaaaatcaatcagcacaaactaaaggtgtaaaaaaagaaactaaagacattaaactttatcaagacgtagataatgatgatgaattgatttattctattaaactttcaattacaaacaaaaaagagaaaaactctgactactcaatgagatatgggaaaattgaattaacggaagaagaaggtaaacaaaagatagataatgtcgaagaactaacacaaagaaatttagtaagtatgaatcaagaatag

SEQ ID NO: 410436 - DNA, 1077 bp, Staphylococcus aureus
atgtggagtgctattgctaaaggaataacaatgctgatgaagaaaaaagcattatccaaaatattaaaaccagtaatagctatagtaataggctttttccttcttatttttataatgattgcttatctagtaggatctttcactaaagaaattaatgagagtggcgaacaaaaaatgaaagaggctgaatcaacagcaacaggtgcgtgtactggtggaagtgttgacggttcgggtatctctgcttttgaaaaaaacgccaaaggtggcgcattagaaggtaaaggtaaggatatggttaaaattgctaaaaaaaataaaataccaccaaaattatttatagcaattgtagcttctgagtcagaatggggaagaggggcaaatgcaacaaaacaaaaaaaccccctatctataatgggggctggccctctacaagtttacccttcaattgaagaaggacttgataaaggtgcaaaaaatttatatgacttatacatttctgaaggtttgacaactcccgagaaaatcgggccaaaatacgcaccagtaggcgctagtaatgacccagatgacttaaatagtaactgggtacctacagttaagaaaatcatgaagtcattcggtggcaaagaggctaaatgttctactgaaagcagtggtggaggttcagacggaaaaggatttgattttaaaggagaattccctaaacctgacaaatcgaaatataacggtcaatcttatccatggggacagtgtacttggtatgtacatcaacgtagaaaagaaattggcaaaccagtacctttaacttggggtaatggtggggactggggcgataatgcaaaagcgcaaggctgggaagtaggtagtaagccgaaagctggcgctggcgcctctgtaaaacccggtaactttggcgcaccaccaccgtatggacacatcatgtttgtcgaaaaagttaaaaaagacggtggaattgtagttagtgaggccaatgtaaaaggcctaggagttataagttcaagagaattttcaaaagcagaaacacaacgtatgcaatttatttatgataagtag

SEQ ID NO: 410437 - DNA, 588 bp, Staphylococcus aureus
atgattataaacggaaagcaacaagaattagatagcaaaatagcacaagcagacaaacaagaacaaagaagtaaagtatatgaaaatctttacaatggcaatgttgatcaagcagttaaaggcatgaaacgtgacgatagctttaacaaaaaagatattgaaaaaacattaaaaaaagaaaagaaatatgaagaactaattgaattgagtagtaaaaacacaccttatgtaattgaacaattatataaagaaggtaagcagaataaaataagagagttagctttcaattttgaaaataacgatacattgagtttagaaaagaaaatattagacaaagacggaacagcatttagtgtaggctcaacaggtaaatacgaagaacaaagtaaacgtttggctttagcgtcagctaaagaaggttatgttgaatcagctaaagatattaataaaaaacttaaagataatgaagttgaagaagaaataaataaagctgaaattaaacaactaaaagaagaaaaagacagcacgaaggataaagacaagaaaaaagaaatccaaaaagatatagaggaattagagaagaaatag

SEQ ID NO: 410438 - DNA, 420 bp, Staphylococcus aureus
  misc_feature (405)..(414): n is a, c, g, or t
atgaaaattagaaattttaatgaaggaacattggtaggaaaacataaccacttagaatatatcatcaatgttgatttgtgccatatatcagatatagacgaaattagatatgacttaacagaacctaatgaattgttttttgaagttaaagatttacaaaaggaaggcgattattttcatatcatttacaacactgataatgaatataattccttcctatcagcaaaaaaagaaagcaaagcactcaaattatctttaatggattatgtgttaaaagttgatccattaaaggacaatataactgttatgcacccagcgaacctattttttaaaaatattgaggatataaaaataggattcaaaggccatgaatatttacctaaacctaaaataaataatttagannnnnnnnnncaatag

SEQ ID NO: 410439 - DNA, 2013 bp, Staphylococcus aureus
atggcatttttaaaaaagaaaaagcaagagcaagttacaaataaaattcacaatgaatcttttcaaaaattaacagaagtattagatacagattctgttgatagtatttatccttttagttggatagagaaaaaatcgcatatagaaacaggcgaaaattatattaaaaatttattagtagttgactaccctcaatcagtaaaaggggcgtacttatcaaatttattaaagaaaaacggtaatattcaaataactaaatttattagaccagcaaatatagaaagaatgattgaccatttaaacaactcaatcaaaaacaaaacagcagaacaaatgcgtactacagaccctaaacgaaatgcaacaattaaaagagaaattgaaagtagtaaaaaacaacttgataaatttttagatgaaaaaacaggatttatgtacatgtatatgtatatcacgttaaatggcgattcatacgaaaagatacaagcgctagaaaaagatgttaagcgtactttaacgagattaagacttaaaacacatacacctacaaacgcaatgcgagaatcatttcatacagttcttcctttaaatagaaacttcttatcagcatttacacaacaaaatatggatacagcaacagcagggcatttctttatgtttgatgattcagaaattattgatttaacacctaatacatcagtttttggaattaacaaaaatacagattcattagtagcagttgattttaataacaaagaaaaaactttaaataaaaatatgactattatcggtacaagtggtgtaggtaaatctaccctcaatatgagaatgattttagacaatatcaaaaaatctataagacaatttatcattgatcccgaagatgaattttcatatataactaaatattacggtggaacagttgtaaatatttcaacaagttcaaatatcaaaattaatccatttgaaattttttcagaagaagtatttgaaaaagaagatgaaacagacaatgaaacaacatcagatgttttaacggaaaacaacgaacacgaaagccaaattgacacattagttcgttctaaaatagggaagttaaaaaccttctttagagttcttaaagatgaaatatctcaaacagaaatatctgtattatcttcaactttaagacagttatatcaagataaaggatttaaaggtaatgcgaaattatcagatttcaaaagcgaagattatccaactttaacagaattatataacaaactaaaagacttagacccagaaaaatatgaggtattaaaggacttaacacttatcatagaagattacacaatggaacatggtactactacaatctttgacggttatacaaacatcaaattagataatgaaattgttacttttaaccttaaaccattacaaacagaaaaagatgttcaaagtgcagcgtatttgaatatattcagtttcttatgggacgaaataacaaaagatagaacaacagaaacagtattaatgactgacgaattacatttcttagcaacaaatgaatatagcttagatttttattatcaagcatacaagcgtattagaaaatatggcggtggcgctattgcctctactcaacaaattaaagatattcttagaacatcacaagaaataggttcagctattattgaaaatagtcatactaaattcttctttggaatggataacgtaggcgttgatgatgttgttgataaattaggattgaaatttagcgatcaagaaatatctcatttaactaaaaagaaaaaaggcgaggcattattactatacggaacacaaagagcatttataagaattgatttagatagagaagaaacaagactttggaataaagaattatatgaaacaatttatgaagaaccagcagacgtagagccgaattatgttgaacaactaggattaacagatattgatttagcagagttggaagaagaattaagacaagcagaaatgatttatgaatag

SEQ ID NO: 410440 - DNA, 684 bp, Staphylococcus aureus
atgatgatgtttaaaaaaaagaataagcaaaataaaaataacgaacaacaatttgaaattataaatagatatataaaaggggacggacgtaatcaaagtattcaagaagattcactaatagctggtttttataaagattacgttgttactaaagacggttatatcagtggaggtttaaatattactggtgtaaatacagagttattaacgaagtttgagcaaaatgatttattagaagaatattcatcttttatttcaaacattctttacgacgaaccaatgataaaaacaattacagaaccagtaaatatacaaaattatataaaacacctttacagacaagtattacttgatatgaagaataataataataaaccaacaagacgtggccaattaatagctggtcgtatattgtttcttcaagaaaagctagcaaaaggcgaaatgagtacaaagaaacattatattttcttttcggaaaagataacagaaaatactgtagcacaattagatcatgcagtgaatagactacatgaaaagataaaccttaataaagaggcattacaacaagcattttcacattatggtttagaaactagacctatatatcaaacagaatacttaaaccagttttatgctttatatgattataaaggttataacgactatcatcttagtaattag

SEQ ID NO: 410441 - DNA, 408 bp, Staphylococcus aureus
atgtctgttgagcaagaagttaaagatataatgctcgatatgttgggcgaagaaaagaaagttaaagagaatataatacctcgtaatgtagacgctagttataaaatattcttaaatttaaacggtaaagaattagcaattgtatttgttccttttttactatttctaacaatagcatttggtgtaacgtttttaatgggcttacttaatttaataactggctttatggtttttatagtaggtttgatttttggtttaacaatatatggcttactaacaattagaccaattagtacaaaagaaaatataagaatgattgataccataaaacaatcacaacgatttagcagaaggcagaaagtttacttctataaaagtaaagaaggattgggtgatgatgatgtttaa

SEQ ID NO: 410442 - DNA, 318 bp, Staphylococcus aureus
atgattaaaaaattcagtttaacaactgtttatgtagcatttttaagcattgttttatcaaatataacacttggcgcagaaaatccagggccgaaaattgaacaaggtttacaacaagtacaaacattcttaacaggcctaattgttgctgttggtatctgtgctggtgtttggatagttcttaaaaaattacctggaattgatgatccaatggtaaaaaatgaaatgtttagaggcgttggaatggtattagctggtgtggctgttggggcagcacttgtttggttggttccatgggtatacaaccttttccaataa

SEQ ID NO: 410443 - DNA, 975 bp, Staphylococcus aureus
ttggataacataacatttcgtaaacgtattgaagaatatcgaaagcgatctattgagcaaaagaaatatgagagcaaactaaattatcaatcaagatttggtgtgaaagatgatgaagttagtacttttaatatcaaaggcattgctacagataaaaaagaaaataagttagtcatggccgaagatagagaggataaacaaaaagttcttttatacgccaataaagataatgatatgtattatttgaattctggtagcacttataaagaggctgttcaaaacacttttggtaatgaaaccaattacgaaatggtagatgatgaattatttatttataattcaaaaaatcaagcacttacaaactatgaccaacttgatgagtatcacaatcgacaaaagcaattacaatataacaccaaattagaacaggaacgaaagcaaagattgactgatacaaataaagttagtgaaaatgctaaagaagatttagcgttaagtttaggacttacagcaacagcattgaaaggtaacataaacatttctaatgttgaaaaagtcactgataatgaaagtatggttactatagaaaatgaaattaatggtaagtcagaacatttaatttcagactttaaagatagtttcattgaaaaggctaaagaaaagctaactgtttccccttcaatgaggttaggatttgaagaatttaaaaacgcctcgggacaaatagcaatgggatttacagagttttttggcgctaggtatgacgaaagcactttagaaaacgaccctaaagttgtggcaacagaaaaagggtactctgtttctgtttttgataaagacggaaacaaaaaagatttaacatcagctgacacttttgaggaggcagtaaaattatccaaagaaatgaaacatgataactcgctttctcgtagtgaaatagaattaaatcaagaattagaaaagaaaaaaatataa

SEQ ID NO: 410444 - DNA, 189 bp, Staphylococcus aureus
atgaataataatgaagaaaattcagtcttttttggtaaaaagaaaaaagtatcactacatttgttagttgatcccgatatgaaagatgagattatcaaatacgcacaagaaaaagatttcgataacgtttcacaagctggtagagaaatcttaaaaaaaggattagaacaaattaaaagtaataaataa

SEQ ID NO: 410445 - DNA, 780 bp, Staphylococcus aureus
atggaagttgttcgtttaaatcaaaacctatttaataaactacgaggaaacgaaatatcaagcaataaaaatggttcaagaccatattattattctttcaaacgtaataataatagagtttgtataccttttagaacaaatgcacaaaaggtacctaataaatataaaattaatttaggaggcgaacagcccgataaacctaattcagctattgatttaacaaagtctatagtaattagtaatgatgaatatcttaataacaggtcaaaagctaaaataccacaaaatgttaataattttttaaagcaacaagcaccagctattgaacaaaaatacgatactatgtctaatgattacataaaagcaaaagctagtttaagtaagatacctttagttaaatattcaactatgcaatacttccacaaagaattgaatattcaagatagtattgataatcaacaaactaaaaatgctattaatgaattaatatctaatgggaaatcaaataaatataataaattacaatcttctctgcctaatgaaaaattaaatttgctagatgattatgaaactctatatgagtttaaaagcctaacagactacccagctaaaataaattctaatgatattgataatcctttcttagaagttgagaaaaataacaaacattttactttgtctgcactaactattaaaaatgaaccagaaaagcatgtaaaagactttttaaattatgatatagagaatgaaaagaataaagatattgatttagatttataa

SEQ ID NO: 410446 - DNA, 558 bp, Staphylococcus aureus
atggccaatattggttatgctcgtgtatctaccagagatcaaagtttagatttacaaatagacgctttgagtaattttggttgtgagaaaatatttagcgaaaaagttagtgggcgtaaagtaaatagaactgaactagataaatgtttagattatttacgtgaaggcgacactttagttatttacaagctagatagattaggcaggactactaagcaactgatagatttagcccaatggttagaaaataataatattgaattacaaattattgatatgaatatcaatacaaaagacccaatgggaaagatgttttttacaatgatgagtgcttttgctgaattagaggctaacttattaagcgaaagaactaaaaaaggtttagaatcagctagagcaagaggtaacatgggaggcagaaaagcaatgccacaagaaaaaaaagaatacattaaacatttatacgataccaaagaatatacaggacaagaaattgctaaaaaaacgaatgtaagtagagatactgtatatcgcattttacgagagtttaaaaagtaa

SEQ ID NO: 410447 - DNA, 417 bp, Staphylococcus aureus
atgaaaataataaatcctaatatgcccgaaccgtacaaatatgaaactgattatagaaacatacctagggaatacttaaatccacatattccaaaaggtagaggaatagttaaatggaacgcatttaagacgataccccagcaatatgaaatattggaacaacacatagaagatcaaaataaaataaatatgcctctattgtctgatgaccagctacaagaaattaatgagaaagtaagtagtaagattagtaaaaatatattaactgatttagattactggaaagacggatatatatattcgattcaatgttacattaacaaaatagatgaatttaatggatttatgattatcactaattccaattcaaacaataaactaaaaatacctttaagtagtattgttagcgtacagtaa

SEQ ID NO: 410448 - DNA, 1272 bp, Staphylococcus aureus
atggattacacaaatcaaaaaagaaaatacataatatttggtattgttcttgctataacacttctaattgttggaattgcttactatttaatcagtttgaataatgctaaaggacaagttaaagaatttgaaaaattagtacagcataatgactacaatagtattgctaaaaagttatctaataaagaagaaactttatctgaaaatgatgctaaaaactttgtgttatttgttaaaagtaaagaaaatcaagaacaatacaatgagcaaatacaaaaaattaaaagtaatattgataaaaataaagacaataataccgtgtatggctctataacagatcaatacggaaataacctaataactattaagaaaaacggaaagactttcttttttatagataaattagaattcaaacctaaacttaccagcgtttatgtgaaagaatttaataacactggaatttacaaatatcagcaagaaaatgctaaaaaggtaatagcagaaagcaatcaaacaacagaattaggcaagttctttattggtaaatatagtattaaaacagataaaacaattgaagattcaattcacaatgggactttgacaggaaaaatagatatagatttaagcaatagaggaaacaataataagatatatgcagatgaagattttaaccaaagctggtttaaggttaagctaaacaatgatagtttattagaaaaaaatagttacaaacttttaattgatgataaagatgttgattataattccaaaaagacatatggaaagtattacaatccaactgaattaagtgtatatgcgattggaaaattagagggtaaagagtttaaaactaacagaataaatataagacgtaattatgataataaacctcaaaatttaaaattaagttttaaggaatctcaaataagagattatgagagtaaaagtaaaaaggttaaagaaaaagctaaaagctatattaaagaatatacgaaagagttaaacaaagcatataaaaagaaagattataaatatatatctgactacgttaaaaataactctcaattagaaaaacaactaaaaaaacaggttaagtctaaatcaaaagttaaatttaaagatgttaagataaacaacgttaaacgtgataaaaacaaaatatatattgagttaagtaaaaccaacaatggtaatgtgtttcaaacgaaatataccttagattacgataatgtatcaaatgaatttctagtagaagattcacatgataattaa

SEQ ID NO: 410449 - DNA, 639 bp, Staphylococcus aureus
atgtctaaacaattttttacagtagaagaaaattataaagaacgcttttaccaattacctaaagtattttttactaatcctaattataaagatttatcgaatgacgctaaaattgcttacgcaatattgagagatcgtttacaattatctattaaaaataactggatagatacagaaggtaacatatatttcatttatacagttgctgatttagaagtgatattaaattgtgggaacaaaaaaatcactaaaattaaaaaagaattagaaaatgtagatttactaatccaaaaaaggcagggtttaaacaaaccaaatctactttatttattaaaaccagccataactaaaaatgatatttatgaaatagataaggctgaaaatgaagttgaggccttacaagacaaggaagtgtcaaaaggacacgtccagaaatgtcaaaaggacacgtctagaaatgtcaaaaggacacgtctagaaatgtcaaaaggacacacaaatgatactgattttattgatactgattttattgatactgaaagtaatgatatgaataatatgaatgatacaaatcaacattcaaatcattcaaatcacttttcaaatattcatgataaagaatctcttaaatatatataa

SEQ ID NO: 410450 - DNA, 261 bp, Staphylococcus aureus
atgaatgaataccgtatacaaaaactatatagatacatttgtttagaatttaaaaaccagcgtcaactcataggcaagcgacaagaagaagttgcatttgatttgagtgtgactgctggtcatctttcacgtatcgagaatggtaaaaaacctagaatagcattacatacatttttagtaatgtctgaatactatggtgtagactttcataaggtagttaaaaatgcagaagaaaaaatggaattggatgaaggaatatag

SEQ ID NO: 410451 - DNA, 330 bp, Staphylococcus aureus
atggataagaaagaaactaaacatcttctgaaaataaaaaaagaagattaccctcaaatcttcgattttttagaaaatgttcctagaggtactaaaacagcccacataagagaggcattgaggcgctatattgaagaaataggggaaaaccctccaataccttcaaaagaacacacagcgcccttaaaagagcatacagaacctattaaacgtaataaagaaagttttaaagacgcaatggaacgtaaggatcaattaaaacaagctgaaatgcctaaaatagaagaaaaagatgaagaaatggtagatattagtattgatgacctttaa

SEQ ID NO: 410452 - DNA, 1041 bp, Staphylococcus aureus
atgagtaacgtatatgtaatggctttagattttggtaatggatttgtaaaagggaagattaatgatgaaaaatttgtaatcccttcaagaatcggaagaaaaactaatgaaaacaatcaattaaaaggatttgttgataataaattagatgtatcagaatttattatcaatgggaacaatgatgaagtattactatttggtaatgatttagataaaactacaaatactggtaaagatactgcctcaacaaatgatagatatgatattaaatctttcaaagatttggttgaatgttctataggattattagcaagagaagtaccagaagaagttgtcaacgttgtaattgctactggtatgccaagtaatgaaataggaactgataaacaagctaagtttgaaaaacttttaaataaaagtcgtttaattgaaattgacggtatcgctaaaacaattaatgttaaaggcgttaagatagtagctcaacctatgggaactttacttgatcttaatatggaaaatggaaaagtattcaaagcatttacagaaggcaagtacagtgttcttgactttggtagtggtactacaattattgatacttatcaaaatatgaaacgtgtagaggaagaaagttttgttataaacaaaggtactattgatttttataaacgaattgctagtcacgtatctaaaaaatcagaaggtgcctcaatcacaccacgtatgattgaaaaaggattagaatacaagcaatgtaaacttaatcaaaaaacagttattgactttaaagatgaattttataaggaacaggatagtttgatagaagaagttatgagtaactttgaaatcactgtaggtaatataaattcaattgacagaattattgttactggtggtggtgcaaacattcattttgattcattaagtcattattattcagatgtgttcgagaaagcagatgatagccagtttagtaatgttcgtggatatgaaaaattgggggaattgttaaaaaacaaagtagagcaagaaagtaaataa

SEQ ID NO: 410453 - DNA, 234 bp, Staphylococcus aureus
atgattttattatcaacagctggcgaaaatgctgttcatattaaccctatttttagattttttctatattttattatgtgtgttcctatgacagttgctttatgtacaatattccttaaatttatctcaatttttattcttccatggaaagtatgtttgtatattggtattgctttaggtattattgttactatttttcttttggttataacaattggtatagaaatgacataa

SEQ ID NO: 410454 - DNA, 1185 bp, Staphylococcus aureus
atggccaaagatttaaaaatttatgtaacacctataaatatgtataaggaaaatgaaagactatatgatttaaaacaaaaaacttcattaatcactgatgatgaagatagattaaataaaattgaggatatagaggatagacagaaaaaacttgaatctataaatgaggtatttgaaaaacaagctggaattttctttgataaaaattatcccgatcaatcattaaactatagtgatgatgaaaaaatctttatcacacgcactatattaaatgatagagatgttttaccagctaataatgaactagaggatatagttaaagagaaacgcataaaagaggctcaaataagccttaatacagttttaggtaacagagatataagtttagaatctattgaaaaagaatcgaatttctttgccgataaactttcaaatattctcgaaaaaaataacttgtcttttgatgatgtgttagagaataaacatgaaggtatggaagatagtttgaaaatagattattatactaacaaattagaagtttttagaaatgctgaaaatatactagaagattattatgatgtacaaataaaggaattatttacagatgatgaagattataaagcttttaatgaagtaactgacattaaagaaaaacaacaattaattgattttaaaacttatcatggtacagaaaacacaattgaaatgttagaaacaggtaattttattcctaaatacagtgatgaagatagaaaatatataactgaacaagttaagttgttacaagaaaaagaatttaaacctaataaaaatcagcatgataaatttgtatttggggctattcaaaagaaattattgagtgaatatgactttgattatagtgataacaatgatttaaaacatttatatcaagaatccaatgaagtaggggacgaaataagcaaagataacattgaagagttttatgaaggtaatgatattctagtagataaagaaacttacaataattacaatagaaaacaacaagcctatggtttaataaatgctggactagattcaatgatatttaattttaatgagatatttagagaacgtatgccgaagtatataaatcatcagtacaaaggtaagaatcacagtaaacagcgccatgagttgaaaaataaaagaggtatgcacttataa

SEQ ID NO: 410455 - DNA, 1617 bp, Staphylococcus aureus
atggcttattcaaaaggaaattataaaaagaaaaaaatagattcaataatagaagaattgaataataagctagatgacttcaaaaacaatgacaaaacctataaggaatttttagatactacagcgaaatttcacaactattcaattaataatattattctaattgctggccaaaatccagaggctacagctgtagctggttataaagcatggaaaaataaatttgatagacaagtgcaaaaaggtgcaaaaagtatgaatataattgcccctattgtacaaaaacgaaatgtagaaattaaagatgataacggtaatatagtacgtgataataacggtaatcctaaaactgaacgaaaacccgtaattactggatatagagcgcataatgtgtttgatgtggcagatacgaaaggcaagcctttaataacagcaaaagacctaataaaaaccgaatttgaaaactctaacgactataaagacttatataatgaatttaaagattatattaatgaagaattaacacctagtgtagaggaaaaacattttcttgatgatcctactttatctaatggcgctaaaggttattatagtcctaaatctgatgaaattgtaatctctgatgatttgtcatatgatatgcgctttaaaactttaatacatgaatatgcacactctcaattacacaataatgatataggtaaaacgcaaatatctgaacatagtagatcattaaaagaaatcgaggctgaaagttctgcttatgtagtagctaattattacggtttagacactagcgattattctttaggttatttaagtggctgggggcataatataagtgatgatgaattaaaagcccacataaaaaatatacattcgttcgcaaaaactacaattgaagaaataaattcattgccagagttttctcaatatatagataaaaaattagaatcagaaatgaacaaagatgtatataaagacctttcaacaatgatagataccaatctaaaaaatggttttgataaaataactattatcaaaggtaatttagttaatgattatggacttaatgaaatttctgagaatagttatgaaaatgatgattttaaagtgaatattgattacaaaggatttaatactaataattcgcaagatcaagctaaaattgagttaattaataagcatgatgattcattgaatagagattacaacttcacgcaaacttataaccgaaatgtaattaataacaccacaactatttttgtacaagatgatgataatgaagataaaaacaaaaaatatatccatgaacgagatatagacggtaatatattagaagaaaaacataaattaagcccacaagatgaaatagtatcatttgaaaactttgtaaataaatcagttgaagaaaatggcctaaaagatacattacgccaatttgtaagtaatggtgtattaatgggctatgaattaaatgatgtttatatagattttaaaattaaaaattcagctggtattaaaaacatatcctatactgaaagtaatgaagaatttaataaagatgaacagaataaagaaattgaaaacaaacaagaagaagaaattgatatataa

SEQ ID NO: 410456 - DNA, 189 bp, Staphylococcus aureus
atgctaaaaacatatactgaaatcattggaagtgaattgccaatttatataacaaaatcagaaacaagcgaattactattttcagaagaattagataaaaatttaaaatatgaagttgctggatattatctatataatgctaaaaaagacttatacaaagaactttataaacctattagcgaggtgtag

SEQ ID NO: 410457 - DNA, 957 bp, Staphylococcus aureus
atgtataatccattcgacgaagcttatcatggcttatgcgaagagatattagaaatagggaatagacgcgatgatcgcacacataccgggacaatttccaaatttgggcatcaattgcgtttcgatttaaccaaagggtttcctttacttacaaccaaaaaggtttcttttaaattagtagcaactgaattattatggtttattaaaggagatacaaacattcaatacctacttaaatataataacaatatatggaatgaatgggcatttgaaaattatgttcagtctgatgattatcatggaccagacatgacagattttggacatcgttcccagcaagaccctgaatttaacgagcagtataaagaagaaatgaaaaaatttaaagaacgtattctaaacgatgatgcatttgctaaaaaatatggcaacttagggaatgtttatggtaaacaatggagagattgggaagataaaaatggaaatcattacgatcaattaaaatcagttatacaacaaattaaaaccaatccaaactctcgacgtcacattgtttcagcatggaatcctactgaaatcgattcaatggcattaccaccttgccacacaatgtttcaattttacgtacaagagggtaaattaaattgtcaattatatcaaagaagtgctgatatatttttaggtgttcctttcaatattgcaagttatgctttactgacacatcttgttgcaaaagaatgtggacttgaggtgggtgaattcattcatacatttggagatgcacatatttattccaatcatatggatgcaatacatacacaattatcaagagatagttatctaccacctcaattaaaaattaatacagataaatcaatttttgatattaattatgaagatttagaattgataaattatgaatcacaccctgctattaaagcacctattgcggtataa

SEQ ID NO: 410458 - DNA, 486 bp, Staphylococcus aureus
atgacattatcaataattgtcgctcacgataaacaaagagtcattgggtaccaaaatcaattaccttggcacttaccaaatgatttaaagcatattaaacaactgaccactgggaatacacttgtaatggcacggaaaacttttaattctatagggaagccattgccaaatagacgtaacgtcgtactcactaaccaagcttcatttcaccatgaaggggtagatgttataaactctcttgatgaaattaaagagttatctggtcatgtttttatatttggaggacaaacgttatacgaagcaatgattgaccaggtagatgatatgtatatcacagtaatagatggaaagtttcaaggagacacattctttccaccatacacattcgaaaactgggaagtcgaatcttcagtagaaggtcaactagatgaaaaaaatactataccgcatacattcttacatttagtgcgtagaaaagggaaatag

SEQ ID NO: 410459 - DNA, 423 bp, Staphylococcus aureus
atggctaaacaaattatcgtcacggattcaacctctgatttatcacatgaatatttaaaacaacataacattcatgttataccattaagcctgacaatcgacgggaaatcttacactgatcaagttgatatctcttcaagtgagtatatcgatcatattgaaaatgatgcagacgtcaaaacaagtcaaccacctattggtcgatttattgaaacatatgagcaattagctcaagatgacgttgaaattataagtattcatctttcgtcaggcttaagtggtacttataatactgctgttcaagcgagccatatggtagatggtaatattacagtgattgattctaaatctatttcgtttgggttaggttatcaaattaagcaaattgttgaattggttctgttgcaaagtaaaaaaatatag

SEQ ID NO: 410460 - DNA, 675 bp, Staphylococcus aureus
atgaactatttcagatataaacaatttaacaaggatgttatcactgtagccgttggctactatctaagatatgcattgagttatcgtgatatatctgaaatattaaggggacgtggtgtaaacgttcatcattcaacggtctaccgttgggttcaagaatatgccccaattttatatcaaatttggaagaaaaagcataaaaaagcttattacaaatggcgtattgatgagacgtacatcaaaataaaaggaaaatggagctatttatatcgtgccattgatgcagagggacatacattagatatttggttgcgtaagcaacgagataatcattcagcatatgcgtttatcaaacgtctcattaaacaatttggtaaacctcaaaaggtaattacagatcaggcaccttcaacgaaggtagcaatggttaaagtaattaaagcttttaaacttaaacctgactgccattgtacatcgaaatatctgaataacctcattgagcaagatcaccgtcatattaaagtaagaaagacaaggtatcaaagtatcaatacagcaaagaatactttaaaaggtattgagtgtatttacgctctatataaaaagaaccgcaggtctcttcagatctacggattttcgccatgccacgaaattagcatcatgctagcaagttaa

SEQ ID NO: 410461 - DNA, 1440 bp, Staphylococcus aureus
atgaatatagttgaaaatgaaatatgtataagaactttaatagatgatgattttcctttgatgttaaaatggttaactgatgaaagagtattagaattttatggtggtagagataaaaaatatacattagaatcattaaaaaaacattatacagagccttgggaagatgaagtttttagagtaattattgaatataacaatgttcctattggatatggacaaatatataaaatgtatgatgagttatatactgattatcattatccaaaaactgatgagatagtctatggtatggatcaatttataggagagccaaattattggagtaaaggaattggtacaagatatattaaattgatttttgaatttttgaaaaaagaaagaaatgctaatgcagttattttagaccctcataaaaataatccaagagcaataagggcataccaaaaatctggttttagaattattgaagatttgccagaacatgaattacacgagggcaaaaaagaagattgttatttaatggaatatagatatgatgataatgccacaaatgttaaggcaatgaaatatttaattgagcattactttgataatttcaaagtagatagtattgaaataatcggtagtggttatgatagtgtggcatatttagttaataatgaatacatttttaaaacaaaatttagtactaataagaaaaaaggttatgcaaaagaaaaagcaatatataattttttaaatacaaatttagaaactaatgtaaaaattcctaatattgaatattcgtatattagtgatgaattatctatactaggttataaagaaattaaaggaacttttttaacaccagaaatttattctactatgtcagaagaagaacaaaatttgttaaaacgagatattgccagttttttaagacaaatgcacggtttagattatacagatattagtgaatgtactattgataataaacaaaatgtattagaagagtatatattgttgcgtgaaactatttataatgatttaactgatatagaaaaagattatatagaaagttttatggaaagactaaatgcaacaacagtttttgagggtaaaaagtgtttatgccataatgattttagttgtaatcatctattgttagatggcaataatagattaactggaataattgattttggagattctggaattatagatgaatattgtgattttatatacttacttgaagatagtgaagaagaaataggaacaaattttggagaagatatattaagaatgtatggaaatatagatattgagaaagcaaaagaatatcaagatatagttgaagaatattatcctattgaaactattgtttatggaattaaaaatattaaacaggaatttatcgaaaatggtagaaaagaaatttataaaaggacttataaagattga

SEQ ID NO: 410462 - DNA, 393 bp, Staphylococcus aureus
atggaagaagttttaattgatgataatatggtttttgatattgataatttaaaaggatttcttaatgataccagttcatttgggtttatagctaaagaaaataataaaattataggatttgcatattgctatacacttttaagacctgatggaaaaacaatgttttatttacactcaataggaatgttacctaactatcaagacaaaggttatggttcaaaattattatcttttattaaggaatattctaaagagattggttgttctgaaatgtttttaataactgataaaggtaatcctagagcttgccatgtatatgaaaaattaggtggtaaaaatgattataaagatgaaatagtatatgtatatgattatgaaaaaggtgataaataa

SEQ ID NO: 410463 - DNA, 675 bp, Staphylococcus aureus
atgaactatttcagatataaacaatttaacaaggatgttatcactgtagcggttggctactatctaagatatgcattgagttatcgtgatatatctgaaatattaagggaacgtggtgtaaacgttcatcattcaacggtctaccgttgggttcaagaatatgctcccgttttgtatcaaatttggaagaaaaaacataaaaaagcgtattataagtggcgtgttgatgagacatatatcaaaattaaaggacagtggtgttatctgtatcgcgcgattgatgcagatggacatacattagatatttggttgcgtaagcaacgagataatcattcagcatatgcgtttatcaaacgtctcattaaacaatttggtaaacctcaaaaggtaattacagatcaggcaccttcaacgaaggtagcaatggctaaagtaattaaagcttttaaacttaaaccggactgtcattgtacatcgaaatatctgaataacctcattgagcaagatcaccgtcatattaaagtaagaaagacaaggtatcaaagtatcaatacagcaaagaatactttaaaaggtattgaatgtatttacgctctatataaaaagaaccgcaggtctcttcagatctacggattttcgccatgccacgaaattagcatcatgctagcaagttaa

SEQ ID NO: 410464 - DNA, 825 bp, Staphylococcus aureus
atgatgttaaaaatcatcttatatgcatatactcaatctgtattttctggtcgaagaatagagaaattacttcatgacagtattcgaatgatgtggttagctcaaaatcaaacaccttcttataaaactattaatcgttttagagtgaatcctaatactgatgcgttaattgaatctttatttattcagttccatagtcaatgtttaaagcaaaatcttattgataataattcaatttttattgatggtacaaaagtagaagctaatgccaatagatatacatttgtgtggaagaaaagtattcaaaatcacgaatcgaaattgaacgaaaattcaaaaacattatatcgtgacttagttgaagaaaaaataataccagagataaaagaagatggagatagcgatttaacaatagaagaaatagatttaattggtagtcatttagataaagaaatcgaagatttaaatcattctattgagaacgaagattgtgctcaaattagaaaacagacccgtaaaaaaataactgagattaagaagttcaaaaagaaatttgatgattattccgaaagaaaaaataaatatgaagaacaaaaatcgattcttaaagatagaaatagtttttctaaaactgatcatgatgcaacttttatgagaatgaaggaagaccatatgaaaaatggccaacttaagccaggatacaatttacaaatagcgacaaattctcaatttgttttatcctatgacctatttcaaaacccgacagatactagaactttaattccatttttaacaatgattcaaaataccttcggttatttgtag

SEQ ID NO: 410465 - DNA, 1407 bp, Staphylococcus aureus
atgaataatagtaattttttaaatgtagagttaataggtactaaaataataacaatggaagacttttataaaatgaaggaagaagaatttttcttaaaatctaagctacctttatatttatattccttcaactatgtagatgaatatacaatgaaattacttgatagaggaagaatatctatattaaatacgaaaacaaataaagattgtatatttgacatttcaaagtatatacatgagaatattatattcagaagagatatatttgaattaaatgatataagagatgatgatttgaagtataaaattaatggttacaatattgaggtatacttaagtggtgaattggagaaaattgtaaaacatttattcgaaaacaagtttgatgtagagtatggtttttatattttatttattaaaccaatatttgaaattgttttttcttctaactatgttaaagaagaattcaatacaaaaatcgaatcatcagaatatagagagagcttagatagttttaatgaaattttaatgaaatatctagaaaatgaaataaatttcaaagaagtatggaaaaaatatattgatgaattatttaaaaaattaaatgttcaaaaattgttaattcataaaaaaatagaaagtttaatatcctcgtatgataaaaaaatatctgatgattgtagtatgtactcaaaagtatttgaacaatataaaaaaaacgttgtattggataaagtatattactctgaagtttataaatatagtgataatttgataaaagtattctctgaagacgtttggaacataatggggtataaaaaatataatgaatattttacaaacagagatgatactacattaaaaattactaatttatatattgggcaatcttttggtacagagggtaatagaaatgtcattgatagaatagggaaaggtcatgaaaaattacaagaaattatgacttatcagccagaaaatagaaagactgtcttaatattttacaagatacagcctgacaatatttatattacaaaccaatatggtaaagaggctgtgtctcgattaaaaagaattttagagcaaagtatacctaataaagaatatattgatttatcagagatatcattaattacattttttaaaccagaatataataaacaacatgtgaatgaggagtttaattctttatcttcttcgaaaataaagaatttagccaaagaaaatgatggtattattatttatttaaattttaaggatgttaattatcaactgataagtgaaggcaatacttttttttctgcaaaaccatatttgcattgtgtgttcaataaagatattttaaatatggataaagttgatatagaaaattttttcaaaagtatagaagtcaaatacagtaaataa

SEQ ID NO: 410466 - DNA, 231 bp, Staphylococcus aureus
ttgaaaaagttatataaaaatcgttcgttttctaatttacttatgagtagaattttgataaatgctggtgatagtctctattatgtttctacaacttggatagttttacaatggacgcaaaaccctttactagttggtttaactaatactttattaatgattcctatgtgtatttcatttttatttggtcctttagtagatgccttaccattaaagaagactctattttaa

SEQ ID NO: 410467 - DNA, 918 bp, Staphylococcus aureus
atgttttgcactcaaataggatacccagctcagtctaaagctatacctttattagtaaaaaaagatcaattattagatgcaaattctgctatgagtgtcgcatatcaaggaacagatgttattatgaattcaataagtggtattattgttgcagcaatagctttttttccactatattctattaattcactaatatttctaatagcttgtttatttatgctgaatgtaaatattcctaatataactaaccctgcaagaaataatccttcttatttacaaaatttaaaagaaggtgtgctaggaattaaaaattcactcctactagttgttgcattggtaagtggtgttataaattttggactaggacttctttatacatggatacctttaaaggctgaccatttaggtggagcctattattacggtttattaatggcactattttcaataggtttaattgtaggttcattaatcacaccttatataaaaaaaatcaacttgggatatggaaaattattaatactcttaaatactatttcaggtttaatattaattttagttaactatattccgcgaaatttttttataattttgtttccagtagcttttatgacaattagtattaccaatatatccttagcttctattcaacaaaaggttattccagaacatttgcttgctagattaactacaatcataacaagtatttcagcaatttcattaccgatgggtagttttattggcggaatcctaataaaaaatcttggtattgattatactcttgtaattggtggagcattatttattattgcaagtatcattttctttatatctacaccttacagatcattgcctaaaattgaaaaaatagagcattatcatatattcggaattcagaaaattggaaacaatcattaa

SEQ ID NO: 410468 - DNA, 759 bp, Staphylococcus aureus
atgcattcaaagaaattaatgctcggtatatgtttggtattactcattatattgattgtaggttatgtcattatgacaaaaataaatagtcgaagcgcccaaattaaagacacatttaatcaaacattaaaattatatccaaccaaaaatctcgatgatttttacgataaagaaggctttcgagatcaagaatttgacaaaggagacaaaggtacttggataatcagctctgaaatgaatattcaattaaagggagaaagtttaaaatcaagaggaatgattctatatatgaatagaaatacaaaaaggacaacaggttatttttttgtaagtgaaacaaaaggaaaaacgtatgaaaaagaaaaaaaatatccagtcaaaatggaacataatcaaattatcccaacgaagccaatacaagatgacaagttgaaaaaagaaattgaaaactttaaattttttgtacaatatggcaattttaaagatattaatgattataaagatggtgacatttcatataatccaaatgtgccaagttattcggcaaaatatcaattgaggaatgatgattataatgtgcaacagttaagaaaaagatatgacataccaacgaaacaagcaccgaaaatgttattaaaaggcgatggtgatttaaaaggctcatctgtagggtctaaagagttagaatttacttttgtcgaaaataaaaaagaaaacatctatttttctgatagtattaatttcaaacctactgaatag

SEQ ID NO: 410469 - DNA, 1137 bp, Staphylococcus aureus
atgttattgataaagatatcatttaataagcttatgttatttagcaaggcaagccactctagattcatggcttgccttattttattgtatatttttaattatcgttgctggactcaaggtatttttgcgagatggacagataatccaaatatcgaagatttgattcaagcacaacaagaacaccctctgttcgatgatttttggaaacagcgtcaagtgccattatcacaaattaaaacacctctactaacatgtgccagttggtctacacaaggtttgcacaaccgtggctcttttgaaggatttaaacaagctgcatctgaagaaaaatggctatatgtgcatggacgtaaagaatgggaaagttactacgctagagaaaatctcgaacgccaaaaatcattctttgatttttaccttaaagaagaaaatagcgattggaaagatacgcctcatgtcatttatgaagttagagatcaattttataaaggcgaattcaaatcagcgttccctttacctaacacagaatatacaccattgtatttgaatgctgaaaatcacacattgaatcatgcaaagattagtagcgcgcatgtcgcacaatatgactctgaagataaacgacaagatgtaagttttaaatatacgtttgacaaagatactgagttagttggaaacatgaacttaaaactatgggtaagcactacagactcagacgatatggatttatttgcaggtattaaaaagttagatcgtcgtggtaatgaagttaacttccctgattttaatcatattgaaaatggtcaagtagctactggttggttacgcgtatcacatcgtgaattagatcaagaaaaatccacaatcgcgcaaccttggcataaacatgaaacagaattaaagttgtcacaagatgagattgtacctgttgaaatcgaattgttaccttcaggcacgctatttaaacaaggcgaaacattggaagttgttgtaaaaggtagtgaaattgtaattggtaatagtacccctggcatgaaaacacgttatgaacatgaagaaaccgtaaataaaggcatgcacatgatttatactggtggtaaatatgattcacaattaatcattcctatcgttaattga

SEQ ID NO: 410470 - DNA, 1077 bp, Staphylococcus aureus
atgacaaaaatttttaaaatatcatttttgattttgttagtagtaattgtttctagttattatggtgaaagttttgtcttagctgataataatcctatcgtcaattcagaaaatggtagtgataataattttgaatcaggaacaattgaacgtaatcaaaatgagctttatgaagtaggtgattatagtacgcccttaactgagcgagttttcggtaaagatcaaagaacggttgttaataatattttacaaagaccttataagcagactgtattattaaatatgacgttttcaaataaccgtgtatataaaggcaccggtactatgattggtaaggacattgtattgacagcggctcataatgtctattctaaagacgataagggttgggctaaaaagattgatgtctatgctggagtaaatgggcaaacatatacaataggaaaggccttttcgcataaattttttgtatctaaatcttggattaataatgctcctacaaaagaagatatagcaattattaagttaaatagtaatttaggaaataaaacaggttacttaactttaaacacacgcattagcaaaggtgaaaatattgaaatttctggatttccaggagacaagtcagacaacagacaatataaaggtaaagggaaattagaaagttttgatgagaatgaaatgtattatacggtagacacattttcaggacaaagtggtagtgcgataagagattcaaaaaacaatatcatcggagtacatgcatacggcagatataatcataattcaggcgtgagaataaatgatttaaaattagattacataaattattggataggtaagtacagaagtcatccatataataagaaagtgaaagtaattaaaagtaagtatatatattggaaaaacattgaaattacaaaaaagggtgataataaattaattaaaaaagataaagcgtacacagctaaactctattacaatattccaaatgggtataaatattactctttatacgacgaaaaaaataaatggatgggttactttaatagcaatgatattaaggtagtaaaatag

SEQ ID NO: 410471 - DNA, 210 bp, Staphylococcus aureus
atgaaaaagattagacttgaactcgtatatttacgtgctattatatgtgcaattattattatcacacatttacttacacaaattactttaaaacatgaaaatatggagggagtatccttagtattacaattttacattcgtaatattgtgatttttggtacaccttgctttattatcttgtcacagttactgacaaccttgaattactaa

SEQ ID NO: 410472 - DNA, 843 bp, Staphylococcus aureus
atgaataatagtaaaattatttctaaagttttattgtctttatctctatttactgtaggagctagtgcatttgttattcaagacgaactgatgcaaaaaaaccatgcaaaagcagaagtttcagcagaagaaataaaaaaacatgaagagaaatggaataagtactatggtgtcaatgcatttaatttaccaaaagagctttttagtaaagttgatgaaaaagatagacaaaagtatccatataatactataggtaatgtttttgtaaaaggacaaacaagtgcaactggtgtgttaattggaaaaaatacagttctaacaaatagacatatcgctaaatttgctaatggagatccatctaaagtatcttttagaccttctataaatacagatgataacggtaatactgaaacaccatatggagagtatgaagtcaaagaaatattacaagaaccatttggtgcaggtgttgatttagcattaatcagattaaaaccagatcaaaacggtgtttcattaggcgataaaatatcgccagcaaaaatagggacatctaatgatttaaaagatggagacaaactcgaattaataggctatccattcgatcataaagttaaccaaatgcacagaagtgaaattgagttaacaactttatcaagaggattaagatactatggatttacagttccgggaaattctggatcaggtatatttaattcaaatggagaattagttggtatacattctagcaaagtgtctcatcttgatagagagcatcaaataaattatggtgttggtattgggaattatgtcaagcgcattataaacgagaaaaatgagtaa

SEQ ID NO: 410473 - DNA, 588 bp, Staphylococcus aureus
atgaaagagattgttattgcatcgaataatcaagggaaaataaatgactttaaagtaatatttccagattaccacgtaataggtatttcagaactaataccagattttgatgtggaagaaacaggatcaacatttgaagaaaatgctatattaaaatcagaagctgctgcaaaagcattgaataaaacggtcatagctgatgacagtggactagaagtttttgcattaaatggtgagccaggtatatactctgcacgttatgctggtgaaaataaaagcgatgaagcaaatattgaaaaattattaaataagcttggtaatacaactgatcgtcgtgcgcaatttgtttgtgtcataagtatgagtggccctgatatggaaacaaaagtatttaaaggtactatttcaggtgaaattgcagatggaaaatatggcgaaaatggtttcggatatgatccgatattttatgtaccgaaattagataaaactatggctcaactttcaaaagaacaaaaagggaaaattagtcatagacgaaatgcgattaatttacttcaagcttttcttgaaggtgataaaaatgtctaa

SEQ ID NO: 410474 - DNA, 498 bp, Staphylococcus aureus
atgaaaaataaattgatagcaaaatctttattaacaatagcggcaattggtattactacaactacaattgcgtcaacagcagatgcgagcgaaggatacggtccaagagaaaagaaaccagtgagtattaatcacaatatcgtagagtacaatgatggtacttttaaatatcaatctagaccaaaatttaactcaacacctaaatatattaaattcaaacatgactataatattttagaatttaacgatggtacattcgaatatggtgcacgtccacaatttaataaaccagcagcgaaaactgatgcaactattaaaaaagaacaaaaattgattcaagctcaaaatcttgtgagagaatttgaaaaaacacatactgtcagtgcacacagaaaagcacaaaaggcagtcaacttagtttcgtttgaatacaaagttaagaaaatggtcttacaagagcgaattgataatgtattaaaacaaggattagtgagataa

SEQ ID NO: 410475 - DNA, 288 bp, Staphylococcus aureus
atgggtgtacatcaatattttaaaagattatcagatatggaaagacttataagattacctggaaaatttaaatattttgaacacaatgttgcagcacactcctttaaagtaactaaaattgcacaatatctagcaacagttgaagaatatcatggacgaaagattaattggaaaagcttatatgaaaaagcattaaatcatgatttcgccgaagtgtttactggtgatataaaaacacctgttaaatatgcgagtagtgaattaaaaaaaattattttcgcaagttga

SEQ ID NO: 410476 - DNA, 417 bp, Staphylococcus aureus
ttgggggagtttgaagttaaatatttaacaggatttattttaatattattgttagaaggaatttttacaaattcagcaagtgcaatcgaatattcagacttacatcataaaagtaaactaaattcaaagcgtctatataatgctaaggtgtcatttgctaatccaactgatcttgaaaataaaaacacaaacgatagactgttgaagcatgatttgttatttcatgacatgttcgtaaatgttgcttcgaaaaaggattttaaagttgaattcgaaaatgaggcactttcaaagaaatttataaataagaatatcgatatatatgctggaagctatagctatgaatgtcatgggggagcaaccaataaaacgcaatgtagttatggtggtgttactttaagtgacaataataaataa

SEQ ID NO: 410477 - DNA, 2496 bp, Staphylococcus aureus
atgaatttaaaagcaccgtatgcaggtttaagagataatttgttattaacgaaaactggcgaagtttgggcgtattatcgtgttcgttctgagtctatatcaacagcaaattatgatgcaaaagaagaatcaaaaaagcgtatgcgttattttttagagtcgattaaaggttatcaagattttcattttgaaatgtatgaccacgatttagatttgcgaaataaatttaaagaaattagtaaagattttgatgatgaagcttttaatgtagctgaatattattcaaaagaaactattgacgtattagaacaagaattacaaatgattacgcataattcttttgttatgggtgttaaaatacgtgaattagctgacgatgcagttacacttaaagagattttaaaaagtacattatcagatacggctgagcgtattgtttcgaattttggttttgatgtgaatttagacgataaaattttagataagtataaaacatttgaacgagatttggctgatagttttctaggtattggaggcgagcgtttaactgagaatgaattggcttatattattagaaagccttttatttcaaatgcaacacatgacgtacaggaagaatcttcaagaagagctattacagatatttataatgcagtaattgaccctactcgcttgagtgttttagaagttgaaaatgataacgagaaattttatacaacaacagttgttgttgatgattttccgttagatatggaatatacacatttatttgagaaagctcaaaatatgccttttccggttgaatgccatgtaaaagcaaaaatcattaataatgagaaagttaagaaaaaatttgaccgtgcgaaaataaatcataaacaacaagcaaaagaaaagcaagatactggcgacagtgcttcggaagatgttcaagataatttgtttgtattgaatcaaatggaacgagaagtgactggctcaggtgtatttattgagtgggtatttatgtttgtaattaaaagtgatgattatagagattgtaaacgtaaagcaaagcgtttgatgaaacgattaaaggaaactcaaatatatgcagttaatccattagctgaccagttacaattgttttatcaatgtttacatggtaatgatttatttattaataagtattggttacaaaaaacaacggcaacaggtatagcagagaatttatttggtgtgtctcaaagtttgggaacaaaaacgggtttttatatagggcgtattgataaatttatacgttctgtttcacgtgaggaagctgttgcaagttcaagggatataattttatttagtttattgttggcagcaaaaggtattaagggggctgtcagtgatagtccgcatgttttaattactggtcaaactggtaaaggtaaatcatttttagcaaaactattgtggatttatacatcattctttaaaggtcaaatgttgtactgggatccaaaatctgagtttgcagaatggtttgatagagtaacagaaagtgaagaaatgcaacaaaagtatcccctatttattaatcatttaaaaacatttaaatatgtaacattgaattatgaagattcaaccaattatggttatttagaccctattgtatttttagatggtattgaagccaatgaaatgttgaaatcggtgtttgatgaaattaaatcttttgaaaattatcatcatattgaaacggcaatttatcaagctatttctgatactgttgaagaacgcgaaaatggcaaaaaagttggttcattaaatgtaattgaaaaattacagaataatgaagatgagcatgtaaaaaatgcaggcgatttattatttgaaaaaacgcaaaacaatattttaaaacttgtttttagtgatggtacgaatccagctttaaatattcaagaaaaagcaactattttacaggttaaaggtttagatatgcctaaagcagatgatgatacatcaagttattcaacaagtgagaaaaatgggattacattaatgttattaattggtaagtttttagagaaattcggttctcgtagagatgttcaaacgactatatttattgatgagggttgggcttttagtgcttcaagacaaggtaaaaaagttggtaagcgtataaaaagaacgggacgttctgagaataattcacttgtatttattacacaatcggtaaaagataaagtagatgatgatggtggtaactttggttgtcattttgcatttgatgaaaaagatgaacgtgaggatattttaaaatctttaggcttagaatattcaaaagaatctcctgaaaatatggagatgttgaaagatttaaagaaaggtcaatgtatattcagtgatttttatggacgtgttggaaaaatggttgtacattgtccatttgaggaaatgactgaagcatttagaacacaagaagattctgcaagttctaaagcagaagaaaaatttgcgatgtaa

SEQ ID NO: 410478 - DNA, 366 bp, Staphylococcus aureus
atgaaaataataagcaagtacattttaacacgattttctaaaaacggaaagcattttgatattcctaaagaacaacgccgagtaattccaaaatttaaaaatcgtcgtaagatgattgtaatttgtttttactcattattagctattttgttaattcttttattagcttcttttattaatgctacaagagcaaataatgacagtaaagaagcagttaataaaacgaatatgattcaaaaaaagtatgaagataatgcgaatacagttcagtatagtcctaaattaaagttatatgctgataagtttattgatacgtatatgaatatctcgaaagattcaaaagaattggaatctagagaaaaataa

SEQ ID NO: 410479 - DNA, 321 bp, Staphylococcus aureus
atgaaaccagtattggatattaaaaaaactttaggacaattaaactttttaggtgtagatgaaaaatataaatatgaaaatggagagcgtactgataaaactgtttatgcatataaattagcgagtcaagagcaaggtgaacaaatcactgttaaaacgcctaataaagtagaattaaactatttacaagaatgcgaattagttgaaccagacgttaaaatgtatgttcaaatgtcaggcgattttggaactatcgcatatagctggaatgcagaagatattaaagtagttggttctaatagtgcacttaaacaaaaataa

SEQ ID NO: 410480 - DNA, 285 bp, Staphylococcus aureus
atgactgagtttacacctttttttgatggttcaaatcaattaaattatcttaaatttgtaattttaagatttcatggtatttctaaaagaaaaatttgtaaaatgtataattttgcatattttcgtatattagaagtttgtgaaatggcaaaaaagaatgattatcgatttacttataaggattataaatttttaaaacaatatggtgtgtctaatacatttatttgtaagatgtatcatatttcaattgaagacttagaattttttgaggtgatgaaccgatag

SEQ ID NO: 410481 - DNA, 774 bp, Staphylococcus aureus
ttggaatggcatattggcgcgaatataatgtgggtagattgttcatattacgtaattgaaaaatcaaatttaaatagattggggctaaaaattatgaaatttaaagcgatagcaaaagcaagtttagcattgggaatgttagcaacaggtgtaataacgtcgaatgtacaatcagtacaagcgaaaacagaagccaaacaacaaagtgaatcagagttgaaacactactataataaaccatttttcgagcgtaaaaatgtgactggatatggatttactgataagggtcagcactatttagaagtcacagtagggcaacagcattctctaatcactttacttggatctgataaagataaatataataaagatgtaaacccaaatttagatgtatttgtcgttagagaaggtgacagtagacaagcaacgaattattcaattggtggcgtaacgaaaactaatagcggacagtactatgactatgttaatgttacacttctagaagtgaaaaacaggaataaagatccacaaagtagcatttattacattcctaaagaagacatatcactaaaagaacttgattttaaattaagaaagcaattaattagtcaaagtggcttgtattcaaatggtcttaaacaaggtcaaattacaattacaatgaatgatggcacaacacatacaatcgatttaagtcaaaaacttgaaaaagaacgtatgggcgagtctatcgatggcagacaaatacaaaaaattctagtagaaatgaaataa

SEQ ID NO: 410482 - DNA, 846 bp, Staphylococcus aureus
atgagatcagacaatgatattattaatacaattttaagtgttgccaaaaataatgaaaatataagactagtatgtatgaatgggtctagagtcaataataaagttgattatgatcagtaccaagactttgatattgcttatattgttaatgatttaaaagaactaacacataatttgtcctggatcaataaattcggaaacattataatgatgcagttgccagataatcaggatttatatgaaaatcaatcagtcgatagttttcatatcttaatgctatttgatgattataaaagaatagatttgactttaatcactaaaaagtatctatcagagtatttgagtagcgattcattattaaaaattttattagataaagataatgtagttgataataatttttcgccagacgattcaaaatactggttgaaagaaccatatcaaaaattatttgatgaatgtataaacgagttttattgggtttctacatacgtgatgaaaggattatggagaaatcagttactgtatgcttttgaccatttaaatatttgtagggaaatgttacttctaatgcttgcatgggacaaaggacatctattagattataaagtaaattttggtaagaattataagtatttaacaaatcacatgtctaaatctgaagaaaacaatcttatttcaacataccccactttaaatagtagtgagattaaaaaatctttatataaaatgattatattctttgatgatattaccaaatcagttagtgataagtgtgacttaatttacgatggaaagcaatatttagaagtgaaaaagtatataggatttgactatattaattag

SEQ ID NO: 410483 - DNA, 753 bp, Staphylococcus aureus
ttgaaaaactggattttctcatttattttagtaagtagtatattggtatattttacaattgagaaaaataataaagagattaatgtcgcaattttagatagtggggtcaatactgagcacatcaaacaaaatataacaacaataaacttttctgctgataaacatacaaaagatagtcataatcacggtactgcaatcagtaatttagtaatccagaacattactaaagcaaatctctatcatttaaaagtattagataataatggcgaaagtacaccctctaatgttgaacaggctattgattggtgtattaaacacaacgtagatattgtgaatataagctttgggtttcctaaatataattacaaaatttctaaaaagttagataaattaattgaaaatggaacaattgttatcgcttcttctggcaacaatttaggcggaaaaagtgacttcccagcttcaaaatcaaatattatatctgttggtggtttaagcaaagatttcaaaatatcgagatatagttcttcaggaaaaatagacatatataatttaagcgaaaatatagagtccattaataatcaaggaaaaagagaattatttagcggaaattctttcgccacagctttaaccacaaatgaaattatcaaaatgaagcagtcaaataagaaattaaattcatataccttaaattcttattctaataatttcaaagatttcaaaataaaagtcacaaatggagatagtaaatga

SEQ ID NO: 410484 - DNA, 1332 bp, Staphylococcus aureus
atgaagaagaaactaacatttaaagaaaacatgtttataggttctatgttatttggtttattctttggtgccggcaatcttatcttcccaatacacttgggtcaagctgctggttctaacgtttttatcgctaacttaggatttttaattacagcaattggcttaccatttctaggtatcattgctattggcatttcaaagacatctggtttatttgaaattgcatcgcgtgttaataaaacatatgcttacattttcacgattgccttatatctagttatcggaccatttttcgccttacctagactggcaacgacatcatttgaaattgcattttcgccatttttatcaccaaagcaaatcactttatatttatttatttttagcttcgtcttctttgtgattgcatggttttttgcgagaaagccatcaagaattttagaatatatcggtaaatttttaaatccggtattcttagtattattagcaattattttattatttgcttttatccatccattaggtggcatatctgatgcacctattagtaaacaatatcaatcacatgccttatttaacggctttttagatggatacaataccttagatgcgctagcgtcattggcatttggtattatcattgttgcaacgattaaaaagttaggtatcgaaaatccaactgatatcgctaaagaaacaattaagtctggtactatcagtatcattatgatggggatcatttataccctactagcaatcatgggtacattaagtattggtcatttcaaacttagtgaaaatggtggtattgccttagcgcaaattactcaatactacttaggtaactacggtatcgtcctgttgtcacttatcgttatggttgcttgtttaaaaacagccatcggtttgattacggcattttcagaaacattcgaacaccttttccctaaaatgaattacctagcgattgcaacagttgtaagctttatttcgttcttattcgcgaatgttggtttaactaagattattatgtactcagtcccagtgttaatgttcttatatccattagcaattgccttgattgtactaacattatttagtagcaaattccatcattcaaaacttatttatcaatgtaccattttctttacaatgattgctgcattagtagatggattaaaagctagtccagagttcatttcaagcacatcattctcacaaactttgattaatttcagccaaaaatatttaccattatcagacattggtatgggctgggttgttctcagtttgattggtttcattatcggcttcattatttataaaatttaa

SEQ ID NO: 410485 - DNA, 684 bp, Staphylococcus aureus
atgttaactaactctgaagaagcttatgctgatgtaggtgttcaaaatttaaggaattattatgggagctatgaatttacagatttgaaaaatcaaagtgataaaaacaatcctcaaagtcatcaattagaatatgaagttgaaggtaaagcactttattcacaactttcaagtgaacatgatgttaaaagacttaaatcaaaaaaagttgatatttttggaattccctatactggtatcacacaaaacgttgaatatatatatggtggaataactttatctaatgattacttagataatgctagaaatattccgataaatctttggataaatggtcaacacaaaacaatttctactgatagagtatccacaaataaaaaacaagtaaccgctcaagaaattgatgttaaattacgaagatatcttcaggaagaatataatatatatggtcataataaaacaaataaagggcgagaatatggaaacgaatctaagtttaactctggatttgataaaggaaatgtaatttttcatttaaacaatggtactcaattttcgtatgatcttttctatactggtcatggtcaacctgaagactttcttaaagtttataatgataacaaaacaattgattcagaaaattttcatttagatgtagatctctctctttctaaaaccatttaa

SEQ ID NO: 410486 - DNA, 753 bp, Staphylococcus aureus
atgaaactattctttatatttaacttcattctaaatactattatgtctcaaacagactattctgatccaacgtcaaaccaactaaacaaaacaagtcaatatgaaggtttaatgtataatatgaaggcgctctatgaatcagatcctgtatcttttgaaaagataaaatcatatgatcaatttttatcttttgacttgatttatttttatcaaactttacaatataacagaattaaaaccgaattaaccaatgatctttcaaattattataaagataaagacgtagatttatttggagtaaagtactttgtgaattgttatttctcagataataaagacataaaagaaaattcaccaagtaacgatagggtttgtatgtatggtggtgtcacagagcatgaaggtaatagaactaaactgtttggttatacgatagtagtttctgtatatatcgacaatagaaatagtcgctcatttaccttatcaacaaataaagatcatattacagctcaagaattagattataacgttagaaatcagttaattaaagatgaacaattatatgaatttgaaagttctcgttttgaaacaggctatattaaatttattgaaaacggtaaagctgtattttggtatgatctaatgccacccccaaattttacgcagagtaaatatctaatgatttataaagataataaaactttgttatcttccaaaactgcaattgaagttcatttaacaaagaaaaaataa

SEQ ID NO: 410487 - DNA, 201 bp, Staphylococcus aureus
ttgaaagttattgagaaagttcattatgaagatattttagaaccaaaaatagttcgattatttcagccatttataaaggacaaaatggatcaactttttattacttctgaacattttgctattgacatagacaagctattatttcaacttaatttaaaagttaaatatattaaaatagagggtaattttcgggttatttaa

SEQ ID NO: 410488 - DNA, 1086 bp, Staphylococcus aureus
ttgggtttaaataaagaagaattagatagcggaaatgctattcctaaaaataaattattaataataaattatttaatagatactgttgaaaaagaagctagagaaaagaaaatagcagtatcaaggttattaaatagagcaagagaaattgaagattttattattcctttaatagataattatgaacagaataatgatttaagtaatgttaatgattcggtgactaaaacaattaataaaatagaaaaagaagtatctaataataaggtgaaaaaggaagaaataaaggaatttaaccagcaaattgataattctaaaagtcaaaaggtagatgtggaaaacgagaaagaaacaataaagatagaggttaatagagaatctttaattatttccgaaaaagacaatgttaatctaatggaaaatataaaaactaaaattgagggagataaatatattgaatttaagagtgacgaattaaatatagaagattataagatagtttcacctaatataccaggaaaatatagcttaaatatatttttatggaagaataataagaaaagtatattaattgattcgagaactataagtatcgagattaaagagaagaatagagaagtaagaagcgaaaaatgtctttcgaataaattttataataaatattatgagaaaatagaatgttttgatgcggttgaattaaataaattaatttactttttaagtaaagaaaatattaatggagaatacagtgttttaatcaaaatagctgttagaatgtttttagaatactcatttaaatattatgctttacaggctatgaacatgagcgaagctgaaatggaattaaaggataaaaatttagaaggatttcttaatagcatcttagaaaagttagaaaaaaataataaaaatgaattttcgagaagtattagtaaagctagaaaagatgcaacgaaaaagttaggaatactacaaaaaagtattcattatccatatgtaaatatttcaatagatgatgtgaaatcgataattaaaaatttagataaacatttaaatcatatttatgattattttgtttcaaaataa

SEQ ID NO: 410489 - DNA, 510 bp, Staphylococcus aureus
atggaaactattcaaaatattaatgttgaaaatatacttttatatactgaaaatcctagacatgaagttacattaaatcaaagagaaaccttagacaaactgatatctaaagttggctcgagtcaaatgtataatttattagaagatatttatttaaatggacttataggggctaatttaccggttttagtttttgatagcaaaatagatgaatatattgtgtacgagggaaatagaagaattagttgtattaaaattattaataatcctaatatattaaaagatatcgacgagaaattaatgaagaaagttttgaaattaaaaaaagatgaaaagcataataaaattgatgaaattaaatgtttattaaccactaaagagcgtgcttactatataatggaaataatacgctccggagagaatcaaggtaaaggtgtgaaacaatggaattcaaaggaaaagcaagaattctcaaaaagaaggaaaaaaaggttaatattggttttataa

SEQ ID NO: 410490 - DNA, 348 bp, Staphylococcus aureus
atggatgcattggaatttatagataaagtattaatgaaaaggagaagtgtatttacattttttgacccaccatattataaaaaggggtctggattatatacaaattattatttacatgaagatcatcacaatttagctaactatattcaaagaaagttaaaaaatagaaaatggataatcacatatgataaatgtgatgaaattaagaaaatgtatgataatttagtctttaaagaaattaatttgaattattcattacaaaacaaaaagacagctattgagtatatgttttattcaaaagcaattaagtcaaaaggagctatatatggaaactattcaaaatattaa

SEQ ID NO: 410491 - DNA, 348 bp, Staphylococcus aureus
atgaatccttcaccgcttagatatcctggtggaaagtataaattattaaaaagtgtaaaaggtcttgtagaaaatagtggatgtaatacctactgtgaagtatttgctggaggttcagcattatcaatagagttgttattaagtgaggcagtaaaaaaaattataataaatgattttgattacacaatatattgcttttggtatagtatattatattatactgaagattttataaatctcattaaatctactacaatagatattgatacatggcatattcaaaaaaatataagaaaaaacttaacagattatagtattttagaaatagggttttcaacatttttttaa

SEQ ID NO: 410492 - DNA, 1266 bp, Staphylococcus aureus
atgagtaatacacaaaagaaaaatttgccagagttgagattcccagggtttgaaggcgaatgggaagaaaagaagttaggggagttttgtgagtttaataatggaataaatgctaaaaaagaacagtatggaatgggtagaaaatttataaatgttttagatatattaaacaacaatttcattacttatgaaagtataattggtaaagtttctgtacctgaaaatgtcgaaaaaaataataaagttgaatttggagatttagtgtttttaagaagttcagaaactcgagaagatgttggcttatgcaatgtgtatttagataaaaattatgcattgtatggtgggtttataattagagggaaaaaggtatcggactataatcctatatttctcaaagaagctttgaatatacctaaaaaaagatatgaaattggttcagcggctggtggtagtacaagatttaatgttagtcaagatatattaagaaaaataaatgtgaagtttccatcaattaaagagcaacaaaaaatcggtgacttatttagtaaactcgaccgacaaattgaattagaagaacaaaaacttgaattacttaaacaacagaaaaaaggctatatgcagaaaatcttctcacaggaattgcgattcaaggatgagaatggaaatgattatccagattgggaaaatgtaatgcttcaaaaagttttgaaggataaaactgaaggtataaaaagggggccttttggaggagcattaaagaaagatatctttgtagaaagcggttatgcagtttatgaacaaaggaatgcaatctatgatataagtaacttcaggtattatatagacgaaaataaatataatgaaatgctatcattttcggttcaaccaaatgatataataatgagctgctcaggtactattggaagattatcactcattcctcagaattttacaaagggaattataaaccaagcgcttattagatttagaactaaccataaaattagaagtgaattctttttgatatttatgaggagcaatcaaatgcaaagaaaaatcctagaggcaaatcctgggtcggcaataaccaatttagtgcctgtaaaagaattgaaattaatcccatttccattacctgtaaagtttgaacaggataaaattagtcaatttatacttattataaatcgacgtattgaacaatctgaaaaaaagattgaaagcctaaaaaatcgtaaacaaggatttcttcaaaagttgttcatttaa

SEQ ID NO: 410493 - DNA, 213 bp, Staphylococcus aureus
atgaaccagtttaaagaaatttataatacaatagaaaaattactaaatgataaatcgatatctaattatagaattaatcaagatactggtgtttcttatggtggtataagtgaattaagaagcgggaaaagaaaagtgaaaaatttaactttagaaacagcggaaaaactctataattatcaaaaacaattagaaataatgaatgaagattaa

SEQ ID NO: 410494 - DNA, 432 bp, Staphylococcus aureus
atgactgacgtattgatgtttggagatatagtcaatttgttaaagctaatgtcaaacaaaaacttgcggaaaatttcagaatattataaatgcagtaataagcagttgatttcatggttaaaatgccttaattttataagaaacatttgtgcgcacaattctaatgttatagatattcaattgactactgcccccattattcataatgattggaaagatgatatatttcaatttaaagatgggaattattcgagcagactagcagtggtagtttttataatccatcatttcataaaacaaattaataataaatataaaataataaaaattataaaatcaattcaaacaatagtaggtaatgacataaaaagaatcaatcagttaggttttgtggagagtaaatctattactaaactaaagaacttgtcttaa

SEQ ID NO: 410495 - DNA, 444 bp, Staphylococcus aureus
atgaaacctaaacctttgaattttcaagaacaagcgaatttattgattgagagaggcatggttataaacaatatcgataatgctataaaaaaattagaaaatataggatattataaattaaaagaatttgcacatccgttgtctaaagaaactaaaagtgaattggacaacaatattagagtttataatgatgttaaatttgatgatgtcataactagatactatcaagacaaaaatttaagaatttacttactacatgcaattgaaaaaatagaagtttctttaaaaactagaatatcatatgttttaggagaaacatatggagcctttggctacttagatttttcaaagtggtgtaataaaaatgagtattgtaagcattatttgaattaccaagaaaacagattcaaaaaaaatcttatgaaaaaaaatcaagttatctag

SEQ ID NO: 410496 - DNA, 390 bp, Staphylococcus aureus
atggaacaagttaaagattttaatgttgaagttgatgattttatgagtttaatttattcagggaattcagtatttattgatttgcttttaattatgatatttattgatattattactggagttttaaaggcattttcagaagggaagttatggagtcacaaagcaattacaggatatattaagaaaattgcttatttatgtgtggttttagtagcgaatacattagatattatttttcgattagatggtattttagtgaatagttcggtaatctttttaattattgcagaatccacgagtattattgaaaacgcagctatattgggtgtaccaattccagatgttttaaaaaagcgtttaggcgtaattgaaaatcaaaatgaaaagtaa

SEQ ID NO: 410497 - DNA, 1398 bp, Staphylococcus aureus
atggcaaatcaagatttattttttgatattactaagcaatttgaagatcaagcgaatcagcaattggttgttggtcgtgttggtgatggtgctttaaaagcggttactgttactttggttagtaatggtacacgttataatattgaaggtctatctgtcatttttgaggggattaaaccagatggaactagaattatagacaagtctggcgctactattttagatgcaaaaaacggtgaatttagatatgtatttccaaggcaagcatttagtgctgatggtgaatatgaacaagcatttttcaaattaatgcgtgatgaacaagtggatagtacactcgaatttaaaattaaaatcaagaaaaataaagttgagttgaatataaattctacggactacattactgaagtagaacaactcatagctaaattgaaacatgattttgatgcgtttgtcagtgagaaattaaatatcattgagccactagaaacaaagattaatgcatattttgatgctgctgatgctattcaaaagagtattaatgcactaaatcaagttgctttaactaagcaatggattaatgttgaagaatttaatgaatataaaaatacggttatcaatgatagagtgcatgctatccaagaccttgaaactaaatttcaacaattgaaaaatagtatgaacatatatactgaaaatgatgaacatggtatgtcatttattgatggttataatcatgcctatactagtttgaaatcaatgcaactttcccatcagaaaaaattagttgctttagaaaatttaattaattcaacatcaagatccggactacaagtaaactcaaatgttttggatgatgttaataatattagggaaagtggtatttattggtttgatagttcgactagaaacattcctgttcgaaatggtaacaattcaaatggctatattgaggcaataatgaaagacccagataatggtatgtttacaatattaggcgcggatatttcgattgaaaaatggcaaggccaactgcatcaaagatggcgttcatctcaaccaattttattatgggaaggtactgctaagaaaggtagtgttatggaactaagagataatatacacaattatatgaaattaattattaatataagtttttacaccgataaaaatgcaacgcgatttgtatcggtgccagcaaataatgaacgtatctatttgaatcaaagtggcttaaggttaacgcaagggaatttgaaaaatggtaatttggaagaaattggtattttagttcaagatgatactcatttaaatttatataaaacacaaatggcaacagataatgaaaatgcagttgattcagaagctgctattacagctgtgtatggaatttattaa

SEQ ID NO: 410498 - DNA, 1014 bp, Staphylococcus aureus
atgaaaattaacttatccccagttttcaaagaatttaaaaaggatattgaggaaaatttcaaagagataacaaatatgaatgctacaaatgttaaagggataatgaagcaagttggaacaaagattgataacaaatttgatgagttaaaaagagaagttagagcgatagtgatgccagaagaatcaccaatgcgtataacggatgagtatgtaaaagcaaaagttgatagtaaaggtgtttcgcatcgttcgctagatgagcgtattgctgccgaatatcagtattttagaaatgaaacaagagttaatgcatcagatttaacagttgtgacgtctaatggaactattgttacggattatttcagaaagtctaacaatattcatcaaataagtaatatagctgttattggggactctgttgcaagaggttcacatgcaaatacaaattttggcaatattatagctcaacgtattcaagcaaatgttcaaaattttgcaattggtggtgcgacaatggcagatgtcgatgctgacagcatatatagacaagctagaaaaatacgtaatgctgacctaattattgttcaaggtactgatgatgattggcttgtaagaaatggaattccaattggaacagataaaactaacatcaatgaattctatggtgggttttatcaaacaattcaatatttaaagaatagttttccgttggccaaaatattagttatgactgcaacacgtcaatgtccagtaaatcagaatggtgttatacgacgaaaagacactgatcataacacacttggcttaaacttagaagattatgtaaatgcacaagttattgcttgtaatgaattaaatgtaccagtatatgatgcttatcatactaatgttatcgaaccgtataatcctggatttagaaggtttaatatggttgacggattgcatccaaacgaaaagatacacgaaatatatgcatatgaactagttaaaaatttttattggtgttacggataa

SEQ ID NO: 410499 - DNA, 1686 bp, Staphylococcus aureus
ttgattaaagtaattaattatgaaggtgaagcatttatcttaccagttaaaacaatactaactgagaagttaaataatgatagtgaacttaagtttgaattttatgaaacagaggaaacgaaattagtttcacaaacaatagctaaaaaatggttgataactaatgttgtcaatgcagatgatatacgaaaatttgttgtgacaattgtgcgtagagattcaactggtaaatccgtgaaagtaagtgtaattgctaaagaaaaacaaatagatgatttaaagtcagaaatggtatttgatgatatcacgggtagttatacaccttttgaatactttaaaacgattgaaaaaaatagcaagtatcattttattattgaatcaaaagcagattcagtaagctgggaacatgcaggtaatggagactcagcgtttagtacattgaaaaagggtttagaacgctatggtatggaattttattttaatcctaataatcaggcattttatattaataagcgcgtagaggatgtagctaattactatattcataatggtatgaatgcattgaattttaagcttgaagaggatgcaaatcaatttttcacaagaattcacggctacggggactttcctgaaaatagtgcgataagagatgcgaaattaaaacttgaatatacacatccattagctgaaaatgtaggttattttgaagctcctgcaattaaagatggccgtgtgaaagatgaaaatgtgttgttggaaaagatgaaacatgtagttgacaattctttaaaacaatcactaactttagattttctatatttgaaaaatgaatactttaatcatgcagttgctcatgtaggtgatgtagttccggtgaaagataatgctctaaatatatttgataatattcgaatagttgaagtaaaaactgtacgtgatgaacaaaatgttattgtgaaacaggaagttacattgggtgactataaaaagagagataggtaccgctctcaaattaataatagtatctcaaatattgaaaaggtagaaaaattagcgactcaacaacatgtaagtaatggtgatattggattattaaaattattacttaatcaattttctgatgtaaagcaatctctgcaatttgatagtgatggaattcaaagtgtaagtggtttgaataaggttattttctcaaaaaatggcatagcgattagtcgtgatggtggtaacaacaaaataaatgcgctaactagtgaaggtataaaccctgatttaatagtaaaagcaacacatgatcaagacggcttaatgtcaaagtatgataaaaagaagttagatttaatatttaataaggaaaatacttatcttcaaattgaaaatttaaatgtgaatttaaatcagaatgatgtgattcacttgactaaacctatttcagatttaaaaaatgggcttattttagtttggaagcatttaacgacagatactttaaatcaacaatttatctcgaaaaaattatttgctaatcgcgaagtcattaagtgcatacacagtgttcctattgggcaaaatcagcatttaaataaaatagctatagtttcaaatcaaagtattgttggtatagatgaaaatgatagcgaagaattcaatactgataaagtgattttacaagatatttatgaatattaa

SEQ ID NO: 410500 - DNA, 936 bp, Staphylococcus aureus
ttggatatagaaattattaagaataatggtcagacattttatttgtctgactatcaaattattgtctctgatataaaaatacaaagcattgaaatgactgataaataccaagatttcgaaggtatacatggcaggcgattggttagtagcgtgtatcataaacgtaaaatagttgtacctgcattttttattgctgaaaataatgttgactttgcaattcaacgtgatttaatgtttcagttgttacaagatcatgaaccattttatattcgtgagcttagaaaatttgaaaaagatcaatatcgatttaaagatacaacacaatatgattatcaagaagtaaatggtcaagggacgccgatatataataagcaagctaatgtttatgtatctggtaatcaatacctggttaaactggtaaatgtaatggtaccaatacaaaagttgaataaatgtaatgttgtttttgaatttgaaacagttgaattaccatttgctgaatcatctggcaccagcatacagttgcatcataatgaaattgataattattgggattttgcattagatattgactttaatgatacatcgaagcggacgtatatttttgaaaacatcaataaaggtaaagtattttatcatggtacggttccgaataaccaatttaatatgtataaaaaagttaaaattataattgggacaagtacaaatgcatttgattggtctttgaataacagacaaacgatgtcgattaaagatattgatttagacgcaggggatgtgcttgtatatgatggacttaacattactaaaaataatgagtccattgttgaaaagacgaatatcgaactgcctgctttctatcccggctttaataatttcttatttaatcaaacagtaaaacgtgttgaatttgatatgcgattttataaaaagtag

SEQ ID NO: 410501 - DNA, 3171 bp, Staphylococcus aureus
atgagtggtagcaatggatatacagtcagtacaacgttaaaagcaaatacttctaaatttaaatcggagatagaacctgcaattaaaaaaattgaaaaattcgacaagatagtatctaaaattaaagatattgaattaaaagctaatgataaacaattacaatcaaaaatcaaacatgttgagcattcattaaatcagttagaacataaaaatcctacagttaacctcaatactgacacaaaaccagtaacatataaacttaaacgcgtaagtgctacattaagtaaactaaattcaaccaaagttgaaagtatgatagatgtaaaagatagtaattcaaatgtgaaactgcaacgtatgcagtgggcaatgagtcgtttaaatcatatgaaatcaacaggcattattgatttatcagataaactatttttaacaaaagttgcaaatgtgaaaaacacattaaatcaattgaataataaagaagtaaagacaagagtagaagtatctacttcagctagtattgcacgagtggttattttcaagaaaatgctaaaaagtattcctaataagattaaggttaaaactgatgttgatacaaatgtattaagtaaagcattagatggattaaatcaaagaacagatgtatttaataatcggatggaaaaattagcgcattcgattaaaacttttggaaccataggtggcaatataattcgtggctcactattgacatcatttacatcgttaatcccaattgttgcaagtgtaattcctatcattactttattaggaaattcaattgcagtaatcggaggtggcgtattaggactagtgggagcatttggtttagctagtgctggtgtcattggtttcgcggcaatggctaaaagcgctatatcaatgttaaatcagggattaattcagacgtcaagtgcgacgattgcttatgttaatagtttgagtgaattaaagcgcacttggcaaagtattataacgatgaattcagattcaatttttaacgcaatgtcaagtggcttacaaattttgacaaatgcattaaatcaattacggccatttattagaggtgtaagtcgatctattgaactttcaatgcaaaagtttcaatcatggattaatgtttctgatactgcaaataaagcttttaatacattgaatacagatggtattaaagtatttaatagtattttaaaagcggctggaaaatttggagatggattagtaaatatacttacgcaatttagcccattgtttgtttatgttgctaaaggtttagaaatgctttcggaaaaatttcaaatttggtcaacaaaagtatccactgctgaaggaattaatcaatttattaattttataaaagtaaacttgcctttaattggtaaaatttttgcagatacatttgtaggtatgattaatatatttaaagcgtttggatctaattcaggaacgttattatcagctatttcagaattatctggaaaatttagagtctggtctcaaaatttagcgcaatcacaagggtttaaaaatttcataacatatattaatgaaaatgcacctgtgttagtttcgttagtgagcaacatcgcaagagcgcttttgagttttatttcagcaatggcaccaatcggatcaattgtaataaatgtacttaatgctgtagcaggttttatagctcaattatttgaaatgcatccagctgtggctcaaatgattggtgtaattactatgtttagtggaatgttaatgtcactttcaccaataatcactgctttgattacatatatggtgccattaattaataaattgaatattttaaaggtggtattttcaattgtcagaactgttgcaagcatgttggtacaaggaattgctttaattgcaacggcactaagttctttaagtgcaccggtattaatcatcattggtagtattgctgctttaatagctatttttatttatttgtggaaaacaaatgaatcatttagaaataaagttattgagatttggaatatgattaaagatatatttttaacagtggttgatgcgatagtttcatttataaaaagtgtttgggggactttagtctcttggtggcaacaaaataaccaattgattatggatacagtaatgattatttggaatgaaatatctgcttatataacaacaattataaatattattgttgcgattattaaatctggttgggacatagttgttacgattattcaaaccgtttggactgtaattacgacaataatacaaacagctatttctgtagtattaaatattattacatttgttatgcaagtaattactggtaattggtcaggtgcatggcaaaccattttagatataggacgtacggtttggaacggtattgtatcaattgcaacaacaatatggaatggtttgaaaagtattttggcagcaatttggaacggtatcgttagtattgcccgtgtactttgggattatttaaaagaaaccatttttgaaaagattaaagcttcttataatattgtcagagatactgctcaacaaatttggcaggttatttcatcaaaatttcaagaagttgtttcagcagtgcgcgataaaatgagtcaaatttacaatgctataaaagataaggtgtctagttcactttcagctgtaaaaagttttacaactgatttctttaatgcgggcatggatttaataagaggattaatcaatggtgttgggaatatggcgcagtcacttgtagataaagtgaaaggtgtagtgggcagtgctattgatacagctaaaaatttattaggcattaaatcgccttcgcgtgtatttaagtcgattggggcgtatacaatgttaggattaatcattggagttaacagcgaaagttctagtgtaatcagcaatatttctaacattgcagagagaatgcaatcagcctttaatccccggttaaatgcaccagtaattggtgacgttacaggtgatttaagtcaaattggaggcgaattacgtactatggtacaacataatcacaccattgaatcaaatcctaatatgaaaacagttagaatagaaatggctattgataatgaagcattaacaagtattgttaacgatgttaatgctacaaatcactcaatatttgaattttaa

SEQ ID NO: 410502 - DNA, 384 bp, Staphylococcus aureus
atgacttatgatcgtattgttattacgtgcatgagtgagttaaaaataactcgtttagcagatattaataatatgacattaactgaattttattatcgtatgtatgcattaagttttgatgtattaaaaaaagaacatgatttatataaattagcttttgctattagagatgctgcaacaactaaaaatgttggtacagaaaagaaacctaaagaagtatatagatttaaatcagttaaagatattttagattatgaatataactataaacgtttattgcaaggcaaatcgattgtatttaaacatgaagttgaagacatttctccagagcaaaacgcattattaaaagttatagctgaaattaaccagcaagcacaacgttag

SEQ ID NO: 410503 - DNA, 345 bp, Staphylococcus aureus
atggtaacaattaaaaacggtaaatatgatttagaattgaaatttggattaggggaattgaatgcaattgatagggctttaggttatgaagtgcgtgaaattaacttaggtgaaggattagaaacattattgccaaagttacaatcaggaaatgtattagcgattgccaaaattattaaagcttgtacgagaggacaaaaaggacatcctagaaaagaagaagaattggaacatatattaacaggcgttgttgaaacatacggttcatttaaagcgtttgggaaagttttaattgaagaattgggaaacaaacctttaacccaagaccttgtgaagatgaagtaa

SEQ ID NO: 410504 - DNA, 600 bp, Staphylococcus aureus
atgtataaagacagtaaagatagaatatatttatttagaaaatgtggtcaaaaagtagatgctaccaaaatgatgtttatgactgaatttgaaaatgaacttgaaaacgactttgatattgaagatacaatggatggtagttatacaagtgaaggatcattagaaaatacactatctgcgacggctaaggcgaattatagtgatccattatgtgatgaatttgaagatgcagtccgtgacaagattgcttatgaagtatgggaaattgaaagtaaagtagaaggtaaaaatgaaaatagtggtaaatataaagcaaagtatcatcaaggccgcttcaaaaaatttaaacgtaaaggtgaaaatgactctattgaagagtatgaagtggaatttgcggtacatgataaatatcaaagaggttttgcctcaatccctagagaggttagtgacaaattagctcaagtaggatatagattccataatacgacaaaagatgattttgctgatgacggattagcaacgaaatcaattccacaaccgatttcagatgaaatgccatcgtcaagttcaatgagtaacatcgcagttgagtcacattaa

SEQ ID NO: 410505 - DNA, 396 bp, Staphylococcus aureus
atgaaacatgaatataccccaacacaactactttatgacaaagttttcgaattgttaaaaggatatggtattgacgttatagatgtaaaagacatcgctgacgaaattacatatcctttttttgttgttaataaatttaaaattgcaaaaactagttataccttacaaacttatcatggtgtacttactggagcgattcatatatggagtgaatcaaatgatttaggaaagcatgataattgtattgcttttgttgaacgattattatcctcaccaattctaattcaaaactatcaagtgagattaaaggaactattgattaatacgattgacgataattctgcggatacattgcttcttcatacaattgttaatgtagaatttgaaatattatag

SEQ ID NO: 410506 - DNA, 351 bp, Staphylococcus aureus
ttgcaagtctctggtgtagataaattattacgaaagtttagaaagatgtataaagatatcgatgatgatgtagattttatcttgaaaaacaatgctaatgagggtgtcgagatagctataaaaaatgcgcaacatgctttcgttaaaggctactggacgggtaatttagcacgtcaaattaaagcgaaaaagattgcaccgttacattatcaaattctatcaaatgcacattatagtggttacctggaatatggaacacgctttatgaataaagaaccttttattttccctacctatgtagcacttaaaaaacaagtaaatgatgattttaaaagattgttaaacagttaa

SEQ ID NO: 410507 - DNA, 306 bp, Staphylococcus aureus
atgaattataaagaaagggtcacacttttacatagatttgattcaaaatataatccaactacgaaacgaaaagaaatcataaaagatgaaataggtacatttgcatgtaatgtaaatgcattaactgcagaaaatgtgagattggaattcggggaagtgtccaaagatataaatgtcattaggttaccgactatgattgaaattgatataccaacgcacgcaataatagcagataaactttataaagtagtcaaattgaagcgctatgctcatactacatcaatatatgccaaggagcttgtctaa

SEQ ID NO: 410508 - DNA, 327 bp, Staphylococcus aureus
ttgaattttttgaagacacttaagacaagaattggtattgatgatgagcaacaagatgaacaattaaaagttattattagtaatgttgaaaaagaattattagcaatgttacctacaatcgaagatacaataccagaagaaattgagtttatagtagtggaagtttcaacaaaaaggtataaccgtataggtgctgaaggtatgacatctgaaacacaggatggtcgttctagtagttatgaattaaatgattttgatgaatataaaagtgtgttaaataatttatattttaaagatgacaaaaagggatttgtacatttttattaa

SEQ ID NO: 410509 - DNA, 474 bp, Staphylococcus aureus
atgagtacaatattgaaaatttataaagataatgaagtgatagcacaacaactagtttcgttagataacgaaaatgatcataacaatgatgtttatattaaagtacagggattaacaccggatacaaattattctgagggtgcgcttcaagctgtgtgggagattgacaatgttgaatctggcagagtaaatgtacctgagtttagaactgcttatgttccgattgaatcgttcactattaaccaacatgaaataaatctaaaagtaaatgattatacgataattaaccctgaaattagaccttataatgcgacgaatcaaggtgtgacatatactacgaaaaatttagaaatagctggcgtaaatggaaaagggtttttgattgcttatagtccaggtactactgaaatagaagtatatgcaaatgatttacctgatcaaaaggaaatctgtgttgtaaatgttagtgaataa

SEQ ID NO: 410510 - DNA, 912 bp, Staphylococcus aureus
atgacatctgaatataatctaactagagcaacagacttgggacaagtaaagtcgattgattttgcgaacaagtttggtaataacattaataaattattggaaatattaggcgtcacgaataaattaccaatgagtgttggtacaaatattaaaatttataagtatgcaattcaagaatctggagatgaccaaatctcagaaggtgatgaaattccgttaactaaagttatacgtgcagtagttgatacaattgagctaacgtttaataaatatcgcaaggctactacaattgaagcgattcaagcacatggttttgatttggctgttaacaaaacagataatgaattattacgtcatactcagaaaaaaatcagaactgattttgctagtacgttaagtaatgctgcaggtacaggtttagatagaactaaaaaagcactaaaggcaaagaatttacaaggtgctttagctaaaggtcgtgctaagttatcaacagtgttagagactgacattactccaattgcatttgttaatccagatgatacagcggaacatatagctaatggattaattgtttcaaatggctctttattcggaatgggattattaacaaattttgtaggtgtaaaaattatagaactttctgaagtgccaaagggtgaagtttggatgacggtttctgaaaatttaaatgttgcttatgctaatccaagtggacagataagtcaagcgttcaactttgcaactgacgaaacaggatttgttggtgttttacatgatattcaatcaaatcgtttaacctctgaaacagtaataatgtctgctgtgaaaattttccctgaaaatattgatgctgttgtaaaagtgaaaatgaaagatgataaagatgaaagtacagaattacccagctaa

SEQ ID NO: 410511 - DNA, 1128 bp, Staphylococcus aureus
atggcatcatttgaaaaaagaggcaataaatggcggtataaagttcaatataaagattcattgggaacaaaaaaaattataagtaaatctgggtttagaacaaaagcggaagcaaaaaaagcagctttagaagttgagttaaatattaaaaatggttataaggaaaacatgaattatacacttgaaaaatggctcgactattacttagagacttggcgaaaagataaggttaacgatagcacctataatattgaattatattcaaaaaaacgattattagacatctatgaccctaatataaacattaaaaatattacaccatcgatgcaccaaaaattcataaacactttaattcaacgtggctacagtaaatcaacgctctcaaaaacacatcatttgatgaaacgtgcaatggaacgtgctaaatatgatagaatcatttattttaatccatgtgatggtatttcattacaacataaaaatttaaaagaaaaggttaaagctaaatatttacctagcgataaaattaatctttttttagaaatggttaaaaagcgggatatttatcaatatttcttatttagaacacttatagaaacaggtatacgaatcggtgaggcaaacgcactcaattggaatgattatgacaaaaagcttaaaacattatcaattacaaagtcgtatgatcaaaaaagaaaaaaatttggcactaccaaaaataaggaaaatagaatcatatttataagtgacaaattaggaaaggaactattcaagttgagaacacttcaaaatgcaaacaaaatagcaaatagtgaattatattatactgattatgattttatgttttgtaatgaatttggagacccacttccacgttctaccacccacaatacaatgaaatatgtaacaggtaaaatattaggaaagggcaatgaactaagtatacataaattaagacatacgcatgcaacattgttactagaaagtaatgtgcccatgaaagtaattcaggagcgattaggtcataaaagtgaattcataacaagcaacatttatagtcatgtcactgagaaaatgaataatactgcaaaagaaaatttcgagaaatatatacgtgatattttttga

SEQ ID NO: 410512 - DNA, 1227 bp, Staphylococcus aureus
atgagtaatacacaaaagaaaaatgtgcctgagttgagattcccagggtttgaaggcgaatgggaagagaagcaatttgctgattttactaaaataaatcaaggattgcagattgctattaatgaacgtaaaactgaatattctccagagttgtatttttatataacaaatgaatttttaagaccaaatagtcaaactaaatattttatcgaaaatccccctcaatcagtaattgcaaataaagaagatattttaatgactagaacaggtaatactggaaaagtagtaactaatgtatttggagcgtttcataataatttttttaaaattaaatttgataaaaatctgtatgatagattgtttttagtagaggttttaaattcatctaagatacaaaataaaatactatctttagcaggatcttcgacgataccagatttaaaccatagtgatttttatagtattagttcttcttatccgctgcttagagaacagcaaaaaataggtaaattcttcagcaaacttgaccgacaaattgaactagaagaacaaaaacttgaattactaaaacaacagaaaaaaggctatatgcagaaaatcttctcgcaagaattgcgattcaaagatgagaatggaaatgattatccagagtgggaatcaaaatcaattcaagaaatatttgagaataagggtggcactgctctagaaacagaatttaattttgacggtaattataaagttataagtataggaagttattctataaatagcacttataatgatcaaaatataagagtcaataaaaataaaaaaactgaaaaatatattttatcaaaaggcgacttagcaatggtattaaatgataaaacaaaagatgggaaaattataggtagaagtatatttatagataaagataatcaatatatttataatcaaagaactgaaagattaataccatttgctgaaaatgataataaatttttatggttcttaatgaatacagatttaattagaaataaaataaaaggtatgatgcaaggagcaacccaagtttatataaattattcatctattaaattgatatctatacaattgccacttcttgaagaacaacagaaaataagaggttttctagaagtcttgtctggaataactactgaacaattgcacaagatagaccaattaaaagagaggaaaaaggcgtttttacagaaaatgtttatttga

SEQ ID NO: 410513 - DNA, 696 bp, Staphylococcus aureus
atgaaattaaaaaatattgctaaagcaagtttagcattagggattttaacaacagggatgattacaactactgctcagccagtaaaagcaagtgagcaaagcagattatcagttacttcaaaagatacacaagaattaaagagttattatagtggaactggatttaattttcaaaatgtcagtggttatagagaagaaaataaaatgaatgttattgttggacagcaacttaatgtaatttcgttacttggttcagacaaagaaagatttgacgacggaaaagattataataatctagatgtatttgtagtaagagagggatctggtaaacaggcagataatatttcaattggtggaattacaaaaacaaatgaaaacaaatataaagatactgttaaacatgtaaatatgtttatttatagaaatacaagccataatactactactgtaaaatctacattccataacatatataaagaagaaatatcgttgaaggaattagatttcaaattaagaaaacagttaattgataatcatgatctttataaaacagaacctaaagacagtaaaattaaagttacaatggaaaatggtgattattatacttttgaattgaataaaaagttacaagaacaccgcatgggtgatgtaatcgatggtactaaaataaaagaaattaatgttgaattaaactaa

SEQ ID NO: 410514 - DNA, 813 bp, Staphylococcus aureus
atgaagtataaaacagagagacgtgaagcgatgggatatttaaaaagactttcatggtacataagcgttatgattttaatagttattgtagcaggttgtggcaaaagtgacgaaacaaaagaaggttccaaagaagaacaaattaaaaagagctttgcgaaaacgttagatatgtacccaattaagaatctcgaggacttatatgacaaagaaggatatcgagatggcgaatttaaaaagggagataaggggacgtggactttactcacaagtttttcaaaaagtaacaaaccaggtgaaatagatgacgaaggtatggttttattccttaatagaaatacaaagaaggcaacaggatattattatatgagtaaagctcatgatgaatttaatgaaaaagatcaacaaaaaaaatatcatgttgaattaaaaaataataagatagtacttttggataaagtagaagattcaaagctcaaaaataaaatagaaaattttaaattctttagtcagtacgctgattttagagattttaaaaactataaaaatggaaatatatcaagtgcagataatgtaccaagtttcgatgcagaatatcaaataagtaatacggataaaaatgtaaaaaaacttagagaggtttatccaatcacaacaaaaaaatctccagtattaaaattacatatagatggtgacataaaaggaagttcaattggatataaaaatatagaatttaatttttcaaaagtaaaagacgaagaaacagctgttagagattttgtgaattttggaccatctgatggagttagctaa

SEQ ID NO: 410515 - DNA, 1113 bp, Staphylococcus aureus
atgaaaatagtagaagtaaaatctaagaatggtaccaattttatgattttagatggtaataatgaacctatagtagatgcagtaagatatttgaagtatctggatagtgttaagaaaagtttaaataccaagaaaacctatgcctatgcactaaaaaatttttttgtttacttagaaagtaaaaagatatgctataaagaagttagttttgataactttgttgattttataagatggatgaaaacaccttttgaatatgagaatgtcctctcttatcaccgaaaagaaaaaagcattagtcctaagacaattaatctgactatgactgtagtatctaatttttatgattatctctataggagtaaaaaattagatgttaatttctatgattttatgcatatggaaagtaaatactctaaaaaatataaaagtttcatgcatcacataaataaggactatagaacgttgaaaaatattttgaaagttaaagaaccaaagaaaaaaatagaagtgttaactaatgcggaggttaagaaattattagaggaagctaataatattagagataaattcttaatacaattactatatgaaaccggattacgtataggtgaggtattatcattacgtattgatgatattaaatttgactttagaaaaggccatcaaatagttttgaaaaatagatttaatgataatggtacttatttgaaaactggggaaagaaaaatatttatttcccaatcgttaattgatttatacgatgattatgtctacgaaataattgacgaactttcaatatgttctgattatctttttgtaaaaataaaggggagaaatgtaggagaagctatgaattatagtgatatatattcattatttaaaaggctaaaacataaaacatctataaatgttcatcctcatttatttcgccatacacatgcaactgttttttataatgaaactaaggatataaaacaagttcaagaaagacttggtcatagtaatatacaaacgactattaatttatatgttcatcccactgaagaagatatacgtgaagattggaataaagtaaagcatcaatttcaagtttttaataaaggggaatga

SEQ ID NO: 410516 - DNA, 474 bp, Staphylococcus aureus
atgcatttgaaactgaacgatgaagatttaaattatttagtaaatataagtaaagaaatacttgaacaatacaatattaaattagacgaaacttgtaagggagatattaacataacatcatgtaattctgaatactttttcactttaagctattttttaaagcctggaaaagcaactataaatttcagagaatgccgttacaactatagcttgttacgtttaaatcttaatgacggttttcataaaaactctaataatgagaaaataaggggaaatagaattaatatattttctgaaaatgaatttatacaaaaagctgatggcgcaacccatatgaaagcatatcctttaccttataatatatttgacgatagctctgattttgtaaaacaattatttactttgcttgaatatacaaaaactaatcataatgataatattaaaattgaaactaatctattcatgagttggtga

SEQ ID NO: 410517 - DNA, 1224 bp, Staphylococcus aureus
atgacaacttttagtgaaaaagaaaaaattcaattactagcagatattgttgaactacaaactgaaaataataatgaaatagacgtttgtaattatttaacagatttattcgacaagtatgatattaaatctgaaattttgaaagttaatgaacaccgcgccaatatcgttgcagaaatcggtaacggctcacctatactcgcattgagtggtcatatggatgttgttgatgcaggaaatcaagataattggacttatcccccttttcaactcacagaaaaagctggcaaattatacggtcgaggcacaacggatatgaaaggcggtctgatggctttggtcatcacactcattgaattaaaagaacaaaatcaattgcctcaaggaacgataagattactagctactgctggcgaagagaaagaacaagaaggtgccaaattattggctgataaaggctatttagacgatgtagatggcttaattattgctgaaccaactggatctggaatttattatgcacataaagggtctatgtcatgtaaagtaactgcaactggcaaagctgtccatagctcagttccatttattggtgacaatgcaattgatgcactgcttgaattttataatcaatttaaagaaaaatattcagagcttaaaaaacatgatactaaacatgaattagatgttgcacccatgttcaaatcattgataggaaaagaaatttctgaagaggatgcaaattatgcatctggtcttacagctgtatgttcgattataaatggcggcaaacaatttaactctgtaccagatgaagcttcacttgaatttaacgtaagaccagttcctgagtatgataacgactttatagaatcgtttttccaaaatatcattaatgatgtggatagcaataagctttcactcgatattccaagcaatcaccgacctgtaacaagcgataaaaatagcaaattaattactacgattaaagatgtagcttctagttatgtagaacaagacgatatatttgtttcggcgcttgtaggtgcaacagatgcctctagtttcttaggtgataataaggacaatgttgatttagccatttttggaccaggtaatccattaatggcacatcaaatcgatgaatatattgaaaaagatatgtatctgaaatatattgatatttttaaagaagcttccattcaatatttaaaagagaaataa

SEQ ID NO: 410518 - DNA, 618 bp, Staphylococcus aureus
ttgaaaataataacaatggaagtgaggacgatgaaagcagggattgagggtttaatacaactgattaaagaatcttttaatatcgataatgtaaagaaattaagatataaaaaacttaaattcagtaatatagcattttttagcatacttattattatattggtattattgagtataaatttaattaatgataaacctaagtttatgaaagagttgttttctcaattaataaatttttttggagtattgatagggttcaccataacaacattagtgtttttagcaggaacttttgtggatttcaagcacaatcagttaaatggttatgatgaagaagttaagattaaaatatgtaaacaaatatccgcaacatttatcttgagtatcgtaataaatttaagtatcgtattattaggattaatttataataatctattatttaacatcaggttgaatgtgtcagattatattttggatatattaaatattttaggttttgtatttgtttactctgcaattactttagcgatactattaatttttagatcgatattttttttgaaaaagtatattgacatgattataagcactataaaacagaaaaatgatgaaaaatag

SEQ ID NO: 410519 - DNA, 1113 bp, Staphylococcus aureus
atggtaaaatcatatacaataagagtttattcagttagaacaccaaagtatataaatatgaaagatattgaacgtaatgataaaggtaaagttttaaaaaatcattttgaaataagtgttatagatgagttttttaaaatcttaaaaattattcctaaagagtatcataatataaatgtagagttatcatatattgacgaaacgtgtaaaataacatttatagattatgaagtttacaataatgattatagtatacttactcttgaaacagataaatttggagaagttaaagatattaaagataatattaaaaacactaaaaataaacaattagatagtcatgagtctgtgccagaaacagttaaaattgttattactagacaacatggattaatgtatgtaacaagagataacaattctattataaataaaacaacgattaatactttttttaataaatacagatttgtgatatatgaatatataaaaaaatggaatcaaattaataaaaaatcaggtttaagaatatataaacaaccagctattaaagtagattctcttccatctacagacttttttgatgagttagataagctaattaatgtagatgagtttgcttatacttacgatccaagtggcgctaatgatacgcctgactttgaagatgtcgaaatattttcaaatacccaattacaaagaaaagattttaaagagacaaaaaaatttaaaaataaggtaaaaaaacctatagtaaacgaagtcaaaaaaatatatgagaatttaagtgacaaaggtaattatgatgaatggtatgtaaaaggagaaaatcaaaatcataaaactacggttgtaaaaccagaactagctacgagatctgaacatattcagttaaataatataaatcaaattaatattaaagaattaatagagaaaataagtgatattttagaagttaataatccatttttaggaaaagtttttgaattagtagatataagtgaaacttctataaatactgaggatagtgaactggtagaaaaaataataaatgactttcaggaaaaatttgaaaataataacaatggaagtgaggacgatgaaagcagggattga

SEQ ID NO: 410520 - DNA, 162 bp, Staphylococcus aureus
atgagtaaaacttataaaagctacctagtagcagtactgtgctttacagtcttagcaattgtacttatgccgtttctatacttcactactgcatggtcaattgcgggattcgcaagtatcgcaacattcatattttataaagaatacttttatgaagaataa

SEQ ID NO: 410521 - DNA, 753 bp, Staphylococcus aureus
atgcaagcattacaaacaaaatcgaacataggcgaaatgttcaacatacaagaaaaagaaaatggagaaatcgcaatcagcggtcgagaacttcatcaagcattagaggttaagactccatacaaaaaatggtttgaaagaatgagtgattacggatttgaagaaaatatcgattatatagtcacggacatttttgtccataacccactaggaggtcgtcagaatcaaactgaccacgcactcacactagacactgcaaaagagattgcaatgattcaacgtagtgaacctggcaaacatgcaagacaatacttcatccaagttgaaaaagcatggaatagcccagaaatgattatgcaacgtgctttaaaaattgctaacaacacaatcaatcaattagaaacaaagattgaacgtgataaaccaaaaattgtatttgcagatgcagtagctactactaagacatcaattttagttggagagttagcaaagatcattaaacaaaacggtataaacatcgggcaacgcagattgtttgagtggttacgtcaaaacggattccttattaaacgcaagggtgtggattataacatgcctacacagtattcaatggaacgtgagttattcgaaattaaagaaacatcaatcacacattcagacggtcacacatcaattagtaagacgccaaaagtaacaggcaaaggacaacaatactttgttaataagtttttaggagaaaaacaaacaacttaa

SEQ ID NO: 410522 - DNA, 219 bp, Staphylococcus aureus
atgaacgcactatacaaaacaaccctcctcaccacaatggcagttgtgacgtggaaggtttggaagattgagaagcacactagaaaacctgtgattagtatcagggcgttgagtgactatctaaacaacaaatctttaaccataccgaaagatgctgaaaattctactgaatctgctcgtcgccttttgaagttcgccgaacaaactattagcaaataa

SEQ ID NO: 410523 - DNA, 663 bp, Staphylococcus aureus; identical to SEQ ID NO: 408855

SEQ ID NO: 410524 - DNA, 198 bp, Staphylococcus aureus
atgagcaatttgattaacggaaaaataccaaatcaagcgattcaaacattaaaaatcgtaaaagatttatttggaagttcaatagttggagtatatctatttggttcagcagtaaatggtggtttacgcattaacagcgatgtagatgttctagtcgtcgtgaatcatagtttacctcaattaactcgaaaaaactaa

SEQ ID NO: 410525 - DNA, 378 bp, Staphylococcus aureus; identical to SEQ ID NO: 408858

SEQ ID NO: 410526 - DNA, 1893 bp, Staphylococcus aureus; identical to SEQ ID NO: 408859

SEQ ID NO: 410527 - DNA, 1086 bp, Staphylococcus aureus; identical to SEQ ID NO: 408860

SEQ ID NO: 410528 - DNA, 234 bp, Staphylococcus aureus
ttgaatacatggcttaatgcaaacttgaaatctattgaacaagtacgtgcatttgaaaagcaacaactggaaagcaaaaagcaaactaataaaccttatgttaaaccatcgaaagaaaaaacacccaaatggctcacagacagcacgagagaaacgaaaacgccggaagtagatgaaaaccttgagaaagacagagaagcttttattaagcgtctaaatagcaaatgggagtga

SEQ ID NO: 410529 - DNA, 219 bp, Staphylococcus aureus
atggatgcatttgataaatactatctatttgatcatgacggcaacaaaatgttttcagttacaccacattttaaagatggtcggcatttagttgttggaataaaagaaacaaaatttaatggtcgtcgttggtatttagacgattatgaattaaatacacttattgataatgaacaaatggagttaggacaccaaacaagcttatttgaatatatatga

SEQ ID NO: 410530 - DNA, 405 bp, Staphylococcus aureus
atggagatagaaattaaatttaatgaagtgtttaatgcgccgatggggtcgccccgtccacgctttcgtaaaacaggtagatttgttcaaacttacatgccaacgtcttacacaaagcataaagcgtatatacaagggcaaatgcctaagttaaatctagagcgcgcactaaaaatcgaattagacttttactttccattgcttaaatcgtggtcgaagaaaaagaaaagcgaaatggttgggcagtataaagtgactaagccggatatcgacaacttaattaaaacggtattagatgcttgtaatggccatgtatggaaagacgataatcaaattacagaaataactagctcaaagcgttatggaattgagcccaaaataatcatacgaatagaagaaatataa

SEQ ID NO: 410531 - DNA, 462 bp, Staphylococcus aureus; identical to SEQ ID NO: 408096

SEQ ID NO: 410532 - DNA, 165 bp, Staphylococcus aureus
gtggcacatatccatgtagtaaatggcacttattactttcacggtcatatcgtgccaggttggcaaggtgtgaaaaagacatttgatacagcggaagagcttgaaacatatataaagcaaagtgatttggaatatgaggaacagaagcaactaactttattttaa

SEQ ID NO: 410533 - DNA, 195 bp, Staphylococcus aureus; identical to SEQ ID NO: 409860

SEQ ID NO: 410534 - DNA, 261 bp, Staphylococcus aureus
atgtattacaaaacgggtgacgtatgtcgaaaaatatttaatgtagatggctttgattttcaattaagagttaagaagcaagcatatagtgtcgaaatagtcgttttagatcatgaaggaaattcaattgacgggctactagtttctgacaagaacgatctatacacagctttagatattttgaaacaaagtatttatgaatggattgaaaataacacagatgaacaggacaaattaatcaatttaatcatgaaatggtag

SEQ ID NO: 410535 - DNA, 276 bp, Staphylococcus aureus
gtggctagttaccaaaacaaagaagtacatcaagggacaattacagataaatataacaagagacaagataaagaagacaagttctatattgtattagacaacaaacaagtcattgaaaactccgacttattattcaaaaagaaatttgatagcgcagacatacaagctaggttaaaagtaggtgataaagtagaagttaagacgattggatatagaatacactttttaaatttatatccggtcttatacgaagcaaagaaggtagataaacaatga

SEQ ID NO: 410536 - DNA, 141 bp, Staphylococcus aureus
atgttacaaaaatttagaattgcgaaagaaaaaaataaattaaaactcaaattactaaagcatgctagttactgtttagaaagaagtaacaaccctgaattgttgcgagcagttgcagagttgttaaagaaggttaactaa

SEQ ID NO: 410537 - DNA, 183 bp, Staphylococcus aureus; identical to SEQ ID NO: 406752

SEQ ID NO: 410538 - DNA, 1224 bp, Staphylococcus aureus
atgacaacttttagtgaaaaagaaaaaattcaattactagcagatattgttgaactacaaactgaaaataataatgaaatagacgtttgtaattatttaaaagatttattcgacaagtacgatattaaatctgagattttgaaagttaatgaacaccgcgccaatatcgttgcagaaatcggtaacggctcacctatactcgcattgagtggtcatatggatgttgttgatgcaggaaatcaagataattggacttattccccttttcaactcacagaaaaagatggcaaattatatggtcgaggcacaacagatatgaaaggcggtctgatggctttggtcatcacactcattgaattaaaagaacaaaatcaattacctcaaggaacgataagattactagctactgctggcgaagagaaagaacaagaaggtgccaaattattggctgataaaggctatttagacgatgtagatggcttaattattgctgaaccaactggatctggaatttattatgcacataaagggtctatgtcatgtaaagtaactgcaactggtaaagctgtccatagctcagttccatttattggtgacaatgcaattgatacactgcttgaattttataatcaatttaaagaaaaatattcagagcttaaaaaacatgatactaaacatgaattagatgttgcacccatgtttaaatcattgataggaaaagaaatttctgaagaggatgcaaattatgcatctggtcttacagctgtatgttcgattataaatggcggcaaacaatttaactctgtaccagatgaagcttcacttgaatttaacgtaagaccagttcctgagtatgataacgactttatagaatcgtttttccaaaatatcattaataatgtggatagcaataagctttcactcgatattccaagtaatcaccgacctgtaacaagcgataaaaatagcaaattaattactacgattaaagatgtagcttctagttatgtagacaaagacgatatatttgtttcggcgcttgtaggtgcaacagatgcctctagtttcttaggtgataataaggacaatgttgatttagccatttttggaccaggtaatccattaatggcacatcaaatcgatgaatatattgaaaaagatatgtatctgaaatatattgatatttttaaagaggcttccattaaatatttaaaagagaaataa

SEQ ID NO: 410539 - DNA, 492 bp, Staphylococcus aureus
atgactttcgaagaaaaactaagtcaaatgtataacgagattgcgaatgagattagtgggatgataccagtagaatgggagcaagtatttacaatagcatatgtaactgatcaagctggagaagtcatttttaattatactaaaccaggtagtgatgaattaaattattattcagacatacctaaagattgtaatgtatcaaaagatatttttaagaattcatggtttaaagtttatcgaatgtttgatgagttaagagaaacttttaaaaaagaagggcttgaaccatggacatcatgcgaatttgactttacaagagatggcaaattgaatgtatcttttgattatattgattgggtgaatttagaatttggaccattagcaaaagaaaattattatatgtacaaaaagtttggtgttttaccagaaatggaatatgaaattaataaaattaaagaaattgagcaatatattaaaagccaagaaagttaa

SEQ ID NO: 410540 - DNA, 393 bp, Staphylococcus aureus
atgtataaaaattataacatgacccaacttacactaccaatagaaacttctgttagaattcctcaaaatgataattcgcgatatgttaatgaaattgttgaaacgatatctgatagcgaattcgatgaatttatatgtcctaataacaaaagaataggttttaaaagatatgcataccgtaatgatagatatagttttaaacgtgacttcaagctatatgaatgtgatgactgttcatcatgttctttgagacatcaatgcatgaagccaaattcgaaatccaataagaaaattatgaagaattataattgggaatactttaaaacccaaattaatcaaaagctttctgaaccagaaacgaaaaaatctatagtcaaagaaaaattgatgtag

SEQ ID NO: 410541 - DNA, 288 bp, Staphylococcus aureus
atgattatgactgtggttctggattttttatattattcactatctaaccaacaacttgcatcaaacaaaaccattacgaaccaaaaacataatcaatatcataacccaccaagagttgactatggggccccaacatggaagctgacgaaaaagtcagcttactataatgtgcaagttggggtgggccccaacatggagaatttcgaaaagaaattctacagactatgcaagttgggctggggtcccaacatggaagctgacgaaaaagtcaacttccaatatcagtag

SEQ ID NO: 410542 - DNA, 519 bp, Staphylococcus aureus
atgaataatagaaatgtgtatgatatcgaagtaagtgactataaaggcttaacttataaattagaagcatttagaggtaaagtgattttagttgttaatactgcaacagaatgtatatatagcgaacaattgaaaaaactagagactttgtttcaaaaatataaggatcgtggatttgtagtgttgagttttccgaataataattttgacaatcgacaaccaggttctaatgaagaaatcttgaaaattagtcgtgagaaatttggtgttacatttccagtgttagctaaaatatctgtgaacgggaacgatgaacatccgttatttacgcatttaaagaatgaacaaccaggaatctttgggtccccaataaaatggaatttcacaaaatttataatcgatcgacaaggcaatgtcgtaaatcgattcttgccaatggaagatccattggatatatcggcaaatgatagaaatattattgcaagaatcttcatcttaaatttaaaattgagcgcttag

SEQ ID NO: 410543 - DNA, 846 bp, Staphylococcus aureus
atgacgtttcttacagtcatgcaatttatagttaacattatcgttgtaggattcatgcttacggttattgttatcgggcttatttggttaattaaagataaaagacaatcacaacatagtgtattaaggaattatcctttattagcacgtattagatatatttcagaaaaaatgggaccggaattacgtcagtatttattttctggggataatgaagggaaacctttttcacgtaatgattataaaaatatcgttttggctggaaaatataactctcgtatgaccagcttcggtactactaaagattatcaagacggcttttacatacagaacacaatgtttccgatgcaacgtaatgagatttcagtagataatacaacattgttatcaacattcatttataaaatcgcgaatgagcgtttatttagtcgtgaagaatatcgtgtaccgacaaagattgatccgtattacttaagtgatgatcatgcaataaaattaggtgaacatttaaaacatccatttattttaaaacgtatcgtaggacaatctggtatgagttatggcgctttaggaaaaaatgccattacagctttatctaaaggtctagctaaagcgggcacttggatgaatacagatgaaggtggcttatcagaatatcatttaaaaggtaatggggatatcattttccaaattggtcccggtttatttggtgttcgtgataaagaaggtaattttagtgaaggtttatttaaagaggttgcacagttatctaacgtacgcgcatttgagctgaagttggccaaggtgctaagactcgtggtggtcatatggaagctgaaaaggtaa

SEQ ID NO: 410544 - DNA, 750 bp, Staphylococcus aureus
atggaagctgaaaaggtaaacgaagaaattgctaaaatccgaaatgttgaaccttataaaacaatcaattcacctaaccgttacgaatttattcataatgctgaagatttgattcgtttcgtcgatcagttgcagcaattaggtcaaaaaccagtaggattcaaaattgtagtaagcaaagtttcagaaattgaaacacttgtacgtacgatggtggaactagataagtatccaagctttattacgattgatggtggtgaaggtggtactggtgcaacattccaagaattacaagatggtgttggcttaccgctatttacagctctacctattgtgtctggcatgttagaaaaatatggtattcgagataaagtgaaattggcggcatctggtaagttagtaacaccagataaaattgcgattgcactaggtttaggtgcagattttgttaatattgcacgtgggatgatgattagtgtcggttgtattatgagtcaacaatgtcatatgaatacatgtcctgtaggtgttgcaacgacagatgcgaaaaaagaaaaagcattgattgttggagaaaagcaatatcgtgttacaaactatgtaacaagtttgcatgaaggcttattcaatattgcagcagctgttggcgtatcaagccctacagaaattactgctgatcatattgtatatcgaaaagtcgatggtgaattgcaaacgatacatgattataaattaaaactcattagttaa

SEQ ID NO: 410545 - DNA, 510 bp, Staphylococcus aureus
atgactaacacattacaagtaaaactattatcagaaaatgctagaatgcccgaacgaaatcataagacggatgcaggttatgacatattctcagctgaaactgtcgtacttgagccacaagaaaaggcagtgattaaaacagatgtagctgtgagcattccagagggctatgtcgggctattgactagccgtagtggtgtaagtagtaaaacacatttagtgattgaaacaggcaaaattgacgccggctatcaaggcaatctagggattaatattaagaatgacgctattgcatcgaatggttatatcacaccaggtgtttttgatattaaaggagaaatcgatttgagtgacggcataagacaatacggaacttatcaaatcaacgaaggagacaaactagctcaattggttatcgtgcctatatggacacctgaactaaagcaagtggaggaattcgagagtgtttcagaacgtggagcaaaaggcttcggaagtagcggagtgtaa

SEQ ID NO: 410546 - DNA, 249 bp, Staphylococcus aureus
atggataaccgtgaacaaatagaacaatccgttataagtgctagtgcgtataacggcaatgacacagagggattactaaaagagattgaagacgtgtataagaaagcacaagcgtttgatgaaatacttgagggtttacctaatgctatgcaagatgcactcaaagaagatatttatcttgatgaagcagtagggattatgacgagtcaagttgtctataaatatgaggaggaacaggaaaatgactaa

SEQ ID NO: 410547 - DNA, 405 bp, Staphylococcus aureus; identical to SEQ ID NO: 408853

SEQ ID NO: 410548 - DNA, 186 bp, Staphylococcus aureus
atgcaacaacaagcatatataaacgcaacgattgatataaggatatctacagaagttgaatatcatcttttcgatgatgtggataacgaaaaagatgcgctggcaaagcgcttagatgacaatccggatgaattactaaagtatgacagtataacaataagacatgcatatatagaggtggaataa

SEQ ID NO: 410549 - DNA, 144 bp, Staphylococcus aureus; identical to SEQ ID NO: 408815

SEQ ID NO: 410550 - DNA, 249 bp, Staphylococcus aureus
atgtatgagttcaacgtcaaaagaatgaaagctgaacgcattgctaaaggcatttcgatttctgatatggcaaaaaaattaggaatgacaccaggaacttattcaaaaaaagaaaacggacacattagaattaatgttgacgatttagcaaaagtaattgaagttttagaattgccacaagataagtgcggtattttttttacttatagagtttccaaaatgtcaacagaacaaaaacaaacatcttaa

SEQ ID NO: 410551 - DNA, 324 bp, Staphylococcus aureus
atgagaacttcagcagaaataggtaaattaatcaaacaactacgaaaagagaataatgtgaatttaactgattttgcaactaagataggtgtcaataaatctaccttatcccgatatgaaaacggtagcagaaaaatacctatggaggatatagctgaaattgccaatgcattgaaagttaccccagaatatttactattaaaaaatagacaaacagaaaacgaagtacaacatcgagcagctcaccttgaaggagaattgacagatgatgaatggcaaagagttttagattatgcagattatataagaagtaaacgtaagtaa

SEQ ID NO: 410552 - DNA, 1878 bp, Staphylococcus aureus
atggaagcatataaaattgaacatttaaataaatcttatgccgataagactatattcgataacctagatttatcaatttcagaaggtgaaaaaataggtttggtaggcataaatggtacagggaaaagtacgttgttaaaagtaattggtggtattgatgatgattttacagccaatgttatgcatccaaatcaatatcgaattcgatattcgtctcagaaacaggaccttaatgaagatatgacagtttttgatgcagtattaagttctgatacaacaactttacgtatcatcaagcaatatgagcaggcagtacaagcttatgcggatgatcaaagtgataaattgttcaagcgaatgatggatgcgcaagatgctatggatcaacatgatgcttgggactataacgctgaaattaaaacaatcctctcaaaactaggtatacatgatactactaaatacattaaagaattatccggcggacaacaaaaacgtgttgtacttgctaaaacattaatagaacaaccagatttattgttattagatgaacctacgaaccatttagacttcgaatcaatcagctggttgatcaattatgtgaagcaatatcctcatacagttttattcgtaacccatgatcgatattttttaaatgaagtttccactagaattattgaactaaacagaggtaagttagcgtcatatcctggtaactatgaatcttatattgaaatgcgcgctgaaagagaagtaacacttcaaaagcaacaacaaaaacaacgagctttatataaggaagaacttgcttggatgagggctggcgctaaggctcgtactacaaagcaacaagctagaattaatcgatttaatgacctagaaaatgaagttaaccagcaatataaagacgataaaggtgaattgaatcttgcttattcaagattaggtaagcaagtgttcgaattagaagacttatcaaaggctattaatgataaagtattatttgaacatctgacggaaattattcaaaaaggtgagcgtattggtgttgttgggccaaatggagctggtaaaacaacactcttaaatattttgagtggagaagaccaacaattcgaaggtaaattgaagactgggcagacggttaaagtagcttattttaagcaaacagatgagaccctggatagagatattcgtatgattgattatttaagagaagaaagtgagatcgcaaaagaaaaagatggaacctcggtatctattacacaacttcttgaacgatttttatttccaagtgcaactcatggtaaaaaagtttataaattatctggaggagagcaaaagcgtttgtatttattacgtttactcgtacaccagccaaatgttctgttgttagatgaaccgacaaatgatttagatactgagactttaacaatacttgaagattatattcatactttcggtggtacagtgattaccgtaagccatgatcgttacttcttaaataaagttgcacagtcatattggtttattcatgatggtcagatggaaaagattatcggaacttttgaagattatgaaagttataaaaaatcattagataaaaataaatccacattgaagcaacaatctaaatcttctacaactgtacgtaagaaaaatggtttatcatataaagaaaaattagaatatgaacaattgatgaaacgcatagaacaagcggaagtaagaatggaagaaattgatgtgctcatgattgaggcaagtgcagattatgggaaaattaaagaattaaacgaagaaaaagaacaacttgaaattcaatatgatttagacatcacaagatggagtgagttagaagaaattaaagaacaacaataa

SEQ ID NO: 410553 - DNA, 276 bp, Staphylococcus aureus
atgctaactgttattaatcaattcttatcctacgagactcatttttatacaattcacactttataccattttaattttaaaaactgtaaaactttcagacacaaaaatgacaccatatcgtcgcagtaccatgtaaaaattatcaaagattatggtgacacacatcaactaaaacgcgtcattacggtatttccaacattaataacatatacgaatttactatacacagcgacaataaatacagattacaattttttattaaatcaaatgttttga

SEQ ID NO: 410554 - DNA, 738 bp, Staphylococcus aureus; identical to SEQ ID NO: 407625

SEQ ID NO: 410555 - DNA, 774 bp, Staphylococcus aureus
atgacatatagaatgaagaaatggcaaaaattatccaccattacgttattaatggccggtgtgattactttgagtgatggtgaattcagaagtgttgataaacatcagattgctgtggctgatacgaatactcaaacaccaaattatgagaaattgaagaatacatggctggacgttaactatggttatgataagtatgatgagagcaatccagatatgaagaagaagtttgaggctacggagaatgaggcaaagaaattacttagtgagatgaaaactgaaagtggaaggacttatttgtgggaaagctcaaaagatatagatacgaaatctgcagatatgactcgtacctatcgtaatattgagaaaatcgcagaagcgatgaatcatcctaaaaccactttaaaaaatgacgaaaataagaagaaactgaaagatgcccttgagtggttgcataaaaatgcctatggaaaagacccagataaaaaagttgctgatctgaaaactaatttctcaaaatcagcacctcaaaagaatacaaacttaaattggtgggattatgaaattggaacacctaaatcattaacaaataccctaatattactgaatggtgatatttcaagtgatgaaaagaaaaaatacactgcccctatcaaaactttcgccccaaaaagtgatgaaatattatcttctgtaggaaaagctgaacctgctaaaggcggaaatttagtagacattgctaaagtaaaacttttagaaagtattatcgaataa

SEQ ID NO: 410556 - DNA, 1419 bp, Staphylococcus aureus
atgactacttatatgttaatgtattcaataccagaaaaagcaggtggtataacatcagttatgttaaatagatctaaacttttagctgaaaaaggctattcatgtgccttattaactttggatgacaaaaactatgatccattaagagctaagctaacaaattcaggacggttacataaagaagtaaaaattgttaacttatacgaagaattgaagatgctgtatgatgttgaaaatacagaaatcgaaaataaaaatatgcaaacatttgaaaaattaaatcttttaaatcaagaaggcttttatattcaaaaagacgaatatgaagaaaaaaagtatgccaggtactttaaagataacaattacataatgtataaaaaatggataaatggtcaattatcacacattgattattttcaaaatcgaaaacgcattaaaaggcatgtttttcaaaataaaatacttcgaaaagaaataactttcaacgataaaaataaaatgagtgaagttaaatatttatcaaatgacggcttttgttatttatcatattggttggataaaaacttaacttcaaacgatgtattaatactagacggtataggcacttatcctaaagtagagaacatgcagaataatgatgtcaaaaaaatatttactatacatacgaatcatttcttgtccccttactcttatggcgctgagattaaaccagagttcagaaacatgttactaaaccttaaagagttagatactttagttgtattaactaaagaacaaaaagatgatattataaaacaatttggtgattacaataatataaaggttattcctaatgctgtatcttttgaagagaatttaacacaaaatattcgagaaaaaaattctattattgtattacaaagatttgtagctatgaaaaatatcacacatatcatttccgctataaatattgtaagaaaaaaagtaaaggatgttaagttgcacatatacggtaccggtacgcaaaaagaaaattacacaaaacttattaaaaaacttaaattgcaagataatgtgttcatccatgattacacatttgacatacgtggtctttatacaaaagcctctctaagtgtactgacatcagattatgaaggtctccctatgagtttactagaggccatgagttacggtgttccagtaatttcatatcctattaattatggccctaaatctataatccaaaataatataaatggaataataacaaaaaagaaggataatattaatgaattggcaaaaaaaataattcatgtattaaaaaaagaaacattgatatctcagttttctgaaaatgccagaacaacaataaaaacaaacttttcttacgaagcggtatccaaaaaatggattgaattaatcgatgaaaaaagcaaatag

SEQ ID NO: 410557 - DNA, 207 bp, Staphylococcus aureus
atgaaaaaatcagctgttttaaatgaacatatttcaaaagcaatcgcgacaattggtcattttgacctattaacaattaatgacgctggcatgccaattccaaatgatcatcgccgtatcgacctagctgtcactaaaaacttaccacgctttattgatgtcttagccacagtgttagaagaaatggaaatccaaaaatatacttag

SEQ ID NO: 410558 - DNA, 195 bp, Staphylococcus aureus
atgacggaagttaaaattaaaactatttcaggcggagtttattttgtaaaaacggctgaaccttttgaaaaatatgttgaaagaatgacgagttttaacggttatatttacgcaagtactataatcaagaaaccaacgtatattaaaacagatacgattgaatcaatcacacttattgaggagcgtgggaaatga

SEQ ID NO: 410559 - DNA, 204 bp, Staphylococcus aureus
atgaatcagctgagaattttattacatgacggtagtagtttgatattacatgaagatgaattatttaacgaaatagtatttgttttggacaattttagaaatgatgatgactatttaacgatagaaaaagattatggcagagaacttgtattgaacaaaggttatatagttgggattaatgttgaggaggcagacgatgactaa

SEQ ID NO: 410560 - DNA, 378 bp, Staphylococcus aureus
atgaaaatcacagtaaacgataaaaacgaagttatcggatacgttaatactggcggtttacgcaatagtttagatgtagacgataacaatgtgcctatcaaattcaaagaagagttcgaacctagaaagttcgttttcactaacggcgaaattaaatacaatagcaatttcgaaaaagaagacgtaccgaatgcatcaaaccaacaaagtgaatcagatttgagtgatgaagaacttcgcggaatggttgcaagtatgcaaatgcaggtgacgcaagtaaacattttggcgatggaattaaagcaacaaaacgctatgttaacacaacagttgactgaactaaaagctggtaaaacaaatacagaggaggacgtttaa

SEQ ID NO: 410561 - DNA, 843 bp, Staphylococcus aureus; identical to SEQ ID NO: 405239

SEQ ID NO: 410562 - DNA, 474 bp, Staphylococcus aureus
atggttaatgcattaacaccaaaacatttagctgaaaagcgtgcaggattccatgagttgttctttgatttaattttcgtctatgccattcaaaaaattgcacatgtgattttaacaacacaaaacggttccatttcagctgatttatttttcaaatacatcgtcatgagtttgttcttatggttaatgtggtctcatcaaacattttttacaaatcgatttggtcaagttacattcaaagacgtctcgtttatgatgtttaatatgttcatcatggtcttcctatctaacagcctatatccggactttgaaaagacattcttcccattcttcttatgcgtggcaattatgtatttaagtatcggattacagtatttattacatatacgtacagggttagattatggcgataagcgtacatgtcaagcttttgcgagcgtagcctttgtgatttcatttttatcatttctataa

SEQ ID NO: 410563 - DNA, 2229 bp, Staphylococcus aureus; identical to SEQ ID NO: 405244

SEQ ID NO: 410564 - DNA, 1842 bp, Staphylococcus aureus; identical to SEQ ID NO: 405245

SEQ ID NO: 410565 - DNA, 180 bp, Staphylococcus aureus
atgtctaaaaatatcaatcaagcaaatagtaaattaaatacgtcaaacaaaaaactaaaacaagcttattcaaaatccgacagtaaaaacatgaaagttatatacatgcctcattggctagagttttattcaattgctatacatagcgatgttacaagcaataaaaaaaagatattataa

SEQ ID NO: 410566 - DNA, 450 bp, Staphylococcus aureus; identical to SEQ ID NO: 407421

SEQ ID NO: 410567 - DNA, 219 bp, Staphylococcus aureus
atgatacctaaatatcgagtgtgggtagaaacaattaacagagcagtaatatctattgatgttgtaaagggtattcaattaaaagattttatgtttgagagctcagtttctgaaagtgactactttgaatttttagataaaaaatcttttcttatgtacgactgtgaggttaaaggcaacatatttgaatcatctcatttattggaggtaacagaatga

SEQ ID NO: 410568 - DNA, 402 bp, Staphylococcus aureus
atgaaaatcaaagttaaaaaagaaatgagattagatgaattaattaaatgggcgcgagaaaatccggagctatcacaagggaaaatatttttttcaacaggatttagtgatggattcgttcgttttcatccaaatacaaataagtgttcgacgtcaagttttattccaattgatatacccttcatagttgatattgaaaaagaagtaaccaaagatacggtatttgataagttgtttgaagtgtacgagtttcaagaaggagattataccgctatatcacacgctaatattagtataaacaaacgtttagatgaacattgtttccctatcaaagcattctatatcttaaacgacgacctaactatgacgttaatttggaaagatggggagttggtagaatga

SEQ ID NO: 410569 - DNA, 207 bp, Staphylococcus aureus
atgaaaggcaaagttgaaaaagaagtgaatttacctgaacttatccaatgggcttgggataaccccaagttatcaggaaacaaaagattctattcaaatgatgttgaacgcaactgttgtgtgacttttgatgttgatagcatcttatgtaatgtggctggatacgtatcaattaacgataaatttactattcaagaggagatataa

SEQ ID NO: 410570 - DNA, 255 bp, Staphylococcus aureus
atgagcataattagtaacagaaaagtagatatgaacgaaattcaagacaacgttaagcaaccggcgcattacacatacggcgacattgaaattatagattttatcgaacaagtaacggcacagtacccaccacaattagcattcgcaataggtaatgcaatcaaatacctatctagagcaccgttaaagaatggacatgaggatatggcaaaagcgaagttttacgttgatagagtgtttgacttgtgggagtga

SEQ ID NO: 410571 - DNA, 618 bp, Staphylococcus aureus
atggcgggcataaaaacgaaagtgagaatagacggtaaattgatgacgcttattgatgtatcggatagatacgacatcaaagtatcgacattgattactaggtacgacagaggggcgagggggaaagatttaatacaaaatgtagtaaagcctaagaaagtaaaggttgacggcaaaatgatgactgttagcgaaatagttaaaaagtacaacctaagcaaaggactaattaattacaggatagcaaaagggctaacgggcgatgcgcttattgcgccaccacaagaaaaacccccttctaaatacactgaatatgaaaatgagcagatgaaaaagaaaggactcacgcccgaaatagttagaaacagagttgcgaagggttgggagatgtcggaagcaattgatgcacctttcggcatgaagctaaacgactatagagaaatacaaataacaaaagctttggagcgagagcgtgaaatggctaggcaacgacgtaaagaagctgagctaagaagaaagaagccacatttatttgatgtaccacaaaaacattcacgtgatccgtactggttcgatgtcacttataaccaaatgttcaagaaatggagtgaagcataa

SEQ ID NO: 410572 - DNA, 771 bp, Staphylococcus aureus
atggcaacatttagagtttacaaagaatcaggtaactttgtcacagtacacaaagattttatacatgattctaatataagttggaaggctaaaggtattctactttatttgttaagtcgacctgataactggcaaatttacgaaacagaactagagcaacattcaactgatggacttagcggtttaaagagtggaatcaaggaactggaagaaattggatacattcaacgtagtagaaaacgtgataaaagtggtaggttaaatggttatgagtacttagtatatgagcaaccgcaccacattcgattttccaacgttggaaaaaccgttaacggtaaaaccaacaatggaaaaaccgttaatggtaaatcgcatactactaataataatagtactaataatgatttaactaataataacaatactaataatgaaggaagtatattgtcgggcaacccgacggtgtcttccattccctataaagaaattatcgaatacttaaataaaaaagcaggaaagcattttaaacataatacagctaaaacaaaagattttattaaagcaagatggaatcaagattttaggttggaggattttaaaaaggtgattgatatcaaaacagctgaatggttaaacacggatagcgataaataccttagaccagaaacactttttggcagtaaatttgaggggtacctcaatcaaaaaatacaaccaactggcacggatcaattggaacgcatgaagtacgacgaaagttattgggattag

SEQ ID NO: 410573 - DNA, 558 bp, Staphylococcus aureus
atggaatgtttattagaacttttaaaaatgtcaatacctctaatagcggtaattttttcttggtggcttgctacaaaaacggctaatgaaaaattcgaagaacaaatcaaaaaagagacctatgataatttttactccgagattctaaaagcttgttatgagttgccttctaccgatttattagacttcatgagtttttactcttatcaccgcaaagataagatttctgaaataatcattaaaaactttagttatgtacctcccgatatagttaactattggaagaaatacaatctagcacttaaatttttcgaacatgattatgaaaaagatgtacaagccagagaagttttaagtcgatttttaaattattattctcacctgataattattaaatcgttagaagaatcagagaaattatcagaagaactgaaattaccgcagctatcgacacaattactttctcctttaaagaggatcgacttttataagtctcaattaccgtcacaaaaattaatcctaaagtaccacctgcaagaattagttccgaattcataa

SEQ ID NO: 410574 - DNA, 144 bp, Staphylococcus aureus
atgttacaaaaatttagaatctcgaaagaaaaaaataaattaaaactcaaattactaaagcatgctagttactgtttggaaacaagtaacaaccctgaactgttgcgagcagttgcagagttgcttataaagataaatcgataa

SEQ ID NO: 410575 - DNA, 189 bp, Staphylococcus aureus; identical to SEQ ID NO: 407433

SEQ ID NO: 410576 - DNA, 180 bp, Staphylococcus aureus; identical to SEQ ID NO: 409070

SEQ ID NO: 410577 - DNA, 429 bp, Staphylococcus aureus
gtgccaccaacgccaccgacaccagaagtaccaagtgagccggaaacaccaacgccaccaacaccagaagtaccaagtgagccggaaacaccaacaccaccgacaccagaagtgccgagtgagccagaaactccaacaccgccaacaccagaggtaccagctgaacctggtaaaccagtaccacctgccaaagaagaacctaaaaagccttctaaaccagtggaacaaggtaaagtagtaacacctgttattgaaatcaatgaaaaggttaaagcagtggcaccaactaaaaaaccacaatctaagaaatctgaactacctgaaacaggtggagaagaatcaacaaacaaaggtatgttgttcggcggattattcagcattctaggtttagcattattacgcagaaataaaaagaatcacaaagcataa

SEQ ID NO: 410578 - DNA, 189 bp, Staphylococcus aureus; identical to SEQ ID NO: 407433

SEQ ID NO: 410579 - DNA, 1206 bp, Staphylococcus aureus
atgtggattgaaaaatttaaaaacaaaaataacgaaactaaatacagatactacgagaagtataaagatccatacacagataaatggaagcgcgtaagtgttgtgttgaacaagaatacaaaacaatctcaaaaagaagcaatgtttcgtttagaagaaaaaataaaagaaaaactgaacaacaagtcgtcaagcgaattaaaaactttgacttttcacgcgctattagatgaatggcttgaatatcatataaaaacatcaggttcaaagttgactactcttaataatataaaaataagaattagaaacattaaacgatacagctctgagaacttgcttttaaacaaactagatacaaaatatatgcagatatttattaataaattatcagatatctattctcaaaatcaagtaacccgtcaactcggagatatgaaaggagctattaaatatgcagttaaattttacaattatccaaatgaatatttgttaactaatgtcaaaattcctaaaagaagaaaaacaatagaggatatcgaaaaagatgaatctaaaatgtacaactatttagaaatgaaccaagtcctacagatacgtgatcatatactaaatgataataagttacacaagcgaaatcgcattttaattgcaggtgctctagaagtacaagctttaacgggaatgcgtataggagaactacaagcactgcaggaaaaagatatagatttattaaacaaaactatcaatataacaggtacaattcaccgcattaaatacgaggaaggattcggatacaaagacactacaaagactataagttcaaaaagaagtatcagcatcaattctagaaccgtagaaatttttaaaaagataatactggaaaacaaaatgttgaaaagatggaattcgagctatgttgacagagggttcatattcacaacaaaaaaagggaatcctttatgtaataatcaaatcgccggtgtgcttaagaaaactacaaaagctttaaatatgaataagaaagttaccacgcacacatttagacatacacacataactttattagtagaaatgaatgtttctttaaaagcaattatgaaaagggtaggacatgtagatgaaaaaacaaccattcgcatatatactcatgtaactgaaaaaatggatagagaactaactcaaaaactcgaaaacattccaagttag

SEQ ID NO: 410580 - DNA, 1185 bp, Staphylococcus aureus
atgaattcaatcattgaattaactgattattatagctctaataattatgcaccacttaagcttgtcatttctaaaggtaaaggtgtcaaagtttgggatactgatggcaaacaatatatagattgcatctcaggtttttcagttgcaaaccaaggccattgtcatccaacaattgttaaagcgatgactgaacaagcttcaaagttgtctatcatttcacgtgtcctttatagtgacaatctcgggaaatgggaagaaaaaatttgtcatcttgctaagaaagacaaagtactcccccttaactctggtactgaagctgttgaagcagccattaaaattgctagaaaatggggctctgaagttaaaggcattactgacggacaagttgaaatcatcgctatgaataacaattttcacggtcgtacacttggctcattatcactatctaaccacgacgcatataaagcaggatttcaccccctacttcaaggcactacaacagtagattttggagacattgaacaattaacacaagctatttcaccgaatacagcagcaattattttggaaccaattcaaggtgaaggtggcgttaatataccaccgaaaggatatattcaagctgtgcgtcaactatgtgataaacatcaaatattattgattgcagatgaaattcaagttggtcttggtagaactgggaaatggtttgctatggaatgggagcaagtcgttccagacatttatattttaggtaaggcattgggtggcggcttataccctgtatctgctgtacttgcaaataatgatgtcatgcgtgttctaacaccaggtacacatggttcaacatttggtggtaaccctttagccattgcaatatcgacggcagcgcttgatgtacttaaagatgaacaactggttgaacgatcagaacgcttaggttcatttttattaaaagcgttgctacaacttaaacatcctagtattaaagaaattagaggtcgtggtttatttataggcatagagcttaacacagatgctgcaccttttgtggatcaactgattcaacgtggaatcttatgcaaagacacgcatcgtactatcattcgattgtctccacctctagtcattgatagagaggaaatcaatcaaattgttgcagcttttcaagacgtttttaaaaattaa

SEQ ID NO: 410581 - DNA, 540 bp, Staphylococcus aureus
atgaaaagaaagattattatggattgtgatccaggacacgatgatgcaatagcattaattttagcgggggcaattgacagtccactagagatattagctgtaacaacagtcgcaggtaatcaatcagttgacaagaatacgacaaacgccttgaacgtattggatattatgggacgtcaagatatagcagtagcgaaaggtgcggataggccgttaattaaatcagctgcctttgcttctgaaatacatggggaatctggattagatggcccgaaactaccgtcgacaccatcacgtcaagcagttgcaatgccagcatcagatatgattataaacaaagtgatgacgagtgatacacctgtaacaattgtagcgacaggtcctcttacgaatgtagcaacggcattgattcgtgagccaagaatcgctgagcatattgaatctattactttgatgggtggtggtacatttggaaattggacgcctacagcagaattcaatatttgggttgatgctgaagcagcgaagcgcgttttttga

SEQ ID NO: 410582 - DNA, 378 bp, Staphylococcus aureus
gtgtttggtttagatgtaacacatcaagttttagccgacgatctcgtgattgaacgctttgaaagtatcaataatcctgttgcacagttcgtcgtagaattattgcaattctttaagaagacatacaagactcactttaatatggacggtggtccaatacatgatgcttgtacaattttgtatttgttacaaccagaattgtttacaatggtacccgttaatatcgacattgaacatcaaagtccactaacttatggtactatggctgtcgatttaaatcatgttacaggtaagcctgccaatgcttattttgctacagcagttgatgttgaagaagtgtggaacttgatagattataagttacgtacttacgaataa

SEQ ID NO: 410583 - DNA, 261 bp, Staphylococcus aureus
atgagtcaaaataaaagagtagttattacaggtatgggagccctttctccaatcggtaatgatgtcaaaacaacatgggagaatgctctaaaaggcgtaaatggtatcgataaaattacacgtatcgatactgaaccttatagcgttcacttagcaggagaacttaaaaactttaatattgaagatcatatcgacaaaaaagaagcgcgtcgtatggatagatttactcaaggcgcaatgacaataaaatggggaaaatag

SEQ ID NO: 410584 - DNA, 246 bp, Staphylococcus aureus
gtgaattacatcattacattagttctaatggttgtattcatagtaatatttaacaatttactcaacagatatatggttttgtacacagaattagatttatttacatgcagaattggcatgttattggccttaatcgttctagtagaatttgcaaagcaacaaaatatgttggctacattgagtgttttactaatacttttattcgtagaaaaacttagaatcattcaaaggagtggcgagaagtga

SEQ ID NO: 410585 - DNA, 201 bp, Staphylococcus aureus
gtgaataagaaggaaacgtattatgttatagaggttaataaaggaatttatttatatagaagtcgtgctggtggatatcatttcacttatgattttatgaatgcgtcgaaatattcggatgctagcgatgctggtgatattgccagaaaatcaggtggaaaagtgttgtgttacacaattacgcatgaggtaataggctaa

SEQ ID NO: 410586 - DNA, 234 bp, Staphylococcus aureus
atgcaatacttagtcacaacattcaaagattcaacaggacgcaagcatacacacataactcgagctaaaagcaatcaaaggtttacagttgttgaggcagagagtaaagaagaagcgaaagagaaatatgagtcacaaaatacacctattgtttactacactaataattctaaagtgaccttattcgaaagacctagtgaagaagtattaggttctttgttcgaaaagaaataa

SEQ ID NO: 410587 - DNA, 237 bp, Staphylococcus aureus; identical to SEQ ID NO: 409168

SEQ ID NO: 410588 - DNA, 1359 bp, Staphylococcus aureus
ttggcgattgacttcaaaccacatagctatcaaaagtatgcaatagataaagtgatagataatgagaaatacggtctgtttttagatatggggttagggaaaacagtgtcgacgcttacagcttttagtgaattgcagttgttagacactaaaaaaatgttagtcatagcacctaaacaagttgctaaagatacatgggttgatgaagttgataagtggaaccatttaaatcatctgaaagtgtctttagttttaggaacacctaaagaaagaaatgctgcattaaacacagaggctgatatctatgtaaccaataaagaaaatactaaatggttatgtgatcaatataaaaaagaatggccatttgatatggttgtaattgatgaactgtctacatttaaaagccctaagagtcaaaggtttaaatctattaaaaagaaattaccactcattaatagatttataggattaacaggaacacctagtccaaatagtttacaggatttatgggctcaagtttatttgatagacagaggcgaaagacttgagtcttcattcagtcgttatcgagaaaggtactttaaaccaacacatcaagttagcgaacatgtttttaactgggagctaagagaaggatctgaagaaaagatatatgaacgaatagaagatatatgtttaagcatgaaagcgaaagattatctgaatatgcctgacagagttgatactaaacaaacagtagtcttatccaataaagagcgtaagttatatgatgagcttgaaaaacattacatcctagaatcggaagaagatggaacagttgtagctcaaaatggggcatcattaagtcagaaactacttcaactatctaacggtgcagtttatacagatgatggagatgtaagggaaatacatgataagaaattagagaagttagaagaaattatcgaggaatcacaaggtcaaccaatactattgttttataacttcaaacacgataaagaaagaatacttcaaaggtttaaggaagcaaccacattagaggattcaaactataaagaacgttggaatagtggtgacattaagctgcttatagcgcatccagcaagtgcagggcatggattaaacttacaacaaggtggacacattattgtttggtttgggcttacgtggtcattggaattatatcaacaagcaaatgctagattatacagacaaggacaaaatcatacgactattatgcatcatattatgacctataacacgatagatcaaagagtatatgaagctttacagaataaagaactaacgcaagaagaattgatgaaagctattaaagcaagaatagctaagcataagtaa

SEQ ID NO: 410589 - DNA, 876 bp, Staphylococcus aureus
atggaaagtgaatcaaaaaaagacacgaatacagaaacaaaatcagtaccagaagaaatggaagcttcaaaatatgtaggacaaggctttcaaccacctgcagaaaaagatgcgattgaatttgcgaagaagcatcgtaaagaatttcaaaaagtaggtgaacaattctttaaagataactttggactaaaagttaaagctacaaatgttgtaggtaaagatgatggtgtagaagtttatgtgcattgtgaagatcatggtattgtatttaatgcaagtctacctttgtacaaagatgccatccatcaaaaaggatcaatgcgtagtaatgacaacggtgatgatatgagtatgatggtgggtacagtgctgagtggctttgaatatcgagcgcaaaaagaaaagtatgataatttatataaattttttaaagaaaatgaaaagaaatatcaatatacaggttttactaaagaagcaataaacaagacgcaaaacgtcgggtatcaaaatgaatacttttatattacatatttatcaagaaacttaaaagaatatcgtaaatattacgaaccattgattcataaaaatgataaagaatttaaagaaggtatgcaaaaagctagaaaagagctaaactatactgctaatacaaatactgtagcaacgttatttagtacgaatgatgaaaggaatagaaaagaaaagataaataatgtaatagatttatccgagaaaattgaaagaacaaaagatatgccaatcaagaatactataactactcaattaggaaataaacttattggcacaaaaaaagctcgttttgatgataagaaagtagtgtcgtttggagcatttgaagatgaatataataaatga

SEQ ID NO: 410590 - DNA, 219 bp, Staphylococcus aureus
ttggaagatacattattgttggtagtatacaacagactaccgttagaagatgaaattgaagatggcatagacgaaaacgaaagaatgattgattcaactatattacttgatgaagaaaagtataatgattttattgagagtgatgtagctgttcaatatgattttaatgtaacagcaattcacaatattactgaacaaggttatattgttggttcatag

SEQ ID NO: 410591 - DNA, 678 bp, Staphylococcus aureus
atgaacaaacaattaaaagtattagcctttactgtcatatgtatattgggcgtagcatttataggttcttttatttatcacaaagcgggtatgaagccaaccgtcgatagccaaaattttaatgcacaagcaaaagagaataataaagtagataaacagtacatggatagaatgaacgaagcgaatatagataaaatagctaaagaccaaacaggttataaattatctatgaaaccagcacaagacgaagaaaacaacgaagtggttaaacctaaatcaataaaagtttataaacaaagtaaaggtaaactaaaagatatcactgataaaggcgaaatttctaaagataataacggttcttttattagatggtattacaaaagcgatgaagataaacccgtaaaaaaagcattaaaaaaagatattggtaaaaatgttgttttcgatgtaacgtatgataaaccagttaaacctaatacatctactaaggaaatgcaagtagtcaacaaacaaattcatgatttgaatcacaaaatacaagatgataaatctaacaataaagaaaaggcattaaagaaacataaaaaagcattaaaaaatagtgaaaaatggaaaaaagacatcaaaaatgacaagaaaaaaactcatcgttataaacatgaaattagatatgaataa

SEQ ID NO: 410592 - DNA, 162 bp, Staphylococcus aureus
atggagtttatagataatcttaaaaactttttcacacatatatatcgtgactttatgaattatattaataactttttagataacccaaatagtagcggaataatttttgcaatatttatagttgcgtgtattggtatatttatatttgaaaagtccaaataa

SEQ ID NO: 410593 - DNA, 177 bp, Staphylococcus aureus
atgatgatattaataattggtttattagcgctaatcatcgcctatgtttcttcacacttagtctttgcaagcaaaatatcaattaagagacgtttagcattttttttagtttcaatcgccagtctatatatagcaattggaagcactgtttttacgttgtctcatatgggaggatag

SEQ ID NO: 410594 - DNA, 645 bp, Staphylococcus aureus
atgtttaagaacaagattaatggagtacatagatatttttcatctcttgacacagtgactaaaacaatacttgtaattaatgtcatcgcttatttatttttagtcatacaatatggttttgatgcaatattcggtttaaatgtagaacaactactagaaataggtggagtaacaggaaatagtccattagtaactacattgttttcaatgtttttacactatagtatttttcatttcttgataaatatggttatattagtgctgttaagtcgaacaattaacgaccatttctctcaaatgacatattttatagtgtatctattatcgggtattatagggaacctagtatctcaagactttacgcctaaagttgttagtataggagcgtctggaggtatatatggcttagttggattattactaataagcgccatatttaagaagaaatacccacagttaaatgacatgtttatgtttatatttgtaacagcgattattttcgttgtagggacgttcttctctgaaatatctaatgtaactgctcacataataggattgttgattggtggaggtagtgcattattaattcaaaattttaaattagaagtatataaggaaacagaagatgaaaacaatgtgtcgtaa

SEQ ID NO: 410595 - DNA, 1095 bp, Staphylococcus aureus
atgaaaaataaaaaattactttacatcataattggtatcatagttgtcatacttttgtctgtactaatattctcgatagtaaatagaaataaagaaccattagaaagaccagaagacagtcatcaaagtaaaaaaactagcactaaaactagcataagcgaacaaatagaaagtgatttagataaatatcgtgaaagtaagacagtcagcaattcggaaacaaatccagataaagctaataagaaaggcatatttttaaatgctgataacaaagtattagtacaaactgattcaaacaacgcagaagacatcaaagaagcgatggttaaatggaatagtgctttgggggagaatgtttttataccttcaagtaacggcggacgtgctgatttattaattcaagatgatgaaacaaagcttccagtagatatttatagaaatacaaattatgaagaagacatgcctcaagaatatatgaaaagagttacatctacaaaagaccaccgaattatgattctggataatgtaaacacacgtctttctgatgaatttgagaatacattaaaagacgaaatcaaccaatctttaggacaaactattggaatcaataaagatgttgacgaaattaaaaacttattccgctcagaagaaggaagaaatgaactgaaaaaacaatttgaacaagtaaaatcagaaggaatttataacaagagtttaactagtaaagataaagaaacagaatatatggattctacttacaataaaacgtatgcaacatggactaacctcagagatagtattgaaaatttaccacgcttcaaaggtcacaataaagaattgttaagtattattgacagtaaaaatgaaaccctatatgacaggaaatctatccaacaaggtaaagacattaataaagcactacaaaatgctatgaaagaaatggataaagcaggtagttacaattcaacagaaggtaaatacaacgatgataaggatatgtacgatagtcatataactatagcgaaaacttcttctaaaatgggcgatgacaatgattttatcaatttaacaaaagattatacaggagttagatag

SEQ ID NO: 410596 - DNA, 735 bp, Staphylococcus aureus
atgatgacgaaaaactctaaaaatatagcagagtacatcaaaagacatgaatatgaaatcataaatgacgagatttctgctcaagatattgccgaaaaattcggcgtgacaaaacaaaatgtatattaccacgctagcacggttagtgagagtgttttcaaaagaagagggacaaaacacaatgaagatttgaagagagttttagaagatattttacaaggtattccgttagacacaatacttcaacaaccttacggacaaccttttttaactaaaaaaggtaaagagaatatacatcgtgcaaaagatttaattattaatagaattaatgccaaaaatttagtttcggaagatattgaaatcaatcattataccctcgttaatgcaaaactaaagaattatatcaatatattacagatagaagcgattattaaggataatccaagcgttaataaagctatgttagggcgtgtcttaggtgcgtcacatagaaaagtgttaagcatcaacgataatataaaagtcccaccacatcgagcattgcctaaaatgccagaagatgtttataacattttgaaaagaaatataaaaatcactacagattattatgaactaggtacaaagaaagctgtatatgaaaaatatgaggatatagaaagacgcactttacgtttgattattgacagttacaaaccgtttcttgttcaaaatccattaggaagtgatgaaaaatga

SEQ ID NO: 410597 - DNA, 891 bp, Staphylococcus aureus
atgagactatttcgttatatattatattgtctattttatccaatagagttagttttaaggttttggtttccatatgcgtttagagatgacccgttgaatccagagcctcaaaacaaagaagaaagaaaaaataaaagagagaagaaacgtcaagaaaggctagaaaataaaaaggaagaaaaaccagtatcgttaagacgtaaaaactttaaagaaagaaaaatagctaaactcgaccctaattataaaagcgaaagtttaaaaggtgtgtataagcctccagaaaaaacaaaaaattacgataatgaaatcaaagaagaaagtttattgaaaatcaataacctaaaacagaatcctaaagataagaaaccaaaacaattagggctacatatggtggatattgaaaacccacttactaatgaaagtgcatataaccttttgaaagaagcagaaggaaatttaactttctactggcatgatgaacaatatcatcaagtagctgtgaaatttgaaaaagattctttaaaagacgaatataagataagagatgatgtagagagaaaaaaacttgagcctttaataagaccgtatcaaaaagaatatgtagatagaacacatgttattccgattggttatcacggttcagaaagtgataaacgattgttaataggttttagtagcaaaataaatcaaaaagacctaaagaactttgaagagaaagtagcaaatatgaatacaaagcaatcggtattgtggtttgtggatatacaaagacaaaaaaatgattccgttaaatggcatgctactgtttggaataatgacggtaaggttttattacaagatgtttttcatgacaaacgaaaattcaactggaaaaataaaagattttag

SEQ ID NO: 410598 - DNA, 1464 bp, Staphylococcus aureus
atgaaattaaagaataaagccaagaatcctactcatgctatttttggtattgcaacagacggagaaattattaatgctccaatatctacattccctcatgcattaattgcaggtgctacaaattcgggtaagtctgtgtttattaactcagctttaatatcaatgatggcagtatcacacccagacgaggttaaattaatcattattgaccctaaaggtaatgagtttggaaattatgaaggtttacctcatatgcttacaaatcccattatagatttaacacaatgtaaaaatgctttagaatatttagctaatgtgatggactatcgtttacaactattccaaaaatatggtggtaagaaaaatattgaagcgtttaataatgctatagataatggagaaattacaggagtagataagctaccttatattatattgacgatagatgagttagccgatttaattactcaatacaaagatgatgtacaaggaagtataaagcgtttaggagctaaagcccgtgccgctggggttcatatgttattagctacacaaacacctagacgtgaatatatcgatggagcaattaaagccaatgtaccgacaaaatttgttcttatggtgtcgagctatacagatagcatggtggcattaggagaaccaggagccgaagatttaaaaccacatggcgatttctatgcttctattgggggaggtaagctacaaagaggacaagcaccgctagtagaagatgatgaaattaaagatatattcgatgagctaagagctacttatccagaaccagaaatgatagatattgataaagcagtagttgaaatggaactaaaatataagagaatggttgcagagaacacaggaaaaaatccagatgatatatctatggaagatatctcaaatgatgatgagaaaaaagaagaaccaaagaaaacatttattcaaagtgagagaacagaagaagaaagagaagaaggaaaaaaacagcacgaggaagcaatgaaaaaaatagaacaaaatgaaaaagaaggaaaaaatggtagtaagacagtaagtttagacacaagcaacttttcttttaatgctattaataagcgtagaaaagagaaaggagaagcggaacgtaaaccaaaatctggtattattccaacttcaagctcaagaagaaagaaaaaacaagaagaaaaattaaaggcacaacctaaaaaagaaattactacaaattcagaaagtaattctatcgaaagaaagacaacagaaccattagaatctaaagctagtgatgtagatactaataataaaaaagaaccaaaaaagaaaaatacaacctccatgaaggaaaatagacaatataaagaaaagagtaatgttgtatcaaatagaagacgtggttcaaacaaagtaaaaaaacgcaaaacaacaacgaatccactggcaagaaagcggtaa

SEQ ID NO: 410599 - DNA, 1170 bp, Staphylococcus aureus
atggcaaagaatagtaataaaaagccttttttgaaatattataatgcttctataaaaatgctgaaaatccttcaactttggttcattgtgtttttagcaattttactaatcagacttgtttttatacaactgatttctaaagcaattcataaaataaaaacaattgttactgaaaatccagagggatatttaaaagacttattcccaaaagctgataagtggggaaataagtttgatgatatctggttatttgatatagacgtatttataagaaatagtgtaatcatcactgtagtattgcttgctatatgtgttgtgttgtatttattaaggcacagaaacggagaacacgcaccgtttttaaatgatttagaagctcttaagattaagcgttttattattaaaacaacagaagcgacacataagaaaacatataaagacgaaaacagaaaagtgcgtaaatatccaagaaaagaagttaaagccaatagacagataagaaaatgtgaagtagaaatccacacatataataagaaaggtatttctaaaccgttcaaaacatatcgagttgcttttaaaagacttagaagtaataaagtaaatgctgtaatgatgaaaaagataaaggatatacatgaaaacctcaattcagaaatagacgcatcgttcagtaggcttgaggaatatagaggttattatacatcaaacgttgaaaaacaattagacaaagaaaagaaatcattcttagttaagttgcgtgaaaaacgtttagctaatgaaggggaaattgtaaacgaaagtgagtttgcttttccattaactaaatttaaagacaagacagaagaaattgaaagacaaaaagaaaaagcacattcatattcagaagagttacaagaagctatgaacatgcacttatcttcaaagagaatttacgctgataagacagaaatgtttattgaaaatacatcagcagaatttcaatacacattaccacctaacacaacaaatatacctaataccgaagaattacaaaaaacgattgatacatcgttagacgtagaaggttctaaagctaaatttaaagggcgtaaattagttattactgtacctcttcctaaagaatatattatccctattgatgtaaaaacaatgatagaggcaatattctaa

SEQ ID NO: 410600 - DNA, 381 bp, Staphylococcus aureus
atggctagtgaagataagacgatagattttatacagaagaagttaaaaaaagaagacagatttatggctaatatacatggtaacggtatggggaacaaaaacggaatgttcgatatcgttagtttagataaagatggtaaatttttaggtattgaagcgaaatcatcaacagggaagccttatcctaatcagttaaggagatgtaaggaggttttagatttaggaggtcgtgcgattattgtttatcctaaagattttgatatacaagctatagacgaacacaaaatcccaaaatataattttattgatgaagataccaaacttccgaaacatacactagagattgtcttagaaggagggcaaatatatggcaaagaatag

SEQ ID NO: 410601 - DNA, 882 bp, Staphylococcus aureus
gtgaagaaggtattatcatcaataggagctatagctttaatcattggctttctttttgttaatcaaaatggcaacggtctgacggatatactgtcaagtgataaaacacataatgttaaaacatcagaagaaaataaagagcttatcaatatagcttatgataattctaaataccccgaaaactatgcgacactcaatggaaataaaacgaacttaaaacaaacagacaaaaagatattggaaagcaaagggacaaatagagcgtggcaatcatacaagcccctagatagtctaggaagaggtcaagaaacaacagcacttgtgacaagcaaagttgttgaacaacgcacaccaaaatatcttaaagaacacggtttgttatatggtaaccaaaaaatttatgaaagaccgccattcccttcttacgtccatgtatctggggaatatcaaaatggttggtacgataaatcaaaacaaagatggaaaggacaaaaaagtaacaacggtaatgttgatttaggttcttataaaggctggttatataataaatctcatactcttgcatggtctttaggaggagatatggagacacataatgttaccttaggcacacgttctcaaaatgtaggaagcggacaagacggaggtatgggatatccagaaagtagagtgcgtgaagcagtaaaaaaacataaagaggcaaaagtttattataaagctgaaccagtatataaagatgaggaacttgtaccaagaggaacacacgtaagagcttactcaattaatgataaaggaaaaacaataaatttaaacatttgggtatttaacacacaaaaagatattgatatagattataaaacaggacaatggcgagaaaaataa

SEQ ID NO: 410602 - DNA, 288 bp, Staphylococcus aureus
atgatgacatatgaagacgctcaaacactttttaacaatgtacaaaacggaacattttttaagaacaatctcaacgcattaatgacatatgaaggattacaccaattatttataacgtctgtgattacaggtgctatatatgtgatatggcaaaaggtatcgagacaaaaaagtggagggcttatatcgttggtgtggttatttgtatctggttttatatgtactggattagcccacgcattatttcaaatatttactgggattcctattaaatttttaagtctataa

SEQ ID NO: 410603 - DNA, 729 bp, Staphylococcus aureus
atggtaagtaacaaaaatattaatgaattagcaaataaatttgaatcaacattttcagatggtaatggcgtagaattaggcaacagattacgaacagaagatgaaagcatagcggaagagctgatagatatggcacttagaaacgagaaattccctatggacgcaaatatgtataacgtgaaagctgatattattattaaacctggtatgagtaatgaagagtgggcaaatggttacgtagatgcccaaaacattgaaacacaagaagagtttcaacaatcattaaaagacgatttattttactttatttcagataacttaaatagaacgaatatttcagtgaaaatctatgattctttgaaagaatggttagaaaaacatggaacagttgaatatttagctcaagaaatggaaaaagcctatgaaccgcaagaatttgaagaggttatcaaaatagaagcatcaactgaggtcgaagaaaaagtaaaacatgctttgagtgaagaaggattcccgcctaatacagatgtaaaaaatgttgattacttaattgctaatcctaaaataacagctacttatgaagggttggcagaaagacatatagatgacgtagaatcatctggaagtgtacaaggatatattaatagccgattctataaagatattattagagataatgctttttcgtttgatgtagaaattacaactgacccagaagatttgtattaa

SEQ ID NO: 410604 - DNA, 1401 bp, Staphylococcus aureus
atgaaaattaatttttcacataataacactaaaaacgttgctattagactgtataatagattcgtagagaatgattacaagtatcaaaatttaacaatgtttacaggttttggtaaaacagcaatatctgtagcaacagcaggaatatatgctgtatctcaaaagcaggatatcaatgtatttgttattgctactaaaagaaagttagaagaaggttcttgggaagaaactattaagcaatataatgatatagcaaaatacaaacttaatattatggcacaaaccacacatgaaagcctacttattgctgataagaatgataaattaagaaaaaaagatattaaggctatgagaccttcaaggcaaaaagaattaaaatttttatcagagtggaaaaaagaggcagaagaaacacctactatcgtatttatagatgaagtacaaaaatgcaagaaaccaacaagaagaaaatctaaagcggtagcaaaactattaaaatccgcttctataggtattggtatttcggctacccctatgcctaacggaattttagacgatggtatagcttatcttatctataatggtttttataaaaataaacaggattttaacaatcaacatattccaaaaggtatgatggataaatactatagaccagcagtttacactaaagaccatcgaattgaccccaacagattttatgatttagaagtgttttataatcgtgtcaaagcaacgacttttgttccagatgtggttgtagattttgaaatacctcatcaagaattacatacacatgcttatgatttagaacaaaaaacaatcaatgatatatataatataagtaagcaatacaaagaaagacgttacgattcatttatgcaatatttattcgacctaaaaagggcaataagtacagacaataatcataaaaaagctatgataaaagcaatacaggaaaatcccaataagcaaccgctaatcttttatgaaacaaacgctcagctagaaaaaatagaagaaggcttgcaagatatcgatatgaattacaagataataaacggccaacctaatagtaataaattaaaagatatagatgaagaagatgtgaatcaggcaataattatacaatacaaatctggtggagattcaatagggtttaaacaatcctatttaacaatattctatggattgacttattcttggggagatataaaacaagcaatgggtagaaatatacgtagaggtatgcctagcgatagaactgttaaacaaatattccttttggctacaagctctcatgatgctaaagtgtatgaagtgatagaaagaaaagagaaattttcagacgagttactagaagaattagccgaagaaatatcggaggatatactagattag

SEQ ID NO: 410605 - DNA, 606 bp, Staphylococcus aureus
atgagaaacaaaaatagtgaagacgaactagtaaattacgatgacgttaagcaacttaggaaaaatgctttgatgatacttcttattattgttgctggatttgtgattgtatttcaaattgtaagatttaatgaaataaaagatttaaagcaagatatcgcagatgctaaaacggagaaaaaagatgttcaaaagtataacaaaggtatacaggagaaacaacagaaacagctagacgaagttggattaacaaatgttaaagaagaaatgagcaattttaataacctgttttttgaatggagtacatggggagaatttagtaggaatatgaaagagttaagagcattatatcctaaaattcaaagtggagatgttgttaatatatctggtaaaagtgtcggtacaggagaaagtccagaaagtacgtatgacaatgactttatgactaccacaaataaggaagaattagcggaagttgttaatcaaaataaagattttaatgacggtcaaagtgatacaatgtggtacatcataggagagaaaaaaggagatagtacatttaatattacacacatgaatcattatagagaaatcaatccaaactaa

SEQ ID NO: 410606 - DNA, 540 bp, Staphylococcus aureus
atgtttaaaaagatacagttgatagtgataattttgttatctgtatttattgttgtaggtattatttcctatataggaaaaggaaaagaattagaccatcttaaacaagaagaatcacaaataaagattccagaaaaacaagtagtgtcaaaacaatttacacaagatgatgtgaagaaatacgaaagtttagtaaaacaaaaattacaaaacttccaacaacacgatttgaaagaaggagaatttaacgaaaataatagtggtgtgatgacggttaaattcttattctccccacctggaggtaaaatcatcacagagaaagatagcgtaaaggattacgtcaaatactattcctcatttgattataaaattagtgatgtgacagctaagccagatggttcaaatggagcagaagtatactttaaagtgaatgttaaacaagataaaaatgatgttaaccctcaatacgaactagctagactacagtttaatgaaaatgatgaacttgtgggaggtagtttatatgagaaacaaaaatag

SEQ ID NO: 410607 - DNA, 1491 bp, Staphylococcus aureus
ttgaagcatactgtaacaaggagtttagcgttttttataaaattgttcctcctttttatatttatttttacaatggcgttgccaaccacctcgagttatcatcaagctaatgcagtaaatcaagctgttattgacggtcagcaaggttgtacaacaggcggagacagtggagataaaaaaagtaaagatgattcagattcagattcagattcggattcaagcggagaatcgagcggagatgctgaaaatcttacaaaagaacaaaagaaaaatatcaaaaaggcttacgatattttaaataaggattacggtgtttctgctcaaatggttgctggtatgatggggaactggatgcaggaatcacatataaaccccaaaagtgtcgaaggtataactggtgttcctactgtaaaacaaagaaaagaagctgaaaaaagtcatgaagattaccatacaggacttggcttaggacagtggtcttatgaacgtaacgatatgttagttgattttgctaaagaaaaaggcggaaattggtgggactttgatatacaaatgaaatttatagccgatggagattcagcaaaagacagattcagagatatcgtgagtgatgcgggagacgaccctggtaagaatgctaatactttccatgagaaatgggagatatcagcggacaacgaccaaactgttcaaaagcgtgcagataatgctaatgctatatggaaatacatgaaagaagaaggtatgacaggtaagaaagaccaagataaaataagcaaaataggaagcaaaaagtctaaaggaaatgatgataagggtgcatcttccgccgatgatactagcgataagaaaagtgacgacccttgcaaagaagaagaagaagataaagatggcggtggagatgttggcggagaaatcggagatagcactaagattaatggtaaatctggagaagttaaagaaggtagctggacttgggacgatatgcctaagaaatacaagaaacatgtcacaatacctaaattcaaaaaggaatatttagataaaccaggtaataattacgttactaacggaaataaaggacaatgtactgagttaacgtgggcttatatgaaccaattatggaaaggtaaacagccaacagatgatggtacaactacagatggttatcgtgtacacgaagtttataagaaaaaaggtgcaaaaacgacacataaaccaacagtcggatatgccttttcttcatcagctccatacggtggagcaagctcaacgccaccaggacatacaggactagttgctggtgttatggacgatggcggattcatacttgttagctacaacataccgcctaaaatggctccaagtcgagaaccagtatattcatatgtagatggtatgcctaaagatgctggagataagcttattttcttctctggtattgatggaggtaaaccaaacaaaaaagaaaagtctaaaaaagacgattaa

SEQ ID NO: 410608 - DNA, 435 bp, Staphylococcus aureus
atgtcatatgatgatgagctttttggagatatagataaagtcgctcaaccccaaaaattagattctaataataaatctaataaaaataaacaaacccttttcaaacatttcaaccaagttgaagatactttaaataatattcaagatacattaatagaaatgcaccaattatataacgagcttggagaaggaaaaataactaatcaattaacacttcaaagacgtaatgaaatagttgaatcgttagaagattatcaatctaatatgaaaaaacttactcaatcgcttaatgattatgtagataatgatttatctatagtaaaaggtcttagagtagttagaagcactagtacaagcgaatttgaaaagttattaaataggtcaagtaatcaaaaactaacatcaaaagacctatccttccaacgccgacattaa

SEQ ID NO: 410609 - DNA, 294 bp, Staphylococcus aureus
atgaaatttataaaaaaatttaaagcatggttagatgatttatctattaaatcaactattattttaactggtatcggtataacattatttatagccatgcaacaagcctttgtgggttctatagctacaggtggtggtactgatatttacgcaatggcatttgctttgtggtttacagtaatgttcgtaaccttagtattaattgtcttggtattatttgtaggatatgtatttaaaaatgctatagtaggttttatggcgaagcgtaataaaagaaaaagcaataaccactag

SEQ ID NO: 410610 - DNA, 621 bp, Staphylococcus aureus
gtgaatgatgtaatcgagttttttaaaagtatctttacaaatcctcaaacagtaaaacttacttttattatgactgtagtattagcaatatcatggtatatttatcaaactattgccgatacaaattcaagaagaaatacagataagtttagaaaaacgtatttaggacaattgataacaggtaaatctccagaagataatccgaaaggtaaagagaaagtaataaatgaagtggaaaataaaaagtacgaagatgatgttaaagtagatatgatgatagtaaaagcattacgtactaaagtttataaaagagaagaattttctaataaaaacacatcacgtggctatgatgctttagcaacgtatgaagatttaaatagaatacttaaatataatcgtgatataaaaagatttgttaaagaagcgaagggaaacttacagtctcaaaacatatcatcatttagagttaaaattatcgaaagtgatgttataattcattcacttacgatacctcctatgaaaatgacatataatcaagcaatgaatttaaatgatgtagatagcatgaaaggtattataaatgacaatagaatactcagcgcatttgcatttgactattaa

SEQ ID NO: 410611 - DNA, 2067 bp, Staphylococcus aureus
atgaatattactactccttttaaaaagaaaataaaaaacggagagacaaaagaagaaaaaagagaaagaaaaaagagaaaaattaaacagcaagaagccaaaaagaaagtgaaacgaagaaaaaaactccaaaagaagtataaaaaagacaatattagagataaaaacgatgcgttctctccattatttggatatgattatagaccttcatatataaatgttggtaacagagtggctactattttaaagattgtaaataagtacggaacaaatcatgaagctagtttcggttggtttgtcaatctcattcccgaaagtagtgaagaaggtagatgtaagacttatttagtcgaggcagataagcctatagatactaaaaaacaagatgaaatatttaaaaagaacattaacaaggttattagaggacactcagaagaaaacgattctaatgcagataatgaaggcgaccgtactataaaacaaatggtagtagatgatttgttagaagcctctcgtaaagaagcaaaatcaacattagcaatggatagctttatttatttaattgttacaggagatacaccctatcatgtatcgaagttgttaagaaaaataaacgaaaattataaagatagaattaacggtgtacaagcaatgtctgtagcagggaatcaagaaaaaatgttcacgaccgtactagaaccacctaagggagataaacatgattacacttggatgtcttccgatttttctggcaacgaccatgctgtgagaagaggtttagatgacgatgaaggcgtatcagtgggaggtttaacggaggattatacaggcggacaagcacttatgtcattatatgattctattggtaaaaaggctttaattgctggttatgaaagctcctcagtttttgaatatgatatgtacccagaattaacgggagcatcaatgtggggacaaagaatcgcaaatgatgcaatgacaaagggacatagagtattccatatagttatgaatgactttgagtatggagctgatgattttgatattgagggagaagataatgaaacaaagtttatttgtcctgttagtttagaatatgacatcggtagagtagacttgagtaagggtaacctaaatccaatggaaatgtttggagacaaagaaagagataaagaaaatgtatctcaaatattcaatagtaatgttagtaaactaagacacatgtttaatttaatgtctggaagaacaattaaggatagacaaaaaacaatgttagaagaagcaataatagccttctatgtttcaaaaaacatgtggcataaacaagcagagaaatatcctaatgctttaaggttatttggattgaaatcagaatccgttcctaaaatgggagctttaactacacaattaacacaacttatattagaaaactctaagaataaagagtataagttagaggacgatataagagatgctagacatttacaatcagttatgaaaacagcacttgctagatatcgttcaatagttaatacaaccactacattgcaacaacccaaatcaatagacaaattgcaaatgtattataacctaaataaattaaatcatgacccagctatgttagaagcacaatttttaaatatatttagttatgtaatgacagcttgtgaacctggagacgttatcatgtttcatggtttagatagaatcagtatcgagacattaaacattttaaaaagtcgcatgaatacagctacaagacaaggtattaaaatggtatatctgttcgatacaattggtggcggagagtacaaatcagatgttgaatatgccaatgtatttaacacagaaggtatattatatcaaagtttagacgttgattttggttatacaatatttggagcgatgaacctaaaagatttagaattatatcaacaaaaggtaaagcaaaagctaacaggtcggctaaaatcaatattgacagcaaccaatcagccattccaatatcaaatcagaagaccatcagaccttactactgttatggtacaagcacacttctttatataa

SEQ ID NO: 410612 - DNA, 885 bp, Staphylococcus aureus
atgtcgcaaaatgatgaaatgatagaagtaagagaagattatggtttcaaagcaagtttaaggcaaaagccattagacgttattagacgtaacgaatggcttgagaaatttaatattccttatgcaatatcgatggcaggagtattactgttgcttgttggcgtgggtatgacaaatgtcttattaatcagtttcttactaaacgatatggaacgggcaaaatatatatggcttggcattattctattagatgtatctttaagtttaattatagctttggcatctttcatgatgccttcttatggttctcctcttaaaagtggacttgtctttttaaaacagcttataaaaagaagattaataaagttaggtctattaaatccagagcatgagacgggtatagcacgtataagaaaagatggaatgattttatatgcaaatggagattatggaatactttataaggtagatggaagaacatcagcaacagcttatccatctgaaatagctcaacaagaggagcttatggcgagctatcataatggtaggttaaccagtacaactgaatttcatattactatttctcaaagacagaacgctgaaacacaaattaggaaacaagaagaaagacgtaattcgacacaaagacgttcaatcaaggatttatgtgatgcggaaattactaacttagaagaacatatcaatggtgtaaaaccggtatctgaacattacttaattcaacgaaatagttctgagcaacaattacaaatttcagctgagagattagaaaattttgtcagaagagataatatgtataatagtattttaaaattaaataaaaaagacacagaacgctttttcgatggattctttaaacttaaataa

SEQ ID NO: 410613 - DNA, 2202 bp, Staphylococcus aureus
atgcttaaccttatagaaacagatattgctgaaatcaactacaaagatgaagaaggtaatttacatcaatactctgttgtaccaattgttaccctaccaaaagaaaagttagaaaaagcagatggcaaagaaagacgtttagaaagactatggaacaatttttataagaatgttcataaagaattagaaattattgaagatatacagttagataaagaagcagaccgtaattttagtgattatgaggaagaccaatacgcttttgttaactatgaatctttatcagctttgacagaaagaaaaagagaaagttatagtattggtttgagatacacggaagcgaaagacgatttcacttatatagctaaaccttttagtaaagaatttatagagaaattaagtatttctgatatagaaaatgtagatatggatataccatttagtcatttagaatcggcacgtgacagtataattaaactaatacaagcacaatcaaaggagaacaataaaagactattagaagaagacgatgaagaacgcagacaacaactgagaagtgaagaagagcaacaagaagaaaatgattttaaagacgaagacgaagaggttcaaaacgaaggatttgatgaaaacggtggtttaagtccagatattgataaagagagttttgtaaagacagaagatgattcatataaaaacgatgaagaaaatgaagatgattttgaggaagaagaacaattagatgcttttaaattacaaaatgatttatataatatcattgataattatgtcccaagagtttatttagaagatttaaacctagatttagatttcagagatgaaaaggaaaataagcactcagcatattcagaattagaaaatataactatagataatacgcttaaaactaaaaatagaacactggaaagacttaaagaagaaagacaatctattattgataagctataccgtaaatcatcaacgttactatacagaaaatacacagacatagaaaaattattcaactttgaatctccagaatcagagtatcattatgattatgaacaaattaaaaattcgtatgaagctgtattagatagttcagaaagccaaagagacgagaagcttgctgagttaacacgaaaatttgatgaggacatggaaagacgtgcaagaaacgcatatgaacaagaaaaggcacgtattgaaagagaagaaagatatcgagtagaagaacaagcggacgagttcttagaagatttaagacgaaatgcagaagaaatttttgaaaatcaaaagaacaatttaattaatgatattaatataacttttgaaagtcgttatcatggaatagttgatgaagtattagacgagtatcaatcagatatagatgaaaatgtaaaaagattctatcaagatgccgaagaatctacttcatatattattgaaaaacacagagaagatatgaaggaagttcaacaacaaatacaagctattgaaaaagaccatattcaaaatgaaacagaatttgaccgtcgtgtgaaaatggaagttgaaagagaaactcaatcgatgagagaacagaacagagactttgaaagagataacaaatcaatgaaagaagaattagagagattaaaacgacaacttcaaatgaacgaaggaacaattgataatcttcaaatagaaaatagaaagaaagaagaacgattacgtattagtgaaagtgatgtagaacattataaaaaacaattaatgaatcataatcaaatcggacatagaaatggaaatgacagctcaaattttaatcaggttgtcgcacctcaattaagtaataacgaaggtgtaggcaaccatgaagataatgtagtggctactgaaaaggtagttacacctttaaaagataaactaaagcacccgcttatgataacgttatttgctatttcacttggtagtgtaggattattaggcatctctacagcagaacataaccagattgagagtgaaaacgaaaatataagtaaagttttatcaaatattgattcatttaaagatactaatgaaggtaagtatcttggaaaagacactacattaacaattagagcagacaacagattaaaaccatcaaaagtcataaaaaaagatgatgataaagttaatgttaaaagttttgataataaaaactatacattgaaaaattaa

SEQ ID NO: 410614 - DNA, 342 bp, Staphylococcus aureus
atgtttgattctatagatgaaattctaaaaagtgttttagaaccactaggtagtacaggaagaaatgttattctcgtggtagcaacagcacttttaatttttacaattgttatggcgcttgttgcgttgtcaaaacaacgtttcggtcaacttcttttatggatagtaattagtattggtatctttatactagggactagaggttacaacatcacaaaaacattaggtgaaaaacaaggtgacgattttgatgggcaaatcagtgcattaattgcatttagtattgtacctacatacttgatgcaccttaaatataaaaaattgagacaaaatacgaagtaa

SEQ ID NO: 410615 - DNA, 198 bp, Staphylococcus aureus
atggctgaaccaatgcgaaaaaaagggaatgaatacaattcagaaggtacacaaaagcccaaaaagaaaccgaatataattaagcgtgggtataggagtatgaaggaagatataaaacatggttcaagagttgaagaaggaagtttaattgacgttgttcataagtcatatcggtcaatgttcccgaagaaaaagtga

SEQ ID NO: 410616 - DNA, 3804 bp, Staphylococcus aureus
gtgagttataagcattttaagaagatactattcctcttagcactagtaataacgctatccgttgttatacccagcttatctcatgttgctaatgctctacctggagaaggatatacaggtggaggagataagtcagaagaacagataaagaaagaaaacaaggaagcgaaggaaaaagaaaaaaaggaagaagaaaagaataaaggtcggaatccaggaagaaattctccagacgggcaagcaagagaagagggagaaagaaaagaaaaaaacccgactaaagaagaaaaagaagcaaaagaaaaagtagaagaagattcaaagaaagcaaaagaaaaagagaaggaaaaagagaaggaaaacgaggacaataaaggaacaacagcagatagcagaaaaaactccccagatgcaaataagcaagaagaacacaaagaagatgaagaaacaaaaaagaaaggtataaaaggtgtagatagtcgttggacgttatatgcacaaattataatgggacaagctattgaaactaaagccaaaaaagagaaagacccagcattgaaaaaagcgtttgatggtgtagtgtcaggtatcatcggagatggcgggacaactttggatttaccttacactaaattttcagcattaaacaaagaattaacagacaaagatgtagacgtttatgaaggtggggaagaaggacaggctttagcttcaacacttgctactttcaatcagtatggatatttcaagagtttatctggtaataagatagcaactgaatttattcaatttttcggggatttaggtcggttctttggtggtggtatagcttatattggtttgattttttacaacttactgagctacctattagaagcattgctaaaaggacttgttgctttaaatccatatagtttattaggttttgacaaaggtaaaacagcattaccagataatccagtttctaaaacagttaaaaaattctttgatgcaatcggtttgaatggagaatttttcactacattaactgagtttggttttatctgtattgtaataggatttgttattaaaacaatgataaatttagcgcaaactaggttcagagaagcaagcagtagagtgtacaaaataatagtacaagtctttgtactatttgtcggacttccgttattattcgtattgtccgcaagtattgcaaaaacagcaaacaactttattaaagcaactcacgtaacagattctccagcaatgtcgcatctgttggattctcgtgctatggcatctggtttgaatttatctccaagcgctttgaaatcatcagaaacgccacatgtgagtgcggaagaaaattatattgacacaaaatatcaaccgtcaaaaaaatcatcaagaaatagaatatatgatatcaataaagaggcttacgcaagactatacaataacgataatgaaagagacattagttttaaacttgtaagcaaatggttaacaggtagcaactttgatgtgaacacatatatggcggacttgcgctctaacgcagagctacctggttctaaaaactttattgaagtttatagtaaaggtaaaaacctttcggcttcaaaaactaagaagttatcaagaagagatttagaatcagccatctggtcgtcaacacaaaatacagatggggatttaagaaagccagaccacgacaattatgaccctactttagaaattggtgtcgaaaatgattcttcattctctactcaatcagttgcattgttattacaatcttcattcgattcttcatcagctaagttttattcttacaacattgcacctaaaggagaacaagcgaatagtaaaaataattcaactataaaaacagaatggagagaaatatctatgccaggagatggcatatttggcgtatttggttcatggttatcactagtatctgaatcgttggcatacatctttattgcgtcagcagttatcatggctcttatctcaacaacatttgctcaagctatctataaatttgtgaaacaagtattccaagccattatatttggtagtattcactcattactggcaacatttttaatatatcttggtactatcggctcactattaatggcggtaggattgcctggtgcatttgttaaattcatacaaggaatagagagtgtagtattcacaattagtggagataaaatacccgcaggattcgttgaaatagttggagcgcttatctctcttattttctcttattggttatcttggggcggtcgtatcgcagcaactggagagacaccagctagattattagttacattcttcacgcaaatggctttagatttcgaaagtcgagttgcagagctaaaccgagcaggtaaaacaagtttccgagtagctggagaaggactaagacgttctggaagacaacgcatgaacgaaacatcacaacgtattaaatctggagctactgaaagtgctaatgctatgaaatatggaacaaaaggtgctattaaaggcggtggtagagaggccatcaaaggagttgttgctggtgctgtaactggtggtgtcggaggagctgttgctggtgctactaagcaaggtatgaaaggagcagttaaaggcggtaaagcaggaagtaaaaatagagctggctcagaagaagcatttaataaatcgcttgacgattcaggacttagtaaggtatcgatttctcaacttaaagaaaactttaaggaacgtggtagtaagcgttttgctaataaaatggggaaagccaatgataatggattgatgagtaatgagatgagagaacaaagcatgggacgttatcaaattcttaaagctaatgaaatggcagatggcattgacgaatcagctacaggttcagacaaatataaaaacgttgtcaataactccgatgttccattaagtgaaaatttaacagcagataaagaaagtttagatagaatttctggagaccaccatatgtacgacaacgcaactaaagaagacttaatgaaatattctcaaaatgctggagatggtgcgagagaatttgtagattcagaagatggcaaaccagcatttactagagacgaaattaattccttatctaacgccgaagacgaaaatgattttgtagatagattacacaacacacatagcggtatgaagtacgcattgcaaagtgataatgcacgcaatatgctacaaggttctaattttactaatgaagctggagaagtttcaatggataaagttaaacaattccaaaacactacaaacaaagccatgaataatggagaaacattatctaaaggacaacttagagataaagcattattagatagtgcgtttgttatgggtgctaaagaaaaatatcgtaaacctagtcaaaaattccaagataaaattggtaatacaaaatcagccaactactatgatgagttaagtaaaaagcaagctcaaaaaaataaaacaagaaaaagacaaaataatagcagtgtacaaaaaccaactagcaaaaaacaaccgactaacgttgcttcacgtaagcaaaacatgaacaaacaagctaatcagagaaaaaatcgtatgagtaatggttttagcagaaaaccatcaactcagactaaacaagctaatccaagaagtggaaaagtaacagcaaagaaacaaccaacaaattctgatagaagaagacaaaatactgtatccagaaaacaatctaaagcaactaagccacctgttaataggatagataacaacatgaatagtagacaaagaagagactaa

SEQ ID NO: 410617 - DNA, 1917 bp, Staphylococcus aureus
atggaaaatcaattactgtgtcccgacttattcgatgaaattaataaggatttaggaaactcattatctgtattagaagggataactactgtaataggtagggaacgtgagaaaaacgcattaaaagttgtgttgaacaaaaaagaaagacctgtagcaattctattaggaggtcacggagcaggtaaatcagttttagctaaagcatatatgaatgatttaagaaatgaaggtattcatgtagaaatgtttcaattaaaagtggggttgatgggtcgagattccgatgagttaaaggctcgtatgaatacgttgttagagaaattaaaagtttataaagatgaggctttgaagaaagataagaacgctgagttcattttatttatagatgaggttcacttagtaatttcaatatttggggaaaattcaaaaatcggcggggatttattaaaagaatccctagctgaatcagagaaattcattaaagttattaccgcaacaacagtagacgagtatttaaaatatatagcggacgacaaagcactagaccgccgacttaatagaataacaataaaagagacctctccttcactcacttttaatatattgaaagattggttagtgaaaataaccaaagaaagtaaaaataataaagattacacaaggcttgtgagtgatagcttactaaaaagaattattgaagcaaacagggcgtataatgaagaggattacgagccagcaaagtctattaatgttttatcttcattagtttcagatagtgaagtatataatgaaataccaacagaaagaacgttatctagggtgttaaaagaccaatttaatattgagcttggatttacgctcgacccttataagataatggaatattttagaagtaggattaaaggtcaaccgcttgctacagctgaatatgaaagggttattaaagcaatcgcatttcagctatatccagataggaatagacctagaggtgcaattttagctgtaggtactactggtactggtaaaacagaagcgtgtaaaacactagcttatgctttacacggagatagaaacgcctatgtcaatatatcgctgacagactatagtgattctgacggtgcaaggagattgtcagtcagaataggtaaggctttgaacgaagaccctaatagtattattttattagatgagatagataaaggaacagaagaagcaagaaacgttatgctcccattattagatgaagggcgtattaaatatgaaactgtcggacgtgatggaacagttacagaacatacatcaagggctactaatgccatcattatcgctacttcaaatgctggagcagaattaatggaagagatacaatatgctgatgatgaagaatatctaggggaacgcttaacacctgagcttaaaattaaagctcgtgatatggttgaaaatgttaagaagacactaggtaaacatattttacgaccagagtttatagcaagatttgatagcgttattccatttagaacattagaagatgaaacattgttagctattgctagaagacaattagaggagactttgaaaagactttacgatgttaagggtatatttattcctttgccacctataaaggattggtcggcaacatcaatgccacataaaaccgatgctgttagtatgtatattgttaaagaacgtatgagagatagtacaaacagtgaatctaaaggggcaagggaaattcagaatgtgattaatgaagacatcatatctgaaattattgatgctcattatagatatccagatgtcacgaggtttacgatagataccaacggaaaatcgagctttgaaaacccagacacaccagaagcacgtggattaattgaggttaaaccagtaagttataatgtaatttga

SEQ ID NO: 410618 - DNA, 1203 bp, Staphylococcus aureus
atgaaattgtttaaaggtggcaaaaaagttaaaaataaggcaaaaaaggaaaacgcaacatcgtctactaaaccaaaatcaaaaaagacgaagaaattcaaattttttaagtcacagagagaacggagacgagaaaaagccaatcgtgatgaaaactttgaaatgtttagaggaatagctggagatagagactatagaacatatcaaggattaattaacggcattctcgttttcataggtgttgccgttactgtgttgggaggcatattaacaataggaggtttaaacaattataaatatttcttagataataatacaactcctattggcgacactttaacgtttggtaaaagtaaaacctccttaaaattcgggggtgcttggactgataagaatagagacgtaactgttgttaaactcaagtattctaaaggagcaagaaacaaactttcaacacagggtaaacaatacaaattgtttataaaagatgatgaaaataaggttcaaaagaaagtgaaaatggcatatggtgtattaggaacgcacggggacggtttcctatttataaacggtaaattggataaaaaagcgtatcaagtaattattaccaatcaattagatataacatctggagacgatagcgaaacagatactagtagttcttctagtacaggtaatatcgcaaaaagagctgacgaattaacgcaatcagaattagaagaatcactttctaaaacgaagagaagtgattataaagacaatgggcgtataaactttggaaaaaacagccataaacctaacgtggattacattgatttccgtgttaatacttattctgattcgacaaaagttataaacgataatttccaaaaaccaaatggagagattgattactcaaaagttattgataaaacaacaatagatgatgttgttaaagcagtagataaagatatcaaacaaaataaagagaagactaaaagttataaagcaggcattaaagagtttgagcagagagttaaaaagaacaaagacgataaagatgcaaaagaaaatatcaagacattaaagaaaaaggtagaggataacgaagaagagttaaaagaattagaaaaacttaaaaaacgttatgtcgaagaagactttgacaaatcttcatttggagatatgcaagaaaactataaagttattcatagtacaaaatag

SEQ ID NO: 410619 - DNA, 894 bp, Staphylococcus aureus
atgaatacaattaatgatttcttaaaaacatacattccagaagattataacggtttttcagcagataaatttttgaatgggaaaaagttaaaaattgaaaatgtaaaaaaagaaagagttcaaggacaattagctattaagatagatgtacgtattattgaagatgctaacggagataatgataataaagtttttacaattcgcttagatagaaacgaacatgtaagtaaagaaatatttaaagaatacttagagaacgcaagggggcatattggatatcaaatctcgatagatgctcatacagatatcgaacaagcatacttctatcaacaaagaatgctcactttagtagtaacacattttgaaatcatcgaagatgtaaaacaattagatgttatccaaccatctatgaaagatagaccgcttagaaatctagcggattatcgtgttttcgatattgaaggattctttgatgaaaatgaattgttttttaaagggacatactttgataaaggcaacgtttatttcaacattcaaatagaagatgaagcattaataaaatttgctgttccagtggaaaattcagatatattaccagcttcattgttaacgataaatggagaaagtgatgacttactcgaagattacaaattttctaatgcaagttcacatagatacggaacaagatggactttttactttgatgaattaacctttaaaaaaggtattattactgaacaaccgtttaaacttgagtatgattcttcatataacatggaaatggataaaaaagatgatgataaaagtgaagaagaacagaaaaaagcaaactcagtaaataataatccatttggtaatagtcggagttcattgaaagggcgaatgcacatctaa

SEQ ID NO: 410620 - DNA, 426 bp, Staphylococcus aureus
atgtataaaaaagacttaaaagaaatagaggattatattatttttttgatatcgcaatcaaagaaacacacacctactgagatgatattagggaacattcctcatacgacaattttgaattttaactatgttttatataaaaaccctttaagtattaattctacaacattaagaaagatagtaataaggattgatgaactagaaggggagactagctattacaaagaattaagtaaacttataaagaaatatgttgagaagaatataatgattggttctatacaatatttaactaaggagataggtttgaattacacaaccctacataaaataaaagattttaaattaacaacaccatatcggcttattacattaaagagatatggagagaaagttaacaattttatagaaagaggagaacaataa

SEQ ID NO: 410621 - DNA, 219 bp, Staphylococcus aureus
atgttcattgtgatttataacaagcaaggagaccaattattaaagatttcggaagcagtaaagattgctaaaaaaaacgaggaaatacaattgaattttgactctgaggtagaaggttatcaatatgttatcgacaataatatttatccagaagttatcgataaagatacactttactttaaagcgcatcagcttggtattcgctatgtagaagagtga

SEQ ID NO: 410622 - DNA, 792 bp, Staphylococcus aureus
atggtaagagttataacaatcaacaactttaaagggggcgtttctaaaacgtctactactaacggaatagcgtatattcttgcagaaaaaatgagcaaaaaagttttagtaattgatttagaccctcaagcagatgctacagaaactttacttttaacttataaaaaacaagtgaaaaatagtctttatgaaacattaaaagaaagagaaaatatcaattattgtcttaccaacctaagtaaaaatatggacttagtaccatctagttttaatatgattggcttccctagtcttttagaagaacaggggtacgatagaaaaactggagctactttgatagaccaattaattagacctataaaagaaaattacgattatatcttaatcgacacaccaccgacaataagcgactattcaagcaatgctatatatgcttgtgattacagtttaattgtcatgcaaacacatagaagaagttatagggctgtttcatcatttatagagtatttagccttattcaaagatatatatcaagtagattttgaaatagcaggtatattgccagtaatgtttaagaagtctggtaaagttgatagaacagtattacaggattctattaataaatacaatacctatttattaaaccattatgtatatcaaagagacagagtgaaactgtgggacgaaacaggaataacaaacgaagactatcatgataagcgtactttagatatgtatgaaaatattacaaatgatttactgaatgaaattaaagaatatgaaagcgagtga

SEQ ID NO: 410623 - DNA, 309 bp, Staphylococcus aureus
atggctaaaaaatcactgatggataatttagaaacatcaaacctaaataacagttttataaatcaaaaacaaaaaaccgagaatctcccagaaacaagtttaagaataaaaggagatacccacagcaaaataaatgcaattaaaaaagtagaaatgaaagaatctctaaacaccgttttagatatggctttagaaaaatatatttcatcactcaataaagagaagagagaagaaatacgagaactgaccgaaagcgaaaacgagtataaattaagaaaagcacgtaaacaagcacagcaaaaaaattaa

SEQ ID NO: 410624 - DNA, 459 bp, Staphylococcus aureus
atggaacgctcaagcaaatttagctctgacactaatattggattaccaaatgttaaagaagctaagcaaatgatgtctaaaggaattagccttgaactatatatacaaaggattcgacacggttgggattcgtataaagcaatgaatactaaaccaaaaaatcaagattctataaataattataagcagttttcagactttgaattagagtatttattaaatcattctattacttatagtgattataaaaatagaagaagattagggtggtcgagagaggaagcaatatttattccaaaaggaataaagagatatcaaatacttaaccatgatttatacccagtaacaagagaagaattaataataatatataagaacgaaactactattgatacttatagaacaagaagagctatggggtgggggaaagaggaggctatgaatacacctaaaaaataa

SEQ ID NO: 410625 - DNA, 381 bp, Staphylococcus aureus
atggaagtttcagatgaaattaagaaacgtttgaagaaaaataatattcctgaaaaaacgtatataaaacgtagatacaaaggagaagatattgaagaagcatcaacaagacccgtacaacaaaagaaactcgataaacaaacgaaggaagaattagaaaaaagagggattcaatacgtaacatattggcaacgccgaaatagaggcatgtcacatgagcaagcaatgacacaacctaaacaaagacgagttaagtttactgacgaggaaaaacgaatcatgaaagaacataatgtatctgaatcattagcacgaagacgtatgcgttattcaaaatggactagagagcaagtgttaactacaccacctagaaataaatga

SEQ ID NO: 410626 - DNA, 384 bp, Staphylococcus aureus
atgattactatatttctgatatttactcctatatggattttatgtataggattaacattattacttattaataagttattgttaaaaactgaattaacaagcagtaattttgctctaaaaactttgattaaaacacaaagatttataaccaaagatgaacaaataaaaggtagaaagctatatgtagctttggtgttttcaactgtcgttactactattatttttggtgttatatcattttgtattttcactgtttatcaaggtatagtatctaccacaattgtaactattattctagtaatcattttgtacatcattttctctaaattttttaaagcattagcgtatcaactgttcgaaaaagataaaaacactaaagattaa

SEQ ID NO: 410627 - DNA, 474 bp, Staphylococcus aureus
atgagaactatagacgaaattaaatctacttatcaaacattaggggctgtaaacactttagataaagctctaaaaaagacaaaaggtttttctcttttagatattatgattttaaaaacaacttttgaacacaaagaatttattcgtaaaactgagatagaaaaaatattacatgtttctcctgccatgtctcaaaagtctactaaacatttaagaaaagaaggtctaattattaaagaccgcgatattgatgatgaaggaatcattatcataggtatgactgaggatatgagacaaaaagcacaaaaattatttaaggaagtagaacacacacaacaagaaatattaaacggtaataatccagctgataaaatcaagaaagacaaagagaatgaaaataataatcatacagaaaacaacgacaaaaataaacataataatccaaatgataattttaacaagaaacataagtag

SEQ ID NO: 410628 - DNA, 630 bp, Staphylococcus aureus
atgaaatacaatcaagaccaccctatttgggcggtaattaaaaatgcttatactcacaatgaccagcctatactatttttattctttaatttatttctaattatcgccatcgcaattgttatatatagtgcttataaatggaaaacagaaagtaaagattatagatttatgactatattcgcaagtgtactatgtattatattcattggttttatgttgctttatttgattaatagcgataataaggtggggaaatatgaaggcactgttgatattgcttttacttctaaagtaaaagatagcgaatactctattgctcgattttcaaaacaagatgaagataaaagctctaatggattaaattcattcgtaatgaaaacttccgatatggataacctagatattaaatctggtaaaacagttagtatttcatctaaaaatcagccagcaccgtcagaagaaaaatcattcgcttatttagataaagacgatattaaaaacgtgactgattctaaaaaagtatcaaattataacaagacaatggaagataaagaagaacaagaaaagaaagaaaaagagaaaaaagaaaaagagaaaaaagaaaaagctaagaaaaaagacaaaaaatag

SEQ ID NO: 410629 - DNA, 654 bp, Staphylococcus aureus
atgagaaagaaatacacaacattattagtgttttcaattcttctaattatgctcataggtattagcttttactttctatattcaaataataaaccagaggagcaatctcaaagctcctctaatacattattacaacagcaaaaagaatttataagggataataattatattacagagggaagtaagaaaagcaaagttcatgttgttgtattcactgactatcgttgctctcattgttcaaattattactataaccaaaaacttagttggctacagaaatacattgacactgggaaagttaaatatacagaaattcctttccctgtaatagataaagaatctaataactatgagaaaatggctagagttatacaaacacgaaatgatagtaaaacattaatagaatttactaaaaagtcttatcaatcttctagtattgataataatccaataaaaacgcttaaacgagttaatcttaattccaaaacattccatgatattactaatgaatataaatcatctaatataaaaagtaataaatctgaaatacaagataagtttgatattacttctacaccaacagtatttgtgaatggtagatttgttagagatatagattttatgaaaaagatggtagaagaagaaattaaataa

SEQ ID NO: 410630 - DNA, 954 bp, Staphylococcus aureus
atgaaaaagaatgtcattactgcattagctgtatcatctttgatactggttaattcaactgctgtagtacacgctgaaagcaacaatacagaatcacacaaagaattagaacatgatgtttatattgaaggtgctgatttaaataatgaacaagccgaagaaacaaaaaaagaattaaatgttaaagatgattttaaaaagtatgaagtatcaactcaagatgtttctaaatatacaggagggacatacgatacgatatactctagtgctacaatcacaccaaaaagatttggtaaaggggtagacgtaaaaataacaacaccagaaaatataactcgaattacaaaagaacaatacattaacgcttgtattacatctggaattgaaaatgcgaaaataaatgtcgcatcagtcgaaaaagttactggagaaggagctttaacaggtatatacaaagcattagaagaagaaggtatcgaagttaatacagacgatatccaaaaagcaaacgaagaaatggataatctagcaacaatcaatgatgagcaaaaagaaaatggtaacgatgtaaatgaaccgctaaataatgctgtggctgatatgaaagaacaagttgcagataaaaaagcgaatggcaattcagtatcaagagaagatgtacaaaacatcgttgataatacactatctgataaaggattagataaggttttgaatgatagtcaaaaagaaaaattagtagtaattatttacaatgcctcacaatctaatgctatgaaaactaatccagaatctatcaagaaacaagcaagtaaattaaaaaacggactatctgataaagttaaagatttcgacagcaaaaatgacggtgttttatctaaattatggaatgactttgtttcttggttcaagaatttcataaatgctattatcgatttctttaagaacattttttaa

SEQ ID NO: 410631 - DNA, 1041 bp, Staphylococcus aureus
atgaaaatggaaaatattagaaatacagtaaaggaaaattggataaataatatcagagagacagacgatatcgacaaactagaaaatatatccaataactatattactattctacaaagcttaactaacattagtaataccctgtcaaaaaatgataagcaactagataaagaacaaccaattatacagaaaaaaagtaactacaatcacgaattgccaattgacttatatgtatttcaaagacgattaagaggtggtatagcaacacaaaatgatgaatcaacacaagttactgaattagtgccagaaagcatcgttagagaagagggattagtcaatggagatgtaatcaagatagagaagcattattactctaacaatgtacaccgcttcacaaagcaaaataatatacctagagagaacgtgggggactatcctattgtttcttatgacaatgctattgttactttcgatgatacattgcaacaatatactattaaatgttattacactgatggagatatgaagacgacaccacaattgattataagtaatattgatgtagaacgttacggactgaaagatggagatgtcgtagacgtggcacatcagccagacagaagctcagtgcgtgtgagatggaaatatagtacagacgaattaccttatgtgaagccaagaaaagcatcggaatataaggaaaatgaatcaactcaaatgagtatagaagatagtatcataaaagataaaacgattggtgttatcggagctgagagttatatacaaagctatacagaagaggtagaaaagagaaaagggaatttaattcatactgattcagaagtaaaaggaaaaatagaaaatttagtaaaacagagtgatatcgttgtaatacctatttttgaggtcggtcacatcaaaatggatttagctaaacatttttgtaaagaattagatataccttatcttattttaagaagtaacggtagaagtaattttattatgtctattgaaaagtatttgtctaataatgagaactag

SEQ ID NO: 410632 - DNA, 1305 bp, Staphylococcus aureus
atggcttataaaatgcgtgttacagataaacaacctaataataaaaagaagattatcctaagcgtaattatagttatcttaattttaatcataggtttagccatatattggtcgttgactaataaaagtagtttaagccaagttaaagatttagataaagcaataaagaacaatgactataagacagtatcaaacatgctcaaaatcgaaggagataatataaatgaaaccgaagcgaagcatttaacagaatatatcaatcaaaatcaaaatagacctagatataataaagagataactcaaattaaaagaaatataaaaaataataaacaatctgattctgaaattgggagattaaccgataaacaaggtaaaccaattattacaatatctcaaaacggtgtggacgcttttatatttcgaaaggtatcattccaaccccactatagaaatatatatataaaatcaatgaacgataaagtaacatatggcttccagtataaaaataaagaagataaggcggtcattacttctgacaacgctaaattgggacgttttatagttggagattatgacatacccgctactaaagaatttgaagaatctgaggttggactagaaacgtctattgacggtcaactacacattaatacagataaagttaataaagatggtcgtatatatgcagacgataatttctctcaagcgtggtttaaagtaagccttaaaaataattcatcattagacaaagactttaaactacttatagatgataaagagattgattataacaaaaagaaagtttacggtaagctaccagcaagtaccccgctagatgttaaagctaaaggacgcttaaataataaatctctatatacaaatgaggtacaagttaaagaaaatacacaatccaaacctcaaactattactctaaagtttgataaaaaagaaattaataaacagctaaacaaaaagaaaaagacagaaaaagaggctaaatcattcatcaaagattatacagaacaactcaacaaaggctatgaatcatctgactttagcagattgaaaagttactttgaagatgataaatcagacgtagcaactaatattaaacaacaagtagaatctaaaaaaagaacacatttcaaagatttaaatatagaatcttcaaattttaaagatgatgaggttacagtgattatcaataagaagaatgagaagaaacaacgcatacgctctcaatatgacctcatatacaatgaagataaagacgaatttaaaatcagagaatacaaagatatttaa

SEQ ID NO: 410633 - DNA, 219 bp, Staphylococcus aureus
atgagaatcaaagaaattattcatcagcatcgtagggacttcaaagcaatatacgagtgtgagcattgcggatatgaaaaaacagatacaggatatgacgacttgaacttccataacaacgttataccaaatcaaatgaaatgtgataaatgcggaaaacttgctaaagacaactacagacctttacaacctaaatatccagaagatatgcaaatataa

SEQ ID NO: 410634 - DNA, 423 bp, Staphylococcus aureus
atgaattacaaagaccttatattaaacactattttgaaagacgatgatacaagcactggcggtaaaagtcatgacaaagaaactttaattgaatttatgaatgaagtaggaattaatcacgattctatgttaggaacaattaactatacacttaaacaatgtggtatcttaccaatcaatgaatttaattatccagaactttttaaatatactttagacgatttaaaatactatattgcaattaattacgattacatggattgctttaattataagaaattcgataaagaacatcacttaacatttatagaggaaatcatcgtacaaaacgttgaaaaaaatagtattaattttccttatgaatttggagaactcattatcaaaaacgattcaatttcaatcaataaacaactatcaatgtaa

SEQ ID NO: 410635 - DNA, 399 bp, Staphylococcus aureus
gtgttaccaaaagaatataaaaatgaaacagattatcgaaaaatacctagagaatatcttgaaagtaatatccctcaaggtagaggttctgttaagtggcaaccgtttgccacgattcctgaacaatatgaaatgttgagacaatatgcacaagaccaaaacagacaggatagaccatcactttttaatgaacaaaaaacgttgataaatgatgtgattcagcaaaaaatatacactcatgaacaagtgaccgtttactattgggacaatggatataatcaagaaataacaaagtacatcatcaaagtagatgtaatgagcaatatacttacacttggagataaaaacggtagtaatctaaaagatataccacttcaaaatataaaaagtatagactaa

SEQ ID NO: 410636 - DNA, 1362 bp, Staphylococcus aureus
atgaaaactaactactacgaaattccaagatatgtatatgaagatgataagtataaatcattaaatcataattcaaaattgctatatgcaatccttttagatgactttgtaaaaatgcaaagataccacaaaaacaaccccgatacatcttattttaaagatgaacaattaaatacttatattgctccaacgagagaacatctagctcatttacttaattgttcaatcgatactataacacgcttaaaaaaacaattatccgttcacgaactactaaaagaagtacgcactggacgtaatcaaccgaatagactatatccaattgtcccaacaaacgttgctggagatggatatattaaagtccctcaattactatttaaagataaatactatagaaatatgtcaggcatcgctaaaattgtttatagctgtttagatgcccgcttcaacatgagcaaaaagaatggatacaaagatgagaaaggtcatgtttattgtaagtattcttataaaacattaattaagtatttaaattgctcacgctatgcttttaaaagagcaaaagacgagcttatagctttaggtcttatgtctcaagctaaagaaacgcaatcttatagtatgaaatactttatgaaatctccttatacaagagaagataataaaacaaacacagaagataaagcaataaaagaagctactagtaaaacaagctcaaatcagcatgtttacaagggacacgacaaaattgaaccgaccgacacgacaaaattgaaccgccaggacacgacaaaattgaaccagaattaccctacatctatttatcctacatacagtcaaccacgtactaatgttaagagtgttatgtatgataagagtatgtctaaagagggtagtatttcacttaacacgcacgacatctctaaaaaccaattatcagattcaatcaatgaaaaacaaagatacttaaaacaatacccagaagaaatagcacaagctcttgctccttatgacttagaagaaattcaaagttatatgagtattatttgtaataccaaaaatcagcataatttagagatggatagagatttcacacttgaggacatggcttatgaattagcgagaactatcgaccaagttaaaagaactatgaaacgtaaaaacgaaacacctaaagcgatgtttggttattttaaagttgccattattgattgcattgaagaatttgatattgctgtaactctcgaacaattacgtgaagaccttaatttcagtgaacatgaactaaaagaaagtgaagaaaatatgcgtcaaagaaagcaaagacgcatggaaaataataaacatcaatctgtagcttaa

SEQ ID NO: 410637 - DNA, 201 bp, Staphylococcus aureus
atgtgggatatcattcagaatataattatattttcaattgtcatgacgattgttagattcctagttaaaggcatttttaagttaatacttataggcattgttattatgataattatttatggaatcaatcaactaggtattatcaatcatatcaatttgctattataccctaacgcattatatactgtagtaaacaaatga

SEQ ID NO: 410638 - DNA, 543 bp, Staphylococcus aureus
gtgaaaaacagcaatagacaaattaatgattacatattggatttagaaagtgcattagagaagtattcagtttatgtatggaataagcaaggtaaattctacaaacataaccagccagaaaatgacgaacagatggaacttcattttgatgtattaccacctgtgaactcacacaatccaattgctttgatagatgatgatatagcactaaaaaatggttataagtatcatttaactacttctagtgaattatctgattcagcaatcattgataacatcgtctgtctaacgcctaaattaaatgtatttaaattaaaaaagaggttaagtcagtacaaaagtaaaggttataaaataattattaacaacgatacctctacactaaaacatttaacagcagttaagacaaaggggttttttggtaaagttgtcgaagaatataaaaatatagaaaaagattgtatcgatttacttatagataacaagctgattgcaactattgatggttcgattcatcgtccagagatatcaaatccaaaataa

SEQ ID NO: 410639 - DNA, 348 bp, Staphylococcus aureus
gtggataagaaaaacaaaatgaacttattattgtttttgagcaaggctttccctatttctttatttatgtatgcgtgggataaaaacaacggaaaagcatatgtttattcattcattcagatgttaatcatgtttttaatactatgtttaggatattttatatctgaaattggatataagctaaccatcattatatttgatattaataatttcatacttcccgatataatcattcaaatattagctgtattgttattagtatgtatttatataatagtgcttatagcacctttaatggtaggttatacatttaatcaattaaccgaaaagagaataaaggaaatatga

SEQ ID NO: 410640 - DNA, 369 bp, Staphylococcus aureus
atgtatgttatagataatttgattgataaaattgaagcatttaatgaaaagaacgacctacagcatggaaattcagaaacttactatgaagcggacaggggcattttaacgacaatagagggaaaaaatcacacgacattaacgattgaaattagtttagatgatatttatgaaactgagcgtaataaaaatgtattagaagtgataaaacgtaattatcaagcaataattaatgactttgatgttgatactgaatttacagagttgtggtctcaagatttcgctgataaaaacggatttacgcctcagatatttattaacatattagaagatgacgctaaccaatttgataacattcaatatagttaa

SEQ ID NO: 410641 - DNA, 195 bp, Staphylococcus aureus
atgatgaaacaacagcaaattgtagataatgaaaaccaagataatttttctaaagacacatatattatgctaatagatttgatgattggacttactgatttagaagttgaagagttaaaaacacttgatgaaagaaaattaaggttcaaatataaaatggctttaacagagaagacagatgaaatggtaggataa

SEQ ID NO: 410642 - DNA, 486 bp, Staphylococcus aureus
atgaacccagtattaaataatccttttattgatattttagagaatgacgaagcagaattaagttatagatacaaagtgaaacatgatatttcagatattattttacctgtagtgaaacctagtaaagatagcgaaaaatggttagaacaatatagaaaagataatagtaatttagatgaatacgattttatagtaatgaatacagataatgtagaacttttagctggcgttgataaagataactttttagatagaaacccgtattatgatattgggaatcactataaagcaaaatgtattagagaggttttaaatgttaataatcttgaactagtgaacgcaacagaatatgacgttgctgacacgtttgaaagtcaaatgacacaagatgtaagcattaaagattttgtagtaagtgaatattttattgattcactatttaaaaaaggattagttagattaaaagtaaagtctccgtttgaataa

SEQ ID NO: 410643 - DNA, 219 bp, Staphylococcus aureus
atgagtacagtaattaatcgtgtagaactaactaaaccatcatattttaaagaatcgccattactaattgctaaaatggcacataataaattgaagaatctatcaagaaatacagaagcggatatgatttcaaaaagtattactggaaatactagtttaaagcaagcgtatgaaattacctctaaatatattatttggaagtctcactatggcaaataa

SEQ ID NO: 410644 - DNA, 528 bp, Staphylococcus aureus
atgaagaatgtaattattttaattatcgtcgctattgctatagtaatgatgaaagaattaatcgtaaaaaaagttttcaataattcaaagaagctgattaataagaacacccaagaatcgaataaaaagaaaagtcgcaatcttgttttacagatagcaattaaatcgaattggtcgcatgttgtgttttttatatcagctattctttgcggtttgaacgttcaatcgagcattgtaattatgattatttacttgataattcttttgtttaatatcatttggattatcattcaacataataaaaattatatgactttcggtggtttggaaaatacactagccagacacgaaactaaagatttacaaaaatggataaatgatgattctatagtaaaagataataaacaaaaaagatttaaacaggattatcagatattggaaaaaagaataggtattttaaatgttgcatgtgcaatgatacttaatttacttagtattgcaatgtggattatgtcattcacaaattaa

SEQ ID NO: 410645 - DNA, 168 bp, Staphylococcus aureus
atgtcttctatagaaataatggtagacatgatgttaaaagataaagaagaaatggagcagaaactcaaaaaagcgaaaggaacagaagcacaatttttaaagatgaaaattcaagatagtacaaaggcattaagaaaagtgcagttaaaagagatgaaaatagaataa

SEQ ID NO: 410646 - DNA, 222 bp, Staphylococcus aureus
atggataggggacaatataaacagttagctatcaatttacttgaatcgatacccaataaatattattacttggattatcgagaccacaatatagtaattacacatatcaacaaaagatataataataatagcaaacggattagtattccatttaataaagacgatgaaacgataaaatcacgatatgaggaagcaatgaaacttattaaagcaagtaaataa

SEQ ID NO: 410647 - DNA, 252 bp, Staphylococcus aureus
atgaataatcgatattttgaaaattgtgtagaagaattaaatagaattgagaaaacattagatgaacgccttgaaagtcttgataaagaaacaattatcgatatttctggactaaacaaacaggaatacgaaagtcttaaaacaagagtaatagataatcaaatagattacagagatattctcaactttttagaaatgtgcgatgataacaatatcgaagctacattagtattagattatcactatagttga

SEQ ID NO: 410648 - DNA, 339 bp, Staphylococcus aureus
atgaacttaatgttatatatatttattttattaatcttttttgttatttggattttagtcacagcattatttttacctattaatgttatggggtttccagatggtaataaaagaaaggacagaaagtatgatgaacgacaagctatcatgattacagaggttttagcacgtacatttgtgatgatagtttttgcactaatatttaatattatttctcgagtttttggattcacaagtaaggaagattttttattaaatcaatatcccgaaataatgtatcttattatcggattcgtattcgcaatttttaactatataatagtgaagaaacgttattaa

SEQ ID NO: 410649 - DNA, 195 bp, Staphylococcus aureus
atgaagaatataatcaaagaacgtagaaaggaacgtaaattatcacaaaaagaactcagcgtgaaagttaacgtatcgagacaaaccattaatgcaatagaaaacaataaatatgacccttcacttagtttagcttttgaccttgctaaagcattggaaacaacggttgaacagctatttatacatgaagagtaa

SEQ ID NO: 410650 - DNA, 504 bp, Staphylococcus aureus
atgattaatagagttgtattagttggaagattaacgaaagaccccgaactcagacagtcgaaaaacggtattgataggactacttttacattagcaatcaatcgaacatttactaatagcaatggagagcgtgaagcggattttattaacattgttgctttcagaaaacaagctcagaatgttagtaaatacgtatcgaaaggacaactcgttggcgttgatggaagaatacaatcacgtaattacgaaaatgaggagggacaccgtgttttcatcacagaagtagtcgcagataatgttcaattcttagaaacgaaaggtagtcgcaacaacaatcgagatgaaaatcaagtgtacgaccacccagaattttcaagaaacacacaaggacaacagcaaaacggacaaaatggatttgctcaaaaatcatcaatgccacctaaaaaagataatccattttcacaagctccagtcgatattagtgacgatgatttacctttctaa

SEQ ID NO: 410651 - DNA, 375 bp, Staphylococcus aureus
atgaatcaaataattaaaatattagcgttatatgatggattgccagtcgaagattacaaggaacaagtcgcatatcttcatatgcagactgttactttagaaaaagatgttacaaatcaaaacattacttcaaaaattattgctgtattaatgttaatgactaataatttaggctatgacataacgcaagagcaagagcgaagaggtatattattagaatccgagcataatgtctatgatgagataagaggtttaaaagatgcgatagagcttcttgaagagattagtatcaatgaagcagataaagaggaagtggtgcatagaattttatatacgtaccttatttgtctaaatatattcgagtttcaaaagtaa

SEQ ID NO: 410652 - DNA, 498 bp, Staphylococcus aureus
atgacagtagaacaacctttaactatgtctactttagacgaaaattatttatatacagcagaacccgaagactttggcaaggataatagtccataccattgtcgaaattgggtgtttgagttaaaaagaattgaagaaagcgacacctattatatgcaagatacgtattgggtttctcagccaacaacgattacggttacaccatataatgtacacttatttaaacatttattcgatataagagaagtcgtaaaaattcctgatgatgacgaaaaatttatgtataacccagaagatatttttaatgtaagagaccaaaatcaattcaaacatagaatatcggtttacaaacgaaaggaggctaaaaagaatattgatagagaaatagagattttagaatataggcttagtttaaagaaacgtgaagaagaacgtatacgtagtgatgtagaatatttagaaaatgagttacaacaaaagaaagaagaaagagaatag

SEQ ID NO: 410653 - DNA, 459 bp, Staphylococcus aureus
atgttcaaagcgaacaaagagaaaaaacacgttgaggaatggctcaatcaatttactatagcaattgcccgatatagcaataatatttctgattctgatggtattcacagagaaaaaatagtggcatattctattaaaaaaatcgattcaagatactatgttgtagttaatgatgaaattacgttccataatggcgagaaataccaattagatttagaaaaagaagttgacgcagaaactatcaatgatatttcacaagtaaaattagaaacacttagtcataaacgacatttaggaaaactagaagaacaaggctataagttagaaattgtaaaccttaacaataaaggtaatacattgattgcaagtaaagacaataatctgatgactggtattgaaaatgaatttgtaaatatcgttatagtagataaaaagataccgaatttagaaaagcaataa

SEQ ID NO: 410654 - DNA, 579 bp, Staphylococcus aureus
atgaaatacaataaattattgaaaatatggttacttactctttttgttttggggataatatatggtattcagattataattaaagatttcttcagtgaaaattatttaggtctatttatgaactataagcagactttgttttcattggtgttctctacagctatattcatatttgtggcatttacacttttcagtaaaaatagcgacaaatatgttgaaacgttaagacagaataatttgtattcgtttttaaaggttataagttatatcatttgtgcagtcttaataggtatcaacttattaaatgtagttggaagtttttatgaaaataaaaatgtaaatacaattaatggtaaagttagcaaaatacaaaaaatttctgataaaactagtggaagaacgattcaagtcgtaacgattattgatacgcataacaaaaaacacatgtttatacctagtgaaaaaataaaaaatttcaacgtagataaaaaagataaagtggaatttgattacctaccacaaaagaaagagaaaaataagggagttatagtagggtacaaaacaaatataaaatactag

SEQ ID NO: 410655 - DNA, 198 bp, Staphylococcus aureus
atggcacaaaaatatgatgtattagttaaaaccaatatgaaaaataaagttaaacgtttgacatttaataacaaagtgactgaaaaccaagagataataagtgatatatataagttgcttaaaaaacatgatttaagttttagtggattaccaatacaagctaccgaagtgttaaaagaagaaaaagaaatcgattaa

SEQ ID NO: 410656 - DNA, 573 bp, Staphylococcus aureus
atgaaattaaaaaatatgagcgaagcatttcaagatatacacccaatcatgaatgtattgggaagtgtttggtttgttatacctattcttcttttgagtatattctttgcaattgtcgtaatatacacaaaaatagacagtaaatattttaagttaacaaccacattagcgattatttgcgttgttgctgatatagtcgttggttatagttgtattatgaagataaactatgaaccgacttatatatatgagggcgtggcaaaggttcaaaatctaagccctgtagatgacaatatgaaacagaaaattactttggaaaataaagatggttcacgtattttggaattaccaaaaacacagattgatggattaagaaaaaatgacgaagtgaaaatgaaatatcattatcaaaataatcaaaataattacatttatcatctatattctaatggtaaatttagaaatactaaatatacttatattgataagaaaacacacaaacctaaaaaatatgtaaactttgaagatatgactgatttagaacgaaacattaagttaacaaagaagcagtga

SEQ ID NO: 410657 - DNA, 204 bp, Staphylococcus aureus
atggaagtgaaagcactattagacaaagctaaagaacaaggcaaagggttgtgtagtttcggcgtattaggaacagaggaacgacaagctgtagaaaaaacacttaaaacgttaggcgtgagttaccaaactacaacggtagcaggagaatatgatttacgaccatacgacatttatgcagatgtaaacacatatcaagtatag

SEQ ID NO: 410658 - DNA, 207 bp, Staphylococcus aureus
atggaacaagagttaagacaaacaaatttagaagtccaattaacaggcgaagatggaaacgtatttaatttaatgggtattgtaagtaaagcattaaaacgtaatggatatagaaatcaagcagaagaaatgaccgagagagtgtggaaatccgaaagctacagtgaagccatcagcatatttaatgagtacgtagatgtttattaa

SEQ ID NO: 410659 - DNA, 315 bp, Staphylococcus aureus
atgaaagtaatcaatgatttaatcacagaagcaaatatcacattaacagatatggaacaacgcaatttaacgtatgttatcgagaaaatggaagtggatttcaattcagaagaatcagtagaagcggtcgaagattttggcatacacagtatgtatttagaccgagacaatgatattaacttagtgtgttttgatggtatgcaacaacaaggtacagtgattgaacccgaagaacttgagactttaggacgagcatgtacacaagaggaactagataagattacagaacgtgtaaaaatcgatgtgacacaataa

SEQ ID NO: 410660 - DNA, 360 bp, Staphylococcus aureus
atgataaacaagatgctagaatatttaataagagtaccaggaatgaatcttttactagaatgtttaataagagtaacagggatgaatcttttagttgaagcattagttagaggtaaatggaaaacaggcatgtatctgttaggacaaatgacatgttttttgatttcattaagtttagctacagttaccatcgaaattgtagctattccttttgataaatggctcatgcaagtcaatgatacgttcagcagtagtttgattatagggttgttcgttttagttgctataacgttcatctttgtaagttacttactaacatatatctataatcgatttgctatgaaaagatgtatggcataa

SEQ ID NO: 410661 - DNA, 201 bp, Staphylococcus aureus
atgattatcacaaaacaagaactcaaaactttagacgtagccaaagcatttgaagaaggagcaaacttcattaaaattaaagatggtagacatgaaatatttttagttaacggacgctataaagtcgttgattacaaaaaagggttaggattagaagaagcacaaagaatcccgaaatacattaagcaagccattgcataa

SEQ ID NO: 410662 - DNA, 318 bp, Staphylococcus aureus
atgaaattaattgaattactgacaactatcgaagcgaatcatatgaacgaaatgacatttgaagaacaggacgttttaccacttaatgaatttatcattgaacaaggtatttcttattcaacgattgatgaagcggataacgatttagaattaatgagacagaacgctatgtcagaagctaacgatgaggaagaagcagaagaaattaacgaagcctatcaagatatcatcgaagaatataaagacatcgctcaagaagaagtgtatgtacaacaaatcgaagttgaaaacggaagtattaatatccgcctatcatag

SEQ ID NO: 410663 - DNA, 309 bp, Staphylococcus aureus
atggaaaattacaaaattaattttgatggtgcagatattgaaaacacttatcaaacattaaaaaagtggctaaatgagagggctaaaacatctggaggaaatgtagaaaataccatcagtgatgaatttttaagacatattgtcatgataagtcgtatatataaaccttacggggaagaacctggaaaggcattagatgatttaagtgcagtagttacttactgtgaagtgaaagaagttccgatttctaaagaagtgttgtcagaagtgtataagataatgtttaatattcagatttataataattga

SEQ ID NO: 410664 - DNA, 201 bp, Staphylococcus aureus
atgattatcacaaaacaagaactcaaaactttagacgtagccaaagcatttgaagaaggagcaaacttcattaagattaaagatggtagacatgaaatctttttagtcaacggacgctataaagtcgttgattacaaaaaaggattaggattagaagaagcacaaagaatcccgaaatacatcaagcaagccattgcataa

SEQ ID NO: 410665 - DNA, 318 bp, Staphylococcus aureus
atgaaattaattgaattacttacaactatcgaatcaaatcatctgaacgaaataacatttgaaagacaagacgttttaccacttaatgaatttatcattgaacaaggtatttcttattcaacgattgatgaagcggataacgatttagatttaatgagacaaaacgctatgtcagaagctaacgatgaggaagaagcggaagaaataaacgaagcatatcaagatatcatggaagaatataaagacattgctcaagaagaagtgtatgtacaaaacatcgaagttgaaaatggaaatattaatatccgcctatcatag

SEQ ID NO: 410666 - DNA, 147 bp, Staphylococcus aureus
atgaaagaatttcaacttgaatgtatcatagagaatattgaaatggagcttgaatttcaagactttccaaaaagagtagaagcggagaagaaaaaagaattacaaaaagctaaaacagatttagaaaaattaagagcaagtgcctaa

SEQ ID NO: 410667 - DNA, 456 bp, Staphylococcus aureus
atgaaaaaatatcgtatatggaattgtaataagcaagcatttgtaagtgaaaaaaatgacagtattgtcattgacctcattagcgatttattgattaaatgtcgcctcaaagatggtttagaatatttaagcgaagaagtagacgatacgcaatataaatacgatacagtgctaggaataagagataaaaacaatcaacctatatatcaatctgacattatcgaatttgaagatgaaacattattaaacggagcagatgaagaatcagcggtatcaacgataaatcgagctgttgtaaaatctgatgaattatacggtgtttatttagaacaatttaaatatgataatagcgaagttgcagaagataattatttagtaatgattgataaaaaggcatttcttcaagattgcgaagttgtgggtaatattcatgaaaatgagcaacttctaagttaa

SEQ ID NO: 410668 - DNA, 228 bp, Staphylococcus aureus
ttgaaacataggctcattctaacgatagttttagtaatgatagggatattaagtttaactggcatagtcaatgctgaatggttgtttgagtttctgacacaacagaatatagaacaacctaagacatcagctcaaagctggggtgtcggaatgataagagtggtttgtattatagggtttttaggaagtttgacgatggtatatcatttttatgcagagagtaaataa

SEQ ID NO: 410669 - DNA, 471 bp, Staphylococcus aureus
atgaaagacatattacaaattgtattgatacttttagttattaacatagtgcttgacccgttttcattaagatatgttttcagaaataaaatgattaaatatgtcaatgctataggtcgaggtaaaaaaacgttatatgcgtatatcaatttttatgaactagccattgcaccgtttaaggctttattagtagatgtaaaaagcgttaaattaatgcagtatatgataacaagtcaattagtgtttattggatatatattagttaacctttcagcagttatatatatgcaacaaatagggcaaatgatatttagtacagatatcagtttattaaacataattatgatggattttatttttgtattagtaacaagtgcttgtttacatttatatgtaaaatggctttataatgcttaccaaattttgatagataggggtttggaaaaaggaacaactattcaaaaaaactag

SEQ ID NO: 410670 - DNA, 336 bp, Staphylococcus aureus
atgagaacatcaaaagaaattggacaacaaatcaagcaaaaaagaagagataatcatattaatcttacagattttgctaaacgaatcggcgttaataaatcaacgttatcgagatatgaaaatggcagtcgtaaagtgccgatggaagatatcaacacgatagctcacgaactaaatatcacacccaaacaattaatatttaaaagagcagacaaaacaggacatatggacgcttatgaaggtaaacttacagaagaagaatggcaaaagattataagttatgccgaggatataataaaacaacgcaaggaaaagaattatttacaaaagttgtaa

SEQ ID NO: 410671 - DNA, 246 bp, Staphylococcus aureus
atgatttactcattaacaaatgcggttaaggaatttgaaaaagcggaagaaaaagttcaaaaacatttagatggattagtgattttaggaaattacaaagaagtcttaaaagaaatcatgaacatcgatgaacaagtatttgaaatgctttacgatgatgacgcagagaacagaccagactatgagtttgaacccgatgacttaattgaagctcaagataaattacatgaaatcacaagtcattaa

SEQ ID NO: 410672 - DNA, 207 bp, Staphylococcus aureus
atgattaacaacacacctagaacaggtatcgtcgtaacgctcacaggagaaaatggcaatacattacatttagcaaccgttgtcgcaaaagcgctcaagaaacatggttacagagattatgcgatggaggtaagagaacgtgtacatgagatgagcaatcaagatgaagcaatccaaatgttcatggaatatgtatcagttgtataa

SEQ ID NO: 410673 - DNA, 438 bp, Staphylococcus aureus
atgaatgaaacgtttaattggcaaattgttattgtcttaatgccatatatcgtcattgttataggcagtatacgtgctatgttctttaaacagcaatcggctttacattatagcagttactacttgctgttagtcccttgtgttttaatcaatttacttgtgtttgttctgtctgagggtatgaatcatatcgacccgatggcaaatacagatattgaacatctaaaaatcattatgattgcgattgtctcagccatttttacagcaatggcaatcgctatatttataacagctatcattgaggagcaacgcacaatgacacttgaagaaaaattgaagtattacttacaggacaaagacatgaccgaagataaaaaagcatttatcaaagaccatcttatgaaagaggagaaaaaggagtttgaaagtgatgaataa

SEQ ID NO: 410674 - DNA, 282 bp, Staphylococcus aureus
atgaataaagcaacgataagagaagcggtgtacggacatgtagcaatgacaggaggagaaaaatccgatgaattgttagatgagttattagtagaaattgaatgtatttatagaaaagcagaaggattcgaccatttagaaaagatagttactaataaattaaaagaaatagatgaagataatcagagtaatttagaaaatgactatgaatatggaatccgtcagacatacgacatcatagatgatgagttagaaccttacaaaaatattgaagataaataa

SEQ ID NO: 410675 - DNA, 699 bp, Staphylococcus aureus
atgatgagaaaaaaacgagaaatgaaaacaaaaaaatatccccctatatttattattcttaccaccctatatttaaccatcttcttacaaagtttaggtggggtaatgaaaatccccatcaattggcgtgtgttaatattctgtttgaatattgctatattatgggcgttaacagagcgttttaagaaagagtatcactggttaatgaataaaatatttgaagatatacctcagccatactacacagctacaaactatatatataaatcgctgattattatatacatggtagtaggattcttatatatgtctttgatgtttatatatccttacatgaaagatttatttaatgcgtttcttttgattttgataacggttatctcaactatgtatattagcacttcagaatcaatgatacgtcttaaaacaaaagccaataaagagaagatatttaaaagcaaactacaatccgatgtagatgttactaagatgttggcggtatttgttattgctatcataagtttattttatatactttcaaatgttttcatagcctattttgatagtaaaacaattattgataaagataagactgaatattacatcaaagacaacggaaaagagttagatacgaagcagtcgaaaatcgtaactaaagagggtaaagtatatcatttaaaagaggaaaagaaaaaatga

SEQ ID NO: 410676 - DNA, 327 bp, Staphylococcus aureus
atgctgaaactattccgttatcgtgaaatgcaaatgaacatttttgttgtggaaaattggaaaggaagccaaagacaatttgtggtactggggaagaaagatagagcattagatgagctgataaaatgtttagttgacaacgacataggcataagcgagattaaggataaagggacaacaggaattaaagtacatcgtaaaagtggaataaaaacttataaggtatatgattatgaggaatttatacgtaataaaaataaaggagtgtttttctatgagcaaacgaaaaaatttagtcataggaataccattaaaagtaatcattag

SEQ ID NO: 410677 - DNA, 213 bp, Staphylococcus aureus
atgagcaaacgaaaaaatttagtcataggaataccattaaaagtaatcattagatttattattgtattcacagtatttggaataggtgcttatatttctaagttttatatagagtctgaattttataaattaatcttctctgttattttagcagtagtaattatgatgattggaatacctaaagataaatggaaagaattgtttgaaaaataa

SEQ ID NO: 410678 - DNA, 252 bp, Staphylococcus aureus
atgactgtacaagataaagttcaaacattgatagaagaaggattagacactaacacaaaaattatttcactagatgaaaataaccgtgttgtatttgtgaaatatttcaaaggagaacatctcgaatacgctgtattaagttacaatgacagagggatttatagcggtcgctacttccctacatttgctcaatctgaaaaagaggcttttcaacaagcatatgacgtatatagaacactagcttttcaataa

SEQ ID NO: 410679 - DNA, 585 bp, Staphylococcus aureus
atgtttcattatcaggaaatacaggatttaagcaacatgaatatatttcgaaaggcatacgaattgcatggttggatagcaattggatttatggtttatattttaatcgtgcttgttataggcgctatattatttgtaattagtggtttgaattacataataataaaaaaagaaaaacaagcatatgaaaacaatgaaatatcaaaagagagtctaaaaaaaatgacacttgtaggattattagctttaatattaggatttgttagcattgcgatttccattttttatataggaaaatatcaaacaataggctattatcaagccgaagccaaagtgatgaacatagaaaagacacaaaaagttgatggtaaaactaactatacatttgaattacgttatattaatggcgttacagtagataagaaaacagcaccgttaaaaatcaaacaaaaagacagacaaggaattaagaatggcgataaagtgctgattaaaacatcagaaaaaacatttcgaggtaatgaggataaagatattgaaatttctagtattcaaaaatcagacctaactattcataagctataa

SEQ ID NO: 410680 - DNA, 855 bp, Staphylococcus aureus
atgacaggagagacggttgtgtataaaaatgacttaaacctagtccctttaagagattttacaagcacagaaattaatttgtttttctctatgtgtaacaaattaaaggaacgagacaccgaagaattaaagattccttttgatgaactgaaacatttgtcgagctatgaacaaacagaaaagaagcggttcatcaacgatttaaaacgtgtttacgataaagttttaaagcttacttatacggaatatagcggactatcattcaaaaaatttgttttatttacagcatacgaagtgaacgctgaggaagaatacttaactattagtgtaaatcctaagttgaagcatatattgaatgagttaacaggggactttacaaagtttgagttagaggaactcacgcacattaaatcaacatattcaaagcatatgtatcgtttgctcaagcagtttaaacatacgggctattttaaaattaatatgagtgattttagagaacggttggacgtaccgcaatcttacagaatgacaaatattaatacgtctatattaaaaccaatcatgaaagatttagccccgttgtttaggaatttacgaatcaacaaggttaaagggaaacgaggacgtaagatagagtggctagagtttgttttcagtccagaaacacgcatttatagtaagaaacagccacaagctgacaaaaagaaacagtctgatattaagagcaaagaaaaaacgcctgagtggttaaaaaacagggacaaaccacagccaccgaaagaggacgaccctcatttagaacgtgatagacaagcgtttttagaacagttagataaagattgggacgataagtag

SEQ ID NO: 410681 - DNA, 390 bp, Staphylococcus aureus
atgataaaagttaaaggagttaaagatgatattgaggtaacgcctcatatggaacgtcaattagaaaagtctacaaagcaatcagcattggtatcgaagattatatcggtacttttgacgtgtattatatttctttcaattctacaaatatatagcacacgtattgatacgttaatagcttactttattattgcgatggatttattaatcatcatgattcatcttacgcataatgaacatacacgtgatatttttaaacaagcactgattgaagaagaacgatatcaagaagctaaaaatgttaaagttgcttataacaaatatgatattgctgttatttgctttgttgtgattcaaattgtaatgcaagtgctgatattatctttataa

SEQ ID NO: 410682 - DNA, 855 bp, Staphylococcus aureus
atgacacaagaaacggtcgtatatgaaaataaattaaatcttgtatctttgaatcactttgacagcatggagaccaacatgttctttgttttatgtaatcgactgaaagaacagaacacacgacttattgaaatttcgtttaaagatatcaagcgtttaatcaactataaatcaacttcaaaagagcgttttattaaagatgttgaagcgttatataacaaaatctttgggcttacatatcggagagaaacggataatgagatagaggtctttgttttgttcactaaggtacgaatagacaaacaaaatgaagttgtacaagtcggcgttaatcctgacttagcctatatattgaacgatatcacagggaattttacgaaatttgaactcaatgacctagtgaaacttcaatcgacctattccaaaaatatgtttcggatattaaaacagtataaacacacaggctattttaaaatacgtatcgatgatttcagagagcgtctgaacattccacaatcttatcgtatgagtaatatagaccaaaaagtattgaaaccaattattagggagttagggacgatatttccagaactgaacattaataagattaaagctaaacgagggcgtaagatagagtggatagaatttatctttaaagctgagaagcgggttcatagtaagaaacagtccaaaccaccagcaaagaagaaaggtcatgtgagcaaggaaaaaacgccagaatgggtattaaaccgagaccagccacagactatacagcaagatgaggcacaacttcaaaaagatagacaagcgtttttagagcgactgaaacgtaattggggagataaggattga

SEQ ID NO: 410683 - DNA, 522 bp, Staphylococcus aureus
atgagtacaagaacagcgattttcaaagaaatgcaagatggaagttatgttggtatctactgtcatagcgatggttacatcgaatatacaggggcggtattaaacgaatattatactaacaacaatcatttccaagaacttattgataaccaacagcctatcagcagactaggagcttcaacacaattggtaagtacgaaagacggtatagacacatatttagaaagaacagaaacaggagctaaaaaatatacaggtcgtggagcagaagcaaacgtcaaatcctattttaaagcaaattctatttatgagattattaattttgactatcgcacatatgatagcgaagggaatatacaaggctatagacgtggtaataaatttgtagaatatagaggttcagacaacaacggatttatttatttacaagataaaaacggtcattggtttgtttctcgtagaaaagaacaaggcatgagtgaatttaatccactaccaacagtgcttaaacaatgtagctaa

SEQ ID NO: 410684 - DNA, 270 bp, Staphylococcus aureus
atgaataaagaaaaagtgaaaacattattattgggcggtatcggtattttattaagtatcgctggtatgatttattgttttgtatcaagttatgattatgtgacaaaaggtgcattgtcatttatcgaatttttcgtaatgtgcttgctaattttaggcgtatttgtttgtgtaggagcaatgatactatgtgggacatttatttacgcaatatttaaaactcattcagataaacgagtgaaaggtaataaaactcaaaacgataaatag

SEQ ID NO: 410685 - DNA, 306 bp, Staphylococcus aureus
atggcggttatctatgatgtagtcgaagattcagagataaaaatatctgatatagcaatgataaatctaacttatgtagttgaaaaagcagaactagaaatgaataaatataaaaatatggatttattttcattgcatcatatgtttttagatgataaaggattgttaaaccttgtctttttagaaggcataataaaacgctcaatctgtattcgagctaacgatttagatactatgagcaaaccgtgtacatggttgcatttagaagaaatcactaagcgtttagaaaagggtttaacgtcataa

SEQ ID NO: 410686 - DNA, 750 bp, Staphylococcus aureus
atgcaacagataaaagagcttttaacaaccgcaatcccctttcacttgtattgggtattaatcattgcccttttatatatcgtgatacatcattatagagggcatagagtaacaagcatattagatgtgtatttaaattatattccagttttaacacatgaatttgggcatattgtgtttaacaaagtcagtggcggacacgctagagatttagtgattgttgcgtcccctacagaacgcctagagacatcaaaacaaggctttgcagtaaccgaaaatagcggacgttttaattcaatcgtgaccgcttttggtggctacattatgccccctattatgttatatatcggtgttgcgtcacttcattcacaataccctagtatatttatcgtggcgtacatcgtcatattcttatactttgttttgattacttctaggaaattacttcctttgcttatacttattggcttgattgccctactgtatatgatatataacggtggatatgaaacgatgattaatcctattctgattggtttatatcattatattttaggtgtattgctaggcgaagtattgcaatcttcatggacgattatcaaactcaacttttctaaagatgcaccagattgggacggtagcgacctaaaggcactaacctttttaccaaccacgttatatagttgtttatgggttggtgcaaatatatatgctattattaggttagctaaggtatatttgatgatgtaa

SEQ ID NO: 410687 - DNA, 324 bp, Staphylococcus aureus
atgattaaagaaaatacagttaaacaattactcaaaagggaagaaccacgatatcaatgggacgaccaatcagtgaaagagtttaaaccgttattagaacaattcgcagatgaacaagaaaatatcgaagacgtgatagcaatggaatgtaatttctttgaaagtgaaatagcgtatctaaattggtattttgaagatgatacgccaagagatgtgattagatatatagatggttgtcagacagtcttagaatttgtgcagtcaacaatgaatgatggcgttaagaaactcagtaatggtgttattgctcgtatctttatttaa

SEQ ID NO: 410688 - DNA, 300 bp, Staphylococcus aureus
atgtttttaattaatcaaagaactacaagagataacagtcataacgtcggactggaaattatcagtcataacgttaaactgaaacctatcatttatcaaccgaaagtcagtgaatatggcagtttatcttttaataacaagattattggtggtaaaacagttgaagatttaccaatagcattaggtagtgtgagagaaaaaacaaagactgaacaagaacgtaaagaagaactaaaggtattgtttaatcgtacacgtgatagatatgataaaactttcagagatttagttaacttatga

SEQ ID NO: 410689 - DNA, 393 bp, Staphylococcus aureus
atgacagagtatttaaattatgacgatatcgtagacattaattcgtggattatcgatatatattcgcctaatgaacctaaaatagttattagttatgaagcattagatatggcagtgcaatcgccacagcaggaagtctttggcaaagtgctttatcctactattgaagaaaaaggagctaatctttatatgaatttagctactcgccacccttttgggaatgctaataaaagaacagcatttatgagtttagatgtttttcttcaaaaaaacgggaagtatatcgatgtagatacagatgaagcgactttatttactatgcgtgttgtgaatgagaatttagaccaagaaaccattgttcgttggattaaacgttacattaaagatatataa

SEQ ID NO: 410690 - DNA, 414 bp, Staphylococcus aureus
atggaaagctatagaaaactaaaagaaagacatcaaaaagagtttaacgaattacctttgttttttgcttttgatgatgaacaatataaaagagggctaaagaaagttaacgctactaaagatacaaagatagtacagattagtggcgcttgctattgtaaagcgtctgacgttgattgtgtaacagacctattgaaaagacatcaacgagaacatttagacaatatgcttgcaagtcgtgagtatgtttacaatatgattagctatgagcttgctaataaggaatatcaatttagcagagatttagatgatgtactaagtgattgtgtaccagatgaagcgtacggaattgtccctaacatatcagatattattaaagaagcagtaaaagattatgagaaaaatgtaggctaa

SEQ ID NO: 410691 - DNA, 624 bp, Staphylococcus aureus
atgaaatattctgtagcaattaaacattttaaacgtattattgataaaagaagcgttagagaagcccttagaggtgtatattttaaaggtaatacaatgacaggaacagattcaaagcgtttgttatgttgtgaagttgaaaacaaagactttgaaccgagtatcgtagatatcaataacgatgagaaaatggatgtaacatatcctcaaactgaaaatttactcttaaaaaatccagacataacaattgatattgaagctgataaaataaagagtttgaaacgtgtggtaacatgtattaaacaattaggacataaacaagttgaactcaaaaaagaaaaagattattggtttataaaaacaaattgtttatctacagaagatgaaaaagcagatgcagatgcagaaataaaatataaagttgcgaaagatacaacaacgagtgagcaacaaagattgttccaaacaaaatacttattaaatgcacttgaatttgtttatgaaacaaaagaagatatgaaaatagaattattaaataatcctttatcgcaagtacagtttagtaacgttagtaatagtaaagataaatataaatatttaataatgcctttaagaaattattag

SEQ ID NO: 410692 - DNA, 375 bp, Staphylococcus aureus
atgagatatataattagagaagatgtattaaacaaaatcaataactcacataatttatggattattgatgaacgaaatatgagattaataattgtaaaagattatgagatacaggaaatgaaacatattaagtgtaaaagaaatggtatgatacagaaattaaaaaataatagttattctatggaaactggatatattagagattcgcttataatggagcattgtatgaatgatataaaagatatgccagaaaataaattatggatagattatataaaagacggtattaaaaattacccatttaaagaagttgttgaaagcgataagtcaatagatatagtggctaaagaattacaaaagacatgctatagctaa

SEQ ID NO: 410693 - DNA, 192 bp, Staphylococcus aureus
atgagtgaatataaaaaacaaatagttgaagtttttgaaagtgaagttacaggatatcaaattagcaaggaaacgggcattagtcaaaatgtaatttcaagtatcagaaataacaaaagagatatagataatttgactttaaaaacaacagagaaattgcatgagttttacaaaaaatatttggaaaaataa

SEQ ID NO: 410694 - DNA, 234 bp, Staphylococcus aureus
atgttaaataatgaaatattaaaaaaatggttaaatgaaataggaattaatgtagaagaagataacaaaaaattaaaaggacattcatgtaatattaaacagtacccagtattcagaatttggattaataaatcaagaaaagtaacgataaaaacaagaggagttcaaaaaagtttttatataaatgaaaaatcatcattaaaaaatgaattaataggatttcaaattatttaa

SEQ ID NO: 410695 - DNA, 1545 bp, Staphylococcus aureus
atggtagtagaatttaaaaatgaacctggttacgatttttcagtccaagaaaatgtggatatgtttaagaaagcattgaaagacgtggaaaaagaattaggtcaagacataccattagtgattaatggagagaagattttcaaagatgacaaaattaaatcaatcaatcctgcagacacatcacaagtaattgcaaatgcatcaaaggcaacaaaacaagatgttgaagatgcatttaaagcagcaaacgaagcttataaatcttggaaaacatggtcagcaaatgatcgtgcagagcttatgttacgtgtttcggcaattattcgtcgtcgaaaagcggaaattgcagcaattatggtttatgaagcaggtaagccatgggatgaagcagttggtgatgcagctgaaggtattgattttattgaatactatgcacgttcaatgatggacttggctcaaggcaagccagtacttgatcgtgaaggtgaacacaataaatatttctataaatcaattggtacaggtgttacaattccgccgtggaacttcccgtttgcgattatggctggtacaactttagcaccagttgtggcaggtaatacagtgttattgaaacctgctgaggatacaccttatatcgcttataaattaatggaaattttagaagaagcaggattaccaaaaggcgtagttaactttgttcctggtgatccgaaagaaattggtgattacttagttgatcataaagatacgcatttcgttacatttacaggatcacgtgcgacaggtactagaatttatgaacgtagtgccgtagttcaagaaggtcaaaacttcttgaaacgtgttatcgctgaaatgggtggtaaagatgccattgtagttgatgaaaatattgatacagatatggcggcagaagctattgtaacgtcagcgtttggtttctctggtcaaaaatgttctgcatgttcacgtgcaattgtgcataaagacgtttatgacgaagtattagagaaatcaatcaaattaacaaaagaattaacgttgggcaatactgtagacaatacgtatatgggcccagttattaataaaaaacaatttgataagattaaaaattatattgagattggtaaagaagaaggtaaattagaacaaggtggcggcactgatgattcaaaaggttactttgtagaaccaacaatcatttcaggacttaaatctaaagatagaatcatgcaagaagaaatttttggtccagttgttggctttgtgaaagttaacgattttgatgaagcaattgaggttgcaaatgatacagattacggtttaactggtgcagtgattacaaataatcgcgagcattggattaaagcggtaaacgaatttgatgtaggtaatttataccttaacagaggctgtacttcagcagttgttggataccatccatttggtggtttcaaaatgtcaggtactgacgctaaaacaggtagcccagactacttattacacttcttagaacaaaaggttgtttcagaaatgttctaa

SEQ ID NO: 410696 - DNA, 693 bp, Staphylococcus aureus
atgttagaaattgaatataataacaagccttcgacactgttctatttagataaagatttgtattttgagaaagttaatgatgagtataaatattctgccaaaaagctaaaagagttcaataggttacaaaatgttttttggagagctatagaaaaaaagaaaagtaacgataacgttaaacataatattagaaaatacaatattataccagcttgggttttattccaaaattttagttttggagatttgtctactttttatagaactacattaccaacttatagaaataaagtaagtaagcgaattgaaaatttaatagaaaaaaatactggtataagcataaaacttccagaaaagttattgtgtgcatggttgaatagtatcaggtttttgagaaatagaatagctcacacagatataatttatggaattaattttacaaacacctgtgcaaaacatcatagtgatgaggaaatgtatgtaaatatagaaaagtataaatatcagcaaaggttagttacatttttattagctatgaagaaaatatttatgagtatgccagaaaataatattattgaatggaatgagactctaactaagatagagaataaatgttcagaacataactttattaaactttctaggttaggagttattgaaaataacctttcttactttaaaataactaaataa

SEQ ID NO: 410697 - DNA, 753 bp, Staphylococcus aureus
atgatgattcattcaaaaaggttgaggctctggctgtatttagtattattagctgtttttattagcgcgtgtaacgtgaaagaagataaacaaattaaagaaaatttcaacaaaacattgagtttatatccaaccaagaatctcgatgatttttacgataaggaaggttttcgagatcaagagtttgataaaagagataaagggacttggattattaattctggaatgaacatccaattaaaaggaggagctttaaaatccagagagatggtactttacatcaatcgtaacactagaacagctaagggatattttttaataagtgagacaacagaagacaaaaaaggatacgtccataataaagataaaaaataccctgtcaagatggaacataatcaaattattccaacgaagcccataagggatgataagttaaaaaaagagattgaaaactttaagttctttgtacaatatggggattttaaagattataaagatggggatatttcatacaatcctaacgtaccaagttattccgcaaactatcaattgaataatgatgattataatgtccaacaattaagaaaacgatatgatatatcaaccaaaagggctccggaattaaaattgagaggatctggcgatttaaaaggctcatctgtaggttctaaagaactagaatttaactttataagaaataaagaagaaaatgtgtatttttctgatagtattaatttcaaacctactgaatag

SEQ ID NO: 410698 - DNA, 2874 bp, Staphylococcus aureus
gtgaaaagcaatcttagatacggcataagaaaacacaaattgggagcggcctcagtattcttaggaacaatgatcgttgttggaatgggacaagaaaaagaagctgcagcatcggaacaaaacaatactacagtagaggaaagtgggagttcagctactgaaagaaaagcaagcgaaacacaaacaactacaaataacgttaatacaatagatgaaacacaatcatacagcgcgacatcaactgagcaaccatcacaatcaacacaagtaacaacagaagaagcaccaacaactgtgcaagcaccaaaagtagaaacttcgcgagttgatttgccatcggaaaaagttgctgataaggaaactacaggaactcaagttgacacagctcaaccaagtaatgtctcagaaattaaaccaagaatgaaaagatcaactgatgttacagcagttacagagaaagaagtagtggaagaagctaaagcgacaggtacagatgtaacaagtaaagtggaagtagaagaaggtagtgaaatagtagggcataacaataaagagacaaatgttgttaatcctcataatgcagaaagagtaaccttgaaatataaatggaaattcgaggatggtattaaaccgggggactactttgatttcacattaagtaataatgtagaaactcatggtatctcgcctcttcgtaaagttccagatataaaaagtaaagatgataatattttggctgttggcaaagtgatggatgaaagaaaaattagatatacgtttactgattatataaataacaaaaataatttaatggctgaattaaacttaaatttgtttattgatccaactacagttacgaagcaaggaaagcaaactgttgaggttaaattaggtgaaaataagatttcaaaagaatttgatatcaaatatctagacggtgttaaagataactggggagtaactgtaaatggacgtataactttattagataaagaaaatagtaaaatacatcatttagcttatataaaccctaaaaaaagcgatatgacctcaataactataaatgggttttttgctaaaggtggattgtatacaggaaatgttccaacagtgaaagtttatgagtatttgagaagtgatgaattaccagaaagcgtctatgctaacacaaatgatcaagagaaatttaaagatgttaccaatgacatgagtgataaattaacgctaagtgaaaacggtagctataaattaactttagatgcactaaataagaaaagttatgttgtaagttttgaaggtaaatataatgaaaatgacaaggagttattattcagaactaatttgcatggctatcatgctaattacggttattactattattatccagtaagtttaacatgggacaatggcgttgcattctactctaataacgctcaaggcgacggtaaagataagccaaatgatcctatcattgagaagagtgaaccaattgaattagacattaaatcagagccgccagtggagaagcatgaattgactggtacaatcgaagaaagtaacgattctaagccaattgattttgaatatcatacagctgttgaaggtgtagaaggtcatgcagaaggtattattgaaactgaagaagattctattcatgtggattttgaagaatctacacatgaaaattcaaaacatcacgctgatgttgttgaatatgaagaggatacaaacccaggtggtggccaagtaataactgagtctaacttagttgaatttgacgaagagtctacaaaaggtattctaactggcgcagtgagcgaccatacaacagttgaagatacgaaagaatatacgactgaaagtaatctgattgaactagtagatgaattacctgaagagcatggtcaagcacaaggaccaatcgaggaaattactgaaaacaatcatcatatttctcattctggtttaggaactgaaaatggtcacgggaattatggtgtgattgaagaaatcgaagaaaatagccacgttgatattaagagtgaattaggttatgaaggtggccaaaatagcggtaaccagtcattcgaggaagacacagaagaagataaacctaaatatgaacaaggtggcaatatcgtagatatcgatttcgatagtgtacctcaaattcatggtcaaaataaaggtgatcagtcattcgaagaagatacagagaaagacaagcctaaatatgaacatggtggtaatatcattgatatcgacttcgacagcgtgccacatattcatggattcaataagcacactgaaattattgaagaagatacaaacaaagataaaccaaattatcaattcggtggacacaatagtgttgaatatgaagaagatacacttccacaagtaagtggtcataatgaaggtcaacaaacgattgaagaagatacaacgccgccaacaccaccaacaccagaagtaccaagtgagccggaaacaccaacaccaccgacaccagaagtaccaagtgagccggaaacaccaacaccgccaacaccagaggtaccaagtgagccggaaacaccaacaccaccaacgccagaggtaccagctgaacctggtaaaccagtaccacctgccaaagaagaacctaaaaagccttctaaaccagtggaacaaggtaaggtagtaacacctgtcattgaaatcaatgaaaaggttaaagcagtggcaccaactaaaaaagcacaatctaagaaatctgaactacctgaaacaggtggagaagaatcaacaaacaaaggtatactgttcggaggattgtttagtattttaggatttgcattattacgcagaaataaaaagaatcacaaagcataa

SEQ ID NO: 410699 - DNA, 798 bp, Staphylococcus aureus
atgcaagcattacaaacatttaattttaaagagctaccagtaagaacagtagaaattgaaaacgaaccttattttgtaggaaaagatattgctgagattttaggatatgcaagatcagacaatgccattagaaatcatgttgatagcgaggacaagctgacgcaccaatttagtgcatcaggtcaaaacagaaatatgatcattatcaacgaatcaggattatacagtctaatcttcgatgcttctaaacaaagcaaaaacgaaaaaattagagaaaccgctagaaaattcaaacgctgggtaacatcagatgtcctaccagctattcgcaaacacggtatatacgcaacagacaatgtaattgaacaaacattaaaagatccagactacatcattacagtgttgactgagtataagaaagaaaaagagcaaaacttacttttacaacagcaagtagaagttaacaaaccaaaagtattattcgctgactcggtagctggtagtgataattcaatacttgttggagaactagcgaaaatacttaaacaaaacggtgttgatataggacaaaacagattgttcaaatggttaagaaataatggatatctcattaaaaagagtggagaaagttataacttaccaactcaaaagagtatggatctaaaaatcttggatatcaaaaaacgaataattaataatccagatggttcaagtaaagtatcacgtacaccaaaagtaacaggcaaaggacaacaatactttgttaataagtttttaggagaaaaacaaacatcttaa

SEQ ID NO: 410700 - DNA, 261 bp, Staphylococcus aureus; identical to SEQ ID NO: 410285

SEQ ID NO: 410701 - DNA, 237 bp, Staphylococcus aureus
atgaaaccacataaatttaaacgaatggctattgacttaatagaacgtgtacaaagtactgcttatgaagtggagtacaagtacaacattatatgggtttggcactatatcgatgactacttaggtaaaattgcatcaataaatatgcacaacaatgttgatgatgacagtacgttattaactaagtacgagaaagctaaaaaagtactagcaggggaggcgttaatagatggctaa

SEQ ID NO: 410702 - DNA, 195 bp, Staphylococcus aureus
atgcaatacattacaagataccagaaagacaatgacggcacttattccgtcgttgctactggtgttgaacttgaacaaagtcacattgacttactagaaaacggatatccactaaaagcagaagtagaggttccggataataaaaaactatctatagaacaacgcaaaaaatattcgcaatgtgtagagatatag

SEQ ID NO: 410703 - DNA, 921 bp, Staphylococcus aureus
atgactgaaaataataaattacaaactattgaacaacaattagtacaagaaaagaacgtatctgacaacgtattaaacaaagtgagagttttagagtcacaaggcaatttggaattgccaaatgattattcaccaagtaatgccatgaaacaagcatggttacaaatcagccaagataacaaattaatgagttgtaacgatacaagcaaagcaaatgccttattagacatggtaacgcaaggtttaaatccagctaaaaatcaatgctactttattccttacggcaacaaaatgcagttacaacgtagctatcacggtaatgtaatgatgttaaaacgtgatgcaggtgctcaagatgttgttgctcaagtgatttataaaggcgatacattcaagcaagaaatgggagaaacaggacgtatcaaagcgattaaacacgaacaagacttctttaacatcgacaaagaaaacattatcggtgcgtactgcacaatcgtatttaatgatggacgagataactatattgaagtcatgactattgaacaaattaaacaagcatggatgcagtcatcaatgattaaagatgaaaaagcattacaaaattctaaaacacataataatttcaaagaagaaatggctaaaaaaacagttatcaatagagctgctaaacgttatatcaacacatcaacagatagcaatcttttcaaatatgcacaagaatccgaacaacgtcaacgcaaagaagtgttagacgcagaagttgaagaaaatgcaaatcaagaacaattggactttgaacaaccagttctcgaagaagcacaatacacagaattagaaaatgataagcctattgatgtatctgactttgaagaaataaaagaacctgcaacagaaaaagaaagcgaagaagagccattttaa

SEQ ID NO: 410704 - DNA, 444 bp, Staphylococcus aureus; identical to SEQ ID NO: 408008

SEQ ID NO: 410705 - DNA, 156 bp, Staphylococcus aureus
atgacaataaaggaattagaagagaagtttaacatctctcgatattttgttgtaaagcatgatagggattgggaaacaggtgaaattattgacacttgtattgttttagatgaatatgcggaccatatcaacatagaagttgaggaagtgatctaa

SEQ ID NO: 410706 - DNA, 186 bp, Staphylococcus aureus
atgcaacaacaagcatatataaatgcaacgattgatataaggatacctacagaagttgaatatcagcattttgatgatgtggatgatgaaaaagatgcgctggcaaagcgcttagatgacaatccgaatgaattactaaagtatgacaacataacaataagacatgcatatatagaggtggaataa

SEQ ID NO: 410707 - DNA, 360 bp, Staphylococcus aureus
atgagtatcgtaaagattaacggtaaaccatataaatttaccgaacatgaaaatgaattgataaaaaagaatggtttaactccaggaatggttgcaaaaagagtacgaggtggctgggcgttgttagaagccttacatgcaccttatggtatgcgcttagctgagtataaagaaattgtgttatccaaaatcatggagcgagagagcaaagaacgtaaattggaaagacagcgaaagaaagaagctgagctaagaagaaagaagccacatttgtttaatgtacctcaaaaacattcacgtgatccgtactggttcgatgtcacttataaccaaatgttcaagaaatggagtgaagcataa

SEQ ID NO: 410708 - DNA, 258 bp, Staphylococcus aureus
atgagcataatcagtaacagaaaagtagatatgaatgaaacacaagacaatgttaaacaacctgcgcattacacatacggcgacattgaaattatagatttcatcgaacaagttacggcacagtatccaccacaattagcattcgcaataggtaatgcaatcaaatacttgtctagagcaccgttaaagaatggtcatgaggatttagcaaaggcgaagttttacgtcgatagagtgtttgacttgtgggaggggtaa

SEQ ID NO: 410709 - DNA, 507 bp, Staphylococcus aureus
ttgaagtttttaaaggatgcaaaattttcttcagattcagaaaatttagatatacgtcttagacctgaatataatgttgggaatgcattagtcgtaagagtagataaagaaataaatcctgaaaaatttgtggattatccagaaggatacacagtacaaagttatgtgtcaaaaggatcagattatccaagtgttgaaaagatagttaaaaataaaataacaggtatgtataaaataacgtatactcttatggataaagctggaaatcctgttaatggttctgatgggcaggttgtcattcgtagccttaatatatatttttatgatcctacaccagtattagaaagtattgataaagtaaataagaaaataaaagatgggaactacagtaatggagatgaagttaagaaagagctagataaaataagagttgacattgaaagacctaaagaaataccaaatatcaaagaatttttaagtaaggttgatatggaagaaaaaaaatga

SEQ ID NO: 410710 - DNA, 255 bp, Staphylococcus aureus
atgaataaccgcgaacaaattgaacaatcagttatcagtgctagcgcatataacggtaatgatacagagggattgctaaaagagattgaggacgtatataagaaagcgcaagcgttcgatgaaatacttgagggaatgacaaatgctattcaacattcagttaaagaaggtattgaacttgatgaagcagtcggtattatggcaggtcaggttgtctataaatatgaggaggaacaggaaaatgaagaaatttaa

SEQ ID NO: 410711 - DNA, 246 bp, Staphylococcus aureus
gtgagttacatcattacattagttctaatacttgtattcataataatatttaacaatttactcaacagatatatggttttgtacaaagaattagatttatttacatgcagaattggaatgttattagtcttaatcgttatagtagattttgcaaaacaacaaaatatgttagctacattgagtgttttactaatacttttattcgtagaaaaacttagaatcattcaaaggagtgataagaagtga

SEQ ID NO: 410712 - DNA, 237 bp, Staphylococcus aureus
gtgacgcaatacttagtcacaacattcaaagattcaacaggacgcaagcatacacacataactcgagctaaaagcaatcagacgtttacagttgttgaggcggagagtaaagaagaagcgaaagagaaatatgagtcacaaaatacacctattgtttactacactaataattctaaagtgaccttattcgaaagacctagtgaagaagtattaggttctttgttcgaaaagaaataa

SEQ ID NO: 410713 - DNA, 150 bp, Staphylococcus aureus
atgattaaacaaatactaagactattattcttactagcaatgtatgagctaggtaagtatgtaactgaacaagtatatattatgatgacggctaatgatgatgtagaggcgccgagtgattacgtctttcgagcggaggtgagtgaataa

SEQ ID NO: 410714 - DNA, 651 bp, Staphylococcus aureus
atgagaactgtagttgatcgacctagaacacaatataaaaaagtcgtctttaataatttattttatcaatttagtaaggatgccaactttgaacctattgcttgtagaccctatcgtcctcaaacaaaagggtctgttgaatcattagctaaatttgttgaacagcgtttaagaccatacgattatgaattttatgatgctgtagaacttattgggctagtaaacgatttatgtcacgaattgaatcacttagaaatttcacaagcaacagaacaacgacctatcgacgttttcaattatgaagaaaaagaacatttaaattcttttaatgccaagttactagatacttacatcgaaaatgagtgtataagaatcgtttctaaagaatcgatgattaactttagaaaaggtaaatactcggtacctactaaatacattggtgaagaagtacaagtgatattcaataattctactgatgaattgctgatttattatgatggtgaattaataagacggcataatctatccgaaagaaaatttaattatatcgttgaagatatgagtgaaatattaaaatcagatgtatttaaacataaggatgacaaagaaattcttacgtatatagaaaattcattattactgtatgactaa

SEQ ID NO: 410715 - DNA, 150 bp, Staphylococcus aureus
atgtcagaagctaacgatgaggaagaagcagaagaaattaacgaagcctatcaagatatcatcgaagaatataaagacatcgctcaagaagaagtgtatgtacaacaaatcgaagttgaaaacggaagtattaatatccgcctatcatag

SEQ ID NO: 410716 - DNA, 309 bp, Staphylococcus aureus; identical to SEQ ID NO: 410663

SEQ ID NO: 410717 - DNA, 201 bp, Staphylococcus aureus
atgattatcacaaaacaagaactcaaaactttagacgtagccaaagcatttgaagaaggagcaaacttcattaagattaaagatggtagacatgaaatctttttagtcaacggacgctataaagtcgttgattacaaaaaagggttaggattagaagaagcacaaagaatcccgaaatacattaagcaagccattgcataa

SEQ ID NO: 410718 - DNA, 393 bp, Staphylococcus aureus
atggcaaagattaaaagaaaaaagaagatgacgctactcgaactggtggaatgggcatggaacaatcctgaacaagttgaaagtaaagtgtttcaatcagatagaatgggcacgcttggagaatgtagcgaagtacatttttcaactgatgggcatgggttttatacaaaagtagtaacagataaagatatttttactgtagaaatcacagaggaagtcactgaagatactgagtttgattgtctagtagaactaaacgatattgaaggttttgaaatatatgaaaatgattcaatcagagagttgatagacggtacttccagagcgttttatatactaaacgaagataaaactatgacattaatttggaaagatggggagttggtagtatga

SEQ ID NO: 410719 - DNA, 192 bp, Staphylococcus aureus
atgatgcaaacctataaagtatgtctttgtatcaagttctttgcatctaaatgtgattataaattaaagaaacattatttcgtgaaaagtacgaatgaggaaaaagccacgaacatggtattaaaactgattcgtaaaaagctcccgttcgaaactgcaagcatagaagtcgaaaaagtggaggcaatataa

SEQ ID NO: 410720 - DNA, 150 bp, Staphylococcus aureus
atgaaagacaaaaagaaaaaagaagcaaaaaataaatctttaccaaaatctggggagtttgaaaataacaacggattattaggtggaggtattgtagcaatcttaggttctattttggctgtattcggcttacgtagaaaacaacaataa

SEQ ID NO: 410721 - DNA, 132 bp, Staphylococcus aureus
atgaaaaagaaattattagttttaactatgagcacgctatttgctacacaaattatgaattcaaatcacgctaaagcatcagtgacagagagtgttgacaaaaaaatttgtagttccagaatcaggtattaa

SEQ ID NO: 410722 - DNA, 2688 bp, Staphylococcus aureus
atgaatatgaagaaaaaagaaaaacacgcaattcggaaaaaatcgattggcgtggcttcagtgcttgtaggtacgttaatcggttttggactactcagcagtaaagaagcagatgcaagtgaaaatagtgttacgcaatccgatagcgcaagtaacgaaagcaaaagtaatgattcaagtagcgttagtgctgcacctaaaacagtcgacacaaacgtgagtgatactaaaacaacgtcaaacactaatagtggcgaaacaagtgtggcgcaaaatccggcacaacaggaaacgacacaatcagcatcaacaaatgcaactacggaagaaactccggcaactggtgaagctactactacggcaacgaatcaagctaatacaccggcaacaactcaatcaagcaatacaaatgcggaggaattagtgaatcaaacaaataatgaaacgacttctaatgatactaatacagtatcatctgtaaattcacctcaaaattctacaaatgcggaaaatgtttcaacaacgcaagatacttcaactgaagcaacaccttcaaacaatgaatcagctccacagagtacagatgcaagtaataaagatgtagttaatcaagcggttaatacaagtgcgcctagaatgagagcatttagtttagcggcagtagctgcagatgcaccggctgctggcacagatattacgaatcagttgacagatgtgaaagttactattgactctggtacgactgtgtatccgcaccaagcaggttatgtcaaactgaattatggtttttcagtccctaattctgctgttaaaggtgacacattcaaaataactgtacctaaagaattaaacttaaatggtgtaacttcaactgctaaggtgccaccaattatggccggagatcaagtattggcaaatggtgtaatcgatagtgatggtaatgttatttatacatttacagactatgttgataataaagaaaatgtaacagctaatattactatgccagcttatattgaccctgaaaatgttacaaagacaggtaatgtgacattgacaactggcataggaaccaatactgctagtaagacagtattaatcgactatgagaaatatggacaattccataatttatcaattaaaggtacgattgatcaaatcgataaaacaaataatacgtatcgccaaacaatttatgtcaatccaagcggagataacgttgtgttacctgccttaacaggtaatttaattcctaatacaaagagtaatgcgttaatagatgcaaaaaacactgatattaaagtttatagagtcgataatgctaatgatttatctgaaagttattatgtgaatcctagcgattttgaagatgtaactaatcaagttagaatttcatttccaaatgctaatcaatacaaagtagaatttcctacggacgatgaccaaattacaacaccgtatattgtagttgttaatggccatattgatcctgctagtacaggtgatttagcactacgttcgacattttatggttatgattctaattttatatggagatctatgtcatgggacaacgaagtagcatttaataacggatcaggctctggtgacggtatcgataaaccagttgttcctgaacaacctgatgagcctggtgaaattgaaccaattccagaggattcagattctgacccaggttcagattctggcagcgattctaattcagatagcggttcagattcgggtagtgattctacatcagatagtggttcagattcagcaagcgattcagattcagcaagtgattcagattcagcaagtgattcagactcagcaagtgattcagattcagcgagcgattcagattcagcgagtgattcagattcagacagcgattcagactcagacagtgactcagattccgatagtgactcagactcagatagcgactcagattccgatagtgactccgactcagacagcgattcagattcagatagtgattcagattcagatagcgattcggattcagatagtgactcagattcagatagcgactcagattcagatagcgattcagattccgacagtgactcagattccgacagcgattcagattccgacagtgactcagactcagacagtgactcggattcagatagcgattcagactcagacagtgactcggattcagatagcgattcagactcagacagtgactcagactcagacagcgattcagattccgacagtgactcagactcagacagcgattccgactcagacagtgactcggattcagatagcgattctgactcagatagtgactccgactcagacagcgactcagattcagatagcgattcagattccgacagtgactcagattcggatagcgattcagaatcagatagtgactccgactcagacagcgactcagattcagatagcgattcagaatcagatagtgactccgactcaggttctaacaataatgtagtgccgcctaattcacctaaaaatggtactaatgcttctaataaaaatgaggctaaagatagtaaagagccattaccagatacaggttctgaagatgaagcgaatacgtcactaatttggggattattagcatcattaggttcattactacttttcagaagaaaaaaagaaaataaagataagaaataa

SEQ ID NO: 410723 - DNA, 423 bp, Staphylococcus aureus
atgactaaaaagaaatacggattaaaattatcaacagttcgaaagttagaagatgagttgtgtgattatcctaattatcataagcaactcgaagatttaagaagtgaaataatgacaccgtggattccaacagatacaaatataggcggggagtttgtaccgtctaatacatcgaaaacagaaatggcagtaactaattatctttgtagtatacgaagaggtaaaattcttgagtttaagagtgcgattgaacgtataattaacacatcaagtaggaaagaacgggaattcattcaagagtattattttaataaaaagactttaattgtggtttgttatgacatacacatctctgaaagtacagcgcatagaatcaagaagaaaatagtctctaaactagccgaagaattaggggaatactaa

SEQ ID NO: 410724 - DNA, 366 bp, Staphylococcus aureus
atgatgtgggaaatagttgctatcggtatccttatattaattacattactttatgtaatatatacagacaaaattgaagtgagggagaagattgatgaattaaagcatgacataaaaaggaatgaaaaattatttgaaaattataagaaagaaaacagaccaatcgaatatattgttgagttatatgatggtgtgtatttacaagaagaatatacaggagcattttcgaaaatgataacacttactacaactagcaatgtttttgaagctaaatcatatgacaatttatttttagctaaaatagatgctgaatttctgagtggtcgtgtattaaaatataagccgaatttagaggtgattgaatag

SEQ ID NO: 410725 - DNA, 243 bp, Staphylococcus aureus; identical to SEQ ID NO: 409872

SEQ ID NO: 410726 - DNA, 210 bp, Staphylococcus aureus
atgaaagcttgtttatatctttctaatgataaatttgttgaaatcgataatttagaaaaagtgataaagtcaggtcatcgcggaactgttgaaatatcaaaagaaaaaattaaaagttccttgttcactaatggctcatatacttttgttggagacaaaatagtagctatcgcttcagctaaaatcgaattcatagaatttatcgattaa

SEQ ID NO: 410727 - DNA, 240 bp, Staphylococcus aureus
atggaacaagtccacgcttgtcttttaggtgaatgggttaatcttcatgatgatgaaaattgcaaaatgggacctcgtatgacttctccatcaatatggtgggaagaaaacgctgaattatggtctccaattcaaaaattagaagctgatacaatgtatcaacaggactacatcatgattaattacaagggtaaagattaccgaattcatcctatctttattcaaattgttacttcataa

SEQ ID NO: 410728 - DNA, 462 bp, Staphylococcus aureus
atgggattatatgaagaaactttaatacaacatgattatattgaagtaagagaggctgatgtacttccagataatttagacggggtatggttaggagatctaattttaataaagcgtggtttatcagatagagaaaaggcaggaattctcttcgaagaattagcacataataaacttacatacggtgatatagctgattactcgaaattcaacaatcgcaagttcgaaaattacgcacgtagacacggctttatctcagctgttccattacgtgaaattgtagaagcttataattatggcgtacgtaacttgtatgagttgtctgagtatctacaattaagcgaagaatacatattggaggcgatagaacaatataagaagatgtatggtattggtactcactacggtgaatactcaattacatttgaaccgttgagagtttttaaatataaagaaatataa

SEQ ID NO: 410729 - DNA, 504 bp, Staphylococcus aureus
atgagaaaattattaggtttagcattagcaagtacgttaattttaggcgcatgtggtagtaacgatacagacaaaaaagaagaaagtaaaaaaacagaaacaaagaaagagaacaaagataaaaagaaagaaactaaagaaaaagcagaagcgaaaaaagaaaatgctaatcaaaacgataacaataatcaagtaaacaacgagaacaacacaaacgttaacaacgatcaacaaaccaataacacatctaagcaacaggtacagaagaatcttccagctaccaataatggacaacaagcacaaccacgcgacccaaacgaacctagttacgaagaatatttaaatgctaaaagagccactgaagaaatggaaaataatccggacaaaaaccaacatgctggaggtggtccaggaatgtcgttaacccaccctaatcagtcatatgatagttttagaaaagaagtaggaaaagcaagaagcgaagcaatagttgttcaacaataa

SEQ ID NO: 410730 - DNA, 855 bp, Staphylococcus aureus
atgaataaacacaagaaaggttctatttttggaataataggacttgttgtcatatttgctgttgtctcatttttatttttctcaatgatatccgatcagatatttttcaaacatgttaaatccgacattaagattgaaaagttaaatgttacattaaacgatgcagcaaagaaacaaataaataattatacgagtcaacaggtatcaaataaaaagaatgatgcatggagagatgcatctgcaactgaaattaaaagtgcaatggatagcggtacttttatcgataatgaaaagcaaaaatatcaatttttagatttatcaaagtatcaagggattgataaaaatagaattaaacgtatgttagtagatagaccaacgttattgaaacatacggatgatttcttaaaagctgctaaagataagcacgttaacgaagtttatttaatttcacatgcattattagaaactggcgcagttaaaagtgaattagctaatggagtcgaaattgatggcaaaaaatactacaatttctatggagtaggagcccttgataaagacccaattaaaacaggtgcagaatatgctaaaaagcatggttgggatacacctgaaaaagctatttcaggcggtgctgatttcattcataagcacttcttatcaagcacagatcaaaatacattgtatagtatgagatggaatccaaaaaatccaggagaacatcaatatgctactgatattaagtgggcagaaagtaatgcaacaattatcgctgacttttataagaacatgaagactgaaggaaaatacttcaaatactttgtgtataaagatgacagtaaacatttgaataagtaa

SEQ ID NO: 410731 - DNA, 1152 bp, Staphylococcus aureus
gtgtatacttatactattaaaattagaaatgagattattatgaaaatagtagaagtaaaatctaagaatggtatcaattttatgattttagatggtaataatgaacctatagtagatgcagtaagatatttgaagtatctggatagtgttaataaaagtttaaataccaagaaaacctatgcctatgcactaaaaaaattttttgtttacttagaaagtaaaaagatatgctataaagaagttagttttgataactttgttgattttataagatggatgaaaacaccttttgaatatgagaatgtcctctcttatcaccgaaaaggaaaaagcattagtcctaagacaattaatctgactattactgtagtatctaatttttatgattatctctataggagcaaaaaattagatgttaatttctatgattttatacatacggaaagtaaatactctaaaaaatataaaagtttcatgcatcacgtaaacaaggactatggaatgttgaaaaatattttgaaagtaaaagaaccaaagaaaaaactagaagtgttaaccaatgttgaggttaagaaattattaggagcagctaataatattagagataaattcttaatacaattattatatgaaacaggattacgtataggtgaggtattatcattacgcattgatgatatcaaatttgattttagaaaaggtcaccaaatagttttgaaaaatagatttaatagcaatggtacttatttaaaaactggtgaaagaaaaatatttatttctcaatcgttaattgatttatatgacgattatgtgtacgaaataattgacgaactttccatatgttctgattatctttttgtaaaaataaagggtagaaatgtaggagaagctatgcattatagtgatatatattcattatttaaaaggctaaaacataaaacatctataaatgttcacccccatttatttcgccatacacatgcaactgttttttataatgaaactaaggatattaaacaagttcaagaaagactcggtcatagtaatatacaaacgactattaatttatatgttcatcccactgaagaagatatacgtgaagattggaataaagttaagcatcaatttcaagtttttaataaaggggaataa

SEQ ID NO: 410732 - DNA, 411 bp, Staphylococcus aureus
atgattccaaatcctaatgcgccagatgaatataaatatgaaactgattatagaaaaataccaagaaaatatttaaaccctaaaatccctcaagggcgtggaaaaatcaaatggcaagcttttgcgactctcccgcaacagtttgaaattttagaacaaattataaaggatcaaaataaaatagaaaaaccattgctaacacatgattcattagataatttagatcagatttttcaaataaaaattcaaaatgatgagttatgtacaatctcatattgggaagacggcagcatttcaaactatacaggaaaaattttgaaaattgatacaatcaatggttattttacattttacgattctacaaatactaaacatacttttttcaatactaatgtgtataatatctcttaa

SEQ ID NO: 410733 - DNA, 432 bp, Staphylococcus aureus; identical to SEQ ID NO: 409849

SEQ ID NO: 410734 - DNA, 1260 bp, Staphylococcus aureus
atgaaatttacagagttaactgttaccgaatttgacaactttgtacaaaatccatcattggaaagtcattatttccaagtaaaagaaaatatagttacccgtgagaatgatggctttgaagtagttttattaggtattaaagacgacaataacaaagtaattgcagcaagccttttctctaaaattcctactatgggaagttatgtttactattcgaatcgtggtccagtaatggatttttcagatttaggattagttgattattatttaaaagagttagataaatatttacagcaacatcaatgtttatatgttaaattagatccgtattggttatatcatctatataataaagatatcgtgccatttgaaggtcgcgagaaaaatgatgccttagtaaacttgtttaaatcgcatggttacgagcatcatggctttacaactgagtatgatacatcgagccaagtacgatggatgggcgtattaaaccttgaaggtaaaacacctgaaacattgaaaaagacatttgatagtcaacgtaaacgtaatattaataaagcgataaattatggtgttaaagtaagattccttgaacgtgatgagttcaatctattcctagatttatatcgtgaaactgaagagcgtgctggatttgtatcaaaaacagatgattatttctataactttattgacacatatggagataaagtattagtaccattagcatatattgaccttgatgaatatgtgttaaagttgcaacaggaattgaatgacaaagaaaatcgtcgtgatcaaatgatggcgaaagaaaacaaatcagataaacaaatgaagaaaattgcagaattagataagcaaattgatcatgatcagcatgaattattgaatgcaagtgaattgagcaaaacggacggcccaattctaaaccttgcttctggcgtttattttgcaaatgcatatgaagtgaattatttctctggtggttcatcagaaaaatacaatcaatttatgggaccttacatgatgcattggtttatgattaactattgcttcgataatggttatgatcgttataatttctatggtttatcaggtgattttacggaaaacagtgaagattatggcgtataccgctttaaacgtggatttaatgtacaaatcgaagaattaataggggatttctataaaccaattcataaagtgaaatattggttgttcacaacattggataaattacgtaaaaaattaaagaaatag

SEQ ID NO: 410735 - DNA, 321 bp, Staphylococcus aureus
atgactactgatgacaaacgtataaaagatatcgtatcccatgcggaaggctttatttatactgtgacgatgaatgcgacaacaggacaaaatggtgcgtttcacccagaattaaaacgaaaaattgagtcaattaaagcgatagccaatgtgccagttgtcgcaggatttggcataagatctccacaacatgttgcagatataaaagaggttgcagatggtatcgttattggtagtgaaatagtaaaacgatttaaatctaacacgcgtgaagaaatcattaaatatttacaatctatccagcaaacattgaataattaa

SEQ ID NO: 410736 - DNA, 729 bp, Staphylococcus aureus; identical to SEQ ID NO: 407573

SEQ ID NO: 410737 - DNA, 261 bp, Staphylococcus aureus
atggcaatgacagtaaaaaaagataataatgaagtgcgtattcaatggagagttgctgatatcaaaattcctacaagtgaaattaaaaatattacacaagaccaagatattcatgcagttcctaaattagacaacaaagatgtatctagaatcggctcaacatttggtaaaacgaatcgcgttattatcgatactgaagaccacgaatacattatttatactcaaaatgatcaaaaagtttacaatgaattaactaaataa

SEQ ID NO: 410738 - DNA, 288 bp, Staphylococcus aureus; identical to SEQ ID NO: 407150

SEQ ID NO: 410739 - DNA, 3786 bp, Staphylococcus aureus; identical to SEQ ID NO: 409427

SEQ ID NO: 410740 - DNA, 1839 bp, Staphylococcus aureus
atggtagatgctattaaaaaaggacttaataaattaatcgacggtttaaactgggtcggtggtaagttgggcatggataaaatacctaagttacatactggtacagagcacacacatactactacaagattagttaagaacggtaagattgcacgtgacacattcgctacagttggagataagggacgcggaaatggtccaaatggttttagaaacgaaatgattgaattccctaatggtaaacgtgtaatcacaccaaatacagatactactgcttatttacctaaaggctcaaaagtatataacggtgcacaaacttattcaatgttaaacggaactcttccaagatttagtttaggtactatgtggaaagatattaagtccggtgcatcatcagcatttaactggacaaaagatcaaataggtaaaggtaccaaatggcttggcgataaagttggcgatgttttagattttattgaaaatccaggaaaacttttaaattatatacttgaagcttttggaattgatttcaattctttaactaaaggaatgggaattgcaggcgacataacaaaagctgcatggtctaagattaagaaaagtgctactgattggataaaagaaaatttagaagctatgggcggtggcgatttagtcggcggaatattagaccctgacaaaattaattatcattatggacgtaccgcagcttataccgctgcaactggaagaccatttcatgaaggtgtcgattttccatttgtatatcaagaagttagaacgcctatgggtggtagacttacaagaatgccgtttatgtctggtggttatggtaactatgtaaaaattactagtggcgttatcgatatgctatttgcgcatttgaaaaactttagcaaatcaccacctagtggcacgatggtaaagcccggcgatgttgttggtttaactggtaataccggatttagtacaggaccacacttacattttgaaatgaggagaaacggacgccattttaaccctgaaccatatttaagaaatgcaaagaaaaaaggtaggttatcaattggtggcggtgatgctacttctggaagtggtgcaacttatgccagccgagtaatccgacaagcgcaaagtattttaggaggacgttataaaggtaagtggattcatgaccagatgatgcgagttgcaaagcgtgaaagcaactatcaatcaaatgcagtgaataattgggatattaatgctcaaagaggagacccgtctagaggattattccaaattatcggctcaacttttagagctaacgctaaacgagggtacactaattataataatccagtacatcaaggtatctcagcaatgcagtacattgttagacgatatggttggggtggttttaaacgtgctggtgattacgcatatgctacaggtggaaaagtttttgatggttggtataacttaggtgaagacggtcatccagaatggattattccaacagatccagctcgtagaaatgatgcaatgaagattttgcattatgcagcagcagaagtaagagggaaaaaagcgagtaaaaataagcgtcctagccaattatcagacttaaacgggtttgatgatcctagcttattattgaaaatgattgaacaacagcaacaacaaatagctttattactgaaaatagcacaatctaacgatgtgattgcagataaagattatcagccgattattgacgaatacgcttttgataaaaaggtgaacgcgtctatagaaaagcgagaaaggcaagaatcaacaaaagtaaagtttagaaaaggaggaattgctattcaatga

SEQ ID NO: 410741 - DNA, 2697 bp, Staphylococcus aureus
atgggagaaagaataaaaggtttatctataggtttggatttagatgcagcaaatttaaatagatcatttgcagaaatcaaacgaaactttaaaactttaaattctgacttaaagttaaccggtaacaacttcaaatataccgaaaaatcaactcatagttacaaacaaaggattaaagaacttgatggaactatcacaggttataagaaaaacgttgatgatttagccaagcaatatggcaaggtatctcaagaacagggcgaaaacagcgcggaagctcaaaaattacgacaagaatataacaaacaagcaaatgagctgaattttttagaaaaagaactagaaaaaacaacaactgagtttgaagagttcaaaaaagctcaagttgaagctcaaagaatggcagaaagtggctggggaaaaaccagtaaagtttttgaaagtatgggacctaaattaacaaaaatgggtgatggtttaaaatccattggtaaaggtttgatgattggtgttaccgcacctgttttaggtattgcagcagcatcaggaaaagcttttgcagaagttgataaaggtttagatacagttacccaagcaacaggagcaaccggcggagagcttaagaagttgcagaattcatttaaagatgtttatggcaactttccagcagatgctgagactgtaggcggtgttttaggggaagttaacacaaggttaggtttcactggcaaagaacttgagagtgccacagagtcattcttgaaatttagtcacataacaggttctgaaggcgtacaagccgttcaattaattacgcgtgcaatgggtgatgcaggtattgaagctgatgagtatcaaagtgtacttgatatggtagcgaaagcagcacaggctagcggtataagtgttgatacattagctgatagcattactaaatacggtgctccaatgagggctatgggctttgagatgaaagaatcaatcgctttattctctcaatgggagaaatcaggtgttaatactgaaatagccttcagtggtttgaaaaaagctatatccaattggggtaaagctggtaaaaatccaagagaagaatttaagaagacattagcagaaattgaaaagacgccggatatagctagcgcaacaagtttagcgattgaagcatttggtgcaaaagcaggtcctgatttagcagatgctattaaaggtggtcgttttagttatcaagaatttttaaaaactatcgaagattcccaaggcacagtaaatcaaacgtttaaagattctgaaagtggctccgaaagatttaaagtagcaatgaataaattaaaattagtaggtgctgatgtatggacttctattgaaagtgcgtttgcaccagtaatggaagaattaatcaaaaagctatctatagcggttgattggttttccaatttaagtgatggttctaaaagatcaattgttattttcggtggtattgctgctgcaattggtcctgtagtttttggattaggcgcatttataagtacaattggcaatgcagtaactgtattagccccactattagctggtattgcaaaggctgatggattaattagttttttatcgactaaagtacctatattaggaactgtcttcacggctttaactggtccaattggcattgtattaggtgttttggctggcttagcagtcgcatttacaattgcttataagaaatctgaaactttcagaaattttgttaatggtacaattgaaagtgttaaacaaacatttagtaattttattcaatttattcaacctttcattgattctgttaaaaacatctttaaacaagcgatatcagcaatagttgattttgctaaagatatttggagtcaaattaatggattctttaatgaaaacggaatttctattgttcaagcgcttcaaaatatatgcaattttatcaaagctatatttgaatttattataaattttgtaattaaaccaatcatgttcgcgatttggcaagtgatgcaatttatttggccggcggttaaagctttaattgtcagtacttgggagaatataaaaggtgtgatacaaggagctttaaatatcatactaggtttaattaagttcttctcaagtttatttactggagattggcgaggagtttgggatgcgattgttatgattcttaaaggagtcgttcaattaatatggaatttaattcaattatggtttgtaggcaaaatacttggcgttgttaggtactttggcggattgctaaaaggattaatagcaggtatttgggacgtaataaaaagtatattcagtaaatctttatcagcaatttggaatgcgacaaaaagtatttttggattcttatttaatagtgtcaaatcaattttcacgaatatgaaaaattggttatctaatacttggagtagtatccgtacgaatacgataggaaaagcgcagtcattatttagtggcgtcaaatcaaaatttactaatttatggaatgcgacgaaagaaatttttagtaatttaagaaattggatgtcaaatatttggaattccattaaagataatacggtaggaattgctagccgtttatggagtaaggtacgtggaatttttacaaatatgcgtgacggcttacaaagtattatcagcaaaattaaaagtcatatggcggtatggtag

SEQ ID NO: 410742 - DNA, 837 bp, Staphylococcus aureus
atgctagataatattattttatattttaaaaacttaccgcatactaaaaggtatgtaacagaacgtttaaaacaaagttggaaaagttttctaatcgtattagctgcatgtttaatacttattattgcaagtgaaacgctattttcctttagtcatttgaccgatgttaaagaggtgcgatggttatttagacttattgcattgattgtttttgcggtattgatgttcacaatttatatctcttatcatcattatatgaatgactttttagttactaagttatttaatatttccgcagcgacgccagtagttattatgtctattttaagttttattatgctagtcattttgacgatgattagtgcattggttaaaccagtaaacttcgaaacatcatatatagcgctattctattttattgtgatggcaactatttttgtaggattaatatcagttacttttggtcttattcgactgttaactgaaaaaataaatatcatattttatgggatttgtgtattgtgtttcttagtgttaccaattattttcataccaaatccaaatcatgtatttatcaatcacatcctaatgctgaatccaatgtattacattgttaatggtatagcacaatctatcatatttggtatatcgagtatggaaaacattccatatcatttttactttattttattcttatgtttaatagctgcagtaaatttcgtattagcaaggtatacgacacacgcaatttataataaaacatctaaagtgacacaaactgataatcaacaagatgtttcaaaagatagtacagacgaggcggatacttcttcatga

SEQ ID NO: 410743 - DNA, 675 bp, Staphylococcus aureus
atgaattattcgccgaagcaaggtgtaaggagtcatggcttaccacacgatccatttaaaagtagtacagtaccacgtccaatagggtggatctctactgtatcgaaagatgggaaagataatttagcaccttatagtcagtatcaaaacttaacttgggatccgcctatggttatgttcgcagcaaatcaatctgttcttggtgatcatgagcgtaaagatacagtaaaaaatgcagaagagacagggtggtttgtatggaacatggccacgtatgatttaagagaagctgttaatttatcgtcgaaggcactaccaccagaagaggatgaatttaattttgcaggtgtaacaaaggaaaaatgtatagaagcaccaggttatcgagtcaaagaatcgccagtacattttgagtgcgagtacgttcaaacaattcgtattccgacaggagaccctgtatcaacagttgatattgttataggaagagttgctcaggttcatattgacgataaggtcattcttgataatggtaaattagacattaagtcgattaaacctattgctaggttaggatattatgattacacggttgtgaatgaaatatttgaaatgaaagcaccatcagcttctaaagaagagcttgcaggtttagaaggaagaaattttgataattaa

SEQ ID NO: 410744 - DNA, 399 bp, Staphylococcus aureus
atggcaattgtattgccggatagtgtgttaacaggtccgaaattacagtacgttagaaactatatcctgaaacgttttaaagtagtaggagtagtttctttaccatatgaaacgtttattccacatggtgccaatgttaaagcatcaatacttttacttcaaaaactagattctaaaacaatggaagaattaaatacagatggctacgaatctttcatggtagatatagagaaaattggttatcagggaaataagaatggtacattaatttataaaattgatgaaaaaggtcagtacatattggatgaaaatggaaataaaatattagatgaagaaataagtgaagcattagaaggatggactgagtacgaagcagtaaatgaggtgtggagttcatga

SEQ ID NO: 410745 - DNA, 183 bp, Staphylococcus aureus
atgagtattagtgtaggagataaagtatataaccatgaaacaaacgaaagtctagagattgtgcaattggtcggagatattagagatacacattacaagttatctgacggctctattatcagtctcatagactttgttattaaaccaattcatttaatcaaggaggcacaggaaaatgactaa

SEQ ID NO: 410746 - DNA, 255 bp, Staphylococcus aureus; identical to SEQ ID NO: 409176

SEQ ID NO: 410747 - DNA, 1611 bp, Staphylococcus aureus; identical to SEQ ID NO: 408382

SEQ ID NO: 410748 - DNA, 843 bp, Staphylococcus aureus
ttgagtgattttacgaagacagaaaagataatcgctgattacattttaaagaatccacataaaatcattgatatgactgtgaatgatttagcagatgttacgaatgttagtacagcatcaattgttagatttagtcggaaaatgacacatcaaggttttcaagagctaaagattgcgatatctcgatacttacccgaagatattgcaaccaatccacatttagaattgattgaaaatgaatctgtagaaactttgaaaaataaaatgattgctagagcaacgaatacgatgcgatttgtagctactaatattatggatgcgcaaattgatgcaatttgtgatgtgttgaaaaatgccaggacaatatttttatttggatttggcgcatcgagtttgactattggtgatctttttcaaaagttatctcgtattggcttaaatgtcaggttattacatgaaacgcatttacttgtgtcaacatttgcgacgcatgatgatagagattgcatgatttttgtgacgaatcaaggtagtcatagtgaattgcagtcaattgcacaggtggccacacattacagtattcccatcataactatatctagtacagctaataatccagtggctcaaattgcagactatgcattgatttatggcagaactgatgaaaatgaaatgcgtatggcggctacaacgtcactatttgcacagttattcacggtagatatattgtactatcgatttgtagcattaaattatcatgcgattctagattgtataacccaatcgaaaatggcacttgataattacaggaagcatcttgcgacgatagattttaaacattag

SEQ ID NO: 410749 - DNA, 864 bp, Staphylococcus aureus
atgacaatgatggatatgaattttaaatattgtcataaaatcatgaagaaacattcaaaaagcttttcttacgcttttgacttgttaccagaagatcaaagaaaagcggtttgggcaatttatgctgtgtgtcgtaaaattgatgacagtatagatgtttatggcgatattcaatttttaaatcaaataaaagaagatatacaatctattgaaaaatacccatatgaatatcatcactttcaaagtgatcgtagaatcatgatggcccttcagcatgttgcacaacataaaaatatcgcctttcaatctttctataatctcattgatactgtatataaagatcaacattttacaatgtttgaaacggacgctgaattattcggatattgttatggtgttgctggtacagtaggtgaagtattgacgccgattttaagtgatcatgaaacgcatcagacttacgatgtcgcaagaaggcttggtgaatcgttgcaattgattaatatattaagagatgtcggtgaagattttgaaaatgaacggatatattttagtaagcaacgattaaagcaatatgaagttgatattgctgaagtgtaccaaaatggtgttaataatcattatattgacttatgggaatattatgcagctatcgcagaaaaagattttcgagatgttatggatcaaatcaaagtatttagtattgaagcacaaccaatcatagaattagcagcacgtatatatattgaaatactggacgaagtgagacaggctaactatacattacatgaacgtgtttttgtggagaagaggaaaaaagcaaagttgtttcatgaaataaatagtaaatatcatagaatatag

SEQ ID NO: 410750 - DNA, 909 bp, Staphylococcus aureus
atgcttaaaaaggcaaaattaatcttaatagcaacgctactgctatcaggatgttcaactaccaataacgaatctaataaagaaacaaaatctgtaccagaagaaatggaagcttcaaaatatgtaggacaaggcttccaaccacctgcagaaaaagatgcgattgaatttgcgaaaaagcataaagacaaaattgccaaacgaggcgaacaattttttatggataacttcagtctaaaagttaaagctacgaatgttgtaggtagtggcgacggcgtagaagtatacgtgcattgtgatgaccacgatatcgtatttaatgcgagtattccatttgacaaatcaattattgacagtgatagctcattaagaagtgaggataaaggcgatgatatgagtactttagttggtacagtgttgagtggctttgaatatcgagcacaaaaagaaaagtatgacaatttatataaatttttcaaagataatgaaaagaaatatcaatatacaggatttacaaaagaggcaattaacaagacacaaaatagtggatatgaaaatgaatatttttatattacgactataccgtataatttaactgagtatagagactattttgaaccattattaaacaaaagtgacagtgaattttcaaaagaattgtcaaatgttaagaagcaattaaaagataagtctaaactttcggtaactactactctatttagtaaaaaaaagaactatactaaaaaaagtaacagtgaaaatgtaataaaaatggcagaagaaataaaaaaagaaaaagagataccaaacggtatagatcttagtataaaattttcggacaataaaataaatacagttaaaccaaattataacggtaaaagcacttcagaatatggtgtgtttgactaa

SEQ ID NO: 410751 - DNA, 393 bp, Staphylococcus aureus
atgaaaaaagtaatcaatgtagtaggagctattattttttctgataacaaaattctttgtgcacagagaagtgaaaaaatgagtctgcctttaatgtgggaatttcctggcggtaaggttgaaaagaatgaaactgaaaaagacgctttgattagagaaattagagaagaaatgaaatgtgatctaattgttggagacaaagttataactacagaacatgaatatgattttggaattgttaggttaacaacatacaaatgtactttaaacaaagagttaccaactctaactgaacataagagtattgaatggttgtcaataaacgaacttgataaattaaattgggccccagcggatataccagccgttaataaaattatgactgagggataa

SEQ ID NO: 410752 - DNA, 2862 bp, Staphylococcus aureus; identical to SEQ ID NO: 408252

SEQ ID NO: 410753 - DNA, 801 bp, Staphylococcus aureus
atgaatattgcaaagttagaagattatctacaaattgaaccaactcgttatgatcaaccgagcattgaagcattaaattattatgcgactcgctttatgttaacggtgcctttcgaaaatattgatgttcaaaatggtaaaccaatatctgtagatatcgatgcacttttcaataaaattgttcatgacaaacgtggtggcttctgttatgaattaaacacatttttcaaagcatatttacaacaaaaaggatttaacccagaattaatgtcggctaccattcatacacccggtggcggtcgtagtcaaaacggttcacatgcatcacttgttgtttctattaataatgtcttttatgtaaccgatgtcggctttggagacttacctctaaatgccataccgattactttaccagatggtacacagccgattactgatatcagtggtacattccgcgctattttcaacagtgaggataaggacattttctatgttcaaaaatatgaaaataatcattggcatacaaaatacgaagctgaattcaaggctagagaaatagaagaattcgatcaaaacattgaatataatcaaacacatcctgattcagtatttgtaaaacatttattaattacaatgccacaatcatttggacgcgctacaatgtctgaaaaccatttaactttaacaaaagatggaacgccagaaaagttagctatcacaaaagataactataaacaatttttaacaacatactttggactaaatgtaacaattagtcgacttgaaaacagcgaaaattaa

SEQ ID NO: 410754 - DNA, 768 bp, Staphylococcus aureus
atgttaagtaaacagtctcaagattttttagaaaaattacgtgttgaattgttatttagaggtaaaactgaagaagaagtagaagaactattggaagagctcgaagatcatttaactatggctgaaaaaaataacgaagatacaagttcaattattaatacaccgattaagtcaatggctgatcagttatcacctgagataagtcttactaccggtttgtataaatatattactttgtacttctcttttatattagcagtcattataattcctaggtttttagatttgggtacatttgatgtgacaattgcatttttactttatatagctagtatcgttattttaggtgttgtcattggtatgctgattctacgcaatacattagtccgatttggtgaccaaaaaataacgtatgttataaatgtgacttatggaattgtcgtatttttatggatgatttttggtggcttgattattaaaaaatatcctatctatagtttctttgagttaagtgacaaacagagtttcatcgttgggttagtacttttaattgcgcttattgtaatttgtattttaataaaacaaaaaatttatgcggtcatcgtgttggtaatttcattgccaagtttgatagcaaggatagcatctatctttagtaaagaaccagacacttttaatttagtttcagtaagtatactcatcattctaaatatagcatttattatttatacatttgtaaattataggaagttaaaaaaagaagactaa

SEQ ID NO: 410755 - DNA, 1572 bp, Staphylococcus aureus
atgatgccacgtaaatttagagttttgcaaattggaggagacgatttagaacctattttccagcacaaaaaaggtgtgagttgggattacttcgatattggattgtttgaatttgatagtggttatgtagaggctattgaagcgattgttgaagcagaagggcgctttgattttatctatattcaagcaccatactcggagacattaacgaatttattacaaacgataagcgaaccatacaatacgtatgttgatgaatcattttggtctgttgaatatgaacaagacgaaaatgtccaaaaatacgttgttcaaccattacattaccggaacattgaagaacgtaataataaattagaggcagttagcttctcaggacagtatggagataaggtttctcctaagttagcacttgttcatccgaattttaaaggagatgtcgtttaccaaggtaattcagagctcacgttgagtggagaatttggaaaagaatttaaacctatcgcatcttggcaaaataatctcgtttacgataaagataaagtcattcaaatatggccagaatttgatattgatggtgcggtcgagttgcaatatacatttagattgattcagactggcgctgatggtgcattaattgaacaaatcgtattgactgatgatatgttagacagtcctttagagatacctacgaaaccatttgatgcttatataagtgtaactgttaaggcgcgtgggaacgggacggtacatttaggacctatacataaacgatggtctagattagacatgggtcaatttttacttggtggtagtcgtttcgtagatagtcaacgacaggaatttatttattatttccaccctggtgatatgaaaccaccactaaacgtatattttagtggttatcgaacagcggaaggtttcgaagggtattatatgatgaaacgtatgaatgcaccgtttttacttatcggcgatcctcgtgttgaaggtggtagcttttatatcggttcatctgaatatgaacaaggtattatcaatgttattgaagagacattagaaaagttgaattttaaatcacatgaattaatattatctggtttatctatgggttcatttggtgccttgtattatggtgctcagttaaatcctcaggcaattattgttggtaaaccacttgttaatattggaacgattgctgaacatatgcgattacttagaccagaagagttcggtacagcattagacgtcctggtgtctaatgaaggtgatacatctcaagcgtcgatacaggcattaaatcaaaaattttggcaaacatttcaaaagaaatcattgtcacaaactgtttttgccatagcatatatgcaacatgatgattatgatccacatgcatttcaagagctactacctgtattgacagcacaccaagcaagagtgatgaatcgcagtattcctgggcgacataatgatgattcacctaccattgcaagttggtttgttaatttttacaacattattttggaagacaagtttgggagagttcaacatgctgaaaaacaaaacatttaa

SEQ ID NO: 410756 - DNA, 2391 bp, Staphylococcus aureus
atgaaacataaactagatgttacgataaacgaattaagactaaagtcgattagaaaaatagtgaaacgcatcaatacatggagcgatgaagttaaatcatattctgatgatgcgttaaaacaaaagacaatagaatttaaagaacgtttagtatcaggagttgatacactagacacattgttacctgaagcttatgcagtggcacgtgaagcgagctggagagtattaggtatgtatcctaaagaagttcagttaatcggagcgattgtattgcatgaaggtaacattgcggagatgcaaacaggcgaaggtaaaacattaacagcaacgatgcctttatatttaaatgcactttcgggaaaaggaacatatttaattacaacgaatgattatttagcgaagcgtgattttgaagagatgcaaccattatatgaatggttaggtttaactgcttcattaggttttgttgatattgtggattatgagtatcaaaaaggggaaaaacgtaatatatatgaacatgatattatatatacaactaatggacgtctcggttttgattatttaattgataatttggcagatagtgcggaaggaaaatttttaccacaattaaattacggtattattgatgaagtggactcaatcattttagatgctgctcaaacaccattagttatttcaggcgcaccaagattacaatcaaatctatttcatattgtgaaagagtttgtagatacattgattgaagacgtgcattttaaaatgaagaagaccaaaaaagaaatatggctgttaaatcaaggtattgaagcggcacaatcatactttaatgttgaagatttatatagcgaaaaagcgatggtcttagtgcgtaatattaatctagcactgcgcgcgcaatatttgtttgaatctaatgtcgattatttcgtatataatggtgatattgttttaattgaccgtattacaggtcgtatgttaccgggaactaagttgcaagctggacttcaccaagctattgaagcgaaagaaggtatcgaggtttcaacagataaaagtgttatggcaacaattactttccagaatttatttaaactttttggatcattttcaggtatgacagctacaggaaaattaggcgaatcagagttctttgatttgtattcaaaaatagtcgtacaagtaccaactgataaagcgattcaacgtatcgatgaaccagataaagtgtttcgttcagttgatgagaaaaacatcgcgatgattcatgatatagttgaacttcatgaaacggggcgaccggttttactcataacgagaactgctgaagcggctgaatacttttcgaaagtattattccaaatggatattcctaataatttactcattgcgcaaaatgttgcaaaagaagcgcagatgatagctgaagcagggcaaattggttccatgactgttgcgactagtatggcaggtcgaggcacagatattaaacttggtgaaggtgtcgaagcattaggtggattagcagttattattcatgaacatatggaaaatagccgtgtagacaggcaattacgtggtcgttctggtagacaaggggatccgggatcatcttgtatatatatttcactagatgattatttagttaagcgatggagcgatagtaatttagcggaaaataatcaattatattcattagatgcacaacgattatcgcaaagtagtttgtttaatcgcaaagttaagcaaattgtagttaaagcgcagcgtatctcggaagaacaaggggttaaagctcgtgaaatggctaatgaatttgaaaaaagcattagtatacagcgagatcttgtatacgaggaacgcaatcgagttttagaaatagatgatgctgagaatcgagattttaaagcgttagctaaagatgtgtttgaaatgtttgtaaatgaggaaaaggtgctaacaaaatcgcgtgttgtcgagtatatttatcaaaatttaagtttccaatttaataaagatgtggcttgtgttaattttaaagataagcaagcagtagtaacatttttattagagcaatttgaaaagcaagtagctttgaatcgtaaaaacatgcaaagtgcatattattataatattttcgttcaaaaagtctttttgaaagcaattgattcatgctggttagaacaagtcgactatttacaacaattaaaagcaagcgttaatcaacgacaaaatgggcaacgtaacgctatttttgaataccatagagttgcattagattcatttgaagttatgacacgaaatatcaaaaaaagaatggtgaaaaatatttgtcaaagcatgattacatttgataaagaaggtatgccagttatacattttccataa

SEQ ID NO: 410757 - DNA, 1509 bp, Staphylococcus aureus
atgacaatatataatataaactttggtataggctgggcaagtagcggtgttgaatatgcacaagcttaccgtgctaaattattgagacgtacaaatcaagacactaaatttgtgtttttagattttatacagtcagagaacatacagacattaacgcaaaacattgggtttgaagatcaagaagttatttggttgtatcagtattttagtgatatttctatagcaccaacaacgtacacgttagatgacattgaacgtgagcttggtcatgatattagttttagagaaagaaatggtaagatagtccgcctatattttaatgggaaatcatcatttgtaacatgttatctgcaaaatgaacaaaaagacattgtggatcgtgcagaatttgtaattaatagtatgttagtacgtaaagatttttatagttatacacgcatattttctgagtattatgcaccagctgataataaagcgaaattatacatgcgacaattctataatgaagatggttccatcgcttataacgaatatattgatggagacagctctatatatgtgtttgaagatgcggtgttatataacaaaacggaatttattgcatactttttacaacgattgaatttaacccgagacgatattgtcatattagaccgcgcttctgatattggtcaggctgttttgcagcataaaggtgatagtaaagttggtgttgtgattcatgctgatcattatagtaataatatgatgagcgagcagcatatactatggaacaattattatgaatatcaattttcaaaagctaaatacattgatttctttattacagcaacagatattcaaaatcatatggtttgtcgacaatttgagcaatatcaaggttatcgcccacgtgtttatactattcctgtgggaagcattgatgcattattatatccaacattatcaagaaagccatatgcgatgattagtgcatctcgtttagcaaatgagaaacatattgattggcttgtcaaagcagttatcgtggctaaacgacaagtgccagaattaacatttgatatttatggagaaggtagcgagaagacgcgactgcgtaaaattattgatacacaccgcgcgcaagattatattcgtttactaggtcatgttaaacttgatgaaatttatactgattatgagttatttctttctgcatcaactagcgaaggttttgggttaacactaatggaagcggtaggctcaggactaggtatgattggattaaatgtgaattatggtaacccaacctttattcgagatggggaaaatggctacttggtaccttttgataccgatgaagatagtgtggatgatgttgtcacaaaactagctcatgccattgtaatgtattttaacaatggtccccagacaccacatgacatctcttatgaagtggcacagcaatttatgactcaagatattattttaaaatgggaaacattagttcaagaggtgctgcatgattaa

SEQ ID NO: 410758 - DNA, 177 bp, Staphylococcus aureus
atggataatgatttagcatggcttgtaggtgtaatgctacaaagaatgaaagcacatggtgtcattaatgatgatttttcactagatgagtttaaatcaaaccttgaacacgaagcaataaacaatcagtgtgcatttatacgtgacatggcgtttggtattatcggaaaagcatag

SEQ ID NO: 410759 - DNA, 735 bp, Staphylococcus aureus
ttgaactttaatgatttggaaatttttataactgtatgtgaagaagcatctatcaataaagctgcaattaaacttagatatgcacaatctaatatatctcaaagaattagcaagcttgaaaatgaattaggtgtagttttgctttttagaaatcaaaaaggtgctaaggcaactaaagcaggcgaagaatttttagcttatagcaaaaaagtattaagagatacagagactataaaaaataaaatgaaaaataacactatgtctcttttatgctcagaactgttatttaattatttatctgagagtgaagaatttatgatgtcgaataactcaataaattttatttctagtgggaatattagaaaagctatagaaaaaaataattatgataaggttatttcattcataaaaattaatgactcaaattatagacttaataatgttgatactatgaaagtaacgctttacagtaacggaagtaattatacgaaagagactttactaataaataaagatgagttttgtccattaaggaagcttattttaaataataagcttgattcacaacgggtaatggaagttgattcgttagcagcaataataaatttagttgaactaggaaaaggaatgactttattacctatggcttttgagaataaaagcgatatagtgcaggaaagctctgagatatttgatgttagctactatacttataataatattctgcataagtga

SEQ ID NO: 410760 - DNA, 987 bp, Staphylococcus aureus
atgaaggaaaatttttggagtgaattaccacgtccattttttattttggcgccaatggaagacgttacagatatcgtctttcgacacgttgtaagtgaagcagctagaccggatgtgtttttcactgaatttacaaataccgagagcttttgtcaccctgaaggcatacatagtgtgcgcggacgcttaacttttagtgaagatgaacagccgatggtcgctcacatatggggagataagccagaacagttccgtgaaacgagtattcaattagctaagatgggctttaaaggcattgacttaaatatgggatgtcctgtagcaaatgttgctaaaaagggtaagggttccggcttaatcttaagacctgacgtcgctgccgaaattattcaagcaactaaagcaggcgggcttccggtaagtgttaaaacacgccttggctactatgaaatcgatgaatggaaagattggttgaagcatgtcttcgaacaagacattgcaaatttatctattcatcttcgtacacgtaaagaaatgagtaaagtagatgcacattgggaattaatcgaagctattaaaaatttacgtgacgaaattgcaccaaatacattgttaacaattaacggtgatattcccgatagaaaaacaggacttgagcttgcagaaaaatatggcattgatggcgtcatgattggtagaggcattttccataatccattcgcttttgaaaaagaaccacgcgaacacacaagcaaagaactattagatctgttgagattgcatctatcattgtttaacaaatatgaaaaagacgaaatacgacaattcaagagcttgcgtagattctttaaaatctatgtgcgtggcataagaggcgctagtgaacttcgacatcaattgatgaacacacaatcaattgcagaagcacgagcactactcgatgaatttgaagcccaaatggacgaagacgttaaactagaattatag

SEQ ID NO: 410761 - DNA, 357 bp, Staphylococcus aureus
atgattgagtttcgacaagttagtaaatcatttcataagaaaaagcaaacaatagatgctttgaaggacgtatcatttacggtcaatcgcaatgatatttttggtgtgattggatatagtggtgcaggaaaaagtacgttggtaagactcgtgaatcatcttgaagctgcctcgaatggacaagtgattgtagatggacatgatattacgaattatagcgataaaatgatgagggatattaagaaagatatcggtatgatatttcagcattttaatttactaaattcagctacggtatttaaaaatgtagctatgccgctcattttaagtaagaaaagcaaaacagaaattaagtaa

SEQ ID NO: 410762 - DNA, 225 bp, Staphylococcus aureus; identical to SEQ ID NO: 408376

SEQ ID NO: 410763 - DNA, 249 bp, Staphylococcus aureus
atgcctaaaaccgatagcgcatgtaaagaatacttaaaccaatttttcggatctaagagatatctttatcaggataacgagcgagtggctcatatccatgtagtgaatgacatttattattttcatgggcatatcgtgccaggttggcaaggtgtgaaaaagacatttgatacagctgaagagctcgaaacatatataaagcaacatggtttggaatacgaggaacagaagcaactaactttattttag

SEQ ID NO: 410764 - DNA, 249 bp, Staphylococcus aureus
atgaataaccgtgaacaaatagaacaatcagtgatcagtgctagtgcgtataacggcaatgacacagagggattgataaaagagattgaggacgtgtataagaaagcacaagcgtttgatgaaatacttgagggtttacctaatgctatgcaagatgcactcaaagaagatattggtcttgatgaagcagtagggattatgacggggcaagtggtctataaatatgaggaggagcaggaaagtgactaa

SEQ ID NO: 410765 - DNA, 510 bp, Staphylococcus aureus
gtgactaacacattacaagtaaaactattatcagaaaatgctagaatgcccgaacgaaatcataagacggatgcaggttatgacatattctcagctgaaactgtcgtacttgagccacaagaaaaggcagtgatcaaaacagatgtagctgtaagcataccagagggctatgtcggactattaactagccgtagtggtgtaagtagtaaaacgcatttagtgattgaaacaggcaagatagacgcgggatatcacggcaatttagggattaatatcaagaatgacgctattgcatcgaatggttatatcacaccaggtgtttttgatattaaaggagaaatcgatttgagtgacgccataagacaatatggaacttatcaaatcaacgaaggcgacaaactagctcaattggttatcgtgcctatatggacacctgaactaaagcaagtggaggaattcgagtgtgtttcagaacgtggagcaaaaggcttcggaagtagcggagtataa

SEQ ID NO: 410766 - DNA, 2070 bp, Staphylococcus aureus; identical to SEQ ID NO: 408490

SEQ ID NO: 410767 - DNA, 345 bp, Staphylococcus aureus
atgaagccaaattcgaaatccaataagaaaatcatgaagaattataattgggaatactttaaagcccaaattaatcaaaagctttctgaaccagaaacgaaaaaaatctatagtcaaagaaaaattgatgtagagcctgtttttggatttatgaaggctattttgggtttcactcgaatgtcagttcgaggaataaataaagttaaacgagagctaggttttgtattaatggcacttaatataaggaaaatagtagctcgacgagctgtatattatcaaatacatttaaaaaaagctgatttctatcaaataattaatagaaatcagcttttttacattgcctaa

SEQ ID NO: 410768 - DNA, 390 bp, Staphylococcus aureus
atgaataatgttatactaaatacctttgattttaaagataaaaatattatttttgacggtaaacttgagaaaattgagtataaagggagaaagtgtttcttttattacgcaaaactaatctatacacctgaggtgtgcccaaactgcaattgtaaaaatattaatggtaatttaatcaaaaatgggtctaagacttctagaatcactatgcctaaaatctccgaatatccaacttatatcatgttgcgtaagcaacgttttaaatgtaaaacgtgcgaacgatactttacagctgaaacacctgaagttgataaatactgttttatatcaaaaaaacacgatcagctgtacttaataaagcagcagaaattcgttctgaaaaatctatag

SEQ ID NO: 410769 - DNA, 912 bp, Staphylococcus aureus
gtgtcagctactacagtttctcgtatcattgatgaggccgctcaatcgcttcatcaatcgccgtattctgcccttcctgaacatatcatgatggatgaatttaaaagtgttaaaaatgtttctgggaaaatgagttttatatacgctgatgcacaaacgcatcatattattgatattgttgaagatcgtagattaagtgagttgaaaaagtatttttatcgtttttcacttaaagctagaaaacgtgtgaaaacagtttcgattgatatgcatgaaggttatatgacattgattaaagagatgtttccgaacgctaaaatagtcatcgatcgattccatattgttcaattattaaatcgtgctttaaatggtattcgagtcactgttatgaatgaattaagaacgacgaatcaacctttatataataagtttaaaagatatgcgaaattactattaaaacctgaagaagatttagaggcatttgaatatcgtaaagtagctttatttaaagaatggaagacacaaaagggtatcgcaaagtatttattaaatcaagatgactcgttaaatgacgcctaccaatatatcaatcagctacgattcaaacttaaacataatgattatgaaggctttatttacgaattaaaacatatgcgattatcccaaacgcattcagttgtccaacgagcaattgagacacttaacaaacatgtatactttataaaaaatacatttgattattacaatttgtcaaatggtcctttagaaggtataaataacaaaataaaattaattaaacgtacatcttttggttatggaaattacaatcatttgcgcaatcgaatattattatgttcaaaactttacgctccaaaaagtaaaaaggaagttaagcaatgtttagttgcctaa

SEQ ID NO: 410770 - DNA, 2106 bp, Staphylococcus aureus
atgaaattgattgagcaaaatgagcatagcgaatgtggtattgcatgtattactatgattctttcatattataaatccaacattaccctcgctgatattagagataaatttggtgttccaaaaggtggacattcattagctaatatgaaagaaatcctaaactattatgggttaaattctaaaggctttcgagtagatgatgtagatgacttaaatcaattacaaagtccagtaatatgtcattggaacaattcacattttattcttctaaaaaaagtaaaaagaaataattattacatttttgatccagatttaggcaagagaaagttgaatagagaagaatttttagaaggtttctcaaattcaattctaattattgagggaaaaaattcaaaatttgatactcggaaaactagaagtagcctttcaaagaagtatatttttaacaaccaaattcatcttatatttagtatatttatatttagctttattatgcaaataataggtttattagtgcctttagctacacagtatttaattgataattcagaagctattaattacataggtatttataaaatcatactaataattttattaacttctgtgttatattatttaatctatgtttctagagaatatttaactttaaattttcaagttaatactgaaaaaaatattatttcgaaatttatgatgaaaatatttgatttacctttatctttttttataaataggtctactggtgatttgatatatagatctaacctttcaactcaaatacaaaatttattgaatcgccaacttataacaactatattagatatgttattcctgacattatatacagtattactaattaaatactctttaaaattattttttatcagtttggttttattgtcattaataatcataatttctatatggcattccaaaaaattcagagattatacaaacaccgagatgtcaattcaaagtaaccatcaaagacaactaatagaaatttttgaatctattgaaactattaaatctcttgatttagaaagaaagtttcaagaaaaatggtatggaattttccttgaaaaaattaacatctataaaaaaagagggaaatttagtcttcttttattaggtattaataatactgtaatatatataatgcctattataattttaatatttggcttattagagatttcaaaccaagaaatgtctttggggcaattgatagctttcactactattcttggttactttattagaccaatacaagtcttattgaacgcatatactcaaattcttcttttgatttcttattttaataaaatacatgaaatcatatcgttagagactaacaataaaaaaattgaattatgcacttttccggaatttcaacgtctcactgtaaaaaaacttgagtttaaatatagttattttgatgaaccagtgttaagagatattaacttggacataaaaaaaggggataaagttgcaatagttggtaaaagcggtgcaggaaaaagcactttactaaagatactttcaggagttttggaaaagaattcaggagaaatattactcaacaatcgtaacattaattctactgaattaaacaaaattgcagcttatataaatcaatctccatatatttttaaagataatttatacaataatatctttctcaatggaggtttaaagccagaagaaataatcgatgtacttcatcaatctgctttatacaatatgatatctaaatatcctttaggtttacaaacaatagtttcagagaatggatctaatttttctggcggtcaaaaacaacaaatatcttttgcaagagcactctccactagaaaaaaagtttttatactagatgaaccaacgagttccctcgataataccaccgaaaatattataatgaaaactttaaaaaatgcggatatgacttgcataatatctgcccatagattaagtactataaaacaatttgatgccatattagttttagacggtggatatattgtagaacaaggaactcataactctttgatgaaactacgaggatactactataaattatacacatcaagagaaatggggtaa

SEQ ID NO: 410771 - DNA, 213 bp, Staphylococcus aureus
atgtcaaacgaacttaataatttagttggtctctcgtttacagaattaaaccaagaagaaatggactttatttctggtgccgaaggaacagtggaaccacaagccactccaacaattgcatcaccatttacgccatatgcaatagaaatttcaattggcgctacagtatctgcagtatcaggtttagtaagctatacaaaagattgtttataa

SEQ ID NO: 410772 - DNA, 216 bp, Staphylococcus aureus
atgcaaatgaaaaatgaaaacattataggaaaatcattcgtagaactagatcaagcggaaatggatttcatttctggtgcagagggtactgtagagccacaagctacaccaacaatttcttcagttgcatgtattagagttagcgtaggagtatccgcagctggggcatcttttgttacttcttttgtagcttcagcaacatcaaattgtgattaa

SEQ ID NO: 410773 - DNA, 3081 bp, Staphylococcus aureus
atgttactgaataatcaagaatttgtagaagctttgactataaaggaacgaattgaattatttaaagaaatggaagaggattattttaattacgatcaagaaatcattgatagtatttttatggaatggataaatagaaaaagttcattaaaaatggaagattttgatgaaataataactaatcaaggatatgattacaggtattataaatatgtaatatcacaaaaatataattacttactggctacatcattgaataataaaatatggtataagaatattaatactattatagacagtcactatagtagtcatgctgcttccgaagaaattggttattatttaatatataacccatttctggaaaaagctaaggatgaattatatgaatacttacaaaaatcaaatgaaaaactagaaatttttaatagtaaaacattactaaaggagttttacgaacatatagctcagttaatgtttaacatttcaaataaagctattataactgaattacacgagcaaaagagtcaaggatttttaaaaggaagaaatgaaaaggaagaacttaaatactttcttacaaacatatctcaaaaggacaatataataaagttttttaacaaatatccagttttatgtaggaaattataccaagtatacaagacacaagtagattatatgattgccttgctacaaaatataattaatgattggtcagatattatagaagtattcggcttgaaaaatgaaaaattaatgagtattcattttggtcaaggagatacccatcaagatggaaaaactgtcgctattttacattttggagatagcaataagatagtttataagccgaaaaatttacatatcgcaaaactttacaatactctagttaactttttaaataaagaaaatcaattcttagatttgaaatatgcgaatatattaatgaaggaaaattactcttatgaggaatttatcactaacagcgatgctaagtcattaaaagaggttaataactactattataggtatggacaaataatgggtatttgttatcttttaaatgcttcagatatacattttgagaatataatatcttctagagatatgcctcatgttattgatttagaaactttgttttttaacgttataccccgggtaggtatgtctgacgatgtacaattaaaggctcaagagattatattaaataatatcgataatactcttttaattccaatagagttacagttagattcgagaggctctaaagttgattttagtggtttatcctatgaaacacaagaaattagtaaaaaaagatatgtgttaaataatatagataactctaacgtaaaatatgtggaatcaaatattgtgattccacagtcaaaaaatgtagttagacatcaaaatgaaattattgattacaaagatttcatagagaatattatcgaaggatttaagtgtacatgtgctatagtaatgaaaaagaaagattgtattattaaaattattgatgattacaaaaatcaaataataagagtaattccacgtagtactgataaatatgtacagtttttacaatacacttatcacccttctgcattgaagagttatcttaatttagaaagtattttagagaacctttatgccttaccattcaaagaaagaaaaattattaaaagtgagtattacgatttattaaatggtgatgttccggtgttcttctctaggatagattcgaaagatataatagattcaaaaggacgttttattaataacgtttattttagaagtaactattccttagtacatgacaagataaatagtttagacaactctatatgtgctaatcaaatagcaatagtgcaatcaagtattaatactttaccagacaatgatattgatggtttctttattaaggatgaaaaagtaaatgataaagagatactagaaattatagaagtcactcttgagtcaattctaggtaaaggaattatttacaaagatcttataacatggattgacatgttacaagatggtagtggaaataagaagcctaaaatattaaatactaacttatatgatggtatcagtggaatttctctggtgctagtatacattaaaaaaatatatcctgagaaattcgatagatatatggagcttacattaaacaattcgattaatcgccctaatgttgattactcagctatatctgcatataatggttttgcatcaaatatatatccgatactaaaacatatggacggctcttttagagggaaaagatataaaagagttctaacacaatttataaactctttagagagctttgaggaaaaagatataaataattatgattggctttcaggtataggaagtttaccttctctcatcaatcatatttataatatgttacctgacggccatttattaaatatactaaataagtttgcagatatattgattagacaaaaaacagaagtgttcgccattgataacctaggacttgcacatggcttatctggttatttactttcgttaaaaaatgtgaatttaaacatcgaaagagaagatgttcaaaatctcattttagaaattgaagaaaagctaattaaaagttacgacagtaacttatccggttggaaatttaaaagaaataaagaaatgatttgtactaattattggtgtacaggatctattggaatcgcactatcattatcacacttagtttctaaaaagaatgaagaaaagattaatgaaatccaaaaggacttggaggagtactatatagacactaataaactattgcgatcagacacattgtgtcatggtaatttaggagttatagattatttaatttatcgttataatattactggtaatgaaattttacttgaaaaagcaaaaaaaatattttctaatattataagaaagcaaaaaaaatatggccattattctctcaattcatatggggaatatccatctacgtctttatttaccggaaaattaggtttgtgctatataggtttacgtttacttaaccctaaaactatagactctgtatctatcttagaatag

SEQ ID NO: 410774 - DNA, 699 bp, Staphylococcus aureus
atgaaaaaagtaatatgtattgttgggtcaagaaatccttcgtcaaaaggacttgcattttgtaaggcacttcttattcgtcttaaagatttttatcatgaaatagactataagatattaacaccaaatgattattttttggaacctatagatggaactaatgaaacattctacaaaggaatagacaaaaaagataacattgatgatggttccatgattaaacataatttagaggatgctgacttcgttattttttgtactcctgtatattcacataatgtttctggagatataaaaatattaattgatagattgtcttactggggacatatatttaaattgcttggaaaatctggattaactgttacagtagctgatagtaatggatttatacaagtagatgaatatatcgataaaatccttacaggatttggtgttgatgtaattgagaacgttatattaactagaaaagatgatgttcagaagtttgattttctatcacttataggagatatagtggaaacttttcaaccagaatataaaataaaagttcccgcttttacagaggcccaatttaaatcatataagaatagtattcggaaacagccacacgaaaattttgagtatagatattgggatgaaaacaaattattttatatggaaaccctacaggaatatgtagataagtatataaactag

SEQ ID NO: 410775 - DNA, 1362 bp, Staphylococcus aureus
atgaaaaaaattgtatattctttaataatcttgttgtttctatctattattagtatgtcgacgctgtcaaaagttcaagcatcagaagatgaattaatgatttatattctaactaagaagaatattcaagaaaaagaatttaaaaaggagatagaaggttatacaaatacaaatgttatatatgaagtgccggaaataggcctataccaagtgagagggtctcagagagagctagaaagtataattgaacacagtaaaatcattaaaaatcatacattaaatacaaagaaaaatccagataaaactcaaatagattatcaaactgataccaatcaaaatagcattatttcagaaaaaaaagatttacaatgggatattagtagattaacttcaaatggaaaaagttttataactaaatctaatattcataataccacagtagctattattgactcaggagtaggcaatcatccagatttgaaaaatgcagtaaatataaggaaaaatctagttcctaaaggcggaaataatggcaaagaaaagctagagactggagatatttcatttcataccgattttttaggtcatggaactatgctagcaggtcaaatggcggccgatgggttatctaaaggactctatcccggattaaagataaactcttacagagtattcggatcggaaagtgctgaatcaatatgggtaattaaagggattatagaggcggcaaaagatgattcagatgttattaaccttagtttaatagaatatgtttcaagaggagatactataaacaaagatggcaaaatagattatacaaataaaattaaatatgaggcttatgaaagagcggttaattatgcaaaatcgagaggttcatttttagttacagctataggaaatcaatctttaaatcttaaagataaagaacaaatttataactattggaagaagaaaaatcctagtctagttaccaatagtcaaatatatgcagtacctgcttcatttcaaaatgttataagtgttggttcaattaatcatcaaaatacaatatctaatttttctaaccacaattctgctgatatatatacttatgggggagataatagattagttgaggacataggtactgaaaaatatttttcaaatagaatgtttgaaaaagaatggattctggctctatcaccacaaggaggatatacgtatacatttggaacatcgttatcggcagctaaagtctcagccatagcggcagcaactatagacaagaataattataaaaataggcctgatttaacccaaagagacctttacaatatgacgagcgggaataaagaaagattattattaaaactacaataa

SEQ ID NO: 410776 - DNA, 204 bp, Staphylococcus aureus
ttgatagtaaaattaaaggagttgagagaaaagtttaatattacacaaactgaactgtctataaaaactaatatatctaggcaaactataaacacgttagagaatggctcatatataccgtcgcttaaaaccgcaaaaaaattatcattattctttaacactagtatagaaagcatctttatatttgaggaggaagatttatga

SEQ ID NO: 410777 - DNA, 741 bp, Staphylococcus aureus
atgattaataaaattaaaatattattttcgtttttagcattattactttcattcacatcatatgcgaaagcagaagatttacacgataaaagtgagttaacagatttagctttagctaatgcatatggtcaatataatcacccattcattaaagaaaatattaagagtgatgaaataagtggagaaaaagatttaatatttagaaatcaaggtgatagtggcaatgatttgagagtaaagtttgcaactgctgatttagctcagaagtttaaaaataaaagtgtagatatatatggggcatctttttattataagtgtgaaaaaataagtgaaaatatttctgaatgtctatatggaggtacaacactaaatagtgaaaaattggcacaggaaagggtgattggtgctaatgtttgggtagatggcattcaaaaagaaacagaattaatacgaacaaataagaaaaatgtgacattgcaagaattagatataaagatcagaaagatattgtccgataaatataaaatttattataaagacagcgaaataagtaaaggtctaattgaatttgatatgaaaactcctagagattactcattcgacatttatgatttaaaaggagaaaatgactatgagatagataaaatttatgaagacaataaaactttaaaatctgatgatataagtcatattgatgtaaatctatatacgaaaaaaagtataatcaatgaaaatttctag

SEQ ID NO: 410778 - DNA, 492 bp, Staphylococcus aureus
atgattgcaatggccatttcatgttctcccaaattattaattgctgatgaacctacaactgctttggatgtcacgattcaagcgcaaatattagacttattaaaagaattgcaaaaggaaacgcaaatggcaattatgatgattacacatgatttgagtgtggttgctgaattttgcgataaagttttggttatgtatgcaggtcaaattgtagaatttggaggcataaaagaaatactacacaatccgaaacatccttatacccaaaaattattatctacaattccaaaacttaaagaagagcagaaacgacttgaaacaatagaaggaattgtgccatcaatccaagcatttcacgttaataagtgcagatttgcaaatagatgtaacaaaaaactggatatttgtaataatcaatctcctaaaatgcatgtttgtgaagacgtcattgtacggtgtcatttataccaaaatgaatataaggagatataa

SEQ ID NO: 410779 - DNA, 546 bp, Staphylococcus aureus
gtgaatgttttagtaagaatatttctaaaaaatttttcaatagtttcacctttttttaataaagaagaaagagcttcagcaaaaaaaggttttgatattatacttagagatagtgaaacttgtaatatgtggataatagaatcaaaagcgggtacagtaagtaaaagaagtgacataaacaagaaaattaaagaacgcctaagagttgctaaaaatgatttgagtagaagactatgtgaatcagataatactcaactttggaataacgcaattaatgatgttgaaatttgtatgaatgacagcaacgaaaaagacgcattcttagaaattcttcatgatagctatgaaaatggtaccacttctgataaaaatattattctagctgggacggtttttcataaaattgatgaaaaatttaattctgatgaaatattaaaatattatattaattgtaaaaacgaagatatttttaatgatattcaaataatagctattcaaaaaagcactttcaaaaaaataattaaatatttagaaagtttggaatga

SEQ ID NO: 410780 - DNA, 525 bp, Staphylococcus aureus
atgaaaaaaactttaactttaaatagtttaaaaagaaatgaagaatttttaaaattttatgaaaaatttttgtttgaagagttggacttgggagaacaaaaaaagatattatctcttatcgttttatttctaaatgccaaagaagaaaacgttaataaattttcatatagaatgttgcttatttattcaataaaaactaagaattttaatcccttgtatgaaataagtgtaaacaaagggttatatccaataactaaaaaaatttttgatattaagaacggttacgagaatatttatacagaaataaatgacatagaaataaaaaaccactttgagattgataatattatacgtactcaccaacaaaaacagttgtttgatgaaatttccgaaaagcattcctatccacatattgaaagctatattaattctcatataattgtagcacctacttcgtatgggaaaacagaattaatgataaaaattatttcaaacctaaaaaaaatgagaacatatgtatattaa

SEQ ID NO: 410781 - DNA, 372 bp, Staphylococcus aureus
atgtataatggtaaaaataataatattatagcagttttaacacaagaaagatatttaagattattgcaaaaacatagtaaacttaaatttgatcatttaataatagatgaagctcataatatattagatacggagaattcttatgattctaggagtattttattggcagctttaattgtcttgagtaaagaaattaatgctaatacttttctttattttttaacaccaattataaattgtcccgacaatctattgccaaaatatattaatatatcaccaaaaaatcatgttatagatgaaattgttaaatcagaaatgtattacttttatgacttaaataaaaaagtagttatatttacgaacaatatttga

SEQ ID NO: 410782 - DNA, 303 bp, Staphylococcus aureus
atgttaaacttagaagaacaatattctcctttaataatgtgtattttgggcaataaatacgctaaatcaccactactgttgttaaatatttcattaaatctacaaactcgacctactaaatttttaaaattactagcattaaggtttttcctaccttttctcggctctaaaataaataaacttgtggcaggtagattaacaccttctagtaacgttgaagtagtaactatatatttaattgctggttcttcgttatataagtactctatatattttctaacattttctggtacagatccatga

SEQ ID NO: 410783 - DNA, 408 bp, Staphylococcus aureus
atgagcaagccgaaatggaacagtgctaaaaaaagaaaaatcaaaaacgaattaacgcaaggaatttataagtgtgttatgtgttcgaatattttcgatagtgtagattgtttgcaaatagagcataaaataccaatttcaaaaggtggtacaaatgaaatgtcaaatttaactgtactttgccaaaagtgtaattgtagcagaaagaatagagttggaaatgaacatttaaaaaatattcttaaaaacatcgaaaaagagatggataaaataaacattgatttactcgcttacgaaaaagaaattggaactctcgataatagagatatttcagaaataattaatgaactagaaagtatatatacagatttccataatacgttggttggagaagttttaaatgtctaa

SEQ ID NO: 410784 - DNA, 765 bp, Staphylococcus aureus
atggttaaatcgatatttttacaagatggagaagaaatttttgttgatgatgaagattatgagagggttaatcaatatatttggacaaaatcttatgtagataacgttagaagaattcacacaaagacactcaacgttagcttaagtggatttgtattagaaaatggttttcaaaaaataaaaaataatgattttaccaaaaacaacatcacttcaattggttatcaacaacgatgggcaaggcctacaagaaatacttcgagtatctataaaggtgtttatttaaatcgaaaaacaaaaaaatggtctgctgtaataaaaattgatagcaaatctaaatatttaggtagttttgttgatgaatgggaggcagctaaagcatacaacagcgcagtagataaatattgggacggacaaggttataagaatcataaaaatcaaaatgactctatatttgaatatgaatacaaaacttacaaagaccaaaaacgtcgtagaagaggaaaaagtaagttcaaaggagtctatttaactcaaagtggttatgtagcgcaaataacttataaaagaaagacatatcatattggatggtcaaaaaatatttatgagactgctctcatgtttaataaaattaatttttatttacatggttcagacgtaatccttaatgacgtacctatgacagatgaacttaaagaattcataaataactgggaagtaccggacaaaataaaagcactgaaagaaggtgctgagaatgactga

SEQ ID NO: 410785 - DNA, 189 bp, Staphylococcus aureus
gtgatagcgaatattgaaatgttgtatcagttagctacgggaatcaatgaaccagcacgagagttagttgagggattaaaattagtaactgagtttgtacaagatgagaatgcgacacaagaggattacaaggcgttagaacgtaaattgaatgatctaaaagcgtcttactatagcttgagtaaataa

SEQ ID NO: 410786 - DNA, 189 bp, Staphylococcus aureus
gtgatagcgaatattgaaatgttgtatcagttagctacaggaatcaatgaaccagcaccagagttagttgaggggttgagattagtaactgagtttgtacaagatgagaatgcgacacaagaggattacaaggctttagagcataagttaactgagttgaagtcatcttattacagtttgaataagtaa

SEQ ID NO: 410787 - DNA, 870 bp, Staphylococcus aureus
atgaatgaaattaaattagaatatgacacacatgtttcagtggtacattatgaaagtttagactcacgttcatttaatagcttttcaaaaattaattggagtaagttggttaataaactgtctgtacctatagaagcaaattataagtatgcacgtggtgttgctgtttacggtgatattaaaaacggtgcaaatgatcaaggtgaaattatcaaaaagcatcgaaacgataaaaatgtcatatacagagatgtgattgtacttgattatgatgaaataaatgatttaaagcaattacatgaagcaatcagctcagctttaagcaatgttgcatggttttggcacacaagttactcgcacagaactgaacaagctagaatacgcctgtatatccctctaaatgagcgaataagtgcagatgattatcgtaaatatacaaaagtattagcaaataaaattggccataaagtggatgaaggttcatatcagccaagtagatgttttgcgttaccagttattcaaaaaggacacatatttattaagcgagtgaatgactgtccaattatgaatgttgatatgctcgaacagtggtcgaaggagtttgaacaatcaaatgctagtcctaatgtcataggatacactcgacgcgatagtgagtactggcgcgagctatgctttggaacaaccgaaggcaatcgtaacaatgcactagctagcttaattgggcatttattaagatgtcacgttaatgattatattgtttattcatttgctttactatgggggcaattcgcatgtaaaccacctatgaaagaacaagaaatcaacgccacttttcaatcgatattaaataaacactataacaattag

SEQ ID NO: 410788 - DNA, 870 bp, Staphylococcus aureus; identical to SEQ ID NO: 409145

SEQ ID NO: 410789 - DNA, 183 bp, Staphylococcus aureus; identical to SEQ ID NO: 408524

SEQ ID NO: 410790 - DNA, 183 bp, Staphylococcus aureus; identical to SEQ ID NO: 408521

SEQ ID NO: 410791 - DNA, 426 bp, Staphylococcus aureus
atggaagtacattacagtagtaaaacaaacgagtggacaacaccacaacatttatttgatgacctaaacgaagaattcagttttacattagatccttgttcaacagacgagaacgccaaatgccggaagtattatacagtaaaagataatgggttaattcaagactggtctgaggacattgtttttatgaacccgccatacggtcgaagtattaagcgttgggtcaagaaggcttatgaagaaagtttgaaaggcgcaacggtagtttgtttaatacccgcaagaacagacacgacatattggcatgattacatttttaataaggctgatgatataagattcctacgcggtcgtctgaagtttggagatagtaaaaacagcgctccttttcctagcgcaattatcgtttatagaggtgcacaatga

SEQ ID NO: 410792 - DNA, 180 bp, Staphylococcus aureus
atgcgttcaaatggacgatataagccttacaacgtcattgaacgcttacaagttgatttgtatcaagcaagtattaaacaacgttcagaacgtcaaaaacaaagaaatacagcaattgaaaacagtaagattgcacgagtaaatgcatatcaccaatcttcatatgtaaaagtggtgtaa

SEQ ID NO: 410793 - DNA, 432 bp, Staphylococcus aureus
atgattattgaatttgtagagtgggttaacacacttgagttttttaaaaattggaagaaacaaccaggtaagccattagatacacaattagatgagattgctgattacttagctttcagtttgcaattaactctgactattgttaatgaagaagatttggaagaaaccactgaggttatggttgatttgtttgaaaatgaagttactttacctaaactacattcagtttattttgttcatgtaatgcatacactaacagaacaatttgtaaaaggtattgataatagtattgtacaagttttaataatgccttttttgtacgccaatacttactattctatcgaccagctcattgacgcatacaaaaagaaaatgaaaaggaatcatgaaagacaagatggaacagcagacgcaggaaaaggatacgtgtaa

SEQ ID NO: 410794 - DNA, 237 bp, Staphylococcus aureus; identical to SEQ ID NO: 409168

SEQ ID NO: 410795 - DNA, 174 bp, Staphylococcus aureus; identical to SEQ ID NO: 408152

SEQ ID NO: 410796 - DNA, 171 bp, Staphylococcus aureus
atgaaaaaatttaatgttcaaatcacatacactggcatgattgaagaggctatcgaggctgaaagtttagaagaagcagaatttgaggctcatgatattgcgagaatggaagtgccatttgattgtgatgaatttgaaattaatgtagaggtggaacaggaaaatgaataa

SEQ ID NO: 410797 - DNA, 423 bp, Staphylococcus aureus
atgttaacaatgttacccatcgccataaaggaaaaagcattacgcgagtactacagagtcttaaagcctgggggtatcttgttaacacatgatattgtcatcgttaatgaatcacatgccacacatgtagttaaatcattatctgcagcaattaatgtcaatgtctcaccgcagacgaaacttggctggttaaatttatataatcaagctggttttaatcatgtgcattatcatactggtccaatgagtttaatgacaccaaaaggtttaatttatgacgaaggtattgttggaactataaagattatcaacaatgctttaaaaaaagaaaatcgaccaatgttttgtaaaatgtttaaaacgatgactagactgcgtaaagatatgaattatattacttttgtcgctaaaaaagagcactaa

SEQ ID NO: 410798 - DNA, 2001 bp, Staphylococcus aureus
atgaagttaagattgttatggcacatagtgcgacgtcaatttattacgcagcgacttgtaatcattccattcattttagcggtaagtgtactattcatgattgaatatacgcttgtgtcaattgggttaaatagctacataaaacagaagaatgacttcctagtaccatttattatcatagctaatttttttatggcgcttttaacttttatttttattttctatgcaaatcactttatgatgtcacaaagacgaaaagagtttagcatttttatgacattgggcatgaccaagaaaagtatgcgtttaattgtagtaatggaaactatcttacaatttataataatttcagtcgttagtattgccggcggatacttacttggtgcgatatttttcttgtttatacagaaaataatgggcagtgaagttgcgacgttaaggtattatccatttgactttgtagcgatgtttattactttgattatcattgctgtattaatgggcatgctacttatattcaacttgttcagtattaattttcaacggccgataacttatcaacatcgttccgattctagtgtcatatcacgatggttgcgttacgttttaattgttataggaagcgcagcactatatttaggctactttattgcattacaacaagatacgacgtttggtgccttttttaaaatatggattgtcataggattagttattatcggtacttatgcattttttgtaggtataagtgaaataattattagtatattgcagcaggtatcaaaagtttactatcatccacggtatttttttgtggtagttgggatgcgtgtacgtcttaaaatgaatgcagtcagtcttgcaacaatcactttgctgtgtacatttttgattgtaacgctcacaatgacattaacaacctatcgtgatatgaatcataccattacgaaattgattacgaatgattatgatttgtcatttagcgacaattctaagtcacaaatagaacgtcaacaaacaattgagaatattaaacgtgatatacagggttcggttaatgcaaaagacttcaaagtatatgaaacgacattatttagagcttctttagaaaagaatcgtgcttattacaagttaaaacaggctagtgatgatattccaatagacttcattggtaatgaaggcgcgatattttcaagacaatcagtaatgattacagcttttactgcacaagattataatcgatatcaccaaaacaaattacacttagacaatcaaagtataggtatgattacgaatgtacctatttttaaaaagcagtctaaggtcggtcttaataatgaagtctttaaagtgaaacaacttgacgcacatgcgttaaatttgatgatgattcaagatagtatggttttaattgttaaagataacaatcaattacaaaaagtaaaaggattttatgcacatgaacaaaagaattcgacaatatcgataaactttaatgtatttggaaagacgaaattaacaacatcacaaatacaaaagctatcgaaaaaatacgatgcgtcaataaattctaaatcagaaatgctaatggtttgggatcgtttgacaggtggactaatatttgtaggtggcgtagtatcaattgtacttgtcattggaatatttctaatgatgtactataaacaagtttcagaagcctatgcaaatcagcacaattatgacattatgaaaaaacttggtttagataatggaagaatagcaaagataacacgaaatcaaatgactttcttgttcgcaataccaataacagtagcactgattcacacattaatttctagtaacattgtatatacgttactaaatatgataggtattaataaccatcatatatttttaacaagttacgtactagctgtcattataatttcgtttctatatatggcgatgtacaaaataacttcctatatttatgctaaagttattcatcaacaacgcaattaa

SEQ ID NO: 410799 - DNA, 630 bp, Staphylococcus aureus
gtgtcactgatactattaactgtaggtgctatttatgtacttgaagccgttcgtaaaattccgattcaatatgctaagaaacaaactgctcaaagattaggttcacaggcaacttatctacctttaaaagtgaactcagccggtgttattcctgtaatctttgcaatggcgttcttcttactgcctagaacattaacgttgttctatccagataaagaatgggcacaaaacattgcgaatgctgcaaatccttcaagtaatgttggtatggttgtatatattgtactaattatactattcacatacttctatgcatttgtacaagttaatccggaaaaaatggctgataaccttaagaaacaaggtagctatgttccaggtattagacctggtgaacaaaccaaaaaatatattactaaagttttatatcgtttaacttttgtaggttctatcttcttagccgttatttcaattctaccgatattagcaactaagtttatgggattaccacaatcaattcagattggtggtacaagtttacttatcgttattggtgtagcgattgaaacaatgaaatctttagaagctcaagtatctcaaaaagaatataaaggctttggtggtagataa

SEQ ID NO: 410800 - DNA, 138 bp, Staphylococcus aureus
atgactcaatttctaggggcgcttcttcttacaggagttttaggttacataccatataaatatctaacaatgataggtttagttagtgaaaaaaaacaagattatcaatactcctgtattattgattttttctattga

SEQ ID NO: 410801 - DNA, 777 bp, Staphylococcus aureus
atgcaagcattacaaatagtagaacagaacgaaacacattatgtagacagtagagaagttgcggaaatgataggaaagcgacacgacaatttagtaagagacattaaaggttatatcaaggttttagaggactcctcaaaattgagtagtcataatttctttgaagaaagcacctatgttaattcacaaaacaaagtacaaccttgttacctactaaccaaaaaaggttgcgacatagtagcaaacaagatgacaggtagtaaaggcattttgtttactgcaacttatgttgatgcatttcataaaatggatgaatacattaaacaacaagcacagcttaatgtaccacaaacaccaatgcaagcattagagatgatgttcaaagcacaaaaagaccaagaacagtttaacaaacaaatgcaacaagaaatcacaggcattcgtcacattgtcggtattgaaacgaaaaactggcgtaacgacacaaacaaaatgttatctgcgattgcacaacatttaggtggcggagcaatgcaccagaaagttaagtctgaagcatataaagctttagaagaaaaaggacgctgtaatttaaaaattcgtatgcagaaccgcaaaggcaaaatgctagcgaatggtgcaacgaaaacccagattaacaagttgtcaaaattagatgtgattactgatgaacctagattggttgagatatacatttcagtgattaagagtatggcgattaaatacggtgtagatattagccaatttgaaatttaa

SEQ ID NO: 410802 - DNA, 171 bp, Staphylococcus aureus
atgaagaaatttaatgttcaaatcacatataccggcatgattgaagagactatcgaggctgaaagtttagaagaagcagaatttgaggcggatgttactgcgagattggaagcaccatttgattgtgatgagtatgaaattaatgtagaggaggcacaggaaaatgactaa

SEQ ID NO: 410803 - DNA, 156 bp, Staphylococcus aureus
gtggtggttaaagaaattttgagactattattcttactagcgatgtatgagttaggtaagtatgtaactgagcaagtatatattatgatgacggctaatgatgatgtagaggcgccaagtgactttgaaaaaatcagagctgaagtttcatggtaa

SEQ ID NO: 410804 - DNA, 558 bp, Staphylococcus aureus
gtggggaacacaacgtatttaaaaataaatagtgaaaacgatgttgatttacaagacatcttgaatgattttattaattgcttttgcaaaggttatgtggaaattaaaacgaaatataaattgcttcccatctttaaaataaattttcataaaaataatttaccccacttattaggtttgcattacacacataaaaaagtgagcgctaaaaagatcattggaagaatagctgaagggaaaattacacacgaatctataaaaaaacattatgaatatagtaacattaaagataggcttatcaattataattttttgcataaatgctttattgataaagaaatcaggctatgcgttatagttccaaaaaattcaattaatccacaaaagattgatgtagcttttatagatgacaagaacagccaagttatgatactcgggttaaggaagtctaacaataatgatttttatagtccggcgactatgtacgttctgggtaaaaacagttcatatcgaagaatgagaagaacacatgttattagcatagaatggaaaaattaa

SEQ ID NO: 410805 - DNA, 723 bp, Staphylococcus aureus
ttgaaattagaatttaaaaaaagtatttccaataaaattatttacacgcttggtgtgctattcatattccttttcttacttgggtattttttaccaataggaatagacaaagttaaaagtttaagctatagccagtttttcttcagttcatatactgttgcaacgcaattagggttcttactattttcatttgttattgcatattttattaataaagagtattcgaataaaaatatcctgttttataaattgattggcgataatatctttaccttcttctataaaaaggtagcagtgttattttttgaatgtttagtgttcataattctaagtatcacaattatttcaattatatattcggatttctcacattacttactattaataatcttattttcactcgttatcttacaatatatcttagttgttggaacgattagtatggtttcacctaatattttaatcagcttaggtatcagcattgtatattggattggttcagtcatcttagttgccattaataaaaatatatttggtatcgttgctccatttgaggcgagcaatacgatgtatcgtgccgtagaaaaaatattgaataacgagtcaacatttatgtgtcctactgaaattataaatacagtatcattcttcgttcttctatttatagttaatactattgtcttattactaagtagaaagagatggttgaaaatcggtatgtag

SEQ ID NO: 410806 - DNA, 381 bp, Staphylococcus aureus
gtgctacaaaacgaattaggtcttgatatccctgttgcaggtttgcagaaaaatgataaacaccaaacatctgaattattatatggcgctagtgcagaaattgtaccactgaagaaaaatagccaggcattttatttgttgcaccgtatccaagatgaggttcacagattcgcaatcacatttcatagacaaacacgtcaaaagacaggcttgaaatcaatacttgatgatatagatggtatcggtaacaaacgtaaaacattattattgcgttcattcggttcaatcaagaaaatgaaggaagctacacttgaagattttaaaaatataggtattcctgaaaacgtcgcaaagaacctacatgaacaattgcataaataa

SEQ ID NO: 410807 - DNA, 2349 bp, Staphylococcus aureus
atgagacaaaaaacattagacgtcttagaattcgaaaaaataaaatcactcgttgccaatgaaactattagtgacttaggcttggaaaaggtcaatcaaatgatgccagctactaattttgaaacggttgtttttcaaatggaagaaacggatgagattgctcaaatctataataagcatcgtttaccaagcttgagtggcttatctaaagtatcagcattcattcatcgcgctgatattggcggcgttttaaatgtatcagagcttaacttgataaaaagattaattcaagtacaaaatcaattcaagacattttataatcaattggttgaagaagatgaaggtgttaaatacccaatattagatgacaagatgaatcaattacctgtgttaactgatctttttcaacaaataaatgaaacatgcgatacgtatgatttatatgataatgcgagttatgaattgcaagggattagaagtaaaatttctagcacgaatcaacgtattagacaaaatttggaccgtattgttaaaagccaagcaaatcagaaaaaattatcagatgctattgtaacagttaggaatgaaagaaacgttatacctgtcaaagctgaatatcgacaagattttaatgggattgtacatgatcaatctgcttcaggacaaacattgtatattgagccatcatcagttgttgaaatgaataatcaaattagtcgattacgtcatgacgaagcaattgaaaaagaacgcattttaacgcaactaactggttatgtggctgcggacaaagatgcactacttgtggcagaacaagtcatgggtcagttagattttttaatcgcaaaagcgagatatagtagaagtattaaaggaacaaagccgatatttaaagaggaccgtactgtatatttacctaaagcataccatccattattaaatcgtgagactgttgtagctaataccatcgaatttatggaagatattgaaacggtaattattacaggaccgaatacaggtggtaaaactgtaacattaaaaacattaggtttaattattgttatggctcaatcaggattgttgattcccacacttgatggtagtcagttaagtgtatttaaaaatgtatattgcgatatcggagatgaacaatcaatagaacaatcattatcaactttttcatctcatatgacgaatatagttgaaattttaaagcatgcagacaaacatagtttagttttatttgatgaattaggtgcaggtacagatccgagtgaaggtgctgcattagcaatgagcattttagatcatgttagaaaaattggttctctagtaatggcaacgacgcactatcctgaacttaaagcatatagttataatcgagaaggcgttatgaatgcgagtgtagaatttgatgtagatactttgagtccaacgtataagttattaatgggtgtgccgggtcgttcaaatgcttttgacatttctaaaaagttaggtcttagtttgaatattattaataaggctaagacgatgattggtactgatgaaaaagaaataaatgaaatgattgaatcattagagcgtaattacaaacgtgtagagacacagaggttagaactggaccgtcttgtaaaagaagcggagcaagtgcatgatgatttatctaagcagtatcaacaattccaaaattatgaaaagtctctaatagaggaagcgaaagaaaaagcaaatcagaagattaaggctgcaacaaaagaagctgacgatattattaaagacttaagacaattgcgtgaacaaaaaggtgcagatgttaaagaacatgaattgattgataagaagaaacgattagatgatcattatgaagcgaaatctataaagcaaaatgtacaaaagcaaaaatacgataaaattgttgctggtgatgaagtaaaagtattatcttacggtcaaaagggtgaagttttagaaattgtcaatgatgaagaagcaattgttcaaatgggaattattaaaatgaagttacctattgaagatttagagaaaaaacaaaaagaaaaagttaagccaacgaaaatggttacacgtcaaaatcgtcaaacaattaaaactgaacttgacttacgaggctatcgttatgaggatgctttaattgaactagatcaatatttagatcaagccgttttaagtaattacgaacaagtttatatcattcatggtaaaggtacaggtgcacttcaaaaaggtgtacaacaacatttgaaaaagcataaaagtgttagtgactttagaggtggtatgccaagcgaaggtggatttggcgttaccgttgcaacactaaaataa

SEQ ID NO: 410808 - DNA, 201 bp, Staphylococcus aureus
atgaataatggtacagtaaaatggtttaacgcagacaaaggttttggcttcatcgaaagagataacgacagtgacgttttcgttcattactctggaattgctggagaaggctataaatctttagaagaaggccaaaatgttgatttcgacatagttgaaggtcaacgtggggaacaagcaaccaacgttgtagcgatatag

SEQ ID NO: 410809 - DNA, 2409 bp, Staphylococcus aureus
ttgaaaaaatcaaagaaaagattagattttttaccaaacaaattgaacaaatattcaattagaaggttttcggtcggtacggcttctattttagttggagcaactttattgtttggaattaacaatgaggcacatgctgcagagcaaaatgaagcaccagtaaaagaagaagcaacaaatgacaattcagcaagtgaagtatcacaagaaacaccagtaaaagaagaagcaacaaatgacaattcagcaagtgaagcatcacaagaaacaccagtaaaagaagaagcaacaaatgacaattcagcaagtgaaacacctgattatgttggagttaattctgattctttagaaaactcaactttagaaaatggcgatgacgaatcatctaatgatcaagataaagatattgcttatacaacacctacagaagcaacagcaccacgttctattgaacctcgttctagagttgcattaaatgaagctcaagcacaaaagcagggtaaaaatgttaatgatttaattacagtaactaatcagtcaattactgaaggtggaagagaagatggtataatcagtgctcatgatggtgaaaacatcacttatactactgattttaaaattgataatgatgtaaaatctggagataccatgactgtaaaatacgatcctcgaactattccatctgatttaacagatgactatacaccagttgatattatggatccgtcgggagaagtgattgctacaggatcatttgataatagtaataaaacaaccacttatacttttacagattacgttgataagtatgaaaatgtaaatgcaaaattagttatgaattcttttattgataaaaaagaggtgccgaatgaagaaacagtagatttaacatttgcaactgctaatgagtcaataaataaaagttttaatgttagttaccaacgacctattgttgaacgtgcgtcgaatattcaatctatttttacaaatttagatttagacggtaacactgtagaacaaacagtttatgtgaatccacttagtttaaatgctcaaaacgctaaagttttaattagaggtgcaggcgtgtatgatgatggtggatttttcaatggtgaaggcagcactattatagacaatagcactgatattaaagtatataaggctaaaccaggacaaaaattgccgcaaaacaatagaatttatgattatagtcaatatgaagatgtaacaaatcaagtgaatattgataaaaattattctaataatcaagctatggttgattttggaaatataaattcaccttatatcatcaaggtgaaaagtaaatatacacctggagcagaggatagtttagcaatacaacaaggtgttagaatgacaacaactaatgatggtattttatcttatgctggttatacgaatagtattattagtactagtgaccaaggtggaggtaatggagaagaggcgcctgagaaaacatataaaataggtgactatgtatgggaagatgttgacaaagatggtgttcaaggtacagatgaaaaagaaaaaccaatcagtaatgtactagtaacattaacttatccagatggcacttcgaaatcagtgagaacagacgaaaatggacattatgagtttgataatttatatgatggtgaaacatatcaagtttcatttgaaacgcctgaaggctatgaaccaactaaagtcaatgctggaaataatagtgaattggattctaatggtagtaatgtttcagtaactattaatggctcagacgatatgacattagatagtggtttctacaaaacaccaaaatatagtataggtgattatgtatggttagatagcaataaagatggcgtccaagatgaagaagagaacggtatttcgggagtaacagtaacgttaaaagataaaaacggcaaaactttacaaactacacaaactgatggaaaaggtaagtatcgctttgataatttggacagtggagattataaagtagtatttgaaaaaccagaaggtttaacacaaacggctacaaattctactaacgaggatgaagatgctgatggtggagaagtagatgtaactattacagatcatgatgactttagcatagataacggttattttgaagacgatacagatgctgacgcagattcagatgctgacgcagattcagatgctgacgcagattcagacgcagatgcagattcagatgctgacgcagatgcagattcagatgctgacaaaggtcataatgacaaagtaaatagtaaagaattgcctgatactggtaatgaaaataatggtacattatttggttcattattcgctgcgcttggaggattattcttagttggcagacgtcgtaaaaacaaaaataatgaagaaaaataa

SEQ ID NO: 410810 - DNA, 1536 bp, Staphylococcus aureus
ttgggtaaacctaacatcaaagcacaagttaaattaataaaaaaaaccaactatcttaagcaagatatttcgaaattagcacttagatttaaaaagaaatccggggaatttcctgagtggattaaattagatattgtaacgtcaactgaaaaaatattatttaaagaattaaaaaaaacactgatcaatacaagaagaaattatgtagattttggtatagcgtttgatagtcaatggaattttgcagtattacctgaggaaattaacgcgaatgcttttgttcgaccagataatactactaaagagttatttctttcggaaaaaaacatcaataattatttacgcaaatatactacaaataaaaaggcattttctagtgaattctataatgaaaaagaagttattaaattctatacacaaggtttctttataggtgatgaagaagtacatgaactatatagcgaaggctataaaaaaggtttaagaaaagtaaatgatttaaataatgaaattgatcaattaattgaaagtagtactaatttcttacaaaatatgttgttagataatggtaaatatatttatgggtattttcctcattttgataatgaaattggattctacaatattttaagacactcttcttctacttatgccttaattgagggtctgtcttatttaggtaaaagcttacaacctgttgaaaaagcaattgattatgtcatttcaaatcaactgttagaggttgatgataaagcttatatctttgatgatacagagggagcaaatgaaatcaaattaggacaaaatgcttcatttatattcgcagtttgtgaatatttaaagcatgaagataatcataaatttcttgagtcagctcaaaaagtagcgaacggtattctttcaatgattgatgaagatacatatgaaacgacgcacttattgaattatcctgatttaagtgttaaagagagattcagaattatttattatgatggtgaaacagcccttgctttgctgagactatatcaaagagataaaaatgatttatggttgaaaactgtagaaaatttaatggatcgtttcattgaaaaaaaatattggcaatatcatgatcactggttaggttattgtacaaatgaattaattcaaattaaccctcaggaaaaatatgttgagtttggtataaaaaatgtcaatacacatttggattatattgaacaacgtgaaacgacatttccaacatttttagaaatgctaatggctacttatcgattagtacaaaaatccaaagaaacgggttatgaggaattagtaaatcatttgatagatgaagaatatttaaaaaaagttattgatattagagcagattatcaaagagttggattcttttaccctgaaactgcaatgtactttaaaaatccatctagaattttaggaagcttctttattaaacaccatggttatcgtgttcgtattgatgatattgagcattatttgtcagggtatgtacagtatcaaatggaattcaaaaggtag

SEQ ID NO: 410811 - DNA, 2043 bp, Staphylococcus aureus
atgctaacaattgaaaagatctatcatattataggtggagaattaaaggatgctcataatagagaatcaaatgaaataaatgattttgaaaccacctataaatttgtaaaaagcaaaaagacggcatatttttctccaaataaagaaacatggtcaagagaattgggaagaaataaaaatgctttagatggtaatgatttagttgatagacaaaataaagaaattggtttaattataactgaaagttatatttccaatttaaaatttactgttcctcaaataattgtaaaagattcagttcaagcatttaaaaaactggctatatatattagaaatcaatataaaaatccggttgttgcaataactggatcaatgggtaaaagttcaactagaatgttaattactagcctattaagtgattttgatgtactcgaaaacagagggaacaataacgtaagagcagccatttataataatatgttgaaattaatcaagaatccagactttgctgtgattgaaacatctttgaatgctattaattatcttgaaaatacagcagtttacttaaaacctgatatagcaattattactggtataggtgaagcacatttttcaacttttaagtctgttaaagatattgccaaaattaagacaagggtttttgagggacttgcagataatggagtagcaatagttaataacgatacattatatgcagattacttagtagataaagcgcgagaaaatacaaataatgtcttaacttatagtattaaaaaggatagtaatgctgatttaactgtagataacatcaagtataataaaggaaatattggattattaataaatgaccaaaataaagaaacagacatttatcaacttaatacgattagtgagggaatggtttctaacacactagcaagtatgctaacgctgaaaagtctaaaattaccaataaagaaagacttacttaagaatttcaaacctttttcaaaaatattagcattgaaagaaatacaaacaaaatctcataaactaactttactggatgatacacataatgcttctttgcctgcaatgattaatgcaattagagcttttaatagtcaaactagattttacacaggaaacaaaatcattgcaattggaaaaattagtgatttaggtcataagtctagtgaaacacatttacaattagttgatgagttagaaagttgtaatgcagattatattctatgtaaggatatagaattaagacaagtcgtaaataaagttcgaaataagaatataatttggtatcctaacaaagaattattgataaatgatttaaaatatttatgtaatgaaaattctctaactttactaaaatcttctgtaactggtacagattttcccgaaatagctaaatcattacctaatattttgaggaggaatgacgtaggatttgattttgataatctgtttgagaaactaagtaaagtagggaaaagttatattagaataaataatgatactggacaaattattgaagaatttaacagtgatatgtctcaaaccattgagggaatgggtccactcatttattatttaaaagctatagatgaaaaattagaaaatagaaagattaacatgaagagttggccaactaatagtagtaaaactggctatgttgaaggtcgagaaatttatacttatacattactaaaaaatatgactaactcaccacatccttctgaaatctatgagttagctaatgagttatttgaaaatcatgtagatcgaaaaaaatatactaaacatttgattgaaaaactaaaattatctagttcgatagctacaaatctaactggtcgtttcagaattaaagatcgacaaagttatactgtaaaagatttatatcaagtatataaacattataaatatgatttatttaagtttaataattcttttattttaggaattaaatataaaagtggatttatacgtggagaaaaagaaactattattttcacttcatatcaagacccaaaatctaacttttaa

SEQ ID NO: 410812 - DNA, 501 bp, Staphylococcus aureus
atgactttcgaagaaaaactaagtcaaatgtacaatgaaattgcaaatgaaatcagtggaatgataccagtagagtgggaaaaggtatatacaattgcttatgtagatgatgaaggtggagaggtcgtttttaattatactaaaccaggtagcgatgaattgaattattacacatatatccctagagagtataatgtctctgaaaaagtattttatgatttgtggacggatttatatagattgtttaagaagttaagaaatgcatttaaagaagaaggtcttgaaccatggacatcatgcgaatttgactttacaagagagggtaatttgaaagtatcgtttgattatatagattggattaaattaggttttggtccatcaggaaaggaaaactactatatgtataaaaagtttggtgttttaccagaaacggaatatgaaattaataaagttaaagaaatcgagcaatatattaaagagcaagatgaagctgaactatag

SEQ ID NO: 410813 - DNA, 687 bp, Staphylococcus aureus
atgaataatactaaggaaaatatagatattcttcgaaagccaggagcacaagctctaagtttaatatcattgtttttgatacttttttcatgtctgactttcttttttggtttagattatgaaaggtttcctaattatttaaagataacgacaattatagaattaataattattgtaatcagtttacttcaatggattagatttatagatttcgaaaaagaaagtgcacagaaatataaaaaaatatatgctcgatttttagttgttataaatgtgttaactactatcactgtagtatttgcactgtgtaacctttattattttgcagctgtacaaaaccattatgatttattcaattattggttaataggtacgatttcaatcataattagttatttgttattagtaattggcggaatgtttacgttgttgaaattacctaaagtaacaaaacgttggggtggtaaaactaaaacacatttcggtttattattaactgcgttgagctcatttatatatattgaaaaaattatcgaatatatattgattcctaatgtcgtagaatccaagtttataattattgtaagcatgttggttatcgctggagcacaatttgtggcatttcaatttattatgcaatacagtagattctatatttttgaattaaacacagcagatgatgactaa

SEQ ID NO: 410814 - DNA, 255 bp, Staphylococcus aureus
atgcctggccaatttcctaatgcaaagacaccccataaagatgcgcctaataattggaatgctgttgtgactggcatggcacgagatgagccgactaattcgaacgctttaaatgtaatgatttgtccgaatccccatcctgcacctgataataaggcgaatagcaaattggttccagtagggaagccacttgatgtgactacggctaatataatagcgaagattaacgtacctacagtagcaccgataatttga

SEQ ID NO: 410815 - DNA, 204 bp, Staphylococcus aureus
atggaagatttaagacactctttaaaaggtttaggttggtatgacttattttttacagtacctatgtttctactattcgtgtatctgccgaattataattttataactatatttattaacattgttatcattattttcttttccataggtttgattttaactacgcatataattatagataaaattaagagcaacacgaaatga

SEQ ID NO: 410816 - DNA, 987 bp, Staphylococcus aureus
atgaaggaaaatttttggagtgaattaccacgtccattttttattttggcgccaatggaagacgttacagatatcgtctttcgacacgttgtaagtgaagcagctagaccggatgtgtttttcactgaatttacaaataccgagagcttttgccaccctgaaggcatacatagtgtgcgcggacgcttaacttttagcgaagatgaacagccgatggtcgctcatatatggggagataagccagatcagttccgtgaaacgagtattcaactagctaaaatgggctttaaaggcattgacttaaatatgggatgtcctgtagcaaatgttgctaaaaagggtaagggttccggcttaatcttaagacctgacgtcgctgccgaaattattcaagcaactaaagcaggtgggcttccggtaagtgttaaaacacgccttggctactatgaaatcgatgaatggaaagattggttgaagcacgtcttcgaacaagatattgccaatttatctattcatcttcgtacacgtaaagaaatgagtaaagtagatgcacattgggaattaatcgaagctattaaaaatttacgtgacgaaattgcaccaaatacattgttaacaattaacggtgatattcccgatagaaaaacaggacttgaacttgcagaaaaatatggcattgatggcgtcatgattggtagaggcattttccataatccattcgcttttgaaaaagaaccacgcgaacacacaagcaaagaactattagatttgttgagattgcatttatcattgtttaacaaatatgaaaaagatgaaatacgacaattcaagagtttgcgtagattctttaaaatctatgtgcgtggcataagaggcgctagcgaacttcgccatcagttgatgaatacacaatcaattgcagaagcacgagcactactagatgaatttgaagcccaaatggacgaagacgttaaaatagaattatag

SEQ ID NO: 410817 - DNA, 798 bp, Staphylococcus aureus
atggtaagagaaaatggtggagcaaatgctcaaagagggtttaactatcaaaattgtgtaatttctttagtagcaattagaaattataagaaaccaaatttcaaaatttatgttgaagcagatgaagatttcgaagtaaattatggcgatgattatcatgcatgtatacaagttaaaggagaaaaaaatttaacctttaacaagcttttaaaaggtgaaaaagggaagctttcaatatttgaaaaaaatctttcatctgggaaatcagattctgtatataaaatagttgtttttagctttagccgaaaagatatggaaagcatgcaggaacaaacagatgaagaagaactgttttcaaactcttggttactatcaaatgaccaaaaaaataaagtgaataatgatcgtgttgaaaatttttcattggtaaaaacagcatttgataacgatatgaagaatgctaggatatatttaaagggagaattagtacaacaaaatatagttgttgagggtagagccgaagtaatacttaatgaattatttcaacaaattcttccgttgaaagaagagaaaattaaaaaggaagagaagaaaataattttagaatacatggctgtaaaaaaagctgttataagatttttgaaatctgatgaagaaaagttggaaaataattccattagtacattaatatctgaaacatttaatttgtcagaaatgaattgtttatcagagaatactaaatatgccattgctatatcggcttattgcgatattttagaggagattgcatatgaataa

SEQ ID NO: 410818 - DNA, 396 bp, Staphylococcus aureus
ttgacatatcgatcatcaaaaagttatgatgaacgtttcacgccggatgaagtagtcgcataccaacaacatcaaggtaataaatttaaagaacattttgatttgaattgttatctgacactgctagatgtattggatagtcacaacattgaccgaggtcgcacagacgtaacgcatgtttttaaaaatttagaaacaaaagtgttaacgatggggttcatagatgatttgctatatccggatgatcaagttcgtgcattaggtgaacgttttaaatatcatcgtcatttcttcgtgcctgataatgttgggcatgatggattcctactaaactttagtacctgggcacctaacttatatcatttcttaaatttaaagcattttaagcgtaagtaa

SEQ ID NO: 410819 - DNA, 714 bp, Staphylococcus aureus
atgtcagaaatgaatgcggtatataacgttaaacaatacattttaaatttgattaagcaaaataaattggaatatggtgaccaacttccaagtaatttatcaattgccagagaattaaatgtaaaaaccgacgatgtttatgaagcaattcaggcattgattactgaacaagtcattaaagataattttgaagagggcacaagtgttaagtcactgccccctttcttttatccattgaatgaacttataagtattgggcaaatgattaaaaatgcaggatttgaatgcggaactgaatacttaaattttgatgagcaaccagcaactatgttagatgcaaatttgttgagcgttgaagaaggatatccagtaaccattatagaacgattacgaactgccgatggagaaccggtcgtctattgtttagataaaattgctaaaaaagaattaacatgtacagagtatcaaatgagcaatggatcgattctaagtgcgataaaagaacaaagtaatcataatatttgttatgctgatacagaaattgaagcggtaaattatgaacctcgaatatccgaagtactgaatgcttcgccacacgaaggtttgattttattaaaaattacgcactacaatgaattagatgaacctattttgtattcattaaattatatgaaaaatagcttagttcaatttaaaatcactagaaaaatatag

SEQ ID NO: 410820 - DNA, 1440 bp, Staphylococcus aureus
atggcgcaaaagaataataatgtaattccaatgacttttgatgatgcattttatcgtaaaatggctaaacagaagtttaaacaaagagaatataaacgagctgctgaatactttgaaaaagtgttagaattgtcacctgatgatctggaaattcaaattgattatgcacaatgtctagtgcaacttggtattgctaaaaaagcagaacatttattttatgacaatattatttataataggcatctagaagatagcttttatgaattgagtcagctcaacattgaagttaacgaaccaaacaaggcattcttgtttggtattaattatgttattgttagcgacgaccaagattatagagatgaattagatcaaatgtttgatgtgaaatatcaaagcgaagaacaaattgaacttgaagctcaattgtttgtagttcaaatactattccaatatcttttttctcaaggtcgattaaaagatgcaaagaattatgtcttacatcaaccacaagaagttcaagatcatcgtgtcgtacgtaatttattggcaatgtgttatttatatctcggtgaatatgatacggctaaagcattgtacgaagcactattacaagaggatagtacagatatatatgcattatgccattatactttgctactttataacactaaggaaaatgaacaatatcaaaaatatttaaaaatattaaacaaagttgtacctatgaatgacgatgaaagttttaaattaggtattgtattaagttatttaaagcagtatcgtgcatcacaacaattgttgtaccctttatataaaaaagggaaatttttatcaattcaaatgtacaatgctttagcatataattattattatttaggtgaagaagacgaaagtcattactactgggataaattgaagcaaatttctaaagtggaaattggacatgcgccttgggtaattgaaaatagcaaagaagtttttgaccaacatattttgccattacttcaaagtgatgacagtcattatcgtttatatggtatttttttattggatcaattaaatggtaaagaaattgtgatgacggaaagtatttggcaggttctggaaaatctaaataattatgagaaattgtatttaacgtatttagttcaaggtttaacgctcaataaattagacttcattcatcgcggcttgttaacgctttaccaaaatgaattatttgtaagtgaaaatgatttaatggttgcatggattaatcaaggtgaactcataattgctgaaaaagtagatttaactgatgttgagccatatatcggtgcgtttatttatttgtattttaaaaatcaacctcgaaacgttacaaagaagcaaattacaacatggttaggcataacacaatataaactgaacaaaatgattgaatttctcttgagcatatag

SEQ ID NO: 410821 - DNA, 201 bp, Staphylococcus aureus
atgatactagtaatgttatctccattattaatcatattctttatagtgttgtctattttagaggagcgtaaacgtacgaagaaaaagcaactcgagaaagaaaaagcaaatacactaaatcaaaatacaaatgacacggaaagttcaaatcaagagccgtcattgcaacaggctaaagaacaaaaagataacaaagggtaa

SEQ ID NO: 410822 - DNA, 834 bp, Staphylococcus aureus
atgttatcagttaaaaaagccacaaaatttgcagttgctaaccttattatcgtgtcaacggtttttagttctgtcacacctgcaattgcgcaatccgataaaagttctaaagatgaaagtttcgcggttggtaatactaaaaatccaaaaaatgttatctttttagttggcgatgacatgggtccatcatttaacacagcttatcgttattataaaaatgatccgcatgctaaagaaatgacccctactgcttttgattcatatttaaaaggcacaaatcgtacatattcaaatgacccaaaacagaatattactgattctgcagctggcggaacagcctttagttctggtcataagacatataatggtgccatcggtgttgacagtaacaagcagaaagtaaagacggtgcttgaacgtgcaaaagaaaaaggtaagtcgactggtcttgtttcaacagctgaattaacagatgcaacaccagcagcatatgctgcacacgtgacttctagagatgataaaaacgaaatcgctaaacaattttataaagataaaatcaacggaaagcataaagttgatgttttattaggcggcggcgctaaatatttcggtaaaagtaatggcaatttagataaaaaattcaaaaatgatggttacgaccttgccacaaacagtaaggagttatcaaaatctgataaagataaagttcttggtttgtttgcagataaaaatatgccacttgcaatagatgcttctaaagatgaaccatcattagctgatatgcaacaaagtgcacttagtaagcttgagcgtaataaaaaagattctttttaa

SEQ ID NO: 410823 - DNA, 222 bp, Staphylococcus aureus
atgaaaagtgtgaaaaagttgagtgaagaattaggggttagtaagcaaacgatttttaataatattaagcgattgaatatagagacaataaaacaggaaaacacttcgtttattaaagaagataccgatatagaaaaaatcattcaaagagtaaatgaaaataaaaagaaatatggttttgaaagtactactgaagacaaacaaaaaaaaagggtcggataa

SEQ ID NO: 410824 - DNA, 705 bp, Staphylococcus aureus
atgcaaaatcaatattttacagtgcaagaaaattacaaagaaagattttatcaaatccctaaagtattctttaccagtgaaaattataaaaatctaactaatgatatgaaaatagcctatgctatcttacgtaatcgcttaaatttatctattaaaaatagctgggttgatgaagatggtaacatttactttgtttattcaaatgaaaagctaatggaaatcttaaattgtaaaaaagaaaagttaacaaaaataaaaaaagggttagaaaacgatggtctactcattcaaaaacgacgtggtttaaataaaccaaatattctatatttaatgaaacctattgtcacagaacgtgatatttacaaaatagaaaaagaagaaaacgatgttgaaccttacggcgagaaggaagttcgaaaatcgaacactaatgatactgactttaatgacattgactttaatgatactgagaataatgatatgaatgacttgaatgatataaagtacaaaaatgaaattagtaatcattcaagtcaatttacacataattttgatgataaagaaatgctattgcaagaattcccagaacaactaactaattatttattaaaatatgattatagagatttagaaatcataaaggctgttattcttaaagcaaaaaatcatttaattcaaggcatgaagatatgcattacatgttag

SEQ ID NO: 410825 - DNA, 1515 bp, Staphylococcus aureus; identical to SEQ ID NO: 410117

SEQ ID NO: 410826 - DNA, 813 bp, Staphylococcus aureus; identical to SEQ ID NO: 410118

SEQ ID NO: 410827 - DNA, 960 bp, Staphylococcus aureus
atgaatgggaaaaaggcgaatacgataaacagatacaaatattttcatcatgtcaatcatcaaaaaattcaacaaagttctaaaaagacgctgtgggcatcactaatcatcacattgttatttacagtgattgaatttgtcggaggtttagtatctaattcattggcattactgtcagattcatttcatatgcttagtgatgtattagcacttggtttatctatgttggccatttattttgcaagtaaaaagccgactgcacgatacacatttggatatttaagatttgagatattagctgcatttttaaatggtttagcattaattgtaatttcaatctggattttatatgaagctattgtacgtattatttatccgcaaccaattgaaagtggcattatgtttatgattgctagtattggtttactcgttaatattattttgacaattatccttgtaaggtctttaaaacaagaagacaatatcaatattcaaagtgcattatggcatttcatgggagacttattgaactctattggtgtcatcgttgcagttgtattgatttactttacaggatggcgcatcatcgacccaatcattagtattgtaatttcactcatcattttacgtggtggttataaaattacgcgtaatgcgtggttaattttaatggaaagtgtgcctcaacatttggatactgatcaaattatggcagatattaaaaacatagatggcatattagatgtacatgaatttcatttgtggagtattacaacagagcattattcattaagtgcccatgttgtgttagataaaaaatatgagggtgatgattatcaagcgattgatcaagtatcatcattgttgaaagaaaaatatggcattgcacattcaacgttgcaaattgaaaacttgcaattgaatccattagatgagccatacttcgacaaattaacataa

SEQ ID NO: 410828 - DNA, 1233 bp, Staphylococcus aureus
atggcacaaaaagataaaattgcaatgattgaaacattaaataatggtaaaccgattcgtgagacaacagcaattgatattccatttgctgcaagacatttccattatttcgcaagtgttattgaaacagaagaaggtacagtgaatgatatcgataaagacacaatgagtatcgtacgacatgagccgattggcgtcgtaggtgctgttgttgcttggaacttcccaatgctattagctgcatggaagattgcgccagccattgctgcaggtaatacaattgtgattcaaccttcgtcttcaacaccattaagtttattggaagttgctaaaattttccaagaggtattacctaaaggtgttgtcaatatactaacgggtaaaggttcagaatcaggtaatgcaattttcaatcatgatggtgtagataaattatcatttacgggctcaactgatgtaggttatcaagttgccgaagctgcagcaaaacatctagtacccgctacattagagcttggtggtaaaagcgccaatatcatattagatgatgctaatttagaccttgcagttgaaggtattcagttaggtattttattcaaccaaggtgaagtatgtagtgcaggttctcgattattagttcatgaaaaaatttatgatcaattggtgccacgtttacaagaggcattttcaaatattaaagttggagacccacaagatgaagctacacaaatgggtagtcaaactggtaaggatcaattagataaaattcaatcatatattgatgcagcaaaagaatcagatgcacaaattttagcaggcggtcatcgcttaactgaaaatggattagataaagggttcttctttgagccgacattaattgctgtgccagacaatcatcacaaattagcacaagaagaaatatttggaccagtgttaacagtgattaaagtgaaggacgatcaagaagcaattgatatagctaatgattctgagtatggtttagcaggcggtgtattttctcaaaatatcacacgtgcattaaatattgctaaagctgttcgtacaggacgtatttggattaacacttacaaccaagtaccagaaggcgcaccatttggtggttataaaaaatcaggaatcggtcgagaaacttataaaggtgcgttaagtaactatcaacaagttaaaaatatttatattgatacaagcaatgctttaaaaggtttgtactag

SEQ ID NO: 410829 - DNA, 405 bp, Staphylococcus aureus; identical to SEQ ID NO: 405155

SEQ ID NO: 410830 - DNA, 417 bp, Staphylococcus aureus
atggaattttatcaaatgccaatgtttaataaagtgctagttcaagacattgaaaaagcagagaaatggtatgaaaaaacacttggttttaaaagcgtttttaaatttagaaatgataaaaatgaagtgctaatgaatcatttgagactagaaaaatatcaagatttaatgctaatttctcaaacagattttgaagttggaaactcaatatacttaaatatcttagtaaaagatatcgaagaaaaatcacaaaacatttcacaaaaatttatagtaagccaattagaagaacaaccatggaacgctaaagaaatgacaataaaagatccagatggacacttaatcacacttactcaatcaaatattagcgatactgattttgaaaaattaatgaaaaaaacttctaaagattattag

SEQ ID NO: 410831 - DNA, 492 bp, Staphylococcus aureus
atgattcgatgtgctaaaaaagaagatttaaacgctatattagcgatatacaacgatgccattattaatacaacagctgtttatacttataaaccgcaaaccatagacgaacgtatcgcatggtttgaaacgaaacaacgtaatcatgagcctatctttgtatttgaggaaaatggaagtgtattaggatttgcgacgttcggttcgtttagaccttggccagcatatcaatatactatcgagcattctatttatgtcgatgcttcagctagaggaaaaggtatcgctagtcaattattacagcgttcaattgtagaggcaaaagctaaaggttatcgtacacttgttgctggtattgatgcttctaatgaagcgagtattaaattacatcaaaagtttgctttcaagcatgccggcacactgaccaatgtaggttttaaatttaatcaatggttagatttagcattttacgaattagatttacaagactag

SEQ ID NO: 410832 - DNA, 603 bp, Staphylococcus aureus
atgttaattagtctcgtaaccccagtttttgctttgttagttattggtggtattatttgggtgattatagaaggtatagtacatatttcaaaaaagaataaagcaatcgataactttttaaaccaagttaataaagtaagtgagacatataaattcgctactactattttatttctaatcttggctacggcgggtatttctcaattttatctatattatatagtatcagcgtttcttttttggcttgtcatacttacctttggtattgcaggtatcatttttttaatgccatatggattatgttttctaccgttttataagcaaaaaaagaaaaaacagacatttaaaaaatacatggtttacactacgattggtttgtcaatttgtctaggcttatctctagttttggttcacactacgaaaatttatatggacgaaggtggcgtaagatactattacggtagttttgtaatgaaacaagcgggcggttatgcttatttagctttagcagtactttcaacgttgttaattgttgcgaaaaaagctacaaataaaaataaagaaatcgaaaccgtcgacaatacaaatataatggaaagataa

SEQ ID NO: 410833 - DNA, 777 bp, Staphylococcus aureus
atgatttctagagcagtattaacgccaggggatactattgttacaagtgaagcgacattcggtcaatattatcacaatgcgattgttgaatcagctaatgtgatacaagtacctttaaaagatggtggcttcgatttagaaggtattttaaaagaagttaatgaagatacgtcattggtatggttatgtaatccaaataatcctacaggtacatattttaatcatgagagcttagattcgtttttatctcaagtacctctacatgtaccagtaattatagatgaagcttattttgaatttgtgacagcagaggactacccggatacacttgctttgcaacaaaaatatgacaatgctttcttattacgtacattttcaaaggcgtatggattagcgggtttacgtgtaggatatgtggtagcaagtgaacatgcgattgaaaaatggaacatcattagaccaccatttaatgtgacacgtatatctgaatacgcagcagttgcagcacttgaagatcaacaatatttaaaagaggtaacacataaaaatagtgttgaacgcgaaagattttatcaattacctcaaagtgagtatttcttgccaagtcaaacgaattttatatttgtaaaaacaaagcgggtaaatgaactttatgaagcacttttaaatgtagggtgtattacgcgatcatttccaactggtgttagaattacaattggttttaaagaacaaaatgataaaatgttagaagttttatcaaactttaaatacgaatag

SEQ ID NO: 410834 - DNA, 141 bp, Staphylococcus aureus
atgtctggtattaacgtaggtatggatacgattcatgtacaaacaggtgtatctacgttagaagatgtgcaaaataaaaatgtgccaccaacgtattcttttaaagatttaaatgaagcaatagctgaattagaaaaatag

SEQ ID NO: 410835 - DNA, 303 bp, Staphylococcus aureus
atggctaaatattccggtaaagatagcgattatctcgttaatcaaaaagtattcgacgcattttataaagcattaaaaggcaaacaggtacttgtctattctggattgtttaaagatgcacgcaaaaagctaaaaaatggcgagttggattatctcaaagaaagtgatccgacagaatatatttaccaaatcttttatgtgtggaatcaaaaagagtatctagcaagtgagatttacgacttaaccgaagaagaaaaacgagaagtaaacaaccaaatgattaacgaaattgaagaagagtaa

SEQ ID NO: 410836 - DNA, 408 bp, Staphylococcus aureus
gtgaacccattaacaggtgaaaaagttggtgagggtcaaccaacagaagagatcacaaaacaaccagtagataagattgtagagtttggtggcgagaaaccaaaagatccaaaaggacctgaaaacccagagaagccgagcagaccaactcatccaagtggcccagtaaatcctgacaatccaggattatcgaaagacagagcaaaaccaaatgaaccagttcattcaatggataaaaatgataaagttaaaaaatctaaaattgctaaaaaatcagtagctaatcaagagaaaaaacgagcagaattaccaaaaacaggtgcagaaagcacacaaaaaggattgatctttagtagtataattggaattgctggattaatgttattggcacgtagaagaaaaaattaa

SEQ ID NO: 410837 - DNA, 150 bp, Staphylococcus aureus
atggttagttttaaaaatattgattggaaattatactttttattattaataattatcttaccgttggcgatagtaactgcttttattttacctggattatataaatacttgtcttttatttgggtttttcttttttttatccttttttaa

SEQ ID NO: 410838 - DNA, 1392 bp, Staphylococcus aureus
ttgaatattgttgataaagcttcacttcaagttgcttgtgaaaatggaaaagttagtgaattaagcggatttgctaagaaaacggaacaaaacatattagaagctgtgaaacaacttggtgctaagaaagatagatatccaattgatcaaatgagaagacttaatcaagaaatcattgattatatagatacattaaattatatcgatcaatattcatctgcaggaagcttccgtcgttttaaagaaatgagcaaagatttagatttcataataagtaccgataacccaaaagcagtgcagcagcaattattaaatattcccaataaagtaaaagaagttgcagtggggaacacaaaagtttcattagaattagcgtatgatgatgaaacgattggtgtcgattttcgattaattgaaccaagggctttttatcatacattgcagcattttactgggtcaaaagaacataatataagaattcgacaacttgctaaagcacgggatgaaaaagtaagtgaatatggaattgaacaagctgatggtacattaattcaatatgatagtgaagccaaaatatatgaacattttaatgtgaattttataccacctgctatgagagaagatggtagcgaatttgataaagatctaagtaatatcattacattagatgatattaatggtgatattcatatgcatacaacgtttagtgatggtgcgttttccattcgagacatggtagaagcaaatatcgcaaaaggttataaattcatggtaattactgatcattcacaaagtttacgtgttgctaatggcttacaagtagaaagacttttaagacaaaacgaagaaattaaagctttagataaagaatatagtgaaattgatatttattcgggtacagaaatggatatattacctgatggctcgctggattatgatgatgaaattttagcacaacttgattacgtaattggagctattcatcaaagctttaaccaatcagaagaacaaattatggaacgattagctaatgcatgtcgcaatccatacgtgcgacatatagcgcatccaacagggcgtattataggtagaagagatggttataaaccgaatattgaacaattaatggcattagctgaagaaacgaatacagtattagaaattaatgccaatccacatcgactggatttgagcgctgatatcgttcgtaaatatccaaatgtgaaattaactattaacactgatgcgcatcatacaaatcatttagattttatgaattatggcgtagcaactgcgcaaaaaggatttgtaacaaaagatagagtgattaacgcattatcgcgtgaagcttttaaagactttattgaaaataatataaaacttaagaaatag

SEQ ID NO: 410839 - DNA, 339 bp, Staphylococcus aureus
atgaaaacacgtatagtcagctcagtaacaacaacactattgctaggttctatattaatgaatcctgtcgctaatgccgcagattctgatattaatattaaaaccggtactacagatataggaagcaatactacagtaaaaacaggtgatttagtcacttatgataaagaaaatggcatgcacaaaaaagtattttatagttttatcgatgataaaaatcacaataaaaaaatattagtcatcagaacgaaaggtaccattgctggtcagtatagagtttatagcgaagaaggcgctaataaaagcggtttagcctggccttcagcatttaaggtatag

SEQ ID NO: 410840 - DNA, 369 bp, Staphylococcus aureus
atggctaatcatgaacaaatcattgaaacgattaaagaaatgtcagtattagaattaaacgacttagtaaaagcaattgaagaagaatttggtgtaactgcagctgctccagtagcagtagcaggtgcagctggtggcgctgacgctgcagcagaaaaaactgaatttgacgttgagttaacttcagctggttcatctaaaatcaaagttgttaaagctgttaaagaaacaactggtttaggattaaaagatgctaaagaattagtagacggagctcctaaagtaatcaaagaagctttacctaaagaagaagctgaaaaacttaaagaacaattagaagaagttggagctactgtagaattaaaataa

SEQ ID NO: 410841 - DNA, 1473 bp, Staphylococcus aureus
atgaattacattttaggaacaattttagaaagtaaaattacaggtgtagaaaaagcacaaataaatagactgaagttgttcaaacaacacggcatatcttcaaaatgtgtatatgttaaatggaatccttattcatacacatatgcgaagcaacatcagattgaaaatgatctgtttacaatgtatgactattttcaaaaagcaatcaattataaaaagacaaagcaagttaactggatacagtattgggaaaagtcatgtaggtacacgttgaaatttgtggaaaattcaaatgatgtcagaatatatgatgaagagcaatttataatgtatgctcattttttagataaacagtatcatcaattaaactatgtgaattattttgatcataaaagaagaaaagtaaaacgtgaattgtatgatggaagaggctttttaagttgttctcgaattttaggtgaaggacaacggattgtactcgaaaattactatacacctaatggggaaatcgtcatccaaaaatatttcgacgatataaaagggaaaaacacgctcacaaaggttatcttaaatgaagaccagcatcaacaattttttgatacagaagatgaattagttcaatattttctccatcaattatgtaaaaataatgatcaaatcatattagaccgtcctcatgaattaggaaatgttattgcgggattaaatcaaagtattccagttattgttgtgctccacagtacacatttatccggcaccggtaatgatataaaaaatttttataaaacagtgtttaataatttaacacgttataaagcgattgttgtatcaacagaaaagcaatgccaagatatttcacaatatattgaaaataaaataccagttatcaatattccggttggctacgtggcaaacttaaagtatcaatttgacatcaatcaaaaggataaaaatcatatcatatcaattgctcgcctcgttgaaaacaaacaaattacacatcaaattgaagtgatcaagcaattagtaaccaaacatcccaaaattcaattgaatatttatggacatggaaatggtttgtcagaatatcgacaacttgtagaaggttatcatttatcggaacatgttaaatttcatggttttaagacgcatattaatgaagagattgctaaagcagaactgatgttatcgacaagtaaaatggaaggttttggcttagcaattttagagtcgctttcagtaggtacaccagtgatcagttatgatgtagattatgggccatcagaactgattcaagatggatttaatggctatttagtacctccaggtgacatcaatcaaatggttgaaaaggttgaccaattattaaataatagccaaatgatgcaacaattttcaattaatagcatagaatctgcacaacagtacaatgcaactactatcagtacaaagtggcaaaaaattttaaactaa

SEQ ID NO: 410842 - DNA, 429 bp, Staphylococcus aureus
atgacaaggtcagcattaaaaccatttaaaaataaacgcgttatggttactggacgtatacatcgtgtgttgtttaaaaattatttagatagacatagcacatttaagccgaatgtaaggatattattaaaagatgtaattgtttcaggtgtttcaatagatcatttatggctatatgagacaaataaatactatgcattagcaatggaacttattcatcaacgagtaaaatttagtgcgaatgttgtaccgtattacaaaataaatagaaataataatttattcgtacaagattatggaattaagcgtaaaggtaatttagttactgaagaagcttacattcaaaacaatcagtatcaggataaaatatatgaaaaattaccggatatagattttagactcgaagatttttatagtaaggaaaactaa

SEQ ID NO: 410843 - DNA, 1890 bp, Staphylococcus aureus
atgagttttaatgagattatatttaaaaatttccgccaaaatttatcacattatgccatttatcttttttcgctaattacaagtgtagttttattttttagcttcgtagcactaaaatatacgcatagcattaacataactgagacatatcccattattaaagaaggatcgcaagtaggtagttactttctattttttatcattgttgcctttttgctatatgccaatgtactatttcttaaacgtcgtagttctgaacttgcattatatcaaacattaggtttatccaaattcaacattatatatatattgatgtttgaacaattattaatattttcaataacagctatattgggcattacgattggtatctttggttctaaaattttattaatgatagtgtttactttattaggtatcaaagaaaaggttccaattattttcagctttagagcagtgtttgagacactattattaattggcgttgcttatttcctaactgcagctcaaaatcttatcttagtattgaaacaatctatttcagaactatcaaagcataatcaggctaagcaaatgaatcataataaaattacatttgaagaagttatactaggaattctaggtattattttaatcatcagtgggtattactactctttacgcattgtacattactatgatgcaattggcgtccttatgtttatattgtttgcgacagtaattggggcgtatttattttttaaaagttcagtatccttggtatttaaaattattaaaagctttaaaaaaggtgtaataagtgtaaatgatgtcatgttttcttcatctattatgtatcgtattcagaaaaatgcattttcacttactgttatggcaattatttcagctattactttatcagtactttgttttgctgctatcagtagagcaactttattaagtgaaattaagtatacgtcacctcatgatgttacgattaaagatcaacagaaagcgaatcagttagcaagtgaattgaacaaccgaaaaattcctcatttttataattataaagaagtgattcatacaaaactttataaggatgacttatttgatataaaagcaaaggaaccatataacgtaacaattactagtgacaaatatattcctaatacggatttgaaacgtggtcaggctgatttatttgtagcggaaggcgctattaaagatttagtgaagcataagaaacatggtaaggcagtaataggaacgaaaaagcaccatgtggatattaaattacgtaaagatatcaataaaatttactttatgactgatgttgacttaggtggaccgacgtttgtgttaaacgatcaagattatcaagagataagaaagtatactaagccaaaacacattgtttctcaatttggatttgatttaaaacataaaaaagaaatgttagcattggaaaaagcaacaaataaagttgacaaatctattgaaacaagaagtgaagccataagttcgatatcgagtttaacgggaatattgttatttgtaacctcatttttaggaattagtttcctaattgccgtatgttgtatcatatacattaaacaaatagatgaaactgaagacgagttagaaaattatagtattcttagaaaacttggatttacacaaaaagatatggcaaaaggattaaaatttaaaattgcgtttaattttgggttaccattagtcattgcactttcacatgcatactttacatcattagcatatatgaaattgatggggacaacgaatcaaataccgatatttatagtaatgggactatatatttgtatgtatgccatttttgcaatgacagcttataatcattctaagcgtacaatcagacattcaatttaa

SEQ ID NO: 410844 - DNA, 2448 bp, Staphylococcus aureus
atgttagacaaagtcactcaaatagaaacaattaaatatgatcgtgatgtctcatattcttatgctgctagtcgtttatccacatattggactaatcacaatatggcttggtctgactttatgcagaagctagcacaaacagttagaactaaagaagatttaactgagtacaataaaatgtctaagtctgaacaagcagatataaaagatgttggcggatttgtcggtggatatttaaaagaaggcaaacgacgtgctggtcaagtcatgaatcgttcaatgctaacacttgatatcgattatgctgctcaagatatgactgacatattatctatgttttatgattttgcatattgtttatattcaacacataagcatagagagataagtccaagactgcgtttagtgattcctttaaaacgaaatgtaaatgcagatgagtatgaagctattgggcgtaaagtcgcagatatcgttggcatggattacttcgatgatacaacttatcaacctcataggttaatgtattggccttcaactagcaacgatgcagaatttttctttacctatgaagatttacctttgttagatccagatacaatattaaatgaatatgttgattggactgacacattagaatggccaacgtcttcaaaggaagagagtaagactaaaagattagcagataagcaaggtgacccagaagaaaagccgggaattgttggcgcattttgtagagcctatacgatagaagaagctatatcaacttttattcctgacttatacgaaaaacattctactaaccgttatacctatcatgaaggttcaactgcaggtggattggtgttatacgaaaataacaagtttgcctattctcatcataatacggatcccgttagcggtatgcttgtgaacagttttgatttagtacgcatacacttatatggtgctcaagatgaagacgctaaaacagatactccggttaatcgactacctagttataaagcaatgcagcaaagagcgcaaaatgatgaagttgttaaaaagcaattaattaacgacaaaatgtctgatgcaatgcaggatttcgatgaaatagtaaatagcgatgatgcatggtctgagacgttagaaattacttcgaaaggtactttcaaagctagtatcccaaatatagaaattatattgcgtaatgatccaaatttaaaaggaaaaatagcatttaatgaatttacaaaacaaattgaatgcttagggaaagtgccatggaatactaattttaagacacgtcaatggcaagacggtgatgatagcagtttaagaagttatatcgaaaagatttatgacatacaccattcaggtaaaacaaaagatgccattataagcgtagcaatgcaaaatgcttatcatccagtaagggattatctaaataaaatatcgtgggatggacataaacgtcttgaaaagttatttatcaaatacttaggtgttgaagatactgaagtgaatagaacaactaccaaaaaggcattgactgctggaatcgctcgagtaatggagcctggatgtaaatttgactatatgcttacactttatggtcctcaaggtgtaggtaaatctgctttgctaaaaaaattaggtggtgcatggttttctgacagtttagtttctgttactggtaaggaagcatatgaggcattacaaggcgtttggttaatggaaatggcagaacttgcagctacaagaaaagctgaagttgaagctattaagcatttcatatctaaacaagttgaccggtttcgtgttgcttatggacattatattgaagattttccaaggcaatgtattttcattggcacaactaataaagttgatttcttaagagatgaaactggtggaagacgtttttggccaatgactgtaaatccagagagagttgaagtgaactggtctaaactaaccaaagatgagattgaccaaatttgggcagaagctaaatactattatgaacaaggagaagagttattccttaaccctgaactagaagaagaaatgcgttcaatacaaagcaaacatactgaggaatccccatatacaggtattattgatgaatatcttaacacaccaattcctagcaattgggatgacctaactatctttgaacgaagacgattttatcaaggtgatgttgatatgttaccaacaggaaatgtagattacgttgaaagaaataaggtctgtgcgcttgaagtgtttgttgaatgttttggtaaggataagggagatagtagaggatctatggaaattagaaagatttcaaacatcttaagacaattagacaattggtctgtatatgatggtaataaaagcgggaaaattcgattcggaaaagattatggtgtacagatagcgtatgtaagagatgaaagtttagaggatttaatataa

SEQ ID NO: 410845 - DNA, 537 bp, Staphylococcus aureus
atgactaacacattaacaactgatcagttacaagagttattacaaatacaaaaggagttcgacgatagaataccaactagaaatttaaatgacacagtagctagtatgattattgaatttgtagagtgggttaacacacttgagttttttaaaaattggaagaaacaaccaggtaagccattagatacacaattagatgagattgctgattacttagctttcagtttgcaattaactctgactattgttaatgaagaagatttggaagaaaccactgaggttatggttgatttgtttgaaaatgaagttactttacctaaactacattcagtttattttgttcatgtaatgcatacactaacagaacaatttgtaaaaggtattgataatagtattgtacaagttttaataatgccttttttgtacgccaatacttactattctatcgaccagctcattgacgcatacaaaaagaaaatgaaaaggaatcatgaaagacaagatggaacagcagacgcaggaaaaggatacgtgtaa

SEQ ID NO: 410846 - DNA, 1047 bp, Staphylococcus aureus
atggtaaataaaaaagatattgctaaaaaagtaataggtaaaacgccaataggtgttaaattgaaattagcgaaagtcatcatcattttgtgtgtggtggctttttttacatttccagtaattgtaatgtttttgttagcgcctgattcaaataaagataaagatgatgctggttgtactgttagtggcggtaatgtttcggcaaatggtattgataagtttaataaaaatgctaaaggtggaaaattagagggtaaaggaaaagaaatacagaaaattgcagaaaaaaataaagtacctgtgaatatttttatggctattattgcgagtgaatcacaatggggtaaaggagaaaatgcgacaagacaaaataatcctttgtctgttatgggttcaaaatcgattcatgattcaacatatccaactattgaagacggtcttaatgcgggagctaaaaatttgtatgatgtttatatttctaaaggtttagatactcctaaaaaaataggtcccaaatatgcgcctgttggtgcgtcaaatgaccctaataatatgaatgcccgttggataccaacagttgaaaaaattatgaaagatttaggcggttcagaagctaaaacgtcatgtagtaatggtaaaggaaagtctataaagtttaatggtaaattgccacattggtcaaatgatgaccctggaaaaggtaatttatacactgctggtcaatgtacttggtatgcatacggtatgcgtcaaaaaatgggtaaacctgtatcaacttattggcatgatgcacataaatggaatgatagggctaaggctgagggttataaagttgataaaaatccggaacctggtgcattatttattgctgaacaaggtgcaggcggtcatgatgggcattatggtcatgtggctgttgttattggtgtaagtgatggtggtaaaacatttagaataacagaaatgaattgggaaggtgcttttaaagttaatgaacgtacattgaaaatgactgatggatatagttttattcatgataaggagtga

SEQ ID NO: 410847 - DNA, 651 bp, Staphylococcus aureus
atggctacaatgaaatatgacatgtgtggcgctgcgaatgtcgttggtatcattgaagcggctagtcgtttacaactgcctgtaaatattgtcggagtgcttgcttgtgctgaaaatatgataaatgaagcatcaatgaagccagatgatgtatttacagcgttaagtggtgaaactgtagaagtaatgaatacagacgctgaaggtagattagtccttgcagatgctgtgtattatgcaaatcaatatcagcctagtgtgattatggactttgctacattaacgggtgcagccatcgttgcacttggcgatgataaagctgctgcatttgaatcgaatagtaaagtgatattaaacgacatattacaaataagttctaaagtcgatgaaatggtatttgaattaccgattactgcaaccgaacgtgcaagtattaaacacagtgatatcgctgatttagttaaccatacgaatggacaaggtaaagcgctatttgcggcaagttttgtaacacattttagtggtcaaacacctcacattcatttcgatattgcaggtccagcaacgactaataaagcttcatataatggtccaaaagggccaacaggatttatgattccgacgatagtacaatggttaaaacaacaataa

SEQ ID NO: 410848 - DNA, 1155 bp, Staphylococcus aureus; identical to SEQ ID NO: 408379

SEQ ID NO: 410849 - DNA, 726 bp, Staphylococcus aureus
atggaaaaattaaatgaagcaattaaaaactatatagatagtgatgaattgttcgccctttttatagatggacaatggggagtagggaaaacttattatattaaaaataaaatattaaaggaatttgatgataaaatagaaattaggtatataagtttatatggcctgcaaaacttatatgaaattaagagtataatcataagtaaattgataaatacatctactaaaaatcttaggaaagtcctaaaaagcatgaaaaatttccaagtagtaccttatttaaatatgaataacttttctgataacatattacgttatattgatgataattcattaaaaaagataaaaaattccctgatgaaaaataataaaagtgctttgctaataatcgatgatgttgaaagaatgagtgacaaagtaagttttgaagaatttttgggatttattagaaatgatttaattgattatttagactgtaaagtgctatttataggaaatttagatgagctaaataaaaaagcggattttcataagaatagtgagaaaataatttctagaatattaaagtttcctaataatagagaagtagcaatggatatagtaaaaagtaatttacctaagttatttgtaaagaacatctctactaaagagctatttaatggtttttttgatataagtgatgaaaaaaagaaattattttcgaaaaatctaaacaaaataatttaa

SEQ ID NO: 410850 - DNA, 504 bp, Staphylococcus aureus
ttgggggagtttgaagtaaaatatttaacaggatttattttaatattattgttagaaggaatttttacaaattcagcaagtgcaatcgaatattcagacttacatcataaaagtaaacttgattccaagcgtctatataatgctaaggtgtcatttgctaatccaactgatcttgaaaataaaaaagcaaatgatagactgttgaagcatgatttgttatttcatgacatgttcttaaatgatgcttggaaaaaagatttaaaagttgaattcgaaaatgaggcactttcaaagaaatttataaataagaatattgatgtatatgctggaagctatagctatgaatgtcatgggggagaaaccaataaaacgcaatgtagttatggtggtgttactttaagtgacaataataaatacgatgattataagaatataccttgtaatttatggattgacggacatcaaacagaaatagaactaactgcagtgaaaacgaaaaagtaa

SEQ ID NO: 410851 - DNA, 1518 bp, Staphylococcus aureus
atgtcacgacaagataaaaagttaactggtgtttttgggcatccagtatcagatcgagaaaatagtatgacagcagggcctaggggacctcttttaatgcaagatatttacttcttagagcaaatgtctcaatttgatagagaagtaatacctgagcgtcgtatgcatgccaaaggttctggtgcatttgggacatttactgtaactaaagatataacaaaatatacgaatgctaaaatattctctgaaataggtaagcaaaccgaaatgtttgcccgtttctctactgtagcaggagaacgtggtgctgctgatgcggagcgtgacattcgaggatttgcgttaaagttctacactgaagaaggaaactgggatttagtagggaataacacaccagtattcttctttagagatccaaagttatttgttagtttaaatcgtgcggtgaaacgagatcctagaacaaatatgagagatgcacaaaataactgggatttctggacggggcttccagaagcattgcaccaagtaacgatcttaatgtcagatagagggattcctaaagatttgcgtcacatgcatgggttcggttcacacacatactctatgtataatgattctggtgaacgtgtttgggttaaattccattttagaacgcaacaaggtattgaaaacttaactgatgaagtagctgctgaaattatagcaacagatcgcgattcatctcaacgcgatttattcgaagccattgaaaaaggtgattatccaaaatggacaatgtatattcaagtaatgactgaggaacaagctaaaaaccataaagataatccatttgatttaacaaaagtatggtatcacgatgagtatcctctaattgaagttggagagtttgaattaaatagaaatccagataattactttatggatgttgaacaagctgcgtttgcaccaactaatattattccaggattagatttttctccagacaaaatgctgcaagggcgtttattctcatatggcgatgcgcaaagatatcgattaggagttaatcattggcagattcctgtaaaccaacctaaaggtgttggtattgaaaatatttgtccttttagtagagatggtcaaatgcgcgtagttgacaataaccaaggtggaggaacacattattatccaaataaccatggtaaatttgattctcaacctgaatataaaaagccaccattcccaactgatggatacggctatgaatataatcaacgtcaagatgatgataattattttgaacaaccaggtaaattgtttagattacaatcagaggacgctaaagaaagaatttttacaaatacagcaaatgcaatggaaggcgtaacggatgatgttaaacgacgtcatattcgtcattgttacaaagctgacccagaatatggtaaaggtgttgcaaaagcattaggtattgatataaattctattgatcttgaaactgaaaatgatgaaacatacgaaaactttgaaaaataa

SEQ ID NO: 410852 - DNA, 1455 bp, Staphylococcus aureus
atggaagataataaaatgaaccgtagtcttaactcaagacacatttccatgattgctataggtggtgcaattgggactggtctatttgtagctactggtaatatcatttctcaagctggtcctggaggcgctatactcgcttatcttgttattggtgtcatgctatatttcttaatggcatcaattggagagttggcaacattttatccagtatcaggttcattcagctcttattcaacacgctttattgactcatctctaggctttaccatgggatggttgtattgggcattgtggtcattagttacaagtgttgatgtcatagtagcgtcaaatgtgctttatttctgggacacatttaaatttttccaccccattacttggagcttaatctttattacaattttactattattaaacattttttctgtaaaatcatttggagaaactgagttttggttatcattaattaaagtgttaacaatcatcgtattcgttatttttggctttttaatgattttcggtatcttaggtggtcatgcatatggatttgaaaactatacaaaaggccaagcaccgtttgttggtggtatctctggtttcctaggcgtattattagtcgctggattctcagttggtggtactgaagtagtagcagtaactgctggcgaatcagatgatcctaaaaagtctatgcctaaagcaattaaacaagtgttttggcgtattcttttattctatgtattatcaattgcagtcattggtgcaattattccgtacacagatccatcattattaagagcaagtagttcaataagtcaaagcccatttacaattgtattcgatagagtaggcatagcctttgcagcatcagtaatcaatgcggttattttaacttcactattatccgctgcaaattcaggtgtttatacaacaggcagaatgttgtattccttaagttcagacaaaaaagcacctaaatttttaagtaaattaaacaagacaacaaaattaccattaagagcattattaactacatatgcagtcgttgttattgttattatttatgcaaactttaattcaaatgccgtttttaatttacttgaaattattggttcaatgattatagttgtttggggatcaagcatttggtcacaaatacgattgcgacaagctattaaaaaacaaggtcaagatcctaataaggtcctaccatataaagcacctttttatccattaggaccaatcattgtcatcgctacgctattattcttgctatttggtggttcagttgaatatattttaaaagatcaatggttaaatgcttttaaaaactttttacctttaatcattctagcgttgatttactttattcataaaatcattcacaaaacaaaatttgtaaagctagaaacaattaatttaaaaccacacgattatgacaatcaaaaataa

SEQ ID NO: 410853 - DNA, 915 bp, Staphylococcus aureus
atgtcgaatgttttggagttaacaattcctgcatcaacagccaaccttggagttggctttgattctataggtatggctttagataaatttttgcatctgtctgtaaaagaaacatcagggacaaaatgggaatatattttccatgatgatgcatcgaagcaattacctactgacgaaacaaactttatttatcatgtggcacaacaagttgctgctaaatatagtgttgacttgcctaatttatgtatcgaaatgagaagtgatattccattggcaagagggttaggttcgtcagcttctgctttagtaggagctatatatatcgcaaattattttggtgatatccaactatctaaacacgaggtattacaattagcgactgaaatcgaaggacatcctgataatgttgcgccgaccatttatggtggtttaatcgctggatattataatgatgtcacgaaagaaacgtcagttgcacatatcgacataccagacgtggatgtgattgtaacgataccaacttatgaactaaaaacagaagcatcaagacgtgctttaccacaaaaattaacacatagtgaagccgttaaaagtagtgcaattagtaatacaatgatttgtgcattagcacagcacaattatgaattagcaggtaaactcatgcaacaagatggctttcatgaaccgtatcgtcagcatttaattgctgaatttgatgaagtgaaaacaattgctagtcaacataatgcctatgcaactgtaattagtggtgctggaccaactattttaatatttagtcgcaaagaaaatagtggcgaattagttcgcgctttaaatagaaatgtagttacatgtcattctgaattagtggatattaatgttagtggtgttaaagaacgaattgtataccaatag

SEQ ID NO: 410854 - DNA, 1281 bp, Staphylococcus aureus
atgaaaaaattaaatatagcattattaggattaggtactgtcggatctggtgttgttaaaatcatcgaagagaaccgacagcaaattcaagatacattaaataaagatattgtcataaagcatattcttgttcgagataaatctaaaaagagaccgctaaatattagtcaatatcatttaactgaagatgttaatgaaattttaaatgatgattcattagatattatcgttgaagtcatgggaggaattgaaccaactgtagattggttaagaacagcacttaaaaataaaaaacatgttattaccgcaaataaagatttattagcagtacatcttaaacttttagaagatttagcagaagaaaatggtgtagctttaaagtttgaagcgagtgtagcaggtggtattccgatcgtaaatgccataaataatggtttgaatgcgaataatatttcaaaatttatgggaattttaaatggtacctctaattttattttatcaaaaatgactaaagagcaaacgacatttgaggaagcacttgatgaagcgaaaaggcttggttttgctgaagcggatccaactgatgatgtagaaggggtagatgcagcgcgtaaagttgtcattacatcatatttatcatttaaccaagtcattaaattaaacgacgttaaacgaagaggaattagtggtgtaactttaactgatattaatgtagccgatcaactggggtataaaattaaattgattggtaagggaatatatgaaaatggcaaagttaatgcatcagtagaaccaacgttaattgataaaaagcatcaattagcagctgtagaggatgaatataacgcgatttatgtcattggtgatgccgttggtgacacgatgttttatggaaaaggagcaggcagtttagcaacaggtagtgccgttgtaagtgatttattgaatgtagcattattctttgaatcagatttacacacattgccaccacattttgaattaaagacagataaaacaagggaaatgatggattctgatgcagaaattaatattaaagaaaaatccaatttctttgtagtagtgaatcatgtcaaaggttcaattgaaaattttgaaaatgagttaaaggcaatattaccatttcaccgatcattaagagttgcaaattacgataatcaagcatatgccgctgttatagttggattggaatcatcaccggaagaattaatcactaagcatggatacgaagttgacaaagtatacccagtagaaggagtttaa

SEQ ID NO: 410855 - DNA, 1383 bp, Staphylococcus aureus
atgaaagtttccaaattcggtggtagctccgtctccaatgctactcaaattaaaaaggttttaaatattgttaattctgatccagagcgaaagattgttatcgtttctgctccaggtaaaagacatgataatgatattaaaacaactgatttgttaatcagattatatgaaaaggtcattaatcatcttgattatcatgataaaaaaagagaaattattcagcgttatgatgatattgtaaaagaattgcaaatggatgaaagtattttacggacgatagatgtgactttggaacattatattaatcaattaaaaaatgaaccgaagagactattagatgcattactttcttgtggtgaagattttaatgcgcaattgatagctttatataataatagtcaaggtataccaacaaaatatatatcaccgaaggaagcgggtatttttgttactgacgtcccacaagaagcacaaatattagatagtgcttactctgaaattaaaaaattaagagattatgatgaaaaactaattatcccaggattttttggcgtatctcatgaaggatatatagttacatttccacgtggcggatcagatataactggcgccatcatatcaagtggtgttagagctacaatttatgaaaatttcaccgatgtgtctggtatttataaagctaatccaaatatcatcaaagatcctgaattaatcgaagaaatcacttatcgagaaatgcgtgaattatcttatgctggttttagtgttttccatgatgaagccttacaaccactttataaagatcgcatacctgtagttattaaaaatacgaaccgccctcaagataaaggtacatttatagtgcatgatagagaaataaatgcgaaaaatgtgattagcggtataagttgtgataaagattttactgttattaatatcaaaaagtatttaatgaatagacaagtcggctttactagaaagatattaggtgtcttagaggataataatatttcatttgatcatatgccttcaggtattgatactatcagtatcgttatgcgttcaaaacaaattcaaaataaagaaacaaaagtattaaatgaaattcgtcaaaaatgtgatgttgatgagctaagtattgagcatgatttagcaattttaatgattgtcggcgaaggtatgaataaagtcattggtactgcaaataaaattacacatgccttagctgaatcaaaaattaacttaaaaatgattaaccaaggtgcttcggaaatttcgatgatgtttggaattcatgtagatgatgctgaaaaagctgtattatctacatatgagttttgctatcacggggttgcattaaaaaacttgtgtgataaaaactaa

SEQ ID NO: 410856 - DNA, 171 bp, Staphylococcus aureus; identical to SEQ ID NO: 408472

SEQ ID NO: 410857 - DNA, 744 bp, Staphylococcus aureus; identical to SEQ ID NO: 408475

SEQ ID NO: 410858 - DNA, 642 bp, Staphylococcus aureus; identical to SEQ ID NO: 408522

SEQ ID NO: 410859 - DNA, 2181 bp, Staphylococcus aureus
ttggatagttcagcaaaaacattaacagaagataaacaggtttaccgtgtggagggtttctcgtgtgcgaattgtgctgggaagtttgaaaaaaatgtaaaacaactagctggagttcaggatgcaaaagtgaactttggcgcttccaaaattgatgtatatggaaatgcatcggttcaagagcttgaaaaagcaggtgctttcgagaatcttaaggtatttcccgaaaaactagcgaattcatcgatgcaagcggtcaaagaagacactaaggctcctaaagaagagaaaataccgttttataaaaaacacagcacattgctgtttgccacattactgattgcttttggttacctttctcactttgtaaatggagaagataaccttgtaacttccatgttatttgtaggttcgattgtaattggcggatattcactatttaaagttggttttcaaaatttgatacgctttgatttcgacatgaaaaccctgatgaccgtagcagttattggagctgccatcattggtgaatgggcagaggcatccattgttgtcgttctctttgcaatcagtgaagcacttgaacgtttttctatggatagagcaagacagtccattcgttcattgatggatattgccccaaaagaagcacttgttatgcggaatggtcaggaaataatgatccatgtggacgatattgccgtgggtgatattatgatcgtcaaaccaggggagaaaattgccatggatgggatcattataaatggtgtgtcggctgtcaaccaggctgctataacaggagaatctgtccctgttgccaaaacggtagatgatgaagtatttgcaggtacgcttaacgaagagggactacttgaagtaaaaatcaccaaatacgtagaggatacaactatctccaagattattcatctggttgaggaagcacaaggggagcgcgctccagcgcaagcattcgtagataaatttgcgaaatattatacgccgatcattatggttattgcggcgctcgttgcagtcgttccacctttattctttggtggaagttgggatacttgggtttatcaaggattagcggtacttgtagttggatgtccgtgtgcattagttatttctactccaatctcgattgtctcggcaattggaaatgcagctaaaaaaggtgtgttgattaaaggcggtgtctatctagaggaattaggagccattaaggcaatcgcatttgataaaacaggaacactgacaaaaggtgtaccagtggtaacagattttaaagtgttaaatgatcaagtggaagaaaaagagctgttttccattattacagctttagaatatcgatcacaacatccacttgcttcagcaataatgaagaaagcagagcaagataatattacttattccgatgttagagtggaggacttcacttctattacaggtcggggcattcaagggaatatagatggaacaacctattacattggcagtccaaggctttttaaagaattaaatgtttccgattttagccttgagtttgaaaataaagtgaaagttttacaaaaccaagggaaaacggccatgattattggaacggaccaaacaatcctcggcgtgattgctgtagcagatgaggtccgcgaaacaagtaaaaatgtgattcaaaaacttcatcagttaggaatcaagcaaacaattatggtgacaggtgataatcaaggtaccgcagaagcaatcggtgctcatgtaggcgtttctgatattcagtccgaattgatgccacaggataagttggactatattaaaaaaatgaaagccgagcatggtaatgtagctatgattggcgatggcgtcaatgatgctcctgcacttgctgcatccactgttggcattgcaatgggcggtgctggaacagatactgccatcgagacagctgatattgcattaatgggagatgatttaagtaagcttccatttgcagtaagacttagcaggaaaacgctaaatatcatcaaagcgaacatcacgtttgccatcggaattaagataattgccttactattggttattccaggctggctaaccctttggattgcgattctttccgatatgggagccactattttggtagcattaaatagtttgcgactgatgagagtgaaggataaatag

SEQ ID NO: 410860 - DNA, 399 bp, Staphylococcus aureus; identical to SEQ ID NO: 410135

SEQ ID NO: 410861 - DNA, 870 bp, Staphylococcus aureus
atgataattttaaaacgattattacaagataaaggtgcagtaattgctttaggcattattgtattatatgtctttttaggattagcagcaccacttgtgacattttatgatcctaaccatatcgatacagcaaacaaatttgctggcatgagttttcaacatctactaggtactgaccatttaggtagagatattttaactaggttaatttatgcgattagaccaagtttgttatatgtctttgttgcgctatttgtttctgtacttattggatctattttaggattcttatcaggatatttccaagggtttgttgacgccttaatcatgcgtgcgtgtgatgttatgttggcattcccaagttatgttgtaacgttagcattaattgcattgtttggtatgggtgccgaaaatattatcatggcatttattttgacgcgttgggcatggttctgtcgtgttatacgtacaagtgttatgcagtacactgcttctgaccatgtaagatttgctaaaacaatcggtatgaatgatatgaaaattattcacaaacatattatgccgttaacattagcagatattgctatcatctctagtagttcgatgtgttcaatgatcttgcaaatatctggcttttcatttttaggattaggtgtcaaagcgcctactgcagagtggggcatgatgcttaacgaagctagaaaagtgatgtttacacatcctgaaatgatgtttgcgccaggtattgccatagtgattatagtgatggcatttaacttcttatccgatgctttacaaattgctattgatccccgcatctcttctaaagataaacttcgttctgtgaaaaaaggagtggtgcaatcatga

SEQ ID NO: 410862 - DNA, 816 bp, Staphylococcus aureus
atgacattgttaacagttaaacatttgacgattacagatacctggacagatcaaccactcgtgagtgatgtgaattttacattaactaagggtgaaactttaggcgttattggagaaagtggtagcggtaaatcaatcacttgtaaatcgattattggtttgaatcccgaacgactcggggtgacaggtgaaattatctttgatggtacatcaatgttgtcattatctgaatcgcaattgaaaaagtaccgtggtaaagacattgcgatggtcatgcaacaaggtagtcgtgcctttgacccatcaactactgtcggtaaacaaatgtttgagactatgaaagtacatacgtcaatgtctacacaagaaattgaaaagacattgattgaatatatggattatttaagtttgaaagattctaaacgtatattaaaatcatacccttacatgttatcaggaggaatgttacagcgattgatgattgctttagcgttagctttgaaaccaaagttaatcattgctgatgagccgacaacggctttagatacaattacacaatatgatgtactggaagcatttatagatattaaaaaacactttgactgtgcgatgattttcatttcacatgatttaacggttattaacaagattgcagaccgtgttgttgtgatgaaaaatggtcagcttattgaacaagggacacgtgaatcagtcttgcatcatccagaacatgtttatacgaagtatttattatcaacgaagaagaagattaatgatcattttaaacatgtgatgaggggtgatgtacatgattaa

SEQ ID NO: 410863 - DNA, 258 bp, Staphylococcus aureus
atgattatcactagccctacagaagcgagaaaagatttttatcaattactaaaaaatgttaataataatcacgaaccaatttatattagtggtaataatgccgaaaataatgctgtgattataggtttagaagattggaaaagtatacaagagacaatgtatcttgtatctactggtacaatggacaaagtaagagaaagagaaaaagatagtagtggtacaacaaatatagatgatattgattgggataatctttaa

SEQ ID NO: 410864 - DNA, 693 bp, Staphylococcus aureus
atgaaattgattaaaatttatttaatattaataatactaattttatcatctatattcatatgtttgaactataattgcaagaaggaaaagactaaaattgcagttctagatacagggattaaaaagaaagctattaatagcaatgtaatatctcgtgatttcactttagataactatagaaatagcgtacacgctaataaaatttcaaagattatagagtatcgagctgatatagttatttatgatgctaaagttttgaaccgttatggcaacggaagagtggaggatactatttcagcacttgattgggcaattaaacatgatgtagacattataaatatgagttatggatttactaaaaattaccctgagttacataaaaagataaaagaggctcatggaaaaggtattattattgtagcagctaacggtaacgatatttttggaggtcaagaatttccagctgcatataatgaaactatatctgttggagtattgaataaggaaggttcaaaatctgtctttaattctaacgatgatgccgacgtatatatttcggttgataaaaaggtgtctaataacgttgaaaatacttctatggctacagcatctgtatctaataaattggttaaagtatgtaaaagagacttgaaaaacatggacaaaggtgaaatccttaagttaattaattag

SEQ ID NO: 410865 - DNA, 606 bp, Staphylococcus aureus
atggataatattattaattgtatgtcagtaagtgatttgaatttttctgaagttgaaaatacaatgcatttagatttaagtgaaggtgaatatccttttttagatgatggaaaaagctttaacaaaaattattttacaaagattcatagaaatgcaattcaaattttacaagatttatttcaacaaagtaagactattgatatagttctagtatattatttatatggaaattcatttaaaaaaactaggttcaaagaaaagtttagttatttcaataatgacgaaacgccgagttttaaagaatatattaacgatgaaggcatccagtgttatgtatttgcttttaaaaataagagtttgaaggatttaaattataaaaagttagcgagagcgatttgcaatcaagattttaaaggtttattcccgacgattaatcaaaaagataattacttagatatatatttaatggatagtgaaagaggcatattgtaccatttgtatgatgatagggggctttggctatattttataaataagcagtcatatacaaattactcccaaaaatacagtaacctcttgtttgatgtaagcgatgaaattgattaa

SEQ ID NO: 410866 - DNA, 750 bp, Staphylococcus aureus
atgaaaatttatttttcgaaattgtgtatatgtacaataataatatccttgattttatctggggttgggagttcaaatacagatgcatctaataaaattatcaaagaaaatatagaagtaaatgaaagcgttaaaaatacaaaaattagtgagaataaaattggcgaagtatcacgtctttctacatcaataaataataatgaaataaatttagatactgtattaactaatgattttaatgcaggagacattaatttatctggaaaaatctctaatgtagaagaatctaaacaagtagattatacaattgatttaacctatgcggatgaagaagacatagctggatttttaatagataattcaaccggtgaggagcatgaatttgatacaagattggctgaagcttctgctgcgcctttagtagtagtggcagtaatggctgcaaggtatggtattcaatgggctattaaaaagtatggtaaaaaagctgtgaataacgctataaaatcaaatacgcataaagtagcgaaaggaataaactctagacttctaactagtaaaggggtggatatcggaaagttcactcaaaaagtaaagggtaaaaacccagtctatagagatcctaaaactgggtggtcaatttcaaggaataaaggggagcctcatggaggatcgtattggaaattgttggataaaagtggtactagaaaagccactttaactaaagatggaaaaatacttcgtaaatag

SEQ ID NO: 410867 - DNA, 363 bp, Staphylococcus aureus
atgttaaatactatagttacatatttctttatctttatttttgttttttttcctattttctgtatattcttttttgtaattactttagttagagacttaacaagaaacttcaacaatttaaaagtaaaatatattgtctcaacccataataaaactggtaaaacaatacttgaattacgttactttatatgggaacttagaaagcgtaagtattttataaatctcataatgaactctgaagttatttatttagatggaaatatacaaattactagaggtgtgtactataaagacgtaccgccattaaataatttcaaaaacaaatcgttttttcttaagtctatacgaatttttgaaaaataa

SEQ ID NO: 410868 - DNA, 870 bp, Staphylococcus aureus
atgaatgaaattaaattagaatatgacacacatgtttcagtggtacattatgaaagtttagactcacgttcatttaagagcttttcaaaacctaaatggagtaagttaattaataaactgtctgtgcctatagaagcgaattataagtatgcacgtggtgttgctgtgtacggtgatattaaagacggtgcaaatgatcatggtgaaacaataaaaaagcatcgcaatgacgttaatgtcatatacagagatgtgattgtacttgattatgatgaaataaatgatttaaagcaattacatgaagcaatcagctcagttttaagcagtgttgcatggtattggcacacatcgtttagccatacaactgaacaagctagaatacgcctatatatccctctgaatgagcgaataagtgcagatgattatcgtaaatatacaaaagtattagcaaataaaattggccataaagtggatgaaggttcatatcagccaagtagatgttttgcgttaccagttattcaaaaaggacacatatttattaagcgagtgaatgactgtccaattatgaatgttgatatgctcgaacagtggtcgaacgaacttgaacaatcaaatgctagtcctaatgttatagggtacacgcgacgtgatagtgcgtactggcgtgagttaagctttggaacaaccgaaggcaatcgtaacaatgcactagctagcttagttgggcatttattaagatgtcgcgtcaatgattatattgtgtattcatatgctttattatgggggcaattcgcatgtaaaccacctatgaaagaacaagaaatcaacgccacttttcaatcgatattaaataaacactataacaattag

SEQ ID NO: 410869 - DNA, 3150 bp, Staphylococcus aureus
atgaataataaaaagacagcaacaaatagaaaaggcatgatatcaaatcgattaaacaaattttcgataagaaagtattctgtaggtactgcttcaattttagtagggacaacattgatttttgggttaagtggtcatgaagctaaagcggcagaacatacgaatggagaattaaatcaatcaaaaaatgaaacgacagctccaagtgagaataaaacaactgaaaaagttgatagtcgtcaactaaaagataatacgcaaactgcaactgcagatcagcctaaagtgacaatgagtgatagtgcaacagttaaagaaactagtagtaacatgcaatcaccacaaaacactacagctaatcaatctactacacaaactagcaatgtaacaacaaatgataaatcagcaactacatatagtaacgatactagtaaaagcaatttaacgcaggcaaaagacgtttcaactaagcctaaaacaacaactattaaaccaagaacattaaaccgtatggcagtgaatactgttgcagcaccacaacaaggtacaaatgttaatgataaagtacattttaagaatattgatattgcgattgataaaggacatgttaataaagatactggtaaaactgaattttgggcaacttcaagtgatgttttaaaattaaaagcaaattatacaatcgatgattctgttaaagagggcgatacatttacttttaaatatggtcaatatttccgtccaggatcagtaagattaccatcgaaaacacaaaatttatataatgctcaaggtaacattattgctaaaggtatttatgatagtgcaacaaattcaacaacatatacatttacaaactatgttgatcaatatacaaatattagtggtagtattgaacaagtttcatttgccaaacgtgaaaatgcaacaactgataaaactgcttataaaatggaagttacattaggaaacgactcttatagtaaagaagttattgtcgattatggtaataaaaaagcacaaccgcttatttcaagtacaaattatatcaacaatgaagatttgtcacgaaatatgactgcatatgtaaatcaacctaaaaatacatatactaaacaaacgtttgttactaatttaactggatataaatttaatccaaatgcaaaaaacttcaaaatatacgaagtgactaaccaaaatcagtttgtggatagtttcacaccagatacttcaaaacttacagatgttactgatcaattcgatattaattatagtaatgataataaaacagctacagtcgatttaatgaaaggccaaaaaagtagtaataaacaatacatcattcaacaagttgcttatccagataatagttcaacagataatgggaaaattgattatactttagacactgacaaaactaaatatagttggtcaaatagttattcaaatgtgaatggctcatcaactgcaaatggcgatcaaaaaaaatacaatcttggtgattatgtttgggaagatacaaataaagatggtaaacaagatgctaacgaaaagggtattaaaggcgtgtatgtcattcttaaagatagcaatggtaaagaattagatcgtacgacaacagatgaaaatggtaaatatcagttcacaggtttaagcaatggaacatatagtgtagaattttcaacaccagccggttatacaccaacaactgcaaatgcaggtacagatgacgcaatagattctgatggactaactacaacaggtgtcattaaagatgctgacaacatgacattagacagtggattctataaaacaccaaaatacagtttaggtgattatgtttggtatgacagtaataaagatggtaaacaagattcgactgaaaaaggaattaaaggtgttaaagttacattgcaaaatgaaaaaggcgaagtaattggtacaactgaaacagattcaaatggtaaatatcgttttgataatttagatagtggtaaatacaaagttatctttgaaaagcctgctggcttaactcaaacaggtacaaatacaactgaagatgataaagatgctgatggtggcgaagttgacgtaacaattacggatcatgatgatttcacactagataatggctactacgaagaagaaacatcagatagcgactcagattcagacagcgattcagattcagacagcgattcagattcagacagcgactcagactcagatagcgattcggactcagatagcgattcagactcagacagcgattcagattcagatagcgattcagattcagatagtgactcagactcagatagcgactcagattcagacagtgattcagactcagatagtgactcagactcagacagcgactcagattcagatagcgactcagactcagacagcgactcagattcagatagtgactcagactcagatagcgactcagattcagacagcgattcagattcagatagtgactcagactcagatagcgattcagattcagacagcgactcagattcagatagtgactcagactcagatagcgattcagattcagacagcgactcagactcagacagtgactcagactcagatagcgattcagattcagacagcgactcagattcagatagtgactcagactcagatagcgattcagattcagacagcgactcagattcagatagtgactcagactcagatagcgattcagattcagacagcgactcagactcagacagtgattcagattcagatagcgattcagattcagatagtgactcagactcagatagcgactcagactcagatagcgactcagactcagacagcgattcagattcagatagtgactcagactcagacagtgactcagactcagatagtgattccgactcagatagcgactcagattcagacagcgattcagacagtgactcagatagcgactcagatgcaggtaaacatataccggctaaaccaatgagtacggttaaagatcatcacaacaaagctaaagcattaccagaaacaggtagtgaaaataataattcaaataatggcacattattcggtggattatttgcggcattaggttcattattactattcggtcgtcgtaaaaaacaaaataaataa

SEQ ID NO: 410870 - DNA, 516 bp, Staphylococcus aureus
atgagagcaagcgtgatgctacatttgccaggtctatctattatgaaaagaatgacacggattgctcaaaccattaatcgttttggatatacaatcagaggtatttacggtgaaggttcgcaagtttatggacatacttatcaagtatccaaccaacttacacttggtaaatctgagttagaaatcatagaaacattaacagaagttgttaatcaaatcattcatgaagaaaaacaaatacgacaaaagttagacacttataatcaattagaaacacaagaccgtgtttttcgctcgctaggtattttacaaaactgtagaatgataactatggaagaggcttcttatagattaagcgaagttaaacttggtatagatttaaattacattgaattacaaaactttaaatttaatgaattgatggtagctatacagtcaccatttttattagatgaagaagatgacaaatctgtaaaagaaaaacgagcagatatactaagagaacatataaagtag

SEQ ID NO: 410871 - DNA, 393 bp, Staphylococcus aureus
atgatgacgcataatattcatgataatatcagccaatggatgaaaagtaatgaagaaacaccaattgttatgtcttctagaattcggttagcgcgtaatttagaaaatcatgtgcatccactaatgtatgctactgaaaatgatggatttagagttataaatgaggtacaagatgccttgccaaactttgaattaatgcgtcttgatcaaatggatcaacaaagtaaaatgaaaatggttgcaaagcatttgattagtcctgaactaataaaacaaccagcagccgcagtattagtgaatgacgatgaatctttaagtgtcatgataaatgaagaggaccatattcgtattcaagctatgggaactgacacgacattacaggcttcgatctaa

SEQ ID NO: 410872 - DNA, 255 bp, Staphylococcus aureus
atgaataaccgcgaacaaattgaacaatcaattatcagtgctagtgcgtataacggcaatgacacagagggattactaaaagagattgaagacgtgtataagaaagcgcaagcgtttgatgaaatacttgaaggtttacctaatgctatgcaagatgcactcaaagaagatattggtcttgatgaagcagtaggaattatgacggggcaagtggtctataaatatgaggaggagcaggaaaatgaagaaatttaa

SEQ ID NO: 410873 - DNA, 174 bp, Staphylococcus aureus; identical to SEQ ID NO: 408152

SEQ ID NO: 410874 - DNA, 165 bp, Staphylococcus aureus
atggcgaatataggtaagtcacgacaatatatcagtcgcgaaaaaacgccgaaatggttagaagaacgcacatatgaaaaaacaacacaaaatgagtatgatccacaattagagaaagaacgagaggcatttttaaaacaacttcaagttgattgggaagaatag

SEQ ID NO: 410875 - DNA, 174 bp, Staphylococcus aureus
atgattaaacaaatattaagactattattcttactagcgatgtatgagctaggtaagtatgtaacagagcaagtatatattatgatgacggctaatgatgatgtagaggcgccgagtgacttcgcaaagttgagcgatcagtctgatttgatgagggcggaggtgacagagtag

SEQ ID NO: 410876 - DNA, 249 bp, Staphylococcus aureus
atgaataatcgcgaaaaaatcgaacagtccgttattagtgctagtgcgtataacggtaatgacacagagggattactaaaagaggttgaagacgtgtataagaaagcgcaagcgtttgatgaaatacttgagggtttacctaatgctatgcaagatgcactcaaagaagatattgaacttgatgaagcagtagggattatgacgggtcaagttgtctataaatatgaggaggcacaggaaaatgactaa

SEQ ID NO: 410877 - DNA, 282 bp, Staphylococcus aureus
gtggttagattatatgaaaatggtaagcttaagaatgaaattatacgcgagtatgatttaaaaccctcaattttctcaaattcgataaaacaacaccaaaatactgaatccttcaatcatcaagataatttaaaaagtgatgaaaaagagttaataaaattacgcaaagaagttcaacatttaaaaatggaacatgtatctgctttaaatcatttacttcatcgtaataaaatacaatcacatatatatgatatttttataattgcagtactttttgattaa

SEQ ID NO: 410878 - DNA, 501 bp, Staphylococcus aureus
atgactttcgaagaaaaactaagtcaaatgtacaatgaaattgcaaataaaattagcagtatgataccggtagaatgggaaaaggtatatgcaatggcttatgtaaatgaaagaagtggagaagtgttctacaattatactgaaccaagaagtgatgaattagtttactatacgagcgtgttaaataaatataatatatcaagatcagaatttatggactcagtatatgaattatataagcaatttgataaactaagagatttatttaaagaagaaggacatgacccatggacatcatgtgaatttgactttacaagagacggcaaattgaatgtttcatttgattatattgattgggcgaattcagagtttggacaaatgggaagagaacattattacatgtataaaaaatttggaatttggcctgaaaaagaatatgccataaattgggttgaaaaaataaaaaattatgttaaagagcaagaagaaactaacctttag

SEQ ID NO: 410879 - DNA, 501 bp, Staphylococcus aureus
atgactttcgaagaaaaactaagtcaaatgtataacgaaattgcgaatgagattagtgggatgatacctgtagaatgggagcaagtatttacaatagcttatgtaactgatcaagctggagaagtcatttttaattatactaaaccaggtagtgatgaattaaattattattcagacatacctaaagattgcaatgtctcaaaagatatttttaagaattcatggtttaaagtttatcgaatgtttgatgagttaagagaaacttttaaagaagaagggcttgaaccatggacatcatgcgaattcgattttacaagagatggcaaattgaatgtatcttttgattatttagattggataaatacagagtttgatcaattgggccgtgaaaattattatatgtacaaaaaatttggggttataccagaaatggaatatgaaatggaagaaattaaagaaatcaagcaatatattaaagagcaagatgaagctgaactatag

SEQ ID NO: 410880 - DNA, 243 bp, Staphylococcus aureus
atgccagatttaatagaaatgatcgtttttaatgtttttacaaatcggcggggtcccaacatagaaggtgacgaaaagtcagcatacaataatgtacaagttggggaacggggccccaacacagaaggtgacgaaaagtcagcttacaataatgtgcaagttggggaacggggccccaacacagaaggtgacgaaaagtcagcttacaataatgtgcaagttggggaacggggcccaacatag

SEQ ID NO: 410881 - DNA, 600 bp, Staphylococcus aureus
atgaaagcaataattcttgcaggtggtcattcagtacgatttggtaagcccaaagcttttgcggaagtgaacggtgagaccttttatagtagagtaattaagacattagaatcaacaaatatgttcaatgaaattattattagtacaaatgcgcaattggcaacgcaatttaaatatccaaatgttgttatagatgatgagaatcataatgataaaggtccattagcaggaatttatacaatcatgaagcaacatcctgaagaagaattgttttttgtagtttctgttgatacaccaatgattactggtaaagctgtaagcacgttgtatcagtttttagtttctcatcttattgaaaatcatttagatgtcgcagcttttaaagaagatggacgttttattccaacaattgcattttatagtccgaatgcattaggcgctataactaaagcactacattctgataattacagttttaaaaatgtatatcatgaattatcaacggattatttggatgtcagggatgtagatgcgcccccatattggtacaaaaatataaattatcagcatgatttggacactttaattcaaaatttgtaa

SEQ ID NO: 410882 - DNA, 1632 bp, Staphylococcus aureus
gtgaaaaaattaacaacaatactgtttcaatataaaatttttccggtactcatgttcttggtcagtactggtctcggcatactcgttatagcgcaaaatattttaatagcagattttttagctaaaattataagacatcaatttcaaggtttatggattgtattatttattttattaggtgttttactcttaagagcaactgtgcaatttctaaatcaatggttaggtgatacattagcatttaaagttaagcatatgcttagacagcgggttatttataaaaataatggtcatccaatcggtgaacaaatgactatactcacagaaaacattgatggtctagcacctttttataagagttatttgcctcaagtgttcaaatcaatgatggttccgctcatcataatcattgcaatgtttttcatccatttcaataccgcattaattatgttaataactgcaccatttattcctttgttttatattattttcggtttgaaaacgcgagatgagtcaaaagatcaaatgacttatttgaatcaatttagtcaacgttttttaaatattgctaaaggtttagtgacgttaaagctatttaatcgtacagagcaaacagagaagcatatttacgacgatagtactcagtttagaactttaacaatgcgcattttacgcagtgcttttttatcgggattaatgctcgaatttataagtatgttaggtattggattggttgcattggaagcaacgctaaacttagtagtatttcataatattgattttaaaactgcggcaattgcgattattttagcgcctgaattttataatgcaattaaggacttaggacaagcattccatactggaaaacaaagtgaaggtgccagtgacgttgtgtttgagtttttagaacaaccgaacaataataatgaatttctattaaagtatgaggaaaatcaaaaaccatttattcagttaacagacatatcatttcgatatgatgattctgatagattggtattaaatgatttaaatttggaaatatttaaaggtgatcaaattgcacttgtaggtccaagcggggcaggtaaatcaactttgacacatcttattgcaggtgtttatcagccaacaataggtactataagtataaaccagcgtgatttaaatataggaatacttagtcaacagccatatattttcagtgcttctataaaagagaatattacgatgtttaaagatatagaaaataatactgttgaagaagtgctagacgaagtaggtttattagacaaagttcaatctttcacacaaggcattaatacaataataggtgaaggaggcgaaatgttatctggtggacagatgagacgcatagaactttgccgtcttttagttatgaagccagatctcgttatatttgatgagcctgcaactggtttagatattcaaacagaacacatgattcagaacgttctgtttcaacattttaaagatacaacgatgattgtcattgcacatagagataatacaattcgccatttacaacgacgtttgtatatagaaaatggaagactgattgctgatgatcgcaatatttcagtaaatataacagaaaatggtgatgacttatga

SEQ ID NO: 410883 - DNA, 909 bp, Staphylococcus aureus
atggaacaaataatgattaatcactatgttcatttttctaggcttgtacaaggtttttggcgtgcaaatgaatggaagatgactgcgaaagagttaaattattttataaatgaattagttgaacgtgggattacaacgatggatcatgctgatatttatggggattatcaatgtgaatcactgtttggtaatgctttggatttatcacccgaattaagaaataaaattcaaattgttacgaaatgtggtatcatattgccttctaagcaatttgattttacaaatggacatcgttatgatttgagtagtaagcacatcgtgaaatctgttgaacagtcattaatcaatttgaatgtagattatttagatagtctactcattcatcgtccttcaccattgatggatccagaaaaagttgctgatgcattaactaaacttgttaaacaaggtaagttgaagtcattcggggtgtcgaattttaatcattcacaataccaattgttaaatcaatatattatgaaagaaagactacatattagcatcaatcaattagaattatcgccatatcacgttgatagtttacaagatggaacaatggattcaatgtatcaaaaccatgttcaaattatggcttggagtccttttgcaggcggtaaaattttcgacaaggaagatattaaagcgcaacgtattatgaaagttattcaatcaatagctgacaaatatggtgtgagtgacacagctgtgatgatagcatggttagtaaaaataccgcatcgtatcatgccgatacttggaacaagtcagttaaagcgtattgatcaagcaatcgaagggctgcaacttaatttagatgatcagtcgtggtttgacatttacaccgctattatcggacaagatattccataa

SEQ ID NO: 410884 - DNA, 684 bp, Staphylococcus aureus; identical to SEQ ID NO: 407672

SEQ ID NO: 410885 - DNA, 1296 bp, Staphylococcus aureus
atgtcttttcttaggaaacacgccgaaattatttttagctatttaatcggtatcgtttcactcttcactggtctcattattttaattaacttgcctttaattaaacaattaaatggtggtaaaaaagttgatacacatgttcataatgtgtgggaatttctgaatgcatttttcagtgaaattattaaagtaatgagtcgatttataggtaatttccctatagttagtgcaattgtgataattatattcggtattttagttatgttgattggtcatacattacttagaactattaagtatgactatgatatttctatctttttcttagttatcggtatcatgtactttattattacacttatattaatgacgcaagtttatggattctttgcagtgattttcattattccatttacaattcatataggatatatcgtctataaagatgaattgaatcaggaaaatgttaaaaatcattacatgtggattattgtaagttatggtataagttatttaattacacaaattgcattgtatggcagaattgatgctaatgaaatagaatcaattgatatcttaagtgtcaatgctttctttataattatgtggttacttggtcaaatggctatttggaatttcttgttcttgcgccgagctttacctttaacaaagcaagaattaggtgaagaggagccagaattatcaagaacaagtaaagggaatgtcacgaatcaaactaaaattcacttgaagcaactccaagataagactacagaatatgcacgtaagacaagaagaagtgtcgatttagataaaattagagctaaaagagataaattcaaaaagaaagttaatgatattatcgatattcaagaggacgatattcctgattggatgagaaaaccgaaatgggttaaaccgatgtatgtcgaactattttgtggtgtcgtcatctttttattcacatttttagaatttaataatcgtaatgcattatttgtatctggtgattggaaattatcacagacacaatatgttattgaatgggttacattactaattctgctagtcattattatcgcatatatcgctacaacgttaactttccacttaaaaggtaagttttattatttacaactatttatggggagcattttattctttaaattgttaacggaatttataaatataatgattcatggacttctactttcagtgttcattacgccaacattactattaatgttattggcaatcatcatttcttattcgttacaattacgagagcgaccataa

SEQ ID NO: 410886 - DNA, 603 bp, Staphylococcus aureus
atgaataaaatctcgaaggctttaacttggtttattataagtttcattatatttcatctcatattatttattatgtggggcgaacaccaagaatactggtatttatatacaggtataatgctaattgctggtatcagttatgtattttatcaaagagatattgaatctaagcggttgcttacatcaattggtgttggtattattacggcaattattttaattatacttcaacttttattctcacttataacttctaatttaagttatagttcattaattaaagaattagcaagaacaggtgtcaattggaagtggcaaatgttagtaactttactttttgtcattccatgtcacgagttatatatgagaactgttttacaaaaagaattaacacatttttcaataccgaaatgggtagctatattaataactgcaatttgttctagttcattatttatttatttagataattggtggatagtaacatttatatttgttgcacaagtgatattatcattaagttatgagtatactcgacgcatagcaacaacatccgttgcgcaaattgttgctattatattgttattaatttttaatgcttaa

SEQ ID NO: 410887 - DNA, 1359 bp, Staphylococcus aureus
gtgtcaatttttagccagtttttaaaaagatcaagccctcaacaaggtattgtattgtactatatcgtcgcaattgtcgttgcatttttattattaaacttaccgtatgttcataaaccaggtgtagaagtaaatccaattgacacattgtttgttgccgtatccggaattagtgttactggattgtctccgataagtattgtcgatacctattctacatttggacaattaattatcctcgtgatattaaatattggtggaattggcgtcatggcaattggtacgatgttatgggtggtactaggtaaacatattggaattagagaacgtcagttaattatgttagataataacaaaaacacaatgagtggtaccgtcaaattgattattgatattgtaaaatcaatatttgtaatcgaactcgtaggagccatgttattagcattttacttttatcgagataatccagatttaaaatatgcaatcatgcaaggtgtttttgtttctatttctgccactaccaatggtggattagatattacaggtaagtcattaattccttatgcacatgattattttgtacaagcgatagttatatttttaataattttaggatcaatcggcttcccagtgttattagaagttaaagcttatattcaaaatagggttactaattttagattttcattatttactaaaattacgacatcaacatatttattcctatttattgttggggtattagccattctattatttgaacataaccatgcgttcaaaggattaagttggcatcaatcgttattctattcgctgtttcaatcagcgactacaagaagtgcgggtcttcaaacaattgatgtgacaacactaagtgaccctacgaatattatcatgggtattttaatgtttataggttcttcgccaagttcggttggtggcggtattcgtacaacaactttcgctattttaattttgtttttaattaactttagtaataatgccgataaaacatccattaaagtttacaatagagaagtacacattatggatattcaacgttcatttgcagtatttacaatggcgacaattttaacatttttaggaatgctaattatatcagctactgaaaatggtaagcttacatttttacaagtattttttgaagtcatgtctgcatttggaacttgtggactatcgcttggtgtcacaagtgatattagtgatatttccaaggtcgtactaatggtactcatgtttataggacgtgttggcttaatatcatttatcattatgatagcaggacgtcgagaaccagataaattccattatccaaaagaacgtattcaaataggataa

SEQ ID NO: 410888 - DNA, 2310 bp, Staphylococcus aureus
gtggatattggtaaaaaacatgtaattcctaaaagtcagtaccgacgtaaacgtcgtgaattcttccacaacgaagacagagaagaaaatttaaatcaacatcaagataaacaaaatatagataatacaacatcaaaaaaagcagataagcaaatacataaagattcaattgataagcacgaacgatttaaaaatagtttatcatcgcatttagaacagagaaaccgtgatgttaatgagaataaagctgaagaaagtaaaagtaatcagggtagtaagtcaacatataatagagatcattatttaacagacgatgtatctaaaaaacaaaattcattagattcagtggaccaagatacagagaaatcaaaatattatgagcaaaattctgaagcgactttatcaactaaatcaaccgataaagtagaatcaactgacatgagaaagctaagttcagataaaaacaaagttggtcatgaagagcaacatgtactttccaaaccttcagaacatgataaagagactagaattgattttgagtcttcaagaactgattcagacagctcgatgcagacagagaaaataaaaaaagacagttcagatggaaataaaagtagtaatctgaaatctgaagtaatatcagacaaatcaaattcagtaccaatattgtcggaatctgatgatgaagtaaataatcagaagccattaactttgccggaagaacagaaattgaaaagacagcaaagtcaaaatgagcaaacaaaaacctatacatatggtgatagcgaacaaaatgacaagtctaatcatgaaaatgatttaagtcatcatacaccatcgataagtgatgataaagataacgttatgagagaagatcatattgttgacgataatcctgataatgatatcaatacaccatcattatcaaaaacagatgacgatcgaaaacttgatgaaaaaaatcatgttgaagataaacataaacaaaatgcagactcgtctgaaacggtgggatatcaaagtcagtcaagtgcatctcatcgtagcactgaaaaaagaaatattgctactaatgacaatgataaattaaatggtcaaaaaccaaatacaaagacatcggcaaataataatcaaaaaaaagctacatcaaaattgaacaaagggcgcgctacaaataataattatagtgacattttgaaaaagttttggatgatgtattggcctaaattagttattctaatgggtattattattctaattgttattttgaatgccatttttaataatgtgaacaaaaatgatcgcatgaatgataataatgatacagatgctcaaaaatatacgacaacgatgaaaaatgccaataatacagttaaatcggtcgttacagttgaaaatgaaacatcaaaagattcatcattacctaaagataaagcatctcaagacgaagtaggatcaggtgttgtatataaaaaatctggagatacgttatacattgttacgaatgcacacgttgtcggtgataaagaaaatcaaaaaataactttctcgaataataaaagtgttgttgggaaagtgcttggaaaagataaatggtcagatttagctgttgttaaagcgacttcttcagacagttcagtgaaagagatagctattggagattcaaataatttagtgttaggagagccaatattagtcgtaggtaatccacttggtgtagactttaaaggcactgtgacagaaggtattatttcaggtctgaacagaaatgttcctattgatttcgataaagataataaatatgatatgttgatgaaagctttccaaattgatgcatcagtaaatccaggtaactcgggtggtgctgtcgtcaatagagaaggaaaattaattggtgtagttgtagctaaaattagtatgccaaacgttgaaaatatgtcatttgcaatacctgttaatgaagtacaaaagattgtaaaagatttagaaacaaaaggtaaaattgactatccggatgtaggtgttaaaatgaagaatattgccaatctaaatagttttgaaagacaagcagttaaattgccaggaaaagttaagaatggtgttgttgtagatcaagttgacaacaatggtttagcagatcgatctggtctgaaaaaaggtgatgtaattactgaattagatggcaaacttttagaagatgatttacgctttaggcagattatatttagtcataaagatgacttgaaatcaattacagcgaagatttatagagatggtaaagagaaagaaattaatattaaactaaaataa

SEQ ID NO: 410889 - DNA, 585 bp, Staphylococcus aureus
ttgttggctaaaacgttatatttaatgcgccacggacaaactttgtttaattttaagggactaattcagggatttggagattcgccgctaacagaacttggaatcgctcaagctcaaaaggcacgtagctattatgaaactaaggggataaacttcgatttatatgcatcatcaacgcaagaacgcgcaagtgacacacttgaaaatgttgcacctaaccaatcgtatcaacgttttaagggactgaaggaatggcattttggattatttgaaggtgagtcagtctatctatttgataatctatacaagcctgaggacttattcggagatcgaattgttccttttaaaggagaggcaaggcaacaagttgaagatcgcattgtgaaaactttacatgacattatgtctcaaacaaagaacaatgcattagtcgtgagtcatggaacaataatgggagtatttttaagatattgccttaaactagatgaagcattaaagcataatatcggtaattgtaatatactgaaatttgaatatgacaatggaacatttaaatttgttgagttaattgatccaaatttataa

SEQ ID NO: 410890 - DNA, 618 bp, Staphylococcus aureus
atggtaaccgcaattattcatggatttatcttagcgattggtctaattttacctttaggtgcacaaaatgtatttatttttaaccaaggagctaatcaaccaaaatatagatatgtattgcctgcaataattacagccgggttgtcagacagcttacttattattattgcagtggtaggagtatctatcattattatgtctttacctgtacttcaagcaattatttatatagttggtttaattttcttgatgtatatggcttggaccatttggcatgataaaccctcaacagatggagaagctcaaattatatctccaatgaaacaagtaagttttgctttatcggtttcattactcaatccacatgctattttagatacaattggtgtaattggtagtagtgctgcattatatagtggcagcaataaaattgcgtttacaatcgcttgtattagcgtttcatggttatggttctttttactcgcaattttaggaaaaatgattggatcaattgataaaaccggaaaattattaacaataatcaataaaatatcaagcataataattattattgttgctctgatgatattacaaaaacttattcaattattattctaa

SEQ ID NO: 410891 - DNA, 171 bp, Staphylococcus aureus
atggaaggattgcaaaatcgtttaaacaaaattttagaagctatcaatggcatgcccaaatatgaatgggacagaattgtgcaagaagttgaaagagtgtacagccataagaccgtcaaggtggagcttgacagtcatagctgtgaagtaattaagaaattacttggttaa

SEQ ID NO: 410892 - DNA, 210 bp, Staphylococcus aureus
atgtctaaacatatttacgcttgtttacttggtgaatgggtaaatctgtcagaatctgagaatgtagtaatcgataatagttatactgatgctaatttgtggtacaaagaagtaggtcataaaatgttcgattacaatcaaatgcacattggatacaacggcattgactacttcattcatccaagcttcatccaagttttaaccaagtaa

SEQ ID NO: 410893 - DNA, 222 bp, Staphylococcus aureus
atgataaaaaatagtttgcaagctaaagaacttgcggtaattttatctgtttctaaatccaaagcgggacaaataataagagaactgaataaagaacttgaagacgaagggtacattgcgatacgaggcagaatacccgtccaattagctaggaaaaaattcccttatcacggcttgtcagacgagagaataatggaggcgttgaaaaaagaaaatgagtaa

SEQ ID NO: 410894 - DNA, 195 bp, Staphylococcus aureus
atgaatgaaaatttagaaaaatatataaaaagtttgccacttttaggtttgttaattagtattttgttaattgttttattcttttttattttagatgttgatgaagatttattcgtggtttttttatactgtttattgcctttgatagttaatttgtctatttatggtttttatgtttttgttaaaagaaagtaa

SEQ ID NO: 410895 - DNA, 693 bp, Staphylococcus aureus
atgaaaattataaaattattttcaataatttccttgttcctactggtatttagcgcgaatttttctaatgcttacgcaaatgaagaacaaaaaagttctttactagaaaatcaaaaagaaaaattgaaaagcaaaaacatcgaagtatcacaaatgaccaagaaagaaataagttttctagaacaattgcaaaataaaaatgaagatatgcaaaaattcgaaaagcaaatgaaaaaagaaggatttaaaaaaataaagctagaagacaaaaattctaaattaaaatatctagctacagaagcaaatgataaaaatgcatatggctacatagctaataacgcttataaaaatgaaaaaacaaaagaaattgtagtttctgaaacaatatatgataactacaacaaaaaaatcacaaaattcattgccgaaaaaagaagtatgactgaaaacaaagagggaaaaatacttattaacaaaaattacgttgaatataaggctgaaaaagttgataaaaacagaccggtaacatatgcaggattcaaatggaacggcaaagcattcgcttgtagtatggctggactttatgcatgtgctcactactgtggagtatgggcaatcgtaaatccaatagccggcggtgtatgtgaagcagtttgcggaactgcatttgcagctggatgctctgtaggttga

SEQ ID NO: 410896 - DNA, 435 bp, Staphylococcus aureus
atgaatgacttgaatgatataaagtacaaaaatgaaattagtaatcattcaaatcattcaaatcaatttacacataattttgatgataaagaaatgctattgcaagaattcccagaacaactaactaattatttattaaaatatgattatagagatttagaaatcataaaggctgttattcttaaagcaaaaaaatcatttaattcaaggcatgaagatatgcattacatgttagaggacattgaggatgaaatattaacttctttaaaaagacttaaaaaagctatacatgataggggagttaaaggccaaaaggaaacaatcaagtcaatgcaagcttatttaatgcaaacaattctaactgaacttgaagaaacacatgccctttatatgcgccgtaaaaacatgaaacaatataatatctttaatcaataa

SEQ ID NO: 410897 - DNA, 873 bp, Staphylococcus aureus
atgcctgaattaccagaagtagaacatgtaaaaagaggaatagaaccctacgttataaatcaaaaaattgaacacgttatattttcggataaagtaatcgaaggtaaaactcaaggcaaggaaacaattataaaaggaattgaactagatacttttaaaactttatcggaaggctataccattactaatgtagaacgaagaagtaaatatatcgtttttcagctagataataaacgagaacaacgtacattaattagccatttaggtatggcgggggggtttttcattgtagacgaacttgaagatattatgatacctaattatcgtaagcattggcatgttatttttgagctgtcaaatgacaaaaagttaatttattcagatatacgtcgttttggagaaatgagaaatgttgcgtctgtagcatcttatccttcatttttagaaatagcgcctgaaccttttacaaatgaagcattgacgtattatttaaatcgaattcatcaacagtctaataagaataaaccaatcaaacaagtgattttggatcataaagtaattgcaggttgcggaaatatttacgcatgtgaagcgttgtttcgtgcaggtgttttaccagataaaaaagtaaaagacttaacacaccaacaacaagaaatggttttttattatgttagagaagtactagaagaaggtattaagcatggcggtacaagtatttcagattatcgtcatgctgatggaaaaactggtgagatgcaattgcatcttaatgtatataagcagccggtatgcaaagtgtgtggaagtcaaattgaaacaaaaatcatcgcgacaagaaatagtcattattgtccagtatgtcaaaaataa

SEQ ID NO: 410898 - DNA, 684 bp, Staphylococcus aureus
atggataagaaaaaagtcatcaaatttatgattaatgtattaccaattgtattggtaccgttaattgttgaacgtaaacgtatcaaacaacatccggacgtacaaaaagttacagatgctacaagtaaagttgcttcaaaaacatctgcagcaatcagtaacacagcgagtgatgttaaagaatatgtcggcgataaaaaacaagattttgaaaataagcgtgaacttaaaaagtttgctagagaacatgatcctgcctatattgagaaaaaaggcgaaaaattagctaaacaaaatcgtaaagacgctgataaaatgaataaaatacttcaaaaaaatatcgaaaagcgtcataaagaagagcaaaaagcccgcgaaaagaatgaaatacaacgtattaaagatatgaaaaaaacacaaaaatacgaagaaaaagcaggcttaacacctaataaattagatgagaaaactgagaaaaaaggcgataaactagctgaaaaaaatcgcaaagaaatcgctaaaatgaataaaaagttacaaaaaaatattgaaaaacgacacaaagaagaacaaaaacgccaacaagaagctgataaagcacgcatcaagtcatttaaaaaatataaagattatgttgccaaaagcgcctctcaacaaaataaagaaaacaatacagaggcataa

SEQ ID NO: 410899 - DNA, 288 bp, Staphylococcus aureus; identical to SEQ ID NO: 404919

SEQ ID NO: 410900 - DNA, 327 bp, Staphylococcus aureus; identical to SEQ ID NO: 408747

SEQ ID NO: 410901 - DNA, 786 bp, Staphylococcus aureus
atgattcattcaaagaaattaacgctcggtatatgtttggtattactcattatattgattggaggttgtgtcattatgacaaaaacaaatggtcgaaacgctcaaattaaagaaaatttcaacaaaacattaagtgtatatccaaccaagaatctcgatgatttttacgataaggaaggttttcgagatcaagaatttgataaaagagataaagggacttggattatttattctgaaatggttatcgaaccaaaagggaaaaatatggaatcgagaggaatggtgctctatatcaatcgcaatactagaacaacgaagggtaattttattgtcaccgaaataactgaagatagtaaaggatattcacgtagtaaagaaaaaaaatatcctgtcaagatggaaaataatcgaattattccaacaaagcctataccggatgacaagttaaaaaaagagattgaaaactttaagttctttgtacaatatggaaattttaaagattttaaagattataaaaatggtgatatttcatataatcctaatgtgccaagttattctgcaaagtatcaattgaataatgatgactataatgttcaacagttaagaaaacgatatcatattccaaccaaacaagcgcccgaattaaaattgaaaggatccggcaatttaaaaggctcatccgtaggatctaaggatctagaatttacgtttgtagaaaatcaagaagagaatatctatttttcagattcggtcgaatttacacctagcgaggatgataaatcatga

SEQ ID NO: 410902 - DNA, 996 bp, Staphylococcus aureus
atgagcaatcaatttaaaagcgaagaagagcgaagacaatgggaacaattccaagctttccaaaatcaacaaaaccaacagtaccagcaatacggacaaaagaaatctaaaaaaggatggttctggggctgtggtggttgtctagtattatttattttaattatcatcggtatttcagcttgtacagctggtattacaggtaaccttggcggaaatagttctaaagaaacgaacaaaacccataaaattggagagactgtaaaaaatggtgatcttgaagtcacagttaattcagttgaaactatgaaatcagttggtccatctatcgcgccaacaaatgctaaaggtacatttgtcgttgctgatgtgacgattaaaaacaaaggtaaagaagcgttaacaattgatagttcaatgtttaagctaaaatccggtgataaaacatttgaagcagataatacaggttcaatgtctgctaatcaaaatgacaatggtagtatagaaaattcatttttcttacagcgtataaatccagatagcactgctcaaggtaaaattgttttcgatgtgtcagaaaacatagccaacgcaaaagataaaaaattagaagttatttctagtttatttagcgtcaagaagattacatttgatttatccgatgctaaaaaaacatcaaaagctaaaaaagacaagcaagatacagaagtagctgttacgagttcaaatagcgataatgtaaattatgaagcttcggctactacacctgctacaacttctagtgcggatactgattctgaagatagcgaaaagtctagtaaagatgaggataagcagaatgcgtctaaaagtgataaatctagtgtagaaaaaagtgaatctaatgaggaaactgctcctgtagagcccatgccccatagcaaacctaccactagtgaagcaccacctagtcaaaatattcacaatgaaaatagtatgtacgacgcttcaacagaataa

SEQ ID NO: 410903 - DNA, 816 bp, Staphylococcus aureus
atgtcaaagcgtctattattgtttgattttgatgaaacatattttaaacataatacaaatgaagaagatttaagtcatttaagagaaatggaaaaattgttggaaaaactaactaataataatgaagtgatgactgctgtgttgacaggaagtacatttcaaagtgtcatggataaaatggatcaagttaatatgacgtttaaaccattacatatcttttctgatttgagttctaaaatgttcacttggaataatggcgaatatgttgaatcagaaacatataaaaagaaagtcttgagcgaaccatttttatttgaagatattgaggatatattacgtcatatttctgcgcaatataatgtcgaatttattccacaaagagcatttgaaggtaatgaaacacattataatttttattttcattcaataggtaatcacaacaaagataggcgtatcctagaatcacttgtcagatacgcaaatgatcaaaactatacagcgagatttagtcgaagcaatccattagctggtgatcctgaaaatgcgtatgatattgacttcacaccgtcaaatgctggaaaactatatgctactcaatttctgatgaagaaatataatataccagtaaaatcaatattaggttttggagatagtggcaatgacgaagcatatttaagctatcttgaacatgcatatttgatgtcgaatagtagagatgaagcattaaagcagaaatttagattaacaaaatatccatattatcaagggataacactgcatgttaaagaatttgttgaaggtaagtatgattattga

SEQ ID NO: 410904 - DNA, 1518 bp, Staphylococcus aureus
atgactacttatatgttaatgtattcaataccagaaaaagcaggtggtataacatcagttatgttaaatagatctaaacttttagctgaaaaaggctattcatgtgccttattaactttggatgacaaaaactatgatccattaagagctaagctaacaaattcaggacggttacataaagaagtaaaaattgttaacttatacgaagaattgaagatgctgtatgatgttgaaaatacagaaatcgaaaataaaaatatgcaaacatttgaaaaattaaatcttttaaatcaagaaggcttttatattcaaaaagacgaatatgaagaaaaaaagtatgccaggtactttaaagataacaattacataatgtataaaaaatggataaatggtcaattatcacacattgattattttcaaaatcgaaaacgcattaaaaggcatgtttttcaaaataaaatacttcgaaaagaaataactttcaacgataaaaataaaatgagtgaagttaaatatttatcaaatgacggcttttgttatttatcatattggtatggggataacgaaaatatagtcaatatattttattttgataaaaatagtaaagaagtattaaactttaaaaacaataaaatgttccactcatattggttggataaaaacttaacttcaaacgatgtattaatactagacggtataggcacttatcctaaagtagagaacatgcagaataatgatgtcaaaaaaatatttactatacatacgaatcatttcttgtccccttactcttatggcgctgagattaaaccagagttcagaaacatgttactaaaccttaaagagttagatactttagttgtattaactaaagaacaaaaagatgatattataaaacaatttggtgattacaataatataaaggttattcctaatgctgtatcttttgaagagaatttaacacaaaatattcgagaaaaaaattctattattgtattacaaagatttgtagctatgaaaaatatcacacatatcatttccgctataaatattgtaagaaaaaaagtaaaggatgttaagttgcacatatacggtaccggtacgcaaaaagaaaattacacaaaacttattaaaaaacttaaattgcaagataatgtgttcatccatgattacgcatttgacatacgtggtctttatacaaaagcctctctaagtgtactgacatcagattatgaaggtctccctatgagtttactagaggccatgagttacggtgttccagtaatttcatatcctattaattatggccctaaatctataatccaaaataatataaatggaataataacaaaaaagaaggataatattaatgaattggcaaaaaaaataattcatgtattaaaaaaagaaacattgatatctcagttttctgaaaatgccagaacaacaataaaaacaaacttttcttacgaagcggtatccaaaaaatggattgaattaatcgatgaaaaaagcaaatag

SEQ ID NO: 410905 - DNA, 735 bp, Staphylococcus aureus; identical to SEQ ID NO: 407375

SEQ ID NO: 410906 - DNA, 735 bp, Staphylococcus aureus; identical to SEQ ID NO: 407375

SEQ ID NO: 410907 - DNA, 219 bp, Staphylococcus aureus; identical to SEQ ID NO: 407417

SEQ ID NO: 410908 - DNA, 477 bp, Staphylococcus aureus; identical to SEQ ID NO: 407374

SEQ ID NO: 410909 - DNA, 207 bp, Staphylococcus aureus
atgtcacaagaaattttaaatgttgaaggtatgagctgtggtcactgcaaaagtgctgttgaatctgcattaaataatattgacggtgtcacttcagctgaagttaaccttgaaaatggtcaagtaagtgttcaatatgatgacagtaaagttgctgtatctcaaatgaaagacgcaattgaagatcaaggttacgatgtcgtttaa

SEQ ID NO: 410910 - DNA, 708 bp, Staphylococcus aureus
atgttgaacgaagttaaggatataacagaagatgatatagatacttcattaagaattttagatttttcattttacaacgcaggaattgaaaaaatctatggaagtcccattatagaatgtaatgaaagaatgataagactaagcgatgcatttactaatgctctaagtaatcaaacatttaaaatatttttagaagatcttattgaattatcaaagtataacaatgaaaaataccaaaaaggtaaaaatggactgattttatataataaatattcaagagaagattttagcaaaatatttaattggaataaaaatggttcgtctgtaatcatgggatacatgataagaagccaagaaatgccaatatttatcacttatgataagcatgaggatataagtgatagtacaaaatatgaagatgaatttttaagtcaagatgaattaaaatggtttactaaatctaatagaacgctaaaatcaaaagaagttcagaaaattttgtcccatagagcaaaaggaattaaaatgtatatttttgtacagaaaaaagatgatgatggtatatatttttattatttaggaactgctggatatatagaaggttcagagaagcaagataaaatgccgaatggttcaaacgtagtaacgatggatttagcactcgataaagctgtaagagatgatatatatcgctatataacaaattaa

SEQ ID NO: 410911 - DNA, 798 bp, Staphylococcus aureus
atgatgattcattcaagaaagttgaggctttggctgtatttagtattattagctgtttttataggcgcttgcggaatgaaaaaggaagaaagcagtaaggataaacaaattaaagaaaacttcaacaaaacgttgagcttatatccaactaaaaatcttgaagacttttatgataaagaaggttttcgagatgaagagtttgaaaaaggagataaagggacttggataattcactctaaaatgacaatagaaacaaatggaaagaatatggaatccagaggcttggtcctgtatgtagaccgcaataccagaacgacaaaaggtgaatttattgtgagagaattatgggaagataaaaaaggatactcacgtagtaaagaaaaagaatatccagtgaaaatggaacataataaaattatcccaactaaaccgatagctgatgataaattaagaaaagaaattgaagactttaagttttttgtacaatacggtgactttaaagatattaatgattataaagatggtgacatttcatataatcctaatgttccaagttattccgcaaaatatcaattgaaaaacgatgactacaatgtgaagcaacttcgaaaaagatataatattccaaccaacaaagctccgaaattattaataaaaggtgatggtgatttaaaaggctcatctgtagggtcaaaaaatctagaatttacctttgtagaaaataaagaagagaacatttattttacagattctgtacaatatacttcaagtgaggatacaagttatgagtcaaactga

SEQ ID NO: 410912 - DNA, 816 bp, Staphylococcus aureus
atgatggagtatataaaaaaaattgctttgtacatgagtgtattacttttaatcatttttattgggggatgtggaaatatgaaagaagaacagaaaaaagaagcaaatacaaataaaacagattcaaaagaagaaaaaatcaaaaagagttttgcgaaaacgttagatatgtatccaattaagaatctcgaggaactatatgacaaagaaggctatcgagatggcgaatttgaaaaaggtgacaaagggatgtggacgatatatacagatttcgccaaaagtaataaaccgggtgaactaagtaatgaaggcatggtcttgtacttagatagaaacacacgcacagctaaggggtactactttgtcaggacgttttatcgcaaggataaattacctgatagaaaaaattataaagttgaaatgaaaaataataaaattatcttattagacaaggtagaagatccaaatctaaaaaagagaatagaaaactttaaatttttcggacaatatgcaaatcttaaagaattgaaaaactacagcaatggtgatgtctcaattaatgagaatgttccaagttatgacgcaaaatttaaaatgagcaataaagatgaaaatgttaagcaattaagaagtcgttataatattcctactgataaatcaccggtattaaaaatgcatattgatggtaatttgaaaggaagttccgttggagataggaagttagaaattgatttttcgaaacgtgaaaatagccatttatcagtaatagattctttggattaccagccagcgaaggtggatgaagatgaaagataa

SEQ ID NO: 410913 - DNA, 1953 bp, Staphylococcus aureus
atgaaaattgtagctattacctcatgcccaaatggcattgcacatacatatatggctcaagaaaagcttgagcaggtagcaaaagaaatgggtgtggatattaaagtagagacacagggcggtgttggtgctgaaaatgttttaactacgcaagacatcgaagaagctgacggtgtcataattgcagctgataaacaagttgatctatcccgatttgttggtaaacggttgattaatgaaaatgttcgcgaagggattcataatccgagaggtctaattcaacgtatcattaatcaagatgcgcctatttatcaatctgaaacaaattatcattcgaaagatcgcggtaagtctaaaagtggtattcaaatggtgtatcaacatttaatgaacggtgtatcgtttatggttccttttatcgtagttggtggactccttatcgccatcgcgctgactctaggcggtgaaacgacatcaaaaggattagtcatcccagatgattcattttggaaatccattgaaaacattggtagtttagcctttaaatttatggttccaatactagctggatatatcgctgttagtatcgctgacaagcccggtcttgttcctggtatgattggcggcgctatcgctgctgacggtagtttttatggcagtgatgcaggcgcaggatttttaggtggtattgttgctggtttcttagcaggttatatcgcaaagtggattaaagatattaaagttccaaaagcaatggcaccaattatgcctatcattattattcccattatttcatcggtcgttgtaggattgatatttatatttttaatcggtgcaccaatttctaatatttttgaggcattaacaacctggttaaaaagtatgcaaggtgctaatattattatacttgcgatgattataggtgcgatgatcgccttcgatatgggcggtccagtaaacaaggtagcatttttatttggctcagcacttattgctgaaggtaattacgccgttatgggtatggtcgcagttgctgtatgtacaccaccaatcggtttaggtttagcaacgtttgttcaaaagtataaattcaatcattccgaaagagaaatgggtaaggcttccttcactatgggactatttggtattactgaaggtgctattcctttcgcagcccaagatccattgcgcattatacctgcaaacatcattggtgcaatgattgcatcagtcattgcagccattggtggtgtcggcgatagagtcgcacatggaggtccaatcgtggctgtattaggtggtattgatcatgtattatggtttatctttgcagtgatagtaggtagtcttgtcacaatgactactgtactattattaaaacgcaatacaccagttatagcagtagatgcaccagcgcaacacacgcaacttcatgatacagatattacacaacatgatacagaggttgacaatgtagataaaaccgcgaaacattcacatctcaataaaccttctcatgtttttgatcaacaaactatgataattactgatcacgacatgtctcgaaacgaagcaattgatatgttgattcataaacttaaaatttgccgttatgtagagcacacatcgcatttaaaaaatgcaatactagaacgtgaaatggagtctacgacagctattggcatgaacgtggccattccacatgcaaagtctgatgttgtaaaacaaccgattgtagctgttatgaaaaataatcatggtgttaaatgggacagtctagatggtagtctacctcaattgatattcttaattgccgtaccaaacaacagtcaggatacacatttaaaaatacttcagcgcttatctaaagcgttaatgaatgatgagacacgccaatcactaattaatgcaaacagtactacagaaatttataacttattaatgaaaatatag

SEQ ID NO: 410914 - DNA, 1875 bp, Staphylococcus aureus
atgcttgatagacacttaaaactactccagttttttattaaaaatccatcaaagcacattagttctaatgaaattgctgaacatgtcaatgtttcaaaccgcacagttcgcaatgatattcatgttatcaatagcaattttatggatgatatcatcgtaagtattaaatctaaaggatatcaattaaatacatcgcagtataccttagaaacgataactgaacgttacacgcatattcaatcatataaagaaaaactattattatctatggcgtatcaactgctaatgcacaataaatcgcagacattgcaacaactagagcaagattatctattatctaaaactgtgctcaacgactatttcgttcgaattcaacaatggtgtcaaaaatttaatatcgttttaacaatcaagaaaaaacaaggtattgtggtcgatggaacagataatgatatcactaatgccatcatccatttaaatcaattatcatcagggcatgtacatgttgaagacctaattttaaatgaattacctgattcacaccaaaggatgatttcgcatattatacaagagacacttcaacaacatagtattgaaacaactgatattcaaatacaacagcttttaattcatctcattttaatcattaaacgtaagcaatctttaagtgagctagacacgttaaaccatgatgcaaaattgatatctcaatcttgcattaagcaaatcaacgaaagattaggttatgacttgaacgaaaaagtaatcaatatgttttcattctttattgcttatcattttaataaactcgatattggtatagaacgtatatttatacaaagttatattgatcgcttaatcgaattgatgcagcaacgtattcatgtacctttcaatgaagattcgattttacaacaaaatttatataatcattttagtaaagcatatttacgtatcactcaaaacatttatttaaacaatcctttagttatagagattaaaaaactctatccctttgtgtttaacacactttttgaagcgattgataaattagcaattgatactgatatagagatgagcgaagatgaaattgcatttttaacaattcattttcaagctgccatcgagcgtcgtaccaaaacacaattaaatgtagtcattgcttgttattatggtctaggtgtgtcgaattttttagaaactaaaataaataacttatccgaagagttgtcagtaataaatacgattaaactagaaagtataacacactatcactttgacaatgtagatttattaataacgacccatgatattccaaaacaaacgctaaacatacttcctaagcacctgacgactatcaaggttgcaccattattttctgaagatgatcgtcacaaaatcagacacgttgtgaagcaaaagcaaaatccggttcaagcacatcatcatatggacactgtcaatttccttgtcgtaaatactgaacaaaaatcacggcatactgtgcaaatttttgaagaagctcaaaaaatattacaagcacatcatgcgattgtagaaggatatatcgaatcagctttagagcgtgagaaatcatcttctacatacataggtaattttatggcgattcctcatggagatcctgaaaaagttttacaatcacatgtgcttatttttcgcacaaaagatgtttttccttggcgacaacacgatgtcaaacttgtctttttcttagcgatttcgcataaagacaaagcttttacaaaacaaatgatgcaattaattgctaacttggatgatgattcagtgaaccatttatgtagtttagatgatcatagtttaaagcaacagttatttgaatacttacaagaataa

SEQ ID NO: 410915 - DNA, 630 bp, Staphylococcus aureus
atgtcgaatcaaaattacgactacaataaaaatgaagatggaagtaagaagaaaatgagtacaacagcgaaagtagttagcattgcgacggtattgctattactcggaggattagtatttgcaatttttgcatatgtagatcattcgaataaagctaaagaacgtatgttgaacgaacaaaagcaggaacaaaaagaaaagcgtcaaaaagaaaatgcagaaaaagagagaaagaaaaagcaacaagaggaaaaagagcagaatgagctagattcacaagcaaaccaatatcagcaattgccacagcagaatcaatatcaatatgtgccacctcagcaacaagcacctacaaagcaacgtcctgctaaagaagagaatgatgataaagcatcaaaggatgagtcgaaagataaggatgacaatgcatctcaagataaatcagatgataatcagaagaaaactgatgataataaacaaccagctcagcctaaaccacagccgcaacaaccaacaccaaagccaaataataatcaacaaaataatcaatcaaatcagcaagcaaaaccacaagcaccacaacaaaatagccaatcaacaacaaataaacaaaataatgctaatgataagtag

SEQ ID NO: 410916 - DNA, 915 bp, Staphylococcus aureus
atgaaaagattaattggaattttattatgtagtttatttattttgactgcgtgttcaacatctgtcgataaaacaagtgactcgacaaagactatagactataaaattgaaaatggtaaaacactgaaagtaccagagaaacctaaaagagttgctgtattaactggattttatgttggtgattttataaagttaggaatcaaaccaattgctgtttcagatataactaaagattcttcaattttaaaaccttatttaaaaggggttgattatattggagaaaatgatgttgaaaaagttgctaaagcaaaacccgatttaatcgttgtagatgctatggataaaaatattaaaaaataccaaaaaatagcgccaacagtcccatatacatataataaatacaatcataaagaaatattaaaagaaataggcaatttgactaataatgaggataaagcaaaaaaatggattgaagagtgggaagataaaactaggaaagataaaaaagaaattcaaagtaaaattggtcaagcaacagcatctgtgtttgaaccagatgaaaagcaaatatacatatataactctacatggggtcgtggtttggatattgttcatgatgcattcggtatgccaatgacaaagcaatataaagataaattacaagaagataaaaaaggttatgcttcgatttcaaaagaaaatattagtaaatatgctggtgattatatatttttaagtaagccttcatacgggaaatttgattttgaaaaaacacatacatggcagaatattgaagctgtaaaaaaaggacatgtaatttcatataaagcagaagattattggttcacagatcctattacattagaacatttgagaagtaaattaaaaaaagaaattttaaataaatctcactag

SEQ ID NO: 410917 - DNA, 1023 bp, Staphylococcus aureus
atgaaaaagaaattattagttttaactatgagcacgctatttgctacacaacttatcaattcaaatcacgctaaagcatcagtgacagagagtgttgacaaaaaatttgtagttccagaatcaggaattaataaaattattccagcttacgatgaatttaagaattcgccaaaagtaaatgttagtaatttaactgacaataaaaactttgtagtttctgaagacaaattgaataagattgtagattcatcggcagctagtaaaattgtagataaaaactttgccgtaccagaatcaaagttaggaaacattgtaccagagtacaaagaaatcaataatcgcgtgaatgtagcaacaaacaatccagcttcacaacaagttgataagcattttgttgctaaaggcccagaagtaaatagatttattacgcaaaacaaagtaaaccaccacttcattactacgcaaacccactacaagaaagttattacttcatacaaatcaacacatgtacataaacatgtaaatcatgcaaaggattctattaataaacactttattgttaaaccatcagaatcgcctagatatacacatccatctcaatctttaattatcaagcatcattttgcagttcctggatatcacgcgcataaatttgttacaccagggcatgctagcattaaaattaatcacttttgtgttgtgccacaaataaatagtttcaaggtaattccaccatatggtcacaattcacatcgtatgcatgtaccaagtttccaaaataacacaacagcaacacatcaaaatgctaaagtaaataaagcatatgactataaatacttctattcttataaagtagttaaaggtgtgaagaaatatttctcattttcacaatcaaatggttataaaattgggaaaccatcattaaatatcaaaaatgtaaattatcaatatgctgttccaagttatagccctacacactacgttcctgaatttaagggtagcttaccagcaccacgagtataa

SEQ ID NO: 410918 - DNA, 2523 bp, Staphylococcus aureus
atgaatcaggaagttaaaaacaaaatattttcaatcttaaaaattacgtttgctacagctttatttatttttgtagcaatcacattgtatcgggagttatctggtattaactttaaagatacgttggttgaatttagtaagattaaccgtatgtccttagtgttactatttattggtggtggggcatcgcttgttattctatcaatgtatgatgtgattttatctagagctttaaaaatggatatatccttaggcaaagttttaagagtaagttatatcatcaatgcattgaatgcgattgtaggtttcggtggctttattggtgcaggcgttagagcaatggtttataaaaactatacgcatgataaaaagaaattagttcactttatatccttaatacttatttcaatgttgacaggtttaagcttattatcattgctaattgtattccatgttttcgatgcatctttaatcttagataagattacatgggtaagatgggtattatatgtagtgtcatttttcttaccattattcattatttattcaatggttagaccacccgataaaaacaatcgttttgtaggattgtactgcactttagtgtcgtgtgttgaatggttagcagctgcagttgtattatatttctgtggtgtaattgttgacgctcatgtatcattcatgtcctttattgcaatatttatcattgctgcattatcaggtttagtcagctttattcctggtggtttcggcgctttcgatttagttgtattactaggatttaaaactttaggtgtccctgaggaaaaagtattattaatgctacttctatatcgttttgcgtactattttgtaccggtaattattgcattaattttatcatcatttgaatttggtacatcagctaagaagtacattgagggatctaaatactttattcctgctaaagatgttacgtcatttttaatgtcttatcaaaaggatattattgctaaaattccatcattatcattagcaattttagtattctttacaagtatgatcttttttgtaaataacttaacgattgtttacgatgctttatatgatggaaatcacttaacgtattatattctattggcaattcatactagtgcttgtttattacttttactgaatgtagttggtatttataagcaaagtagacgtgccattatctttgctatgatttcaattttattaatcacagtggcgacattcttcacttacgcttcatatattttaataacatggttagctattatttttgttctgcttattgtagctttccgtagagcacgtaggttgaaacgcccagtaagaatgagaaatatagttgcaatgcttttattcagtttatttattttatatgttaaccatatatttattgctggaacgttatatgcattagatatttatacgattgaaatgcatacatctgtattgcgctattacttctggcttacgattttaatcatcgctatcatcataggtatgattgcatggttgtttgattatcaatttagcaaagtacgtatttcttctaaaattgaagattgcgaggagattattaatcagtacggcggtaattatttgagtcacttgatatatagtggtgacaagcagtttttcactaatgaaaataaaacagcatttttaatgtatcgttataaagcaagttcattagtggttcttggagatccgttaggtgatgaaaatgcctttgatgaattgttagaagcattctataattacgctgagtatttaggctatgatgttatattctatcaagttacagatcaacacatgcctttatatcataatttcggtaaccaatttttcaaattaggtgaagaagcaattattgatttaacgcaattttcaacttcaggtaaaaaacgccgtggatttagagcgactttaaacaaattcgatgaacttaatatttcattcgaaattattgaaccaccgttttcaactgaatttataaatgagcttcaacatgtaagtgatttatggctagataatcgtcaggaaatgcatttctctgtgggtcaatttaatgaagaatacttatctaaagcgccaattggtgtaatgcgaaatgaagaaaatgaagtaattgcattctgtagtttaatgccaacatactttaatgatgccatttcagtcgatttaattagatggttgccagagttagatttaccattaatggatggattatacttgcacatgttactttggagtaaagaacaaggttatacaaaatttaatatgggtatggcaacgttatcgaacgttggtcaattgcattattcatatttaagagaacgacttgcaggccgtgtctttgaacatttcaacggtctatatcgtttccaaggattacgtcgttataaatctaaatataatccgaattgggaaccacgctttttagtttatcgtaaagataattcgctttgggaatcactttctaaagtaatgcgtgtaatacgtcacaaataa

SEQ ID NO: 410919 - DNA, 1146 bp, Staphylococcus aureus
atgactataaatttatcggaaacattcgcaaatgcgaaaaacgaatttattaatgcagtaaacaacggtgaaccgcaagaaagacaaaatgaattgtacggtgacatgattaaccaactatttgaagaaactaaattacaagcaaaagcagaagctgaaagagtttctagtttacctaaatcagcacaatctttgagtgcaaaccaaagaagtttcttcatggatatcaataaaaacgttaactataaagaagaaaaacttttgccagaagaaacaattgatagaatttttgaagatttgacgacgaatcatccgttattagctgatttaggtattaaaaacgctggtttgcgtttgaagttcttaaaatctgaaacttctggcgtagccgtttggggtaaaatctatggtgaaattaaaggtcaattagatgctgcgttcagtgaagaaacagcaattcaaaataaattgacagcgtttgttgttttaccaaaagatttaaatgattttggtcctgcgtggattgaaagatttgttcgtgttcaaatcgaagaagcatttgcagtggcgcttgaaactgcgttcttaaaaggtactggtaaagaccaaccaatcggcttaaaccgtcaagtacaaaaaggtgtatcggtaactgagggtgcttatccagagaaagaagaacaaggtacgcttacatttgctaatccgcgcgctacggttaatgaattgacgcaagtgtttaaataccactcaactaacgagaaaggtaaatcagtagcggttaaaggtaatgtaacaatggttgttaatccgtccgatgcttttgaggttcaagcacagtatacacatttaaatgcaaatggcgtatatgttactgctttaccatttaatttgaatgttatcgagtctacagtccaagaagcaggtaaggttttaacgtacgttaaaggtttatatgatggttatttagctggtggtattaatgttcagaaatttaaagaaacacttgcgttagatgatatggatttatacactgcaaaacaatttgcttacggcaaagcgaaagataataaagttgctgctgtttggaaattagatttaaaaggacataagccagctttagaaggtaccgaagaaacactataa

SEQ ID NO: 410920 - DNA, 741 bp, Staphylococcus aureus; identical to SEQ ID NO: 405818

SEQ ID NO: 410921 - DNA, 354 bp, Staphylococcus aureus
atgacaaataatggtaatgagccgaacttaacgttaagtgatttatatgacaaagatgttgtctatacgtcaagaccttcgtatatatcgaatccatggttgaaaccggacgaacatcaatctaattttttaactggtagggagttattaatagcaaatcaattacctgttattgttcacgaagctagtgcgacagacaaattgcatcagctatttcaagttattggtaaggaagtaccgaactcaatttttacatttaacaatcagcaatcttacgaaaacttgatcaacaattggcacataaggaaaataaaaagatttattttcaatatattcatgatgaaacaatcttga

SEQ ID NO: 410922 - DNA, 1317 bp, Staphylococcus aureus
atgcctgaaagagaacgtacatctcctcagtatgaatcattccacgaattgtacaagaactatactaccaaggaactcactcaaaaagctaaaactcttaagttgacgaactatagtaaattaaataaaaaagaacttgttctagctattatggaagcacaaatggaaaaagatggtaactattatatggaaggtatcttagatgatatacaaccagatggttatggttttttaagaacagtgaactattctaaaggggaaaaagatatttatatatctgctagccaaattcgtcgttttgaaattaaacgtggggataaagtaactgggaaagttagaaaacctaaagataacgaaaaatattatggcttattacaagttgactttgtcaatgaccataacgcagaagaagtgaagaaacgtccgcatttccaagctttgacaccactttatccagatgagcgtattaaattagagacagaaacacaaaattattcaacgcgcatcatggatttagtaacaccgattggtttaggtcaacgtggtttaatagtggcgccacctaaagcaggtaaaacatcgttattaaaagaaatagcgaatgcaatcagtacgaacaaaccagatgcaaagctatttattttgttagttggcgagcgtcctgaagaggtgacagatttagaacgctcagtagaagctgctgaagtcgttcattcaacgtttgacgaaccaccagaacaccatgttaaagtagctgaattattacttgaacgtgcaaagcgtttagtagaaattggggaagatgtcattattttaatggattctataacgagattagcacgcgcttataacttagttattccaccaagtggtcgtacattatcaggtggtttagatcctgcatctttacacaaaccaaaagcattcttcggtgcagcgagaaatattgaagcgggtggaagtttaacaatacttgcaactgcattagttgatacgggttcacgtatggacgatatgatttacgaagaatttaaaggaacaggtaacatggagttacatttagatcgtaaattgtctgaacgtcgtatcttccctgcaattgatattggcagaagttcaacgcgtaaagaagaattgttaataagtaaatctgaattagacacattatggcaattaagaaatctattcactgactcaactgactttactgaaagatttattcgcaaacttaaaaggtctaagaataatgaagatttcttcaagcagctacaaaagtctgcagaagaaagtactaaaacgggtcgacctataatttaa

SEQ ID NO: 410923 - DNA, 354 bp, Staphylococcus aureus
atgattacatatcaaaataaaaaagttttattaatgggcgatgctagtaaaaataatgaatctttactactaaaaaaatataacttgccggagattgatattttaaaagtaggacatcatgggagcaagacaagtagttctaaagaatttatagagatgattaagcctaaaataagtttgatttcttctgggaagaacaatatgtatcatcttcctaatatagaagttgttaaacgattgcaaaggattcgcagtcgcatttacaatagtcaacaaaacggtcaagttacaattgacttagatgataatttaaaagttgattcaaactcttatggaaatgcaagtggtttatag

SEQ ID NO: 410924 - DNA, 1347 bp, Staphylococcus aureus
atgtcaacagttgcgtttcacacattaggttgtaaagtaaaccattatgaaactgaagcaatctggcaattatttaaagaagcaaactatgagcgcgttgactttgaagcgaatgctgatgtatttgttattaatacttgtacagtaacgaatacaggtgataaaaaaagtcgtcaaataattagacgtgcaataagacaaaatcctgatgctgtaatctgtgtaacaggttgttatgcgcaaacttcatcagctgaaattatggaaattcctggtgtcgatgtagtagttggtacacaagatagacataaactattaggttacattgatgaattccgtaaagaacgccaaccaattaatggtgttggaaatatcatgaaaaatcgtaaatatgaagaattagatgttccatattttacagatagaacacgtgcgtcattaaaaattcaagaaggttgtaacaacttctgcacattctgtattattccatgggctcgtggcttaatgcgttcaagagatccggaaaaagtagttgaacaagcgacgcaactagtgaattcaggatataaggaaattgtattgacgggaattcatacaggtggatatggtcaagatttaaaagattataacttggcccaattattacgtgatcttgaaacgattaatggattagaacgaattcgaatttcttcaattgaagcaagtcaacttacagatgaagtaattgacgttttagaacgttcaacaaaagttgtgcgtcatttgcatattccattacaatctggttcagatacagtattaaaacgtatgagacgtaagtatacaatggatagattttcagaacgattaacaaaattgcataaagctttaccagacttggcagttacgagtgatgtaattgttggtttcccaggtgaaactgaagcagagttccaagaaacatatgattttatcgtaaagcataagttctctgaactgcatgttttcccttattctcctagaattggcacgccagctgcaagaatggatgaccaaattgatgaagaaattaaaaatgaacgcgtgcataagttaattacgctaagcaatcaactcggaaagttatatgcgtctaaatttgatcaagatgtgcttgaagtaattcctgaggaacagggtgacacagaaggtacattagttggatatgcagataattatatgaaagtacaatttgaaggtgacgaatcactcataggtcaaattgtaaaagttaaaattacgcaagcaaattatccattaaatgaagggcaagcaattaaagttgttgatttcgcaacaaataaatctgatagagaagttttagtttaa

SEQ ID NO: 410925 - DNA, 708 bp, Staphylococcus aureus
gtgagttataataattttttacaaatgacaactatcttggaatcaacggctggagatacttgggttgaacaagttagtaatataattgttcaacctatttttacgttaatattaacctgtttgacattcttaggatttgtatatcaactttactctaaaaaaatcaatgcagctggtattatcgccacattatcattacttattttatttttgggatttctaatccaaggaaatgtcaatatgcattctatcttaatattctcaattggcgttatattagttgtaattgaattatttgtagttggtgcagtaattggtattattggcatgatactgataactataagcataacaacgctcggtgataatttgctatttatgcttgcgaatgttatcgttgccttgattttaacgattgtagaatgggtgatattagtgaagattttcaacagaaagattccgtttttggataaggttatcttaaaagattcaactaattctgagtcaggttacaattctcatgataaccgctcgcacctcgtaggaaagactgctcaaacagttacagatcttcgacctgcagggattattttttgtgaaaatgaacgtattgatgctgtttcagatggcaactttattttacgcaataaaacggtgaaaatccttgaagttgaaggaacaagagtagttgtgagggaagtagattaa

SEQ ID NO: 410926 - DNA, 702 bp, Staphylococcus aureus
atgaaaaagacaattatggcatcatcattagcagtggcattaggtgtaacaggttacgcagcaggtacaggacatcaagcacacgctgctgaagtaaacgttgatcaagcacacttagttgacttagcgcataatcaccaagatcaattaaatgcagctccaatcaaagatggtgcatatgacatccactttgtaaaagatggtttccaatataactttacttcaaatggtactacatggtcatggagctatgaagcagctaatggtcaaactgctggtttctcaaacgttgcaggtgcagactacactacttcatacaaccaaggttcagatgtacaatcagtaagctacaatgcacaatcaagtaactcaaacgttgaagctgtttcagctccaacttaccataactacagcacttcaactacttcaagttcagtgagattaagcaatggtaatactgcaggtgctactggttcatcagcagctcaaatcatggctcaacgtactggtgtttcagcttctacatgggctgcaatcatcgctcgtgaatcaaatggtcaagtaaatgcttacaacccatcaggtgcttcaggtttattccaaactatgccaggttggggtccgacaaacactgttgaccaacaaatcaacgcagctgttaaagcatacaaagcacaaggtttaggtgcttggggattctaa

SEQ ID NO: 410927 - DNA, 318 bp, Staphylococcus aureus
atgaaatcaatggtagaaatgcaacgtgaagttgatgaatatattggacaatttaaaacaggatatttttcaccattagctaacttagctagattgactgaagaagtgggcgaacttgcacgtgaaataaatcatacctatggtgaaaaaaagaagaaagattcagaggaagcaaatacgattaaagcagaattaggtgataatttatttgtgttgttatgtttagcgaattcaatgggaatagatatgacagagagctttaatgaaacaatggaaaagtttaatacaagagataaaaatcgattcgaaagaaagtga

SEQ ID NO: 410928 - DNA, 1143 bp, Staphylococcus aureus
atgaagataggtataacatgttacccgtccatgggtggttctggaattattgccacagaattaggaattaaattagcagagcgaggtcacgaagtacattttatcacttcaaatatcccgtttagaataagaaaaccattgccgaatatgatttttcatcaagttgaagtgaatcaatatgcagtatttcaatatccaccgtatgatattacgttaagtactaaaatcgctgaagttattaaagaatatgatcttgatttgttgcatatgcactatgctgtacctcatgcaatttgtggaattttagctcgtgagatgtcaggtaaagatataaaaattatgacaacgctacacggtactgatattactgttttgggctatgatcattcactccaaggtgcaattaaatttggcattgaaaaaagtgatattgtgacaagtgtgagtaaatctttagcgcaagaaacacatgaaattatcgaaactaacaaagaaattataccgatttataattttgtacgtgaaaatgagtttccaactaaacataacacagcattaaaatcacaatttggtatagcaccagatgaaaaagtgttaatacatgtatcgaattttagacaagtaaaacgcatagatactattatagaaacatttgcaaaagtacgtgaaaagatacctagtaaattaattttacttggagatggtcctgaattagtgccaatgcgtcaattgacgaaagagttaaacgtagaagaggatgttttatttttagggaaacaagattgtgtaagtgaattttatcaattatctgacttagtattattattaagtgaaaaagaaagctttggactaactttacttgaggctatgaaaacaggcgtcgttccaattggttcaaatgccggtggaattaaagaggttattaaacatggtgaaactggatttgttgtagatgtgggtgattgtgattcagcgagtgactatgctatccgtttacttgaagataaggcgttatacaacaaacttcagaaaaacatgctagcagatattgctgaacgttttggatcagaacttattacagatcaatatgagtattattatcaaaaaatgctaaatgagcataacaaaagtaaaggcgagtaa

SEQ ID NO: 410929 - DNA, 972 bp, Staphylococcus aureus
atgtcaaaatatagtcaagatgtacttcaattactctataaaaataaaccgaattatatatctggacaaagcattgcggaatcacttaatatttcacgcactgcagtaaaaaaggtgattgaccaattaaagttagagggatgtaaaattgattcagtaaatcataaagggcatttattacaacaactcccagatatttggtatcagggtataatagaccaatatacaaaaagttctgctttgtttgattttagtgaagtatacgattcaatagattctacacaacttgctgcgaaaaagtcacttgttggaaatcaatcttcattttttatcttgagtgatgaacaaacgaaaggtcgtgggcgatttaatagacattggagttcttcaaaagggcaaggactttggatgtctgtcgtgttaagacctaacgttgcattctcaatgatatctaaatttaatttatttattgcattagggataagagatgcgattcaacattttagtcaagatgaagtcaaagtgaaatggccgaatgatatatatattgataatggtaaagtgtgtggtttcttaactgaaatggttgctaataatgatggtatagaagcaataatatgtggtataggtattaatttgacgcaacaactagaaaactttgatgaaagtattagacatagagcaacaagtatacaattacatgataaaaataaattagatagatatcaatttttagagagattacttcaagaaattgaaaaaagatataatcaatttttaacgttacctttttctgaaattcgtgaagaatatattgcagcttctaatatttggaatagaacgttgctatttacagaaaatgataaacagtttaaaggacaagcaattgatttagattacgatggctatctaattgttagagatgaagcgggtgaatcacaccgtttaattagtgcagatatagatttttaa

SEQ ID NO: 410930 - DNA, 777 bp, Staphylococcus aureus
gtgattaatttggaaacaattaaacaagaagtaagagaatctattgttaaaggaattatcgcgggatataaggactatgttaatgagagaaatgaagtcaagaaacgtatggtgattagtgatgcctatgcctttactaaatctaatcatattgaaagtcaagttgctaagcatttggaaaattttgttaagtatattaaagaaaatgctggaccatcatggaagtatttaaagtttatatttaataaagatgaagagaaaaataatatcatgtttatattgaaaaatgaagattactttgatgaaaaaaatgtaagcgtagggaagagtttagttgctgataaaaatccaaaaagtaaaaactacctagaggtacttatggctaagaatagggacattaattttggtactgttggagaagattttgaaattgggcatcaaatgactgcagatagtatattatttaatataaaagaaggcagtaatagagatattaattcttattttttaattattacatatcgtattgataaagaatcaaagcaattagctgcaatcaaacaatggttaccaaatccagaaacaaattctgcaattatggttgatgatttgacagagttaatagaaaaagtaatagtagaaagagaagattatcatattgacgaagaagagttagaagtacttaaaaacgatggagagttagaactcatagatgtggaacatgcatttggtatcagtatcgatgaaggtaacgatatgattgaaagtgaaaggtga

SEQ ID NO: 410931 - DNA, 330 bp, Staphylococcus aureus
atgtatcaactacaatttataaatttagtttacgacacaaccaaactcacacatctagaacaaaccaatatcaatttattcattggtaattggagtaatcatcaattacaaaaatcaatttgtatacgtcatggcgatgatacaagtcacaatcaatatcatattctttttatagatacggcacatcaacgcattaaattttcatctattgataatgaagaaatcacttatattcttgattatgatgatacacagcatatcctcatgcaaacgtcatccaaacaaggtattggcacttcgcgcccaatcgtttatgagcgcttagtataa

SEQ ID NO: 410932 - DNA, 822 bp, Staphylococcus aureus
atgactaacagacaatgggaaacacttagagaatatgatgaaatcaaatatgaattttacgaagggattgctaaggtaacaataaatcgccctgaagtacgcaatgcgtttacacctaaaacagttgctgaaatgattgacgcattttcacgtgcacgtgatgatcaaaacgtttcagttatcgtattaactggtgaaggtgatttagcattctgttctggtggtgaccagaagaaacgtggacatggtggttatgtaggtgaagaccaaatccctcgcttaaatgtattagatttacagcgtttaattcgtattattccaaaaccggttatcgcgatggtaaaaggttatgctgtaggtggcggtaatgtactaaatgttgtttgtgacttaacgattgctgctgataatgctatttttggacaaactggtcctaaagtaggttcatttgatgcaggttatggttcaggatatttagcacgtatcgttggacataagaaagcacgtgaaatctggtacttatgtcgtcaatacaatgcacaagaagctttagatatgggcctagtaaatacagtggtacctttagataaagttgaagatgaaactgtgcaatggtgtaaagagattatgaaacactcaccaacagctttacgattccttaaagcagctatgaatgctgacacagatggtttagctggtttacaacaaatggctggggatgcaacattgctttattacacaactgatgaagcgaaagaaggccgtgatgcgtttaaagaaaaacgtgatcctgacttcgatcaattccctaaattcccataa

SEQ ID NO: 410933 - DNA, 777 bp, Staphylococcus aureus; identical to SEQ ID NO: 407810

SEQ ID NO: 410934 - DNA, 495 bp, Staphylococcus aureus
atgaggagattactcagtctattactagctagtacaatgattttagtcgcatgtgggaatgctaacaatgaaaataagaaaaaggaagacgaaaaaaaatcagaagtaaaaaaagaagctacgaaaaataatgataaaccaaagaacgaaaagaagaatcaagatataaataaaaacaataatgagcaagttcaaaatgtcaataataaacaaccagtcttaaataataatagtaatcataacaatcaacaacaaagcaataaaaataattacacagttatagaaaacgggaatacagttacagaaatttataatggacaatcacacacaactacaaataaccctattagagaagaatatgtagagggagaaacagacccgatatataaaagagagtataagcatttttatacacctgaagaagctcaaagagcacaagaaaatagcgaccaaattttaagagaaatgggtctcgaaccagaaagatatgaataa

SEQ ID NO: 410935 - DNA, 789 bp, Staphylococcus aureus
atgactacgtttgatgctaaaaaattaaaaaaagaatatcttgattggtataatcagattttagagttttctaatttatcaaacaattcagtaaaaatagataccccttttaaagataattctttagataatttaaaaatatacgctttatacgatcagtccagagacatgattacactgactgatgacggctatactatatttggtttagaaaataacggtgtttctataaataaatttaaaaaacgtaaaaagatttttgaagagcacctttcagcttacggtattaaatataacgataaaactcacgaaatttttgttcaaactaactttaaaaattttaataaatcgaaacataatttattacagtgccttatatttgttaatgatatgtacttactttctaatcctaagtcacagaacatatttacagaagatgttgcaaacaaattggatgaacataacatttattacggaagagatatacctattataggaagcagtggtgttgttcataatttcgacttttttattagcgctaagaaaaatcaaaaagaaaaatttatcaatgttttttctaaccctaataattctatgattattaagtcgaaaataacggatgctatgcaagcaaaaaaaataaaaagacacaggcaaaatgagtttatttttattttaaatgactcaaaaaaagaaataaatgaacataataaaaatcttcttcatgaaaactatattagtacaatagattatagcgaattagatgaaaagataggtttattgatttaa

SEQ ID NO: 410936 - DNA, 849 bp, Staphylococcus aureus; identical to SEQ ID NO: 406207

SEQ ID NO: 410937 - DNA, 588 bp, Staphylococcus aureus
atgacgattaatacattttggcaatatacactttatcaacgttcttggttaatgatgctactcatttgtaatatattagggatgatttatggttatatatggtatggtgaacaattaagtcatacgccgtggcattttaagatttttgttccagatagcccaactgcaatattatacttagttatttctatctcattgatattaattcaaaaacaaaatagtattatcgaagcactggcatttgtaacattattcaaatatgggatttgggcagttataatgaatatattatttattattgaacaaggtgatattacagtaaatggtttggtattaatgttttcccacagtataatggctgttcaggcaatttacttctatcctaggtttaaacgttctatgattggaatcagtgtagcgatgatttgggtgtttttgaatgattatattgactattttcaccttcaatttccatattatgattttataactacacatgtgtggcaaattggtgtattatcatgttgtctaagtgtttttggacttttgctttatattgaattaaacaaattattaaagtgtaaatga

SEQ ID NO: 410938 - DNA, 393 bp, Staphylococcus aureus; identical to SEQ ID NO: 408047

SEQ ID NO: 410939 - DNA, 2610 bp, Staphylococcus aureus
atggatataaataaaatgacatatgctgttcaaagtgctttacaacaagcagttgaactgagtcagcaacataaattacaaaatatagaaattgaggcaattttaagcgctgccttaaatgaaagtgaaagcttatataaaagtattttagaacgagcaaatattgaggtagatcaattaaacaaagcttatgaagacaaactaaacacgtatgcatctgtagaaggtgacaatatacaatatggtcaatatattagccaacaagcaaaccaattgataactaaggctgaatcatacatgaaagaatatgaagatgaatatatttcaatggagcatattttacgttcggcaatggacattgatcaaacaacaaaacattatataaataataaagtagaagttatcaaagaaattattaaaaaagtaagagggggaaatcacgtgacatcacaaaatccagaagttaattacgaagcattagctaaatatggccgcgacttagtagaagaagttagacaaggtaaaatggatcctgttataggaagagatgaagaaattcgaaatacgattcgtattttaagtcgtaaaactaaaaacaaccctgtgctcattggtgaaccaggtgttggtaaaactgcaattgttgaaggattagcgcaacgtatagttaagaaagatgtgccagaatcattattagataaaactgtttttgagttagatttaagcgcattagtagcgggcgctaaatatcgtggtgaatttgaagagagattaaaagcagtcctaaaagaagttaaagagtctgatggtagaattatattatttattgatgaaatccatatgcttgtaggtgctggtaaaacagatggtgccatggatgcaggcaacatgctaaaaccaatgttagcacgaggagagttacattgtattggtgcaacaactttaaatgaatatcgagaatatattgaaaaagattcggcattagagcgtcgtttccaaaaagtagcagttagtgagcctgatgttgaagatacaatttcaattttacgtggtttaaaagaacgatatgaagtgtatcatggtgtgcgtattcaagatagagccttagttgctgccgctgaattgtctgatcgttacatcactgatcgttttttaccagataaagcgattgatttagttgaccaagcatgtgcaacaattcgtacggaaatgggatcaaatccaactgaattggatcaagttaatagacgtgtcatgcaattagaaattgaagaaagcgcacttaaaaatgaatctgacaatgcgagcaaacagagattacaagaactacaagaagagcttgccaatgaaaaagagaaacaagcagcacttcaatctcgtgtagaatcagaaaaagaaaaaatagcaaatttacaagaaaaacgtgcgcaactagatgaaagtagacaagcgttggaagatgcacaaacaaataacaatttagaaaaagctgctgaactacaatatggaacaattcctcaattggaaaaagaacttagagaattagaggataatttccaagatgagcaaggtgaagatacagatcgaatgattcgtgaagttgtaacagacgaagaaattggcgatattgtcagccaatggacaggcataccagtttcaaaattagttgaaacagaacgtgaaaaattacttcacttaagtgacatcttgcataaacgtgttgtaggtcaagataaagcggttgacctggtttcagatgcagtagttagagcaagagcaggtattaaagatccaaacagacctattggtagtttcttattcctaggtccaactggagtaggtaaaactgaattagctaaatcattagctgcatcattatttgattctgaaaaacatatgattcgtattgatatgagtgaatatatggaaaaacatgcagtatcaagattgataggggcacctccaggatatattggacatgatgaagggggtcaattaactgaagcggttcgtcgtaatccatactcagttatcttattagatgaggttgaaaaagcgcatactgacgtctttaatgtattattgcaaattttagatgaaggccgtttaactgattctaaaggacgtagcgttgattttaaaaatactattattattatgacaagtaatattggatctcaagttttattagaaaacgtaaaagagactggtgaaattacagaatcaacagaaaaagctgttatgacaaatttaaatgcatatttcaaaccagaaattttgaatcgtatggatgacatcgtattatttaaacctctatctattgatgacatgagtatgattgtagacaaaatattaacgcaattaaatataagattattagaacagcgaatctcaattgaagtttctgatgatgctaaagcttggctaggtcaagaagcttatgaacctcaatacggtgcaagaccattaaaacgttttgtacaacgccaaattgaaacaccattagcacgtatgatgattaaagagggattcccagaaggtacaacgattaaagttaatttaaattcagacaataacttaacgtttaatgttgaaaaaattcatgaataa

SEQ ID NO: 410940 - DNA, 795 bp, Staphylococcus aureus; identical to SEQ ID NO: 408181

SEQ ID NO: 410941 - DNA, 786 bp, Staphylococcus aureus; identical to SEQ ID NO: 408180

SEQ ID NO: 410942 - DNA, 762 bp, Staphylococcus aureus; identical to SEQ ID NO: 408179

SEQ ID NO: 410943 - DNA, 246 bp, Staphylococcus aureus
ttgactagaacttataatattattggtatcctttcttgtcttatatcttttattattatggcgttaccaatgatttggtacacagcttcagcattatggttcttcccaggtgcaatcatgatattgttgttatctttagtcattgttttttgctatattaaaacgaaaaatcaattacatttattactaatcgtattaaatattattatattgctttttttcagtttaccgttgttactttcataa

SEQ ID NO: 410944 - DNA, 642 bp, Staphylococcus aureus
atgatagaattaaaagatttaaccatacaaaaaggtaatatacatattttgaagaaacttaatttgaaatttcaatgtggaaaatcatatgcacttattggtaaaagtggatgcggtaaatctacattattaaatactattgctggacttgaaaaaacggggaaacaatatgtctattttaatggtcaattagaacaatttaaatctaatttttacagagataaattaggatatttatttcaaaattatggattaatcgataatttgacagtaaatgaaaatttagatattggattagcatataaaaaaataagtaagaaagaaaaagaacaattaaagatacgttatatagaacagtttggtctgtcaaacagtttaaaaagaaaagttcatacgctaagtggaggtgaacaacaacgtgtcgctttaattagaatgatgttaaaagatccgattgttatgttagctgatgaaccaacgggtgcgttagatcctaaaacaggacagatgattattcaaccattatttgatttggtcgatgaaaataaagtgctgattttagcaacacatgatatggctattgcaaatcaatgtgacgaaataatagatttagaacagtatagtaaagtagcatctatgtga

SEQ ID NO: 410945 - DNA, 1716 bp, Staphylococcus aureus
atgtgtataagagacagatcaaaagcaacaactatcactccttttaacgctaaatataacattcattatttaagtgacgacgaattattaaaaaaagatatcaaaggaagttattttgtaaaagacaaaaattttgacgtgtctaaattcataaattttttaaaagaatatggtgttactgctgaatcatacaaaatagatcatatgatgattgccgttggtgtcattaaacaaatgaatatagaagttccgttatccgcacttttaatcgtttattttatttattatattttcgaaaagaacattaatttcaaagcgtatgcgattaagtatttaaatggttttacattaagaaaaataatttttgaaaatttttcaaaaaaatgcacgtattgggtaacgttaatcataagtcaaattcttttaactacaagtgtactttggatattaaattacacgggtaatttagatttattcatattaagattagttctgctttcatgtcttttcattttaacgattagtgttattaatttatggactttcttaatgttactaaatttaaatattgctaatatgattaaaggtaagcagcactttaaaacaattcgttttattaatacagtttgtaaaagtattctcttagtactaatagctagtgtaatgatagaaaatactagtgttattaaagatttgaataaaataaaggaaactgagaaatattggaatgtattagatgattattacacgattgaatttgcaccttatcacgaaacgaaacaaagtttgattgataatatgctgcgatcagaacaattagtaaaggctagtgaagcagaaaataatgcgattttattcaaaccaaagggtgactccgttgacaatgacaacttttcgcctgatgaggggaatgtaatattagtaaataatcagttctggtcgatttattacaagcagtttcaacctgatattccgataaaaaatcaaaaaaataatgtcgaagtaattattccacaaaagtttcatgcaatgcgtaatgaaatcaatcaagcatatcattcatggtttgaatttgtacaaaataaaaataataaagagaataagttatctatacagtttatcaacaaaaatgattatcgaattttttcatttgatgcacgagatagtcgccatttgtcatttatagaggcgccaatcattgtgaatgttcaggcatcagatttatcgaatgatttttattatgccatgatcagtcaaggcgggtatttattcaaaaattatgacgcgctagtaaaaaatattgaaaattatcatcttgatggggaaatcagtggaataaccaattataaagatagcgtgatggaaatgtatcatgaaaacaatttgaaattaacagtactcaacttttcacaaatcattatcgcaatcattttaataattattattttatttgatgtgaaatattattttgaacagcatcgaaaattactcgtaatcaaaaagctatatggttattcaacattaagagccaattaccaatacttattaataaataatatagttgttgtttttattggaatattgacgaatgtaattttacattctcagtatataatgatgatatttgcaacgattcttgtcgttcaaatattattgcagatttgcagcctatactatcatggccgacgttttaatgaagttatcaaggagttttaa

SEQ ID NO: 410946 - DNA, 501 bp, Staphylococcus aureus; identical to SEQ ID NO: 408035

SEQ ID NO: 410947 - DNA, 642 bp, Staphylococcus aureus
atggaaattttaaatgattctgtaaaaagttttgaaaaactttatttacaattacaagatggttttccagtgattgttcctactgatactaattataatttatgtagtttaccaaacaatgatctttgtatcgataaaatatttgaatataaaaagagatcgaaagataagccattatcattatttattgataagccagaggattggaaattgtatggagataatcaaaatacggaaatagttgataaactagttgaaatattttggcctggaccattaaatattattttaaaaaataaaacaagctataattatatgctcaataattcagatagtatagctataggatgtgtgcaaaataaaacgatgagaaggtttatttcatatattaattcacctatagcaattacttcagcaaatatctctggaactgccgacgatattttaataactgaaaatgaagcaattaagcacatgggcgaaaatgtaagatatatgctaagaagtcaaaataaaactaactataaaacatctagtacgattattaaagtgacagataataaaattgaattattaagagaaggagatataaagtttgaagaaataaaagaaagactaggtacaggtattatttatgaataa

SEQ ID NO: 410948 - DNA, 789 bp, Staphylococcus aureus
atgaataaagtcacaattaatcctcaaatccaattaacttatcaaattgaaggtaaaggggatcctataatattacttcatggattggatggtaatttagctggatttgaagatttgcaacatcaactagcatcatcatataaagtacttacttacgatttaagaggtcatggcaagtcttctaaaagtgaatcatacgatttaaacgatcacgttgaggatttaaaaattctaatggagaagttaaatattcatgaggcacatattctaggacatgatttaggtggggtagttgctaagttatttacagataaatatgcttatcgtgtaaaatcattaactaccattgcatcgaagaaagatgacttaatacacagctttactcaattgttaatacaatatcaagatgatatagcgggttttaataagtctgaagcgtatattcttttattttctaaattgtttagaaatcaagagaagacgatgaaatggtatcaaaaacaaagaatatatagcattaagtctgaggatgatagtgcggtggcaattcgttcattaattttgcataaagatgaacctatgtatttaaaaaaacgtacatgtgtacctactttgttaattaatggggaacatgatcctttgattaaagataagaatcattttaaattggaagcgcattttttaaatgttacgaaaaaaatcttcgaacattcaggacatgcaccgcatattgaagaaccagaagcatttatgaattattatttaaattttttaaaaagcgtatcataa

SEQ ID NO: 410949 - DNA, 375 bp, Staphylococcus aureus; identical to SEQ ID NO: 406125

SEQ ID NO: 410950 - DNA, 684 bp, Staphylococcus aureus; identical to SEQ ID NO: 408089

SEQ ID NO: 410951 - DNA, 612 bp, Staphylococcus aureus; identical to SEQ ID NO: 408090

SEQ ID NO: 410952 - DNA, 720 bp, Staphylococcus aureus; identical to SEQ ID NO: 408188

SEQ ID NO: 410953 - DNA, 219 bp, Staphylococcus aureus; identical to SEQ ID NO: 408091

SEQ ID NO: 410954 - DNA, 732 bp, Staphylococcus aureus
atgatactaagttacttgaaaatcgaatttaaagttataatgcgtaaaaaaacaacattaatattatctattttatttcctgtgatattctatatattatttacttcgatattggaattgccggaagatgttaaacctaaattttataaagagtatatgtatagtatgacggtttatagtttgttaagttttagtttactaacttttccattagatattattaatgaaaaacaaaatgaatggcgccaaagattaatggtaacaccatttacttttactagttattatatttcaaaagtagtgaaaactatgctgcaatttgcaatagcgatattagttatttttatggttggacatttttataaaggtgttgcaatgagtgcagttcaatggttagagtcaggaatatttttatggttaggtgcgtctctattaataacttttggcatattattttctttgttaaatgatattcaaaaaacaagtgctttagctaatatcgtaacaattggtttagcagtattaggtggattgtggtttccgataaacacatttccaaattggcttcaacatgttgctcatgttttaccgagctatcatttgcgtaaactaggtgtagatattgcttcaaatcatcatatcaatttaatatcatttgctataatactcttgtatgttttagggagtataatagcagtatattgtattagtcattttaaaagggcggaataa

SEQ ID NO: 410955 - DNA, 465 bp, Staphylococcus aureus
ttgattaatacaattcccaaaatacgtaagaatttaagacatgcaattgaaatgttaaatgtaaaaaagaaagaatttttgtccctgattcctaatgtaacttgtaattatattaaaactaaattagaagaattagataatactttaggcaaatgggagccatttcttaatgatttaaaagcagtgtcaccaattttagataaccatttagatgatattgttaagaacatgaagcctttgattgtacagatgttatttgaaccatcacattatgatgatatgtttattttaaacacacaagctcatgcacgtcttgatcaaatggcacaacagtttgaagttgtttgtaatggcttgaacgaaaatgaaggacaagcaattcaaacgatggatcaatctgcctctctaatacggtcaaacttaattcaagttaaagaacaattagaaaaactagctgtatactaa

SEQ ID NO: 410956 - DNA, 864 bp, Staphylococcus aureus
atggagaaaattgagaatgaaatagttaataagacatatcttgcaattaattctttggaagaattaagaaatatgattggtattaaatcagactatttttataaatgtctttatgtgaatgaccatttttataatgttatcaaaatacctaaacgaaaaaaagatgaatatagagaattgatgattcctaatatggctctcaaaaatatccaaaggtggattttagataatgtattgtacagaaggcaagttcataaatgtgcaactggttttgttcctaggaaatcaatagtgaacaatgcaatcccacacgttgggcagaaatatatattgaaaatggatatagaaaacttttttccgagtatcacatttaagcaggttagaaaaatattttctgagatgggctataaatttgaacttgcgacagcactcgcaaatttgtgtacagtgaataatcagttgcctcaaggtgcaccaaccagtccatatatagctaatatcatcttttacaatatagataaaagaatcttttcttattgtcaaaaaaataatttgagatatactcgatatgctgatgatattactatttctggatctaataaagtaagttttagtaaagaaattatcagggaaatagtaaaccaatataattttagaattaatgaaagtaagacaattatgtttaaaccaggagacagaaaaaaagttactggtattatagttaatgaaaaaatatcggttcctaaaactttaataagagaggtcaggaagcaaatttattttgtaaataagtttggattagaagaacacttaattcgaaataattattcattggattatgagctgtctcttatacacatctga

SEQ ID NO: 410957 - DNA, 402 bp, Staphylococcus aureus; identical to SEQ ID NO: 408187

SEQ ID NO: 410958 - DNA, 687 bp, Staphylococcus aureus
atgctgagttctaataatgatgttggacaccatgcatacaaaaatgctaaaagagaattacgcaagattttagatagctatctcgaaaatggtaaattaaaatattacgatattatcgttacaagcaatttagctactaaacatccgtttttcgagtatgcacgttcatttgattttatcattgtttcagatatcggtttaataaacgttgatgtaaaaagttggggtgaaaaaacattttatcactttgatgtacctgatgagcatgatacagaaatgagcaatagtaatattgaaaaagttgtcggtcattacattagccagcaatatcatgatcagtttaattcatcaagaaagtctatctatacttttacagaaacagttcaaccaaatcgtgttatttatgatttttatgattatgatccatatcaattagcagcaaataatgctaaagcattaaaggatcatattgaacaaaactttaactttaaagtccaaagtaccggtgttatttactttagtgatggtacagttaatatcattcaaggttctgaagaaagagataaatatgttgataccgtttcaacaaaatcttcattacgacgtattattagcgaagccatagagctatctaaacaccctttaaataaagaacaggttgatcaaatcacagctatattcaagtaa

SEQ ID NO: 410959 - DNA, 774 bp, Staphylococcus aureus
atgagtaatacacaaaagaaaaatgtgccagagttgagattcccagggtttgaaggcgaatgggaagagaagcagttgggggatcttacagatagagtaattaggaaaaataaaaacttagaatcgaaaaagcctttaacaatatccggacagttaggtttaattgatcaaacagaatattttagtaaatcagtttcgtcgaaaaatctagaaaattatacactaataaagaatggagaattcgcgtataacaaaagttattctaatggatacccattaggggctattaaaagattaactagatatgatagtggtgtattgtcctctttgtatatttgtttttctattaaaagtgaaatgtctaaagacttcatggaagcatattttgattcgacacactggtatagagaagtttctggaattgcagttgagggtgcaagaaatcacggattattaaatgtttctgtgaatgatttttttactattctaattaaatatccaagtttagaagaacagcaaaaaataggcaagttcttcagcaaactcgaccgacaaattgaattagaagaacaaaagcttgaattacttcaacaacagaaaaaaggctatatgcagaaaattttctcacaggaactgcgattcaaagatgagaatggtgaagattatccagattgggaaaatagcaaaatagaaaaatatttaaaagagagaaacgaacgttctgacaaagggcaaatgctctccctttataatattcactcaagtcttgagtag

SEQ ID NO: 410960 - DNA, 357 bp, Staphylococcus aureus; identical to SEQ ID NO: 408044

SEQ ID NO: 410961 - DNA, 561 bp, Staphylococcus aureus
atggtgaatataataaataattggttagttttattcattccattgcttaattggttgacaccaaaaagatacatcaagatcagtcaagaagaattagaaagtttaaatactttcaaacctgctaaaaacaatgcattttggccagcattaggtagttcagttttatttagtgtgacttttagaaagtatatgcctttatttaatgttagattggaaaaaacaatagtaatagccatattttttgttgtatttcttggtattttatttttctacctaaatttaaatcgtaggctagcattaagtgtttttactatgaataaagaaaaaagtcagaaaatgatattactacctaatttaaaacattttttctttataatatttgcatatttatatttcggtggtttttcatttttcactttatatgccctgataactatagatgttcaaaatataattatatttatctgttggggtgcagtaactatgtttttcttttttataaacattgttcccattggcattaaaaaagctcatgtaatacttcttaaaaaagctgaataa

SEQ ID NO: 410962 - DNA, 498 bp, Staphylococcus aureus
ttgaaagttgagtttaactcatcagatttagcaaatcaatttaaaggaaaaaatatagatatttatggactgtattttggaaataaatgtgtaggcttaactgaagaaaaaacatcatgcttatacggaggagttacgatacatgatggaaatcaattagatgaagagaaagttataggcgttaatgtatttaaagatggtgtccaacaagaaggttttgttataaaaaccaaaaaggctaaagtaacagtacaagaattagacactaaagttcgatttaaattagaaaatttatataaaatatacaataaagataccggtaacatacaaaaaggatgcattttctttcattctcataatcatcaagatcaatcattttattatgatttatataacgtaaaaggttcagtgggagcagagttttttcaattttatagtgataatagaacagttagctcatctaattatcatattgatgtatttttatataaagattaa

SEQ ID NO: 410963 - DNA, 510 bp, Staphylococcus aureus
gtgggctcggagatgtgtataagagacacattgaaaatcgaaaatgaaatgatgactgtgaacagagcattaaatgaaaatccaaattctaaaaagaataaatcaaaattaaatcagttaaatatgcaattatctagtattaataatagaattagtaaaaccgaagaactaatattagaagatggacctgttttggatttagctgctgctttatttatatgtactgatgatgaagtttattatctatcaagtggatcaaatccgaaatataatcagtatatgggtgcatatcatctacaatggcatatgataaaatatgcaaaatcacataatattaataggtataatttttatggaataacaggcgtctttagtaatgaggcggatgattttggtgttcaacaatttaaaaagggttttaatgcacatgttgaagaattaattggtgatttcatcaaaccagtaagaccaattctatataaatttgcaaaacttatttataaggtttaa

SEQ ID NO: 410964 - DNA, 777 bp, Staphylococcus aureus; identical to SEQ ID NO: 409019

SEQ ID NO: 410965 - DNA, 1092 bp, Staphylococcus aureus
gtgattgatttctttaaagataataaacgaattgaacggtttagttttatagataataaagtgcatatgaaggaaacatttaatgtagataataaagtttgttatcaagtattttatgatgaaaagggatacccatatatttcaaggaatattaatgctaataatggtgctgtaggtaaaacttatgtgttagttaataaaaaagaatttaaaaacaatttagcactgtgtgtttactatttagaaaaactaataaaagattctaaagatagtattatgatttgtgatggaccagggagttttccaaaaatgtttaatacaaatcataaaaatgctcagaaatatggcgttattcatgttaatcatcatgaaaatttcgatgatacgggtgcatttaaaaaaagtgagaaatatattattgagaatgcgaataaaattaacggtgtaattgtattaacagaggcacaaagattagatattcttaatcaatttgatgtagaaaatattttcactattagcaattttgttaagatacataatgctccaaaacattttcaaactgaaaaaatcgtaggtcatatttctagaatggtaccaacgaagcgaattgatttgcttattgaagtggctgagttagtcgtaaaaaaagataatgctgttaaatttcatatatatggagaaggatctgtcaaagataaaatagctaaaatgattgaagataaaaatttagaaagaaatgtttttcttaaaggatatacaacaactccacaaaaatgcttggaagattttaaattagtcgtttctacatctcaatatgaaggtcaagggttaagtatgatagaagcaatgatttctaaaaggcctgttgttgcctttgacatcaaatacggaccaagtgattttatagaagataataaaaatggttatttaatagaaaaccataatattaacgacatggctgataaaatacttcagcttgttaataatgatgtattagcagcggagtttggttcgaaagcgagagaaaacattatagaaaaatattcaacggaatcaatattagaaaaatggttaaatcttttcaatagctaa

SEQ ID NO: 410966 - DNA, 639 bp, Staphylococcus aureus; identical to SEQ ID NO: 409012

SEQ ID NO: 410967 - DNA, 327 bp, Staphylococcus aureus
atgctcaataattcagatagtatagctataggatgtgtacaaaataaaacgatgagaagatttatttcatatattaattcacctatagcaattacttcagcaaatatatctggaactgccgatgatattttaataactgaaaatgaagcaattaagcacatgggcgaaaatgtaagatatatgctaagaagtcaaaataaaactaactataaaacatctagtacgattattaaagtgacagataataaaattgaattattaagagaaggagatataaagtttgaagaaataaaagaaagactaggtacaggtattatttatgaataa

SEQ ID NO: 410968 - DNA, 564 bp, Staphylococcus aureus
gtgacatttaatggtgtattatctgctttaaataattttactgacgagttatttaatacgttattaactttaatttcttggtttgtaagacctgctttatatgtcacagagtttgcgtcaattctaggtgggtcaggtttaactttagataaaatagttaaatcttctgtttgtctattatcatatgtcactctaataagacgagtagatatgcctacaacatctttgttaggaccatatgttccaacaaattggaaattcatatgttgcgcatttgtcgaccaagaattatttactggcttaacatattgtttcgcatcatacatatctgaaacacctgggtataaaacacctctggctgtttcaaagacatgtttcggtacagttcttactactttatatgttgctgttttcgtaatcggcgttgtttcgccatcaattaagatatgtgcagttacagttatatcttcaccaatacgtgtattatctttatttggcgcttgtccacttacccatgtaatagttgcatctgcaatgtcactaccattagataacttaaagtaa

SEQ ID NO: 410969 - DNA, 318 bp, Staphylococcus aureus
ttgaaagtacctgctgcaacagtaataccattattagttccagcaatacctgctacagttgctgcagatgcttctttcacccatggactcgtattattgcgacgtgtaaatgtcgtcacaacgttaccattacgtttaataactaatttatcagcgtatgtcgttacgttaccggcatgtgtattcactgtttggtttgctccaggtgcaattgtaatcgctcctgccgctgtttcagtcacagttggtttcgctggttgcacatcttttactacaaatttcgctggtaaagatgttgcaaaagtatgtccgttatag

SEQ ID NO: 410970 - DNA, 132 bp, Staphylococcus aureus
gtgggtcccaacacagaagatgacgaaaagtcagcttacaataatgtgcaagtttgggatgggccccaacaaagagaaattggattcccaatttctacagacaatgcaagttggggtgggacgacgaaataa

SEQ ID NO: 410971 - DNA, 501 bp, Staphylococcus aureus; identical to SEQ ID NO: 405187

SEQ ID NO: 410972 - DNA, 189 bp, Staphylococcus aureus; identical to SEQ ID NO: 407427

SEQ ID NO: 410973 - DNA, 777 bp, Staphylococcus aureus; identical to SEQ ID NO: 406808

SEQ ID NO: 410974 - DNA, 639 bp, Staphylococcus aureus
atgtatccaattaagaatctcgaggatttttatggcaaagaaggatatcgagatggcgaatttaaaaaagatgataaaggtacttggctaattagatccgaaatagttaaacagccaaagggcaaagtgatgaaaacaagaggtatgcaattatatattaatagaaataccgaaacagccaaaggtttctttgttttgaaagaaataagtgaaaataataatcgtgtaaataaagataaggaggaaaaatacgaagtgaaaatggtaggaaataaaattattcctactgaacaaattaatgacgagaaaataaaaaaagaaattgaaaacttcaagttttttgtgcaatatggaaactttaaaaatttcgaaaaatacaacaatggtgagttttcatataatcctgaagcaccaatttattcggctaaatatcaattacacaacgatgattacaatgtaaggcaactacgtaaaagatatgacatttcaacaaaagaaacaccgaagttacttttgaaaggtggaggagatttaaaaaattcctcagttggtcaaaacgatattgaatttacttttgttgaaagaaaaggtgagaatatttattttaacgatagtgttgaattcataccaagtaagtaa

SEQ ID NO: 410975 - DNA, 378 bp, Staphylococcus aureus
atgaaaaataataaaattatcttattagacaaggtagaagatccaaatctaaaaaagagaatagaaaactttaaatttttcggacaatatgcaaattttaaggatttggaaaattacaacaatggcgacgtgtcaataaattggaatgttccaagttatgacgtggaatataaaatgagcaataaagatgaaaatgttaaacaattaagaagtcgttataacattcctactgataaagctccaatgttaaaaatgcatattgacggggacttaaaaggtagttctgttggatataaaaggttagaaatagatttttcaaaagaaggtagggatatttcagtcattgattatttaagttataagccagcgaaaaaatag

SEQ ID NO: 410976 - DNA, 429 bp, Staphylococcus aureus; identical to SEQ ID NO: 410577

SEQ ID NO: 410977 - DNA, 225 bp, Staphylococcus aureus; identical to SEQ ID NO: 410345

SEQ ID NO: 410978 - DNA, 501 bp, Staphylococcus aureus
atgaatttcgaagaaaaattaagtgaaatgtacaataaaattgcaaatgagatcaatgaaatgataccagtagagtgggaaaaggtatatgtaattgcatatgtggacgatggaggtgggcaagttatattttattataccaagcccagaaatgatgagctgtattattattcgagtatcgttgaagattataatgttttagaagaaatctttgatgatttatggatggaactttatagatcatttaaaaaattaagaaatatatttaaagaagaaagtcttgaaccatggacatcatgtgaatttgactttacaaaagaagataaattaaaagtttcatttgattatattgattggaagaatacagaatttgatcaattaggccaagaaaactactataactatagaaaattcggaattataccagaaatggaatatgaaatggaagaggttaaacaaatcgagcaatatattaaagagcaagaagaagctgaacaatag

SEQ ID NO: 410979 - DNA, 552 bp, Staphylococcus aureus; identical to SEQ ID NO: 408992

SEQ ID NO: 410980 - DNA, 288 bp, Staphylococcus aureus; identical to SEQ ID NO: 409066

SEQ ID NO: 410981 - DNA, 174 bp, Staphylococcus aureus
ttgaatgtatcttttgattatatagattggataaatacagagtttgatcaattgggccgtcaaaattattatatgtacaaaaaatttggggttataccagaaatggaatatgaaatggaagaagttaaagaaatcgaacaatatattaaagagcaagaagaagctgaacaatag

SEQ ID NO: 410982 - DNA, 174 bp, Staphylococcus aureus
ttgaatgtatcttttgattatattgattgggtgaattcagaatttggaccaatgggaagagaacattattatatgtataaaaaatttggaatttggcctgaaaaagaatatgccataaattgggttgaaaaaataaaagattatgttaaagagcaagatgaagctgaactatag

SEQ ID NO: 410983 - DNA, 312 bp, Staphylococcus aureus
atgttgaaaaaatggcttggaatggcatatttaaatatattgttttatgtttcattaattatttttattagcatttttttgattttacttgtacaagaaggcatttttgatgcgacaagttatggttttagaagattaaagtatcaaatgtcatcttcgaaaaagaagaagtctatctctgatgatccatttttcaacccacaagaggtaaaaaaagagcattactttgtttctacatggataataccattattattaataaatattttatattttattatgacgattgtgctgtcgctcatcttagtataa

SEQ ID NO: 410984 - DNA, 861 bp, Staphylococcus aureus
atgcctttagtttcaatgaaagaaatgttaattgatgcaaaagaaaatggttatgcggtaggtcaatacaatattaataacctagaattcactcaagcaattttagaagcgtcacaagaagaaaatgcacctgtaattttaggtgtttctgaaggtgctgctcgttacatgagcggtttctacacaattgttaaaatggttgaagggttaatgcatgacttaaacatcactattcctgtagcaatccatttagaccatggttcaagctttgaaaaatgtaaagaagctatcgatgctggattcacatcagtaatgatcgatgcttcacacagcccatttgaagaaaacgtagcaacaactaaaaaagttgttgaatacgctcacgaaaaaggtgtttctgtagaagctgaattaggtactgttggcggacaagaagatgatgttgtagcagacggtatcatttatgctgatcctaaagaatgtcaagaactagttgaaaaaactggtatcgatgcattagcaccagcattaggttcagttcatggtccatacaaaggtgaaccaaaattaggattcaaagaaatggaagaaatcggtttatcaactggtttaccattagtattacacggtggtactggtatcccaactaaagatatccaaaaagcaattccatttggtacagctaaaattaacgtaaatactgaaaaccaaatcgcttcagcaaaagcggttcgtgacgtattaaacaacgacaaagaagtttacgatcctcgtaaatacttaggaccagctcgtgaagctatcaaagaaacagttaaaggtaaaattaaagagttcggtacttcaaaccgcgctaaataa

SEQ ID NO: 410985 - DNA, 1332 bp, Staphylococcus aureus
atgactcatattcaattagattttagtaaaacgttagaatttttcggtgaacacgaattaaaacaacaacaagaaattgttaaatcaattcacaaaacaattcatgaaggtactggtgcaggtagtgacttcttaggctgggttgatttaccagttgattacgacaaagaagaattttcaagaattgttgaagcatcaaaacgcattaaagaaaattctgatgttttagtagtcatcggtattggtggttcttacttaggtgcacgtgcagcaatcgaaatgttaacgtcatcatttagaaacagcaatgaataccctgaaattgtatttgttggtaatcacttatcatcaacatacactaaagagttagttgattatttagcagacaaagatttctctgtaaacgttatttctaaatctggtacaactacagaaccagcagttgcatttagattgttcaaacaattagttgaagaaagatacggtaaagaagaagcacaaaaacgtatatttgcaacaacggataaagaaaaaggtgctttaaaacagttggctacaaacgaaggttatgaaacgttcatcgtacctgatgatgtaggtggaagatattctgttttaacagcagtaggattattaccaattgcaacagctggaattaacatcgaagctatgatgattggtgctgcaaaagcacgtgaagaattatcttcagataaattagaagaaaacattgcataccaatatgcgacaattcgaaacattttatatgcaaaaggttatacaacagaaatgttgattaactatgaaccatctatgcaatactttaatgaatggtggaaacaattatttggtgaatcagaaggtaaagacttcaaaggtatctatccttcaagtgccaactacacaactgatttacattctttaggtcaatatgtacaagaaggccgtcgtttcttattcgaaacagttgtaaaagtaaatcatcctaaatatgatattactattgaaaaagatagtgatgatttagacggattaaattatttagctggtaaaacaatcgacgaagttaacacaaaagcattcgaaggtacattattagcgcatactgatggtggtgttcctaacatggtagtgaacattccacaattagatgaagaaactttcggttatgtcgtatacttcttcgaacttgcttgtgcaatgagtggataccaattaggcgtaaatccatttaaccaacctggtgtagaagcatataaacaaaacatgttcgcattattaggtaaacctggttttgaagacttgaaaaaagaattagaagagcgtttataa

SEQ ID NO: 410986 - DNA, 1380 bp, Staphylococcus aureus
atgagcaataaagcttggggcggtagatttgaagtacaacctgaagagtgggttgatgactttaacgcatccattacttttgatcaaacgctcatagatcaagatatcgaaggcagcattgcgcatgcaactatgcttgcgaatcaaggcattattagtcaacaagacagcgaacaaattatacaaggactaaaatctattcaacatgattatcatcaagatcaaattcaatttagtgcatcattagaagatattcatttaaatattgaacatgaattaattaaacgtattggtgatgctggtggtaagttgcatactggacgcagtagaaacgatcaagttgcaacagacatgcacttgtacactaagaaacaagtgcaagatatcatcgcattaattaagtcgttacaaagtgtaattgtagacatcgcttccaataatgttgatacaattatgcctggttatactcatttacagcgtgcacagccaatttcatttgcacatcatattatgacttatttttggatgttacaacgagaccaacaacgatttgaagatagtttaaaacgaatcgatattaatcctttaggtgcagcagccttaagtggtaccacataccctatcgatagacacgagacaacagcattgttgaactttggcagtctctatgagaatagcctagatgctgtgagtgacagagactatattattgaaacattgcataatatttctttaacgatggttcacttatcacgctttgcagaggaaattattttctggtccacagacgaagctaaattcattacattatcagatgcattttcaactggctcatctattatgccacaaaagaaaaatcctgatatggcagaattaattagaggtaaagttggccgaacgactggtcatttaatgagtatgcttatgactttaaaaggattacctctagcatataacaaagatatgcaggaagataaagaaggtttattcgatgctgtccatacaattaaaggttctttacgtattttcgaaggtatgattcaaacgatgacaattaataaagaacgactcaatcaaactgttaaagaagatttttcaaatgcaacggaactggcagattatttagtaactaaaaatattccatttagaactgcacatgaaattgtaggaaaaatcgtcttagaatgtatacaacaaggtcattatttattagatgttcctttagcaacatatcaacaacatcattctagtattgattccgatatttatgattatttgcagcctgaaaattgcttaaaacgacgtcaaagttacggttcaacgggtcaatcatcggtcaaacaacaacttgatgttgctaaacaattactatcacaataa

SEQ ID NO: 410987 - DNA, 930 bp, Staphylococcus aureus
atgactaactcttcgaaaagcttcactaaatttatggctgcttctgctgtttttactatgggatttttatcagtacctactgctggcgctgaacaaacaaatcaaattgcaaataaacctcaggcgattcaatggcatacaaatttaacaaatgagcgattcacgactatcgcacatcgtggcgcaagtggctatgcacccgagcatacgtttcaagcatacgataagagtcataatgagttgaaagcatcttatatcgaaattgatttacaacgtaccaaagatggccatttagttgctatgcatgatgaaactgttaaccgtacaacaaatggacacggtaaagttgaggattatacccttgatgaattaaaacaattagatgcaggaagttggtttaataaaaaatatccaaaatacgcgagagcaagttataaaaatgctaaagtacccactttagatgaaattttagaacgttatggtccgaatgcaaactattatattgaaacaaagtcacctgatgtatacccaggaatggaagaacaattattagcttcattgaaaaggcatcaccttttaaataacaataaattaaaaaatggacatgtaatgattcaatcattttctgacgaaagtttaaagaaaattcatcgtcaaaataagcatgtgccattagtaaaattagttgataaaggtgaactacaacaatttaacgaccaacgcttaaaagagatacgctcttatgcgattggattaggtcctgattatacagatttaactgaacaaaatacccatcatttaaaagacttaggatttatagtacatccttatacagtgaatgaaaaagctgatatgttacgattaaataaatacggcgttgatggtgtctttacaaattttgctgataaatataaagaagtcattaagtag

SEQ ID NO: 410988 - DNA, 663 bp, Staphylococcus aureus
atgaataattacggtattccacaaaatgccattataaccattgcaggtacagttggtgttggaaaatcaactctaacgcaagcacttgcagataaattaaactttaaaacgtcttttgaaaatgtcgaacataatccatatttagataaattttacagcgattttgaacgatggagtttccatttgcaaatttacttcttagctgaacgttttaaagaacaaaagcgtatgtttgaatatggtggtggttttgtccaagatcgctcaatttatgaagatgttgatatttttgcaaaaatgcatgaagaagaaggcacaatgagtaaagaggatttcaaaacatattcagacttatttaatgccatggtcatgacaccttattttcctaaacctgatgtaatgatttatttagaatgtaactatgatgaggtcattgatcgcattattgaacgtggtcgcgaaatggaaataaatactgaccctgaatattggaaaaagttatttaaacgttatgacgattggattaacagctttaatgcatgtccagttgtacgtatcaacattaatgaatatgatatacacaaagatcctgattctttaaatcctatgattgataaaatcgctcgtattataaaaacgtatcgtcaaatagatatgcgataa

SEQ ID NO: 410989 - DNA, 732 bp, Staphylococcus aureus
atgcaagtctttcgctttaatttcagacatcaaattgataagaaaattttatatattcacggtggattcaatgcactacaaccatcaccgttccattggagattgttggataaaatcactttaagtacattatatgaggttgtactgcctatctatccaaagacaccagagtttcatattgacgacactttccaagcgatacaacgtgtttatgatcaattagtatctgaagtaggccatcaaaatgtcgtagtcatgggtgatggttcaggtggtgcactggcattatcctttgtacaatctcttttagacaatcaacagccattaccgaataaattgtatttaatctcaccaattttagatgcaacactatctaataaagatatttcggacgctttaatcgaacaagatgcggttctaagtcagtttggtgtcaatgagattatgaaaaagtgggcgaatggcctaccattaacagataagcgcatatcgccgattaatggcacaatagaaggattaccaccagtttatatgtttggtggtggacgtgaaatgacacatcctgatatgaagctattcgaacaaatgatgttgcaacatcatcaatacattgagttttatgattatcctaagatggtacatgattttccaatttatccaattagacaatcacataaagctattaaacaaattgccaaatcgatagatgaggatgtaacacaaaataactaa

SEQ ID NO: 410990 - DNA, 948 bp, Staphylococcus aureus
atggctttaacgatacggtatcaaactacatacgaaccgtttaaagtagttgatgatatcaaagatataccaaaagatgcgactattgtttggtatgattttgatgaaccgaatgaacaagaaaatgaatggtttaaagcacattttagttttaatgatttagaagtggatgatgcaattaacggtatgccacgagctaaatataaatcttataaagattatcaatacttagtattccatagtattatggggtcaaactattcaccaatagcactaaatatttttatacaagacaatgtattagtaacatatcatcatcaaacgttggaatcattaaataaagtagtctataagtatatgaatacattagatgcagaattagattgtgcagatgtcgtcatattaattttagatatgatggttgataaatatttcaactttgtatatgcacttgaagatagtgtttatcattttgaagaccgccatgtagatgatcgctttaataaaatggtcatggatagtgtttttaagttacgttcggatttgattaaagtaaaacgtgtactgtttcctatgcaagagctaattgatacaatgaaacaaaatggtgatttgattatagataataaacattcgctatacattcaacatatcgatgaccacttgattaagcaacgtaatatcattcgtactgctcaagaaatgacaaacgaaatacgagaaaactttgagtcatacacatcatttagaatgaatagtattatgcaagtattaacgttagtatcagttatattttcaccgttaacattcatagctgggatttatggtatgaactttgtaaatatgccggcattacatttacattatggatattatatttgcttagctgtaatgtttgttatagctgtcgtattaatcatctttttcagacgtaaaaaatggttttaa

SEQ ID NO: 410991 - DNA, 1149 bp, Staphylococcus aureus
atgaatccgttacagcgatttgtaaaaatgctgtcagatatctttgttccgattataccagccatcgttgctggtggtttattaatggggttaaataacattttgactgcgaaagatttattcttttcaggtaaatcattgatagatgtatatagtcaatttgctggattagctgaaatgataaatgtttttgcgaatgcaccatttacattattaccaattttaattggatttagtgcagcaaaacgttttggtggcaatccgtttttaggtgctgcattaggtatgatattggttcatccatcgctaatgagcgcatacgatttcccaaaagcagttgaagcaggtaaggctattccatattgggatgtatttggtttgcatattaatcaagtaggttatcaaggacaagtgttacctatgcttgtagcagcttatatcttagcctcaattgaaaaagggttacgcaaagttattccaacggtgttagataatttgttaacaccattgttatctatttttataacagcatttctaacattttcatttgtaggtccaatcactcgacaattaggttactggttatcagatggtttaacatggctttatgaatttggtggtgcaattggtggattaatattcggattattgtatgctccaattgttattacaggtatgcatcatagctttatagctgtagaaacgacattaattgcagatgccactaaaacgggtggatcatttatattcccgattgcgacaatgtctaatgttgcacaaggtggtgcagcaattgcagcgttctttattattaaacaaaataagaagttaaaaggtgtggcatctgccgcaggtatttcagcattacttggtattacagaaccggctatgtttggtgttaacttaaaactaagatatccatttattggcgctatcgttggatcaggtattggttcagcatatattgctttcttcaaggttaaagcaatcgcattaggaactgctggattgcctggatttatctcaatcaatccagtacatgcaggatggttacattactttgttggtatgacaatatcattcatcgttgccataacagttactttaattttatcgaaaagaaaagcaaataaaaaagttgtagaataa

SEQ ID NO: 410992 - DNA, 252 bp, Staphylococcus aureus
atgaattataagcaatccgcagaagatattttgaacgcgataggcggagaagagaatttagatgcaatggcgcattgtgcaacgagactacgattagttttaaatgatgaaagtttagtaaatgaagaggcgctaaacaatatggatgtagttaaagggacattttctactgggggacaataccaaattattattgggtctggtacagtcaataaagtatttagtgaactggaaaaattaactggaaaataa

SEQ ID NO: 410993 - DNA, 939 bp, Staphylococcus aureus; identical to SEQ ID NO: 407706

SEQ ID NO: 410994 - DNA, 585 bp, Staphylococcus aureus
atgattgtatatatattaattaatattgctatcgtcgtacttataactggattcaatttatataggcatcaaatgcaacatttatcattaagtgcaatgttgttatctataactataaacgcctttataaatacattcataattgataaatataactttattactctgtgtactataacgatgtttatcatttggacgatactacagttttacattgataaaaaattaaaacctgtatacattacagaccaaaaatttattgctatcatattaacgattgttgtcagtttaacgcaacgtgttaccgacttttcaagtacacaatcaatatatatgtctattccatttttagcccctgccattttcatcattggtggtattatgttgtttatttcaacatttaataacttagatgaaactgctgaaaataataacaaaataaagaaactaatgattaaaggacttatcattattaacatttcatttatcgttatgatggttttaacaccatattggtacttgtatttaatcgtctatcttattttcttgttgtttttattgtggcaaaaggtttataaattttaa

SEQ ID NO: 410995 - DNA, 357 bp, Staphylococcus aureus
ttggatttttaccagctttaccccaattggggtcaatataagcgtgctgatttaattggacaatcttcttacatcaaaaataatgatgtcgtcatatttaatgaagcatttgataatggtgcatcagacaaattattaagtaatgtaaaaaaagaatatccttaccaaacacctgtactcggtcgttctcaatcaggttgggacaaaactgaaggtagctactcatcaactgttgctgaagatggcggcgtagcgattgtaagtaaatatcctataaagaaaaaatccagcatgttttcaaaagcggttgtggattcgacaatgacagtaataaaggctttgtttatacaaagatag

SEQ ID NO: 410996 - DNA, 1056 bp, Staphylococcus aureus; identical to SEQ ID NO: 407760

SEQ ID NO: 410997 - DNA, 474 bp, Staphylococcus aureus
atgtctaaaatcaggtcttttacaatattaagtctacttatttacttagctatgatgtgctatacagtagtgacctattcaaaattaccaaccaaagtacctattcactataatttagcagggaatgctgataactttgctgataaatgggtgctgcttttgattaatagcgcatttatagtgatttggcttatatttttcattgcaggtagatactatgaacgatttgccaaatggtcacattataatcatacaccacgtgaaattcgagcgattaaattatttttaagtacgttaaatttagagattatgagctatatgtctatcttcacagtattagaaatttggcaaatacaacaccatcatcaattcaatttactatggtttaatatgatatttatcattatcattggtttgacgcttgtcatattttgtttacttccgacaattcataaaatgagagattctcaataa

SEQ ID NO: 410998 - DNA, 516 bp, Staphylococcus aureus
atgaaaataaaaactgaatttaaagggaacaatataccatatgaatacgcagcaggtgcagatgtgagtgattctattaacgggaatccaattaaatcatttccatttgaagtaactgaattaccggaagggactaaatatcttgcttggtctttaattgactatgatgcaattcctgtgtgtggctttgcatggattcattggagtgttgctaatgtaggtgttagtggcaattcaatttctataaaagcagatttatcaagaacaaagggtgactatgtacaaggtaaaaatagctttactagtgggttgttggctgaagatttttcagaaatagaaaatcactatgtaggaccaacaccacctgataaagatcatcaatacgaattaacagtttatgcgttagatcattctttaaatttgaagaatgggttctacttgaatgaatttttaaaagaagtaaatcaacataaaattgatcaaacaagtattaaccttattggaagaaaaatttaa

SEQ ID NO: 410999 - DNA, 576 bp, Staphylococcus aureus
ttgaaaaaagaattattggaatggattatttcaattgcagtcgcttttgtcattttatttatagtaggtaaatttattgttacaccatatacaattaaaggtgaatcaatggatccaactttgaaagatggcgagcgagtagctgtaaacattattggatataaaacaggtggtttggaaaaaggtaatgtagttgttttccatgcaaacaaaaatgatgactatgttaaacgtgtcatcggtgttcctggcgataaagtagaatataaaaatgatacattatatgtcaatggcaaaaaacaagatgaaccatatttaaactacaatttaaaacataaacaaggtgattacattactgggactttccaagttaaagatttaccgaatgcgaaccctaaatcaaatgtaattccaaaaggtaaatatttagttcttggggataatcgtgaagtaagtaaagatagccgtgcgtttggcctcattgatgaagaccaaattgttggtaaagtttcatttagattctggccattcagcgaatttaaatataatttcaatcctgaaaatactaaaaattaa

SEQ ID NO: 411000 - DNA, 525 bp, Staphylococcus aureus
gtgaaaaaagttgtaaaatatttgatttcattgatacttgctattatcattgtactgttcgtacaaacttttgtaatagttggtcatgtcattccgaataatgatatgtcaccaacccttaacaaaggggatcgtgttattgtaaataaaattaaagttacatttaatcaattgaataatggtgatatcattacatataggcgtggtaacgagatatatactagtcgaattattgccaaacctggtcaatcaatggcgtttcgtcagggacaattataccgtgatgaccgaccggttgacgcatcttatgccaagaacagaaaaattaaagattttagtttgcgcaattttaaagaattagatggagatattataccgcctaacaattttgttgtgctaaatgatcatgataacaatcagcatgattctagacaatttggtttaattgataaaaaggatattattggtaatataagtttgagatattatcctttttcaaaatggacgattcagttcaaatcttaa

SEQ ID NO: 411001 - DNA, 2409 bp, Staphylococcus aureus
atgatagcgaaagtcatagtcgatgtcgcgtcgaagagcgttgactataaatttgattatataattcctgaacaactcgaatctgtcatccaacctggtgtgcgtgtaattgtaccttttggaccaagaacgattcaaggttatgtaatggaagtaacagcagaacctgatgcacaacttgacgtttcgaagttaaaaaaaatcatagaagtgaaagatatacaaccagaattaacatcagaattaatagctttaagtgagtggatgggttcaactcatatcattaaacgtatttctatgttagaagtgatgcttccgagtgctattaaagcgaagtataaaaaagcatttaagatgaaagatgagatagaggtaccttcagctttattacaaaaatttgataagcatggttactattattataaagatgcccaaaaaaataatgatattcaattgcttatgaagttgttaaaagatgatatcgttgaagaaaaaacgattctcacacaaaatataactaaaaaaactaagcgtgctgttcgtgtcattgaagggtatcatcctgatgaagtattagctaaattggagaaagttattaaacaatacgatttgtatgcttacttgtctgaagaacaacataaaacaatatttttaactgatattgaggatatgggcttttcaaaatccagtttagatggacttatcaaaaaaggttatgttgaaaaatatgacgcggttgttgaaagagacccatttaaagatcgtgttttcgaacaagaatcaaaacagcaattaacagaagaccaatttaaagcatatgaagcgattaaagctaaaattgtaagccaagagcaagaaacatttttacttcatggtgtgacgggttcaggtaaaacagaagtatatttacaaacgatagaagatgttttaagccaaggaaaacaggccatgatgttagttcctgaaatcgctctaacaccgcaaatggttttacgcttcaaacgtcgatttggtgatgacgttgctgtattacattctggcttatctaatggggaacgttatgatgagtggcaaaaaattagggatggtcgtgcgagagtaagtgttggtgcaaggtcaagtgtgttcgcacctttcaaaaatttaggtttaatcattattgatgaagaacatgaatctacatataagcaagaagattatccgagatatcacgctagagaaattgcccaatggcgaagtgaatatcatcactgcccagtcattttaggaagtgcaacaccatgtcttgaaagttatgctcgagctgaaaaaggtgtttatcatttgctatcattaccaaacagagtgaaccaacaagctttacctgaaattgatatagtagatatgcgtgaagaattgagtgaaggtaatcggtcaatgttttcaaaagatttacgtgaagccatacaattaagattagatcgacaggaacaagttgttttatttttaaatcgacgtggttatgcatcatttatgttatgtcgggattgtggttatgtaccgcaatgcccaaactgtgatatttcattaacgtatcataaaacgacagacttattaaaatgtcactattgtggttaccaagagacgccaccgaatcaatgtccaaattgtgagagtgaacacattcgacaagtaggtacaggaacacaaaaagttgaagaactattgcagcaagaatttgaagatgcgcgcataattaggatggatgtagatacaacctcaaagaaaggtgcacatgaaaagttattgactgaattcgaaaaaggtaacggtgacattttactaggtactcagatgattgcgaaaggattagattatccaaatattactttagttggtgtgctgaatgcagatacaatgttaaatttacctgattttcgggcgagtgaacgtacttatcaactattaacgcaagtggctggtagagctggtcgtcatgaaaaggcaggtcaagtcatcattcaaacgtataacccagatcattattcaatattggatgttcaaaaaaatgattatttaacattttatcgtcaggaaatggaatatcgtaaattaggaaagtatccaccgtattattatttgattaatttcacaatctcacataaagaaatgaagaaggttatggaagcatcacagcatgttcataaaattttattacagcatttaacggaaaaagcgcttgtactaggtccatctccggcagcacttgcgagaatcaacaatgaatttagattccaaattttagtgaaatataaaagtgaacctggattattacaagccattcaatttttagatgactattaccatgaaaaatttataaaagaaaaattagcattgaagattgatattgatccacagatgatgatgtaa

SEQ ID NO: 411002 - DNA, 1614 bp, Staphylococcus aureus
atggactgtaaagtagttagtttaaatgaaaaagatcagtttataccaaaaataaagagcagtgatcctgtaataacaggattatttcaatatgatgcagctcaacaaattagttttgaaaaaagaatgtctaaagaaaataatggaagagaagcggcattagcgaatgttattcgtgaatatatgagtgatttaaagctttctagtgaacaagaattaaacatacaacatttagctaatggttcaaaagttgtgattggtggacaacaagcagggcttttcgggggaccattgtatacattccataaaatattttcaatcattactttatctaaggaattaacggatacacataagcaacaagtagtacccgttttttggattgcaggagaagatcatgatttcgatgaagtgaatcatacatttgtttataacgaaaatcatgggtcactgcataaggttaaatatcatacaatggagatgccagagacgactgtctctagatattatcctgataaggctgagttgaaacaaactttaaaaacgatgttcattcatatgaaagaaactgttcatacacaaggtctactggaaatttgtgacagaattattgaccaatatgactcgtggactgatatgtttaaagcactactgcatgaaacatttaaagcatatggcgttctatttgtagatgcgcagtttgagccgttaagaaaaatggaagcgcctatgtttaaaaagattttgaaaaaacatcaattgcttgatgatgcatttagagcaacacaacaacgcactcaaaatcaaggtttgaaggcgatgatacaaacagatacaaatgttcatttattcttacatgatgaaaatttgcgtcaattagtttcgtatgatggtaagcattttaaattaaataaaacagataagacatttataaaggaagaaattataaatattgcggaaaatcaacctgaattattttctaataatgtagtgacaagaccattaatggaagaatggctatttaacacggtggcatttattggagggccgagtgaaattaagtactgggctgaactaaaagatgtatttgaactatttgatgttgaaatgcctatcgtgatgccaaggcttagaattacttatttaaatgaccgtattgaaaaattactttcgaaatacaatattccattagaaaaagtgttagtcgatggtgttgaaggagaaagaagtaagtttattagagaacaagcatcagatcaatttattgaaaaggtagaaggtatgatagaacaacagcgtcgtctataccaagacttattagatgaagtggcggggaatcaaaataatattaaccttgtgaataaaaataatgaaattcatatacaacagtatgattatttgttaaaacgttatcttttaaacattgaaagagaaaacgacatcagtatgaagcaatttagagaaattcaagaaacactccatccaatgggaggattacaagaaagaatatggaatccacttcaaattttgaatgattttgggacagatgtgttcaagccctccacctatccaccactttcttacacttttgatcatattattataaaaccttaa

SEQ ID NO: 411003 - DNA, 1965 bp, Staphylococcus aureus
atgagagtaacagagttattaacaaaagatacaatagcaatggatttaatggcaaatgacaaaaatggtgttattgatgagttagtaaatcaattagacaaagcaggtaaattaagtgatgtctcgtcatttaagaaagcgattcacaatcgagaatcacaaagtacgactggtatcggcgaaggtattgctattccacatgcgaaagtagccgcagttaagtctccagctatcgcattcggtaaatctaaagaaggtttagattaccaaagtttagatatgcaaccagctcatttattctttatgattgcagcgccagaaggtggtgcccaaacacatttagatgctttagctaaactatctggtattttaatggatgaaaatgtacgtgaaaaattattacatgcatcgtctccagaagaagtgttagcaattattgatcatgctgatgatgaagcgacaaaagaagaagaggcagaagctgaagcacaacaagttgctgctgtagaagcaaatcaagacactaatggatcaaacgagccatatgtattagctgtaactgcttgtccaacaggtattgcacatacgtacatggcacgtgacgcattgaaaaaacaagcggataagatggggattaaaattaaagtagaaacgaacggttcaagtggtattaaaaaccatttaacggaacaagatattaaaaatgcaacaggtatcattgttgctgctgatgttcatgttgagacggatcgcttcgatggtaaaaatgtcgtagaagtaccagtcgcagatggtattaaacgcccagaagaattaattaataaagcattagatacaagtcgtaaaccttttgttgcccgtgatggtcaaagaaaaggtaactcaaatgacagtcaagaaaaattaagcccaggtaaagctttctataaacacttaatgaacggtgtttctaacatgttgccacttgtaatatctggtggtattttaatggcaatcgtgtttttatttggtgcaaactcatttgatccaaaaagctcagagtacaatgcgtttgcagagcagctttggaacattggtagtaaaagtgcattcgcgttaatcattccaattttatctggattcattgcacgtagtattgcggataaacctggattcgcttcaggtcttgtaggtggtatgttagcaatttcaggtggttcagggtttattggtggtattattgcaggtttcttagcaggttacttaacacaaggtgttaaagccatgacacgtaagttaccacaagcattagagggattaaagccgacattaatttatccactattaacagtgacagctacaggcttattgatgatttatgtctttaatccaccagcatcttggttaaatcatttgttattagatggattaaacaatttatcaggttctaatattgtattattaggtttagttattggcgcaatgatggcgattgatatgggcggtccattcaacaaagcggcatatgtttttgcaacaggtgcgttgattgaaggtaatgcagcaccaattacagctgcaatgattggtggtatgattccaccgttagcaattgcgacagcgatgttaattttcagacgtaaatttacaaaagaacaacgtggttcaattatccctaactatgtgatgggtatgtcatttattacagaaggtgcgattccattcgcggctgccgatccattacgtgttattccttcaatgatgattgggtcaggtataggtggcgcaatcgctttaggtttaggttctcgaattactgcgccacacggtggtattatcgtaattgttggtacggatggtgcacatttactgcaaacacttattgcacttgtagtaggtacattagtttcagcattaatttacggtttaatcaaacccaagttaactgaaacagaaatcgaagcttcaaaatcaatggacgaataa

SEQ ID NO: 411004 - DNA, 660 bp, Staphylococcus aureus
atgaaagccattaatattgcattagatggtccagctgctgccggaaaaagtacaattgcgaaacgtgtagccagtgaactatcaatgatttatgtagatacaggagcaatgtatcgtgcattaacatacaaatatttaaaattaaacaaaactgaggactttgcaaaactagttgaccaaacaacattagatttaacttataaagcagataaaggtcaatgtgtcattttagataacgaagatgtaacagactttttgagaaacaatgatgtgacgcaacatgtttcatacgttgcatctaaagagccagtacgttcattcgccgttaaaaaacaaaaagagttagctgcagaaaaaggtatcgtaatggatggtcgcgatatcggaactgtagtgctaccagatgcagatttaaaagtatatatgattgcatcagttgaagagcgagcagaaagaagatataaagataatcaattaagaggtatcgaatcaaattttgaagatttaaaacgtgatatagaagcacgtgatcaatatgacatgaaccgtgaaatatcaccattaagaaaagcagatgatgcagtgactttagatacgacaggcaagacgattgaagaagttactgacgaaattttagcgatggttagtcaaattaaataa

SEQ ID NO: 411005 - DNA, 282 bp, Staphylococcus aureus; identical to SEQ ID NO: 407821

SEQ ID NO: 411006 - DNA, 1023 bp, Staphylococcus aureus
atgataaaacaaagagaggtagcaatattaggtggtacaggatttgtaggaatggaattgttcagacttttacaaaaccatccattctttagggttacatttatttcttccgaaagtatgagtggtaaatcaattattaaccaacacacgttggacagaaaaatgaaatatcaaagtatagatagtttaaaaaatgattatgatgctatattttcatgcttaccctctggtgtattgcctaattatataaataaattacttaataaatcagaagttatatttaatgttagtggtgactacagacttaatgataaaactctctcaaatcgttactatccagcaacggaatgggaaaacctaaattcaaaggtacagtattatatacctgaatttactaaaattgatagagataaaaaaatcattaatttaggaggttgtatggcagtatcttcaatttattctctttatcctcttatcaaacataacttaatagaaaacaataatattattttagatgttaaaacaggctccagtggaggtggaaaaaccacaaaagaatctcatgcagaacgctttaataactttagaattcataaagcttttgaacacaaacatcaacctgaaatagtaatgtttttaaatacaatttcacaaaatactaataatgttaatttttctgcatttagtttagatatacctagaggaatatatgttagttcatatactaatcttaaacaagatgttacagaaatagatgtaaagaaagcatactttcaaacttataaagaatcagtatttatagattatatatctaacataaacaaaattaatctaaaacaaactttgggaacaaaccaagtatatacaagtttcaaacttaataaaaatttatgtctttctgtatcgatgttagacaacttagttaaaggtgcagccggtcaagctattcaagctgctaataattacttcaatattccagaaagtgaaggtttatctgttcagaaaggagctatgtggccctaa

SEQ ID NO: 411007 - DNA, 1167 bp, Staphylococcus aureus
atgaataaacagattttggtattatattttaatattttcttaatttttttaggtatcggtctagtgataccagtcttacctgtttatttaaaagatttggggttaactggtagtgatttaggattattagttgctgctttcgccttatctcaaatgattatatcgccattcggtggtacgttagctgataaattaggaaagaaattaattatatgtataggattaattttgttttcagtgtcagaatttatgtttgctatcggtcagaattttttaattttgatgttatcaagggttatcggtggtatgagtgctggtatggttatgcctggggtgacaggtttaatagctgatatttcaccaagccatcaaaaagcaaaaaactttggctacatgtcagcgattatcaattcaggattcattttaggaccagggattggtggatttatggcagaagtttcacatcgtatgccattttattttgcaggtgcattaggtattctagcatttataatgtcaattgtattgattcacgaccctaaaaaagtttcgacaaatggattccaaaagttggagccacaattgctaacgaaaattaactggaaagtgtttattacaccagttattctaacacttgtattatcgtttggtttatctgcatttgaaacattgtattcactatacacagctgacaaggtaaattattcacctaaagatatttcgattgcaattacaggtggcggtatctttggtgcacttttccaaatttatttctttgataaatttatgaaatacttctctgagttaacatttattgcatggtcattaatatattcagttattgtattagtgctattagttattgccgatggttactggacaattatggtaataagctttgttgtctttatcgggttcgatatgataagacctgctattacaaattatttttcaaatattgctggtgatagacagggatttgcaggtgggttaaactcaacattcactagcatggggaattttataggtcctttaatcgcaggtgcgttatttgatgtgcacattgaagccccaatttatatggctataggtgtgtcattagctggtgttgtcattgttttaattgaaaagcaacatagagctaagttaaaacaacaagatttgtaa

SEQ ID NO: 411008 - DNA, 798 bp, Staphylococcus aureus
ttgaaaaaattagcatttgcaataacagcaacatctggtgcagctgcatttctaacgcatcatgatgcacaagcatctacacaacatacagtacaatctggtgaatcattatggagtattgctcaaaaatacaacacttcagtagagagtattaaacaaaataaccaattagataacaacttggtattccctggtcaagttatctcagtaggtggaagtgatgcacaaaatacatcaaacacttctccacaagctggctcagcatcatctcatactgtacaagctggtgaatctttaaatatcattgctagcagatatggtgtttcagttgatcaattaatggcagccaataacttacgtggttatttaattatgcctaaccaaacattacaaattcctaatggtggatcaggtggtacaacaccaacagctacaacaggtagcaatggcaatgcatcatcttttaatcaccaaaatttatacactgctggtcaatgtacatggtacgtatttgatcgtcgtgctcaagctggtagtccaattagcacatattggtcagacgctaagtattgggctggtaacgcagctaatgatggttaccaagtaaacaacacaccatcagttggttcaatcatgcaaagcacacctggtccatatggtcatgttgcttatgttgaacgtgtcaatggtgatggtagtatcttgatttctgaaatgaattacacatatggtccatacaatatgaactaccgtacaattccagcttcagaagtttctagctatgcattcatccattaa

SEQ ID NO: 411009 - DNA, 201 bp, Staphylococcus aureus
atgatggtgaaaaaaacaaaatccaacacactaaaaaaagctgcaacacttgcattagcaaatttattattaattggggcactgacagacaatagtgccaaagcagaaactaagaaagatgatactgatttaaaattagtcagtcataacgtttatatgttatcgaccgtattgtatccgaattggagacttttaacataa

SEQ ID NO: 411010 - DNA, 522 bp, Staphylococcus aureus
atgattaatattatttcagctataggatctattggaacatttattatggctttattttattttgtatcagtttcagttcagctttatcaaatgaaaattagctttctgccagctttaggttttaaccaaattttattagaaagggagggagaacaacttaatataatgaattcggcaacagaagagcatcatcataaagattatattaaactatataatttaggtggcggtgctgctaaaaaaattgcaatagaggttttattgggtaatgataaagtcattcagaaaaagtacgtgaatattttacctagtaaagaagggtacatgttaccaattaataaaaatgtgtacgaagaattagaaagaacgattgagaacaatggttatgaagctgatttgaatgtacgtatgacttattatcataatgtaagtcgcaaacaacaggaagttatattaaaaggtcaaatcgaccgttttaatacttataataataaagaaatttatgatttgcagtttatctaa

SEQ ID NO: 411011 - DNA, 294 bp, Staphylococcus aureus
ttgttaaacaaaagtgacagtgaattttcaaaagaattgtcaaatgttaagaagcaattaaaagataagtctaaagtttcggtaactactactctatttagtaaaaataagaactatactaaaaaaagtaacagtgaaaatgtaataaaaatggcagaagaaataaaaaaagaaaaagatttaccaactgatatagattttagtatacaattttcagacaataaaataaatacgattaaaccaaattataacggtgaaagcacttcagaatatggtgtgtttgatcaagaataa

SEQ ID NO: 411012 - DNA, 177 bp, Staphylococcus aureus
atgatgactaaacaaatattaagactattattcttactagcgatgtatgagttaggtaagtatgtaactgagcaagtatatattatgatgacggctaatgatgatgtagaggcgccgagtgacttcgcaaagttgagcgatcagtctgatttgatgagggcggaggtgacagagtag

SEQ ID NO: 411013 - DNA, 249 bp, Staphylococcus aureus
atggataaccgtgaacaaatagaacaatcagtgatcagtgctagtgcgtataacggcaatgacacagagggattgataaaagagattgaggacgtgtataagaaagcacaagcgtttgatgaaatacttgagggaatgacaaatgctattcaacattcagttaaagaaggtattgaacttgatgaagcagtagggattatgacggggcaagttgtctataaatatgaggaggaacaggaaaatgactaa

SEQ ID NO: 411014 - DNA, 381 bp, Staphylococcus aureus
atggtgttgaaatttagagcgtgggataaattaggaaaggaaatgcacaaagtaagtgttattgattttagtagcaaaggtgcaagaattattcgtttagctggagtacagtctaacggtaagggagatcataaaagatggcattcatctgttgaactcatgcaatctacaggatttaaagatgtgaacggtgtggagatttatgagggggatattgttcaagattcttattccggagaagtaagttttatcgagtttcaagaaggagccttttatataacttgtagcaatgtaactgaattaataagtgaaaatgacgacattattgaaattattggaaatatttttgaaaatgaggagctattggaggctatgagatga

SEQ ID NO: 411015 - DNA, 201 bp, Staphylococcus aureus
atgatgcaaacctataaagtaagtctttgtatcaagttttttgcatctaaatgtgattataaattaaaaaagcattatttcgtgcaaagcacgaatgagaaagaagccacgaatatggtattaaaactgattcgtaaaaagctcccgttcgaaactgcaagcatagaaatcgaaaaagtggaggtaacagaatggtgttga

SEQ ID NO: 411016 - DNA, 744 bp, Staphylococcus aureus
atgactgaacaaccaagttactactcaataataacggcaaatgtcagatatgataatcgacttactgatagtgaaaaattactttttgcagaaataacgtctttaagtaataagtatggatactgcacagcaagtaatggttactttgcaactttatacaacgtcgttaaagaaactatatctcgtagaatttcgaaccttatcaaatttggttatctaaaaatcgaaattatcaaagaaggtaatgaagttaaacaaaggaagatgtaccccttgacgcaatcgtcaatgcctattgacgcaaaaatcaatacccctattgataattctgtcaatacccctattgacgcaaatgtcaaagagaataatacaagtattaataatacaagtaataacaatataaatagaatagatatattgtcgggcaacccgacagcatcttctataccctataaagaaattatcgattacttaaacaaaaaagcgggcaagcattttaaacacaatacagctaaaacaaaagattttattaaagcaagatggaatcaagattttaggttggaggattttaaaaaggtgattgatatcaaaacagctgagtggctaaacacggatagcgataaataccttagaccagaaacactttttggtaataaatttgagggatacctcaatcaaaaagcagaaccaactggcatagatcaattggaacgtatgaagtacgacgaaagttattgggattag

SEQ ID NO: 411017 - DNA, 669 bp, Staphylococcus aureus
atgccgaaaattactagttatatcactcaagacgacggcacaacaacagttgtcatctcgggtgttgaattaggcaataaagaaacattactacttgataacggatttgatgtggaagtcgatgtaagcgtcatagatccgtttcaaattaccggcaagcaacgacgaaaaatatttgcgcttgtcaaagatatagaagaacatacaggtcaaccaatggactatatgcgacatatgttcatcgagtatgtaaggacttactacggctatgatgaacgtatttcactaagtaattgtacgagaacacaagcaagtcaaatcattgaagcaacgcttgactggacgttctacaatgacataccacttagctacaaaacaagcgacttgctgaaacaagataaatcgttcttatactggtcaactgtcaaccgcaactgtgtaatatgcggaaagcctcacgcagacctggcacattatgaagcagtcggcagaggcatgaacagaaacaaaatgaaccactatgacaaacatgtattagtgttatgtcgcgaacatcacaacgagcaacatgcgattggcgttaagtcgtttgatgataaatatcacttgcatgactcatggctaaaagttgatgagaggctcaacaaaatgctgaaaggaggagaataa

SEQ ID NO: 411018 - DNA, 933 bp, Staphylococcus aureus
atggaagagaataaaactttaaaagaatacttgcgtaaatttttagaaggctacaaatatgtagttgaaaacagatacaattatcagtttagtagcaatccagaagctttcccattcatgagaaaagacgattacaagatttcgatattttatctaaatcaatctttttttgaagaaccttgcatcgtcgttatctcaaatgacagtaaattaaaagaaatatataattttcgtaatattgatatcaaatatttgtctaaacactttacttcatacatatatgattctaaaaagtatgtagaagaacaatccggattattagattttaataattacatttattacacatctatttactacggaaaatatatcgggaccgtaatattacaaaacaatttagatttattttttaattatggcaaaagattagctaacgatcattacaatacattgatatcgaagtcgaaagaaagattgataaacaaagcacatgatgaaatacaaccgttcaaccacttagatttaaatagtatgaaagagattgttgatgatataactttttcttatcaaatagaacaaggattacaagcttataaaagggaattgtatttgccagctgcagcaacctttgctgttgctatagaaacgtttttaatcaaattaaaaaaagttaataaaatcaaacataaagacaccgattcaactatgtacacaaaattattaggagaattaactaaagaaggtaaagtaaattatagaaccaaaaaacgggtagaaattgcgtatagtatgagaaacataatcaaccattcacaagctggtgcagtagccaaaggtgattgtgactttcttttaaacacactaaaagacattgttgatgaaaacgaaaaaatattaagagaatataccaaatcaattaataagacggaataa

SEQ ID NO: 411019 - DNA, 2238 bp, Staphylococcus aureus
atgcaacgtgattatttaattcgagtagaaactgagagtatgtcagatttcaaaaggctcaatggtttaatgattggttttgttattaaaggtgaggcgcatatttatgatgaaaataatatgacgcaatgcaacagtggcgatattttcattattaaccaccgcgacttgtatcgatttcaacttcaacaagatggcatcatatgttatatccaattccaaatgaaatatttagcagacaagtttgatgatgtgcattgtctatattttcacttaacagatgcgaccacaaccaagaatatacatcaactgagaaatataatggcaagactggtttcaacacacattcgacataatgagttgtctaaattgactgagcaacaacttgtgattcagttgcttatgcatatgattcattatgtcccgcgtacatatcattcgaaccaaagtatcttaaatgatgataaggtgaatcaagtatgcgactatatcgagttacattttcatgaagatttaagcctttcggaattaagcgaatatgttgggtggtcagagagccatctgtctaaaaagtttacagaatcgctaggtgtaggattccagcatttcttaaatacgacgcgaattgagcatgcgaaactcgatttgacatacacagatgaaaccattactgatattgcattgcaaaatggcttttcaagtgcagcgagctttgcgagaacatttaaacactttacgcatcaaacacctaaacaatatcgaggtgatcgtccagcaatcactgaaaaccagcaatcggcacaacatgattatcacgaccgtgaattgatattacttttaaatgactacattgaagaaatgaatcattttattgaagatattgaaaagatgaactataaagagattgcctttcaaccaaccaatcaccaactaaatcaatttaatcatattattcaagtgggctatttgaggaatttgctcaatacacagtatcaatcacagttacttacatgccatcatgattttcatgtcaatgaagtattagcatatgatgtgattccatatatcatgaaaaagctcaatgcgccattcacgtatgatgcagagatttcgaatatattttatgatatcgatttgtgtttagactttttattagatcataattttagtctaaccatgcatttgaatcagtatgactcacgtgattatatcgatgcatttaaaatttttatccatcacgttgccctgcatgtcagtcatagaaaagatttgaagttcaacttgtatgtgacgacattgcacacgtctttgattgaaatgattgattattttaaagcattattccctaatggtggcttgtacattcacttagatcaagctacggaaagacatctaccattgttgaaacgacttgagccacacatcgaccattttgtatttgatgccaattcaaatgacgctgttgattttaataaaatgaatgatgatgaatttaaaaccgcgagtcaaatgattattaataaaacgaattaccttatcgacttaatgcatcgtcatcgcctaaagcgtccactcattttactcaattggaatacattgacgggtgatacatttattacaaacggcgaatattttagaggtggtatcatcattgagcaattattaaaattaagttctaaagtagagggtatcgggtattggttgaattatgatttgcacgtcagtcattgtaaaaatgaacgggattatatgaattctattgaactgtttcatcaatataatggaaaacgtccggtctatttcacggcattgctatttaataaattaacaagcaatattttgtattctgatgatacatgtattgtcacggggactgattcaaattttcaaatattgttatatgatgcaaagcattttaatccgtacttagcgttggacaatcaaatgaatatgcgtgcgacggaaatgattcatttgaacattaatgccctggaagaaggtatgtataagattaaacattttaccttagataaagaaaatggtgcgttatttaatctttggcgcaaacatcatacgatacatggcatggacaaggactctatagattacgttaatcgaatgagttttccgaaattagaagtatatgatatagatatcacggacacactggcattaaacattaaaatgattacgaatgggattcacttaattgaagtaaaacgttacccaagttcataa

SEQ ID NO: 411020 - DNA, 771 bp, Staphylococcus aureus
atgatgaaacgtttaaacaaattagtgttaggtattagtcttctgtttttaatcatcagtatcactgctggttgtggcatgggtaaagaagcggaaataaagaaaagttttgaaaaaacattgagtatgtatccgattaaaaatctagaggatttatacgataaagaaggctatcgtgatgatcaatttgataaaaacgataaaggcacatggattattaattctgaaatggttgttcaacctaaaggggaacgtatgaaatcaaaaggtatggttctatatatgaatagaaacactaagactacaaccgggaagtatatagtgagtgaaacacttcatgatgaagatggtagacctaagagtaaagataaagaatatcccgttaaaatgattgacaataaaatcattccaactaaagatatcaaagatgaaaaaataaaaaaagaaatcgaaaactttaagtttttcgcgcagtatggcaattttaaagatttgacgaagtataaagatggagatatttcatacaatccagaggtaccgagttattcagccaaatatcaattaactaatgatgattataatgtaaaacaattaagaaaaagatataatataccaacgaataaagcaccaaagtttttgttgaaaggtacaggtaatttaaaaggctcatcagttggatataaagatattgaatttacttttgtggagaaaaaaggtgaaaatatatactttagtgatagtctacatcttgaaccaagtgaggataaataa

SEQ ID NO: 411021 - DNA, 336 bp, Staphylococcus aureus
atgcatttgaaactgaatgatgaagatttaaattatttagtaaatctaagtaaagaaatacttgaacaatacaatattaaattagacgaaacttgtaagggagatattaacataacatcatgtaattctgaatactttttcactttaagctattttttaaagcctggaaaagcaactataaatttcagagaatgccgttacaactatagcttgttacgtttaaatcttaatgacggttttcataaaaactctaataatgagaaaataaggggaaatagaattaatatattttctgaaaatgaatttatacaaaaagctgacggcgtacccatatga

SEQ ID NO: 411022 - DNA, 1461 bp, Staphylococcus aureus
atgataaaagaaacaccttttaaaactacacaagataatgctacattaagcaattggatttatgaaggatttatgccactcatttataaaggtgaaatgatggatttatcacgaggtagagctatcagtcgcgaaaatgaaacgagtcatacagcttcagcgactgtaatgaaatcattgttgagattgagtgataccatggatgattcaacaaaaacaaagtataagcaaatcgtcaaaacttctgttgattctgattcaagttacaaccaaaatgattatttaaattcatattcagacatagataaaatgaaaaagttaattgatgataaatctattactaaaaatgatttaacacaacaacttaaaatatataatgacatggatcgtgtcacctatcacaataaagaccttgactttgcatttggattaagtatgacatcgaaaaacgtcgcacgttacgaaagtatcaataatgaaaacttaaaaggttggcacaccggtgcaggcatgtcttatttatataacagcgatgtcaaacactatcgtgataacttctgggcaacagccgatatgactcgtcttccaggtactactactttaaatgatatgccatctacaaatactaagaatgataattcctttgttggcgggacaaaattaaataataaatacgcaagcatcggtatggattttgaaaatcaggacaaaattttaactgccaaaaaatcatatttcatattaaacgataaaattgtcttcttaggaactggcattaaaagtactgattcatcaaagaatccagttacaagtgttgaaaatcgcaaagcaaatgggtataaattatataaagatgatattgaaattaccacttcagatgttaatgctcaggaaacccattcagtctttttagaatctaacgatactaaaaagaacattggttatcattttttagacaagccaaaaataactataaaaaaagaaagtcatactggtaagtggagtgaaattaataaaagtcaaaaaccagatgacaaaaaagatgagtattatgaagtaactcaaacacataatacatctgacagtaaatatgcttatgttttgtatcctggtttatcaaaaagtgattttaaaccgaagaataataatgtaagtattcttaaacaagatgaagattttcatgtgataaaagataatgatggcgtatttgctggggttaattatagtgatagtactaaaatttttgatatagacggaactactgttgaattaaaagaaaaaggcatgtttgtaattaaaaagaaagatgataacacatatgaatgtagtttttataatccgacatccacaaattccacttcaaatatagaatcaaaaatttcaatgactggatactctattacaaacaaaaatacatcgacttctaatgaatccggcgcgcgctatgaattaactaaataa

SEQ ID NO: 411023 - DNA, 213 bp, Staphylococcus aureus; identical to SEQ ID NO: 407844

SEQ ID NO: 411024 - DNA, 621 bp, Staphylococcus aureus
atgctatgcgaatctaaaatcatcaataaaaatccaaaatatagaattattaaatataatgatgagtacttaatgatcgatataataagcacttggattagtttgttttttccttttattaattggttcatcaccaaaagatacgtcaaaattagtagagaagagtttgaaaatttaaatattgttaaacctgctaaaaagaatgttttttggccagttgcaggtatctctactttattcgcagttacattaagaaagtatacgcatttacttgacactcaacttgataaaaaattagttattgccatatgttgtatcacatttatagggattttaatattttatgtacgcctaattaaaaaatcatctttaaatatttataatactaaaaataaaaggtcgaaaatcatcttaataccaacactaaaaaatttttgtttcacattgttcggatatgtttttttaattttttggacagtggttttctcatatgctctattatcaatgagttatcaaaacataatagtatattttgcttggattacagcaataatgggtttttttctagtgaatatagctttaattatagataaaaacattcatgtcatacttaaaaattaa

SEQ ID NO: 411025 - DNA, 633 bp, Staphylococcus aureus; identical to SEQ ID NO: 409333

SEQ ID NO: 411026 - DNA, 915 bp, Staphylococcus aureus
atgtttaaaagaactaaactaatcttaatagcaacattactgctatcaggatgttcaactaccaataacgaatccaacaatgaaacaaaatcagtaccagaagaaatggaagcttcaaaatatgttggacaaggcttccaaccacctgcagaaaaagatgcgattgaatttgcgaagaagcatcgtaaagaatttgaaaaagtaggtgaacaattctttaaagacaactttggactgaaggtaaaggctaccaatgttgtaggtaaagatgatggtgtagaagtttatgtgcattgcgatgatcatggcattgtatttaatgcaagtctacctttgtacaaagatgccatccatcaaaaaggatcaatgcgtagtaatgacaatggtgatgatatgagtacgatggtgggtacagtgctgagtggctttgaatatcgagcgcaaaaagaaaagtatgataacttatataaatttttcaaagaaaatgaaaagaaatatcaatatacaggttttactaaagaagcaattaacaagacgcaaaacgtcgggtatcaaaatgaatatttttatatcacatatttatcaagaaatttaaaagaatatcgtaaatattatgaaccattgattcataaaaatgataaagaatttaaagagggtatgcaacgagctagaaaagagctaaactatactgctaatacaaatactgtagcaacgttgtttagtacgaatgatgaaaggaatagaaaagaaaagataaataatgtaatagatttatccgagaaaattgaaagaacaaaagatatgccaatcaagaatactataactactcaattaggaaataaacttattggcacaaaaaaagctcgttttgatgataagaaagtagtgtcgtttggagcatttgaagatgaataa

SEQ ID NO: 411027 - DNA, 501 bp, Staphylococcus aureus
atgaatttcgaagaaaaactaagtcaaaagtacaacgagattgcgaatgagatcaatggaatgataccagtagactgggaaaaggtatatgtaattgcatatgtggacgatggaggtgggcaagttatattttattataccaagcccggaaatgatgagctgtattattattcgagtatcgttgaagattataatgttttagaagaagtctttgatgatttatggatggaactttatagatcatttaaaaaattaagaaatatatttaaagaagaaagtcttgaaccatggacatcatgtgaatttgattttacaagcgaaggtaaattaaaagtatcatttgattatattgattggaagaatacagaatttgatcaattaggccaagaaaactactataactatagaaaattcggaattataccagaaatggaatatgaaatggaagaggttaaacaaatcgagcaatatattaaagagcaagaagaagctgaacaatag

SEQ ID NO: 411028 - DNA, 375 bp, Staphylococcus aureus
atgaaaagaatattggtagtatttttaatgttagcaattgtattagcaggttgttctaataaaggtgaaaagtatcaaaaagatattgataaagtgtacaaagaacagaatcaaatgaataaaattgcctcgaaagtacaaaacactattaaaacagacattaaacaagaagacagtaatacacatgtttataaagatggtaaagtcattgttattggtattcaattatataaagatcgtgaaaaaatgtattatttcgcatatgaaataaaagatggtaaggcagagattaatagagaaatagatccaattaagtatatgaaagaccataaagcagattatgaagatgaaaatgtagaagtggaaaaagattaa

SEQ ID NO: 411029 - DNA, 471 bp, Staphylococcus aureus
gtgatatacatgcacaatatgtctgacatcatagaacaatacatcaaacgtttatttgaagagtcgaatgaagatgtcgttgaaattcagagagcgaatatcgcacagcgttttgattgtgtaccatcacaattaaattatgtaatcaaaacacgattcactaatgaacatggttatgaaatcgaaagtaaacgtggtggtggtggttacatccgaatcactaaaattgaaaataaagatgcaacaggttatattaatcatttgcttcagctgattggaccttctatttctcaacaacaagcttattatattattgatgggcttttagataaaatgttaataaatgaacgtgaagctaaaatgattcaagcagttattgatagagaaacgctatcaatggatatggtttctagagatattattagagcaaatattttaaaacgtttgttaccagttataaattattactaa

SEQ ID NO: 411030 - DNA, 888 bp, Staphylococcus aureus
atgagtaaaattattggatcagacagagtcaaaagaggtatggctgaaatgcaaaaaggcggcgttattatggatgtcgttaatgctgagcaagcaagaattgcagaagaagctggcgcggtagcagttatggcattagaacgagtaccttctgatattagagctgctggtggcgttgcacgtatggcaaaccctaaaattgtagaagaagtaatgaatgctgtttctattccagtcatggctaaagcacgtattggtcatatcactgaagcaagagtattagaggcgatgggtgttgactatattgatgaatcagaagtgttaacaccagcagatgaggaatatcacttaagaaaagatcaatttacagtaccatttgtatgtggatgtcgtaatttaggtgaagctgcgcgtagaattggtgaaggtgctgctatgttacgtactaaaggtgaaccaggtacaggtaatattgttgaagctgtaagacatatgagacaagttaattcagaagttagtcgattgactgtaatgaatgatgatgagattatgacttttgcgaaagatatcggtgcgccttatgaaattttaaaacaaattaaagacaatggtcgtttaccggtagttaactttgcagctggtggcgttgcgactcctcaagatgctgctttaatgatggaattaggtgccgacggtgtgttcgttggatcaggtatttttaaatcagaagatccagaaaaatttgctaaagcaattgttcaagcaacaacacattaccaagactatgaactaattggaagattagcaagtgaacttggcactgctatgaaaggtttagatatcaatcaattatcattagaagaacgtatgcaagagcgtggttggtaa

SEQ ID NO: 411031 - DNA, 1383 bp, Staphylococcus aureus
ttgaaaaatactttataccatcaactttatgaaaaattaaaaaaacaaataattgaaggtcaatttaaagaaggcgataaattttattctaaaagacaattaagcaaacatttatctatcagccaaacaaccgtagagcatgcatatcaacttctattagacgaaggttacatttattcaagacctcgctctggatattttgtgtccgaaattgaatctttaacaattttaaacaatcaacctatcccctctctttttgatgatgattcatataaaccaaaagcgagtgatgaagcttatgattatgcttttaatttggatgaaatagatacgaaacatttcccgatagaacttttcagaaagtattccaaagatctttatgatacaaatcatttaaatcaattacgtagaggacattttcaaggagaattacatttaagatttcaactggcattttatttatttactaatcgtggtgtaatttgtgatcctaatcaaattataattggctcatctaccgaacaattagtaaatcaattagtcgatttactttatacttcaacgtttattatcgaaaaacctagttatccaccaatcaaaaatattttagataaaaaacaagttgaatatgaacaaattgaagttgaagataatggaataaacgtagatgaagttattaaatcacaaaaaaatatagtatatataacgccttcccatcaatttccaactggatatgtgatggacttaaaaaaacgaactcaattaatacaatgggctcaagaaaaagaagaacgatttattatagaagatgattatgattccgagtttagatatttcggcaaacccattccagcaattcaaggtctatattcaagaggagaaaaagtgatttatatcagtacattttcaaagtctatttttcctagctgtcgagttgcatatatggtgttaccctattctataatgaaaaaatatcattctcaaaatcacattgaaggcaacactgtacctgttcatatgcaaaaccttattgcaacgtttatatcttccggtggttttgaaaggcatttaaataaaatgagacgaatttatcgtagaaaactaacctatattttaaaaagattgaaaccttacaaagagcagcttgatattcaaggtgctgaaacgggtatgcattttacaattacagtaaaaaatggattaacattacaagagtgtcttgatagagcaaacaaagtaaaattaaaattacaagtttataattttgatgatggtcaagactataagaaaacccctaaatttatattaggctttggcggtatagacgatgatgctttaaaaccgcatgtagacgctctaataaaatcattaattataaagtaa

SEQ ID NO: 411032 - DNA, 501 bp, Staphylococcus aureus
atgacatttgaagagaagcttagcaaaatatacaatgaaattgcgaatgagattagcagtatgatactggtagagtgggaaaaagtatatacaatggcttatatagatgatggaggaggtgaagtattctttaattatactaaaccaggtagcgatgaattgaattattacaccgatatacctaaggagtataatgtttctgtgcaagtatttgatgatttatggatggatttatatgatttgtttaagaatttaaggaatttatttaaagaagaaggtcttgagccatggacatcatgtgaatttgactttacaagagacggcaaattgaatgtttcatttgattatattgattgggcgaattcagagtttggacaaatgggaagagaacattattatatgtataaaaaatttggaatttggcctgaaaaagaatatgccataaattgggttgaaaaaataaaaaattatgttaaagagcaagatgaagctgaactatag

SEQ ID NO: 411033 - DNA, 489 bp, Staphylococcus aureus
atgactttcgaagaaaaattaagtcaaatgtacaacgagattgcgaatgagatcagtgggatgatacctgtagagtgggaaaaggtatatacaattgcctatgtagatgatgaaggtggagaggtcgtttttaattatactaaaccaaacagcgatgacttgaattattacacatatatccctagagagtataatgtctctgaaaaagtattttatgatttgtggacggatttatatagattgtttaagaagttaagaaatacatttaaagaagaaggacttgacccatggacatcatgtgaatttgactttacaagcgagggtaatttgaaagtatcgtttgattatatagattggattaaattaggttttggcccatcaggaaaggaaaactactatatgtacaaaaaatttggtattttaccagatatgaaatatgaaatggaagaaattcgagcagtagagaagtatgttaaagagcaagagtag

SEQ ID NO: 411034 - DNA, 540 bp, Staphylococcus aureus
atgattttacacttgataacggatactacgaagaagaaacatcagatagcgactccgattcggacagcgattcagactcagatagcgactcagattcagacagtgattcagactcagatagtgactcagactcagacagcgactcagattcagatagcgactcagactcagacagcgactcagattcagatagtgactcagactcagatagcgactcagattcagacagcgattcagattcagatagtgactcagactcagatagcgattcagattcagacagcgactcagactcagacagtgattcagattcagatagcgattcagattcagatagtgactcagactcagatagcgactcagactcagatagcgactcagactcagacagtgattcagattcagacagcgactcagattcagatagcgactcagattcggacagcgattcagactcagatagcgactcagattcagacagcgactcagactcagacagtgattcagattcaggaaaacatacacctgttaaaccaatga

SEQ ID NO: 411035 - DNA, 234 bp, Staphylococcus aureus
atgtattttgttttagcaatatttacaataatcagtgccagtgtaagtttaggttattcaattcaagcatgtgcatctagccataatataaatgcatattatgcacttagtcgaagcttacctttatttttattagctatttttttctttagtcattcattgtgctatatttttgataactatatccattgcaatgatctaagttcaatttttagatgttattgttggttataa

SEQ ID NO: 411036 - DNA, 396 bp, Staphylococcus aureus
atggaagctaatttaaaaggtgtaaagaaattggtatacaaaggggttgaatactctaaagtatttgcaggtaatacaaaagtttggtctaaaccgccgtcttttgtaattaaacccttacctaaaaataaatatccggatagcatagaagaatcaacagcaaaatggacaataaacggagttgaacctaataaaagttatcaggtgacaatagaaaatgtacgtagcggtataatgagggtttcgcaaactaatttaggttcaagtgatttaggaatatcaggagtcaatagcggagttgcaagtaaaaatatcaactttagtaatccttcagggatgttgtatgtcactataagtgatgtttattcaggatctccaacattgaccattgaataa

SEQ ID NO: 411037 - DNA, 1239 bp, Staphylococcus aureus
atgtacaaaataaaagatgttgaaacgagaataaaaaatgatggtgttgacttaggtgacattggctgtcgattttacactgaagatgaaaatacagcatctataagaataggtatcaatgacaaacaaggtcgtatcgatctaaaagcgcatggcttaacacctagattgcatttgtttatggaagatggctctatattcaaaaatgagccccttattatcgacgatgttgtaaaagggttccttacctacaagatacctaaaaaggttatcaaacacgctggttatgtacgttgtaagctgtttttagagaaagaagaacaaaaaatacatgtcgcgaacttttctttcaatatcattgatagtggtattgaatctgctgtagcaaaagaaatcgatgttaaattggtagatgatgctattacgagaattttaaaagataacgcgacagatttattgagcaaagactttaaagagaaaatagataaagatgtcacttcttacatcgaaaagaatgaaagtagatttaaaggtgcgaaaggtgataaaggcgaaccgggacaacctggtgcgaaaggtgatacaggtaaaaagggagaacaaggcacacccggtaaaaacggtactgtagtatcaatcaatcctgacactaaaatgtggcaaattgatggtaaagatacagatatcaaagcagaacctgagttattggacaaaatcaatatcgcaaatgttgaagggttagaagataaattgcaagaagttgaaaaaaacaaagaggcaactctcaaagactctaaaacgtatacagattcaaaaattgctgaactagttgatagcgcgcctgaatctatgaatacactaagagaattagcagaagcaatacaaaacaactctatttcagaaagtgtattgcaacagattggctcaaaagttagtacagaagattttgagaggttcaaacaaacattaaacagtttgtatgcagataaaaatcatagtcatacaatcaaacagattgaaggattagaaaatgctttatcaagaaaatcagacataaatcataatcatgacgagaggtatgttttgtcgtctcaagcttttactaaacaacaagcggataatttatatcaactaaaaggcgcatctcaaccgacggttaaaatttggacaggaacagaaaatgaatataactatatatatcaaaaagacccgaatacgttatatttaattaaagggtga

SEQ ID NO: 411038 - DNA, 414 bp, Staphylococcus aureus
atggcaaaagttaagtacggtgctgatagcatggttgttgaattggataagttcgataagaaaatagaagagtgggttaaaaaaggtatcgctaaaacaacgatgaagatatataacactgctgtagcattagctcctgttgacttaggttttttagaagaaagtattgactttaaatatttcgatggtgggttatccagtgttataagtgtcggcgcagattatgcaatatacgttgaatacggtactggtatatatgctactggtcctggtggtagtcgtgctacaaagattccgtggagttttaaaggtgatgacggcgaatggtacacaacatatggtcaagcgccacagccattttggaaccctgcaattgacgcaggacgcaagacattcgagcagtatttttcatag

SEQ ID NO: 411039 - DNA, 192 bp, Staphylococcus aureus; identical to SEQ ID NO: 410719

SEQ ID NO: 411040 - DNA, 393 bp, Staphylococcus aureus; identical to SEQ ID NO: 410718

SEQ ID NO: 411041 - DNA, 849 bp, Staphylococcus aureus
atggatcctattttaggtaaaggtattgataaaattattgaaggtgctgcagatggacctatcaaaacattaaattctacttgggatttaatttttggtggatatcataactgggttgctaaaatacaatataaacgagaattagacttgactgactttaaagctaatattgaatctaaggtaaaaaagatacctgataataatctacaagaacctgaactttcaataattggacccgctattgaaagttctaaattttatattagcgaaagagtaataagagatcttttctctaatttaattgcatctgcaatggacaatcgcaaaacaaatgacgtacatcactcttttgttgagcttattaaacaaatgtcacctaaagatgcaatattgtttaaatttctatgcaatcaaaaagttattccggctgtaagatacaaatatatacgagacaatagtaaggcaggcgactttttgtcagatagtattatttctaattcaccaatcgatttaaattcaacagaaatttcattaaataatttagaaagaattggtttattaaaaattgacataggtctaaattcttatactaatgaaaatctttatgaaagttttgatgatcccaaaataatcaataattatattcaaaaatatgaaaaagaaacttacaaaaaagttcgtgatgtttttaatatgattaatcattttggtatagaaaatatatctcgttactataatttatctatcaatgaagtttatacaattgtaaaacctgcctgtattgagtatgacaaggggtacattgaaattacctcttttggcaaagcatttgccaaatgttgtttttaa

SEQ ID NO: 411042 - DNA, 1737 bp, Staphylococcus aureus
atgattaaacgatatttgcaatttgttaagccatacaaatatcgtatttttgcaacgattattgttgggataattaagtttggtataccaatgcttataccactattaattaaatatgcaatagatggcgtgattaataaccacgcactaacgactgatgaaaaagttcatcatttaactattgccattggtatcgcattatttatttttgtaatagtgagaccaccaattgaatttatacgtcaatatttggcgcaatggacaagtaataaaatattgtatgatatacgtaaaaagttatacaaccatttacaagctttaagtgcgagattttatgctaataatcaagtaggtcaagtaatatctagagtgattaatgatgttgaacaaacaaaagatttcattttaaccgggttaatgaatatttggttagattgtataacaattattattgcactatccataatgttctttttagatgtgaaattgactttagcagcactgtttatcttcccattttacattttaacggtgtacgttttctttggaagattaagaaaattgacacgtgaaagatctcaagcattagctgaggttcaaggattcttgcatgaacgtgttcaaggtatttcagtcgttaaaagttttgcgattgaagacaatgaagcgaaaaactttgataaaaagaatactaatttcttaacacgtgcgttgaaacatacaagatggaatgcctattcctttgccgcaattaatacagttacagatattggaccaattattgtcatcggtgttggtgcatatcttgctatttctggatcaatcacagtaggtacacttgcagcatttgttggatacttggagttattgttcgggcctttacgtcgtttagtcgcatcatttacaactttaacgcaaagttttgcttcaatggaccgtgtattccaattaattgatgaagattatgacatcaaaaatggtgttggtgctcaacctattgaaattaaacaaggtcgtattgatattgatcatgttagttttcaatataacgataacgaagctccaattttaaaagatattaatttgagtattgaaaaaggagaaacagttgctttcgtaggtatgagtggtggtggtaaatcaacattaattaacttaataccgagattttacgatgtaacttctgggcaaattttaatagatggtcacaacattaaagattttttaacgggaagtttaagaaatcaaataggattggtgcaacaggataatattttattctctgatacagttaaggaaaatattttacttggtcgtccaacagcaacagatgaagaagtagttgaagcggcgaaaatggctaatgcacatgactttattatgaacttgccacagggatatgacactgaagtaggtgaacgaggtgttaaattatcaggtggtcaaaaacaaagattatcgattgctagaatatttttaaataatccgccaattcttatcttggatgaagcaacaagtgcacttgatttagaaagtgaatccattattcaagaagcattagatgtgttgagtaaagatcgaacgacacttatcgtagcgcatcgcttgtccactattacacatgctgacaaaattgtcgtaattgaaaatggacatattgttgaaacaggtacgcatcgtgaattgattgcaaaacaaggtgcttacgagcatttatatagcattcaaaacttataa

SEQ ID NO: 411043 - DNA, 195 bp, Staphylococcus aureus
gtgtttgaaaatgaacctttgaaacctaatcatgaattatatgaattggaaaatgtaaccataacagcacatataactggtaatgattatgaagcaaagtatgacttattagatatttttaaaaacaatctagttaattttctcaataagaatggtctaattgagaatgaagtggatactaaaaaaggctattaa

SEQ ID NO: 411044 - DNA, 939 bp, Staphylococcus aureus
atgaactggacagagctttcaattattattaatcatgaagcagtagaattggctaccaatatacttgaaaatcatggatcaaatggtgtcgtgatagaagattcagatgatttaattaaccaaccagaagataaatacggtgaaatttacgctttgaaaaaagaggattatccagataagggagtaagattgaaagcctattttaatgaaatgacttatgatgataagttgcgacagcaaattaaagatgagttattaaatttagatgaacttgatcaacataacattcaattcagtgagcaaattattgcagagacggattgggaaaatgaatggaaaaactatttccatccattccgagcgtcgaagaagttcacaatagttcctagttgggaaacatatgctaaagaagcggatgaagagctttgcattgagctcgacccaggtatggcttttggaacaggcgatcatccgactacaagtatgtgtttgaaggcaatagaaacatatgtattgccacagcattcagtaattgatgttggtactggctcaggtatattaagtattgcaagtcatctaatcggtgtaaaacgtattaaagcgttggatattgatgaaatggcagtgagtgtagctaaagaaaacttcagaagaaatcattgtgaaacgttaattgaagctgttccaggtaacttattgaaagacgaaacagaaaaatttgatattgtaatagcaaatattttagcgcatattattgatgaaatgattgaagatgcttataatactctaaatgaaggcggttattttattacttctggtattataaaagagaagtatgaaggtatacagtcacatatggagcgtgtaggttttaaaattatttcagaacaacatgacaatggttgggtttgtcttgttggccagaaagtgagtgaataa

SEQ ID NO: 411045 - DNA, 444 bp, Staphylococcus aureus; identical to SEQ ID NO: 409337

SEQ ID NO: 411046 - DNA, 792 bp, Staphylococcus aureus; identical to SEQ ID NO: 409363

SEQ ID NO: 411047 - DNA, 300 bp, Staphylococcus aureus
atgcttgctatatcaatactgttaaaacccgctgttcgtgttgttactgattggaaaaaagaatttccgattttttcaactagtcccatatgttgcatagtattaaactgttctaataaaaagaatgtaatagctcctataattattaggatactagttgtagttaagactaatttagaatgtaaagataatttactcaattttttacaattaataaagtctattacgacaaaatgtccaatacctccaaatattatgagtattgagattgtaataatgacaattggatcactagaataa

SEQ ID NO: 411048 - DNA, 474 bp, Staphylococcus aureus
atggaaaaaataaagagaataaacaaaatatttttatcatttgaagttattccatttgcaatgatgattttactggcatttccaccaattattgcaagtctaattaataatcgtttgcagtatggtagggattttggcgatagagtaagcttttattgttatatttcaattatggttgcatatgcaattaccattttgttagaaattattttttactttattttattgaaaaactatcaatatgatcaaaataatattgaattggctaatagagtgaaagttacaaaagtactgtcgattttgtatatgattcccggattatatgcgattgcatgctattttagatttatacatgttcgctcatttagagaaaataaaaaatctggacagccggcctatcacttttgggaattttttataaaacctaatcgcaaaccgatagagttgaaagacttttttattaaaaatagataa

SEQ ID NO: 411049 - DNA, 1482 bp, Staphylococcus aureus
atgcaattttcattttcaaatgatttaggaacactttttaccattattttagcaattgcctttatcattaatttggtacttgcgtttattattatttttttagaaagaaatagacgtacagccagttcgacatgggcgtggttatttgtactttttgtcttaccattgattggttttattctttacttgttttttggtagaaccgtttcggcacgcaaattgaataaaaacaatggtaacgtgttaacggatttcgatggacttttaaaacaacaaatagaaagctttgataaaggtaattatggtactgataacaaacaagttcaaaaacatcatgatttagtacgtatgcttttgatggatcaagatggttttttaactgaaaataataaagttgatcatttcattgatggaaatgatttatatgatcaagttttaaaagatattaaaaatgcaaaagaatatatccatttagagtactatactttcgctttagatggtttaggtaaaagaattttacatgctttagaagaaaaattgaaacaaggtctagaagtaaaaatattatatgatgatgttggatctaaaaatgttaagatggcaaattttgatcattttaaatcgttaggtggagaagttgaagcattttttgcttcaaaattaccgttattgaatttcagaatgaataatagaaatcatagaaaaatcatcgtaatcgatggtcaactaggttatgtcggaggatttaacattggtgatgaatatctaggattaggaaaattaggatattggagagatacgcatttacgtatacaaggggatgcggttgatgcactgcagttgcgatttattttagactggaattcgcaagcgcaccgtccacaatttgaatatgatgttaagtatttccctaaaaagaacggaccattgggcaattcaccaattcaaatagctgcaagtggcccggctagtgactggcatcaaattgaatacggttatacaaaaatgattatgagtgcaaagaaatctgtatatttacaatcaccatatttcattccggataattcatatataaatgccattaaaattgctgctaaatcaggtgtagatgtacatttaatgattccatgtaagccagatcatccattagtatattgggcgacatattcaaatgcttcagatttactatctagtggcgtaaaaatttacacgtatgaaaatggatttatacattctaaaatgtgtttgatagatgatgaaatggtttcagtcggaacagctaatatggattttagaagttttgaattgaattttgaagtcaatgcttttgtatatgatgaaaagcttgctaaagatttaagggtggcttatgaacatgatattacaaaatcaaaacaacttactgaagaatcatatgccaatagaccgctgtctgttaaattcaaagaatcgttagcaaaattagtttcgccaattttataa

SEQ ID NO: 411050 - DNA, 501 bp, Staphylococcus aureus
atgaatttcgaagaaaaactaagtcaaaagtacaacgagattgcgaatgagatcaatggaatgataccagtagactgggaaaaggtatatgtaattgcatatgtggacgatggaggtgggcaagttatattttattataccaagcccggaaatgatgagctgtattattattcgagtatcgttgaagattataatgttttagaagaagtctttgatgatttatggatggaactttatagatcatttaaaaaattaagaaatatatttaaagaagaaggtcttgaaccatggacatcatgcgaattcgactttacaagcgagggtaaattaaacgtatcttttgattatattgattggaagaatacagaatttgatcaattaggccaagaaaactactataactatagaaaattcggaattataccagaaatggaatatgaaatggaagaggttaaacaaatcgagcaatatattaaagagcaagaagaagctgaacaatag

SEQ ID NO: 411051 - DNA, 501 bp, Staphylococcus aureus
atgactttcgaagaaaaactaagtcaaaagtacaacgagattgcgaataagattagcagcatgataccggtagagtgggaaaaggtatatgcaatggcatatatagatgatggaggaggagaagtgttctactattacacagaacctggaagtaatgaattatactactatactagtgtattaaataaatatgatatatcggaatcggaatttatggattcagtgtatgagttgtataaacaatttcaagatttaaggaatttatttaaagaagaaggacatgaaccatggacatcatgcgaatttgactttacaagagaaggtgaattaaaagtttcatttgattatattgattggataaattcagaatttggtcaaataggtcgacaaaattactataagtatagaaaatttggaattttaccagaaacggaatatgaaattaataaagttaaagaaatcgagcaatatattaaagagcaagatgaagctgaaatatag

SEQ ID NO: 411052 - DNA, 372 bp, Staphylococcus aureus
atggaaaagttaaatcaagttatgttatatgttgatgatgttgaaaaagcgaaagcattttggacagaaactttagaatttgttgttgtaagtgaaacaccgttagctgaggactatgttgcagttgaagtatcacctacgaaagatgctgaaacgtcattgacgattatggcaaaagaatttattgaaaagtatagcccggaggtgaacctaggaacaccatctttaatgtttaaagagaaaaactttgatgcattatactcaaaattaaatgatttaggtttaactgggcatgatatagtagaaatgaatggtcaacgtgtatttaatttccaagatggccaaggtaactattttgcagttagtgactaa

SEQ ID NO: 411053 - DNA, 1167 bp, Staphylococcus aureus
atgaaaagaaactttccaaaattaatagctttaagtttaatactttctttaagtgttacccctattgcaaacgctgagagcaattcaaatatcaaagcaaaagataagaagcatgtgcaagttaatgtcgaggacaagagtattcctactgaagtacgtaatttagcgcaaaaagactatctttcttatgttacttcacttgataaaatctataataaagagaaagcctcgtatacacttggtgaaccttttaaaatttataaattcaacaaaaagagtgatggtaattattattttccagttttgaacactgaaggtaatatcgattatatagttacaatttcaccaaaagtcactaagtattctagttcatcttctaaatacacaatcaatgtttctccatttttatctaaagtcttaaatcaatataaagatcaacaaattactattttgacaaactcaaaaggttactatgtggttactcaaaatcataaagctaaactagtactaaaaacaccacgtctagaagataaaaagttaaaaaagactgagagtatacctactggcaataatgtaacgcaactaaagcaaaaagcttctgtcactatgccaactagtcaatttaaaagtaataattatacttacaacgagcaatatgtaaataaacttgagaatttcaagataagagaaactcaaggtaacaatggttggtgtgcaggctatacgatgtctgcattactaaatgcgacttataatactaacaaatatcatgcagaagctgtgatgagatttttacacccaaacttacaaggacaacgattccaatttactggtttaacgccaagagagatgatttattttggacaaactcagggaagaagtccacaacttcttaatagaatgactacatataatgaagttgacaatcttactaaaaataataaaggaattgctgttttaggtagtagagtagaatcaagaaatggtatgcacgcagggcatgccatggcagttgttgggaacgctaaattagataatggacaagaggttataattatatggaatccatgggataatggttttatgactcaagatgctaaaaacaatgttattccagtatccaatggcgaccattatcgatggtattcatctatttatggttattaa

SEQ ID NO: 411054 - DNA, 393 bp, Staphylococcus aureus
atgaaatatacttggtggatacttttaacaattgcagggattttaagtttaacaagtatttatggatttattttatgtttaggtagctttggaatgttggcactgaatgtcatgtggctatttgtttatacaccgcataaaaattctaaagcacttgaatctatatcaaaaccaaccataattttatcaatcattgggacatatgcagtatttatatttatgtctatcttattttacttcgtaatgaaagctaggtttatggaaattggaataaaactttacggtgaatcctttaatatgtttggaataccattattcattattgctatcattttatttacaatcggtacagtattcgtttataaaatacagcaatcaagattaaagcagtag

SEQ ID NO: 411055 - DNA, 870 bp, Staphylococcus aureus
atgtataaaaattataacttgacccaacttacactaccaatagaaacttctgttagaatccctcaaaatgatatttcgcgatatgttaatgaaattgttgaaacgatacctgatagcgaattcgatgaattcagacatcatcgtggcgtaacatcctatcatccaaaaatgatgttaaaaatcatcttatatgcatatactcaatctgtattttctggtcgtagaatagagaaattacttcatgatagtattcgaatgatgtggttagctcaagatcaaacaccttcttataaaactattaatcgttttagagtgaatcctaatactgatgcgttaattgaatctttatttattcagttccatagtcaatgtttaaagcaaaaccttattgataataattcaatttttattgatggtacaaaagtagaagctagtgccaatagatatacatttgtgtggaagaaaagtattcaaaatcacgaatcgaaattgaacgaaaattcaaaagcattatatcgtgacttagttgaagaaaaaataataccagagataaaagaagatggagatagcgatttaacaatagaagaaatagatttaattggtagtcatttagataaagaaatcgaagatttaaatcattctattgagaacgaagattgtgctcaaattagaaaacagacccgtaaaaaaagaactgggattaagaagttcaaaaagaagtttgatgattattccgaaagaaaaagtaaatatgaagaacaaaaatcgattcttaaagatagaaatagcttttctaaaactgatcatgatgcaacttttatgagaatgaaggaagaccatatgaaaaatggccaacttaagccaggataa

SEQ ID NO: 411056 - DNA, 717 bp, Staphylococcus aureus
atgaataaaaatataatcatcaaaagtattgcagcattgacgattttaacatcagtgactggcgtcggcacaacagtggttgagggtattcaacaaacggctaaagctgaacataatgtgaaactaatcaaaaatactaatgtagcaccatacaatggtatcgtttcgataggatctggaacaggattcattgtcggtaaaaatacaattgttaccaacaagcatgtcgttgcaggtatggaaattggcgcacatattattgcgcatccgaatggtgaatataataatggcggattttataaagttaaaaaaattgtccgtttttcaggtcaagaagatattgccattctacatgtggaagataaagctgttcatccaaaaaacaggaattttaaagattacacaggcattttaaaaatagcatcagaagcgaaagaaaatgaacgcatttcaattgttggctatccagaaccatatataaataaatttcaaatgtatgaatcaacaggaaaagtgctgtcagttaaaggcaacatgattattactgatgctttcgtagaaccaggcaactcaggttcagctgtatttaacagtaaatacgaagttgtaggtgttcactttggtggaaacggtcctggaaataaaagtacaaaaggatatggtgtttatttctctcctgaaattaagaaattcattgcagataacacagataaataa

SEQ ID NO: 411057 - DNA, 396 bp, Staphylococcus aureus
  misc_feature (198)..(207): n is a, c, g, or t
gtgacaggtaatcaagctattacacaagttcatgttcaaaaggttaagcaaaacaataataaagaactttatgaaatggctaaatattccggtaaagatagcgattatctcgttaatcaaaaagtattcgacgcattttataaagcattaaaaggcaaacaggtacttgtctattctggattgtttaaagatgcacgnnnnnnnnnngatgcacgcaaaaagctaaaaaatggcgagttggattatctcaaagaaagtgatccgacagaatatatttaccaaatcttttatgtgtggaatcaaaaagagtatctagcaagtgagatttacgacttaaccgaagaagaaaaacgagaagtaaacaaccaaatgattaacgaaattgaagaagagtaa

SEQ ID NO: 411058 - DNA, 273 bp, Staphylococcus aureus
atgcgccgagcacatgcaaaaaagcccctaacaactaaaagttgtaaggtaaaagagggatacatgcgccgagcacatgcaaaaaagcccctaacaactaaaagttgtaaggtaaaagagggatacatgcgccgagcacatgcaaaaaagcccctaacaactaaaagttgtaaggtaaaagagggatacatgcgccgagcacatgcaaaaaagcccctaacaactaaaagttgtaaggtaaaagagggatacatgcaccgagcacatgcataa

SEQ ID NO: 411059 - DNA, 201 bp, Staphylococcus aureus
atgacatttaaaaacaatcataatttcaatgaattagttttaacgaatgaagacattagaattttaaaaaatgtcttagaagatgcagtcagtgtttatgatgaatattcggtatgtaatgaagaatccgattttgcttactgtttattaagagacttatatacattagacagcttagctatttcgtcaaataatgtttga

SEQ ID NO: 411060 - DNA, 906 bp, Staphylococcus aureus
atggaagaaaaacaatacttatggagatataacgatataaaaaaaagaatgaatgaacttcacaaaaaatataaagaattagtggatatattttttggtgatgtaatagataaaaatactggatacttccccttttattccggtataaaatatagctacgcagatttgaatatcagtttttacagaggtttaatttatattcacggtgggtcagaaggcatgcaagcgaaaaaaataaatatttctgtagatgatgttttaaaaagaacagaaagatctttcgagaagttaagtgaatatataaaaagtactttcattttcgaaaaagtcatacatgattttcaaatgtttaacttgagcgatttagctagtatatacaacgacgatgcaattgcgcattattattttgaaactcattctgacttatatttatcagataaatctacaaaaatttatcgaacacctaattctttgttagaaaacgcaaatgatttaccggcttctttaagaaaatacactcaattattagaaacagttaatgacaaggattttgaaactcatatagttgaagcttatgattgctttatgtctgaaaaaaggctagctacatcactacttttaggtagagcgctagaactaatgtgtaggctgatattgaacaagtttgataaagatataattaaacaaacacctgattacaagaggaatataagaacatttttaaacgaaatggaaaacaacgatttaatagaagaacatttaaaacattcagtcaaagctgctattgaacacagaaactctattatgcatggtattaaaatcgaagagtacaattcgataattcaaacattatttgacgaaatagctaagctgtctaatgtatataagtctcttaataaacagtaa

SEQ ID NO: 411061 - DNA, 675 bp, Staphylococcus aureus
atgacttttggagatagaataagaaatttaaggaagcaaaaaggtttgactttacaacaacttagcgatgaactgcatgaaaaattcccttcaaaggacaagaaaaacagttttactaaaggtaaattgtccaattgggaaaataacaaatcagaacccatagcgaaaactgtatctcaactagcttcttacttcggtgtaagcatggattatttaattggtttagaagatgatattgttccattagaaaacattaatcattactatcaagtgccattttatggaaaagtttctgctggaaattttgagacagtcgaaattgaaacaaaagattttgatattccagacgtagcctttaatggtcgtaagcctagtgaatgcatagcgttacaaataaatggtgatagcatgaacaaaatacttgctaacggttcttatataattgtccatgattatagaaagtcttgtgatcataaacttaacagcaatgacatccttgtattacgtctaggtggtgaatatacagttaagcgtgtgagacgtactgaaacaaaactacatttagacccagtaagctattcagatgaatttaaaactaattcttacgatttagattctattgatgaaatcgaagtgataggcaaagttatttataactatcgaatttttgattaa

SEQ ID NO: 411062 - DNA, 240 bp, Staphylococcus aureus
atgaacggatataacaagttgaaaggtttgttaacagaaagaggcatcaagaataaagatttagccgaattacttgatataaatagaacaactgttaataaaaaactaaatcgaactaatgggaacgacttttcaatgtcagaagtaagagcaatttgtttgtacttagatatcagtgcagacatatattttttaaatcaaagtcgtgaaaacacgacaaaagaaaaacaaacgctttaa

SEQ ID NO: 411063 - DNA, 318 bp, Staphylococcus aureus
atggctgaaaatattaaaacagaacaacattattacactaaagatttctcaggatacagaaatgaagaagataattttgtagcaaatcaagaattgacagtaacaatcacattgaacgagtacagaaaacttattgaaataaaggctgttaaagataaagaagaagatacttacagaggtaagtattttgcggaagaaagaaaaaacgaaaaattggaaaaagaaaatataaaactaaaaaacaaaatttatgaattacaaaacgaagaagataacgaggagtgcgaagaggagtacgaagaatacaaggaggactaa

SEQ ID NO: 411064 - DNA, 261 bp, Staphylococcus aureus
atgtattacaaagcgggtgagataaaaaataaaattataaactttaacgggttcgaatttaaagtgtctgcgatgaagagacatgacggtatcagtatacaagttaaggatatgaataatgttccacttaaatcatttcatgtcgtagatttaagcgaactatatattgcgacggatgcaatgcgtgacgttataaacgaatggattgaagaacacacagacgaacaggacagactaattaacttagtcatgaaatggtag

SEQ ID NO: 411065 - DNA, 360 bp, Staphylococcus aureus
atgggcagtgttgtaatcattaataataaaccatataaatttaacaattttgaaaaagaaataatggcaaagcgtgggataaatgctggaattgtttctaaacgtgtaagaggttgttgggagttttcagaagctttagacgcgccttatggcatgcatctaaaagaatatagagaaatgaaacaaatggaaaaaattaaacaagcgagactcgaacatgaattggaaagagagcgaaagagagaggctgagctaagaagaaagaagccacacttgtttaatgtacctcagaaacatccaagaggacgttatgcgtgctacctgatggaaaacgacatattcgtgaaagttaagaagtag

SEQ ID NO: 411066 - DNA, 537 bp, Staphylococcus aureus
atgactaacacattaacaattgatcagttacaagagttattacaaatacaaaagaagttcgacgatagaataccgactagaaatttaaatgacacagtagctagtatgattattgaatttgcggagtgggttaacacacttgagttttttaaaaattggaagaaacaaccaggtaagccattagatacacaattagatgagattgctgattacttagctttcagtttgcaattaactttgactattgttgatgaagaagatttggaagaaactactgaggttatggttgatttgattgaaaatgaagttactttacctaaactacattcagtttattttgttcatgtaatgcatacgctaacagaacaatttgtaaaaggtattgataatagcattgtacaagttttaataatgccgtttttgtacgccaatacttactattctatcgaccaactcattgacgcatacaaaaagaaaatgaaaaggaatcatgaaagacaagatggaacagcagacgcaggaaaaggatacgtgtaa

SEQ ID NO: 411067 - DNA, 189 bp, Staphylococcus aureus
gtgacacaatacttagtcacaacattcaaagattcaacaggacgtaaacatacacacataactaaagctaagagtaatcaaaggtttacagttgttgaggcagagagtaaagaagaagcgaaagagaagtacgaggcacaagttaagataaggagagatggagatgccaaagaaaacggtaacgattga

SEQ ID NO: 411068 - DNA, 201 bp, Staphylococcus aureus; identical to SEQ ID NO: 407437

SEQ ID NO: 411069 - DNA, 420 bp, Staphylococcus aureus
atgagtttgagaaaatcaacgcaaagatatttagaaagtgaattaagcaattacaactacttcgataaagatatagcgcgtgtaagagatgaagttttaaacccgtggagtcaacaagatactaatatcggtggagatagggtgcaaagcaatgtaagtgtaactgaaataaaagctattagagttgttaatgatagaagattatcgcaattggccagaatgaaatcggctatagaggttgtatataatcatagcactacagaaactcaaaaacttatggaactttattattttaaaaagcctagaacattaaatttaactggtgtagctcaagaaataaatgtaagtaaatctaccgcttatgatatgaggaaagatatattagttaggttagctgatgaattaggtataatacattaa

SEQ ID NO: 411070 - DNA, 996 bp, Staphylococcus aureus
ttgcctaacaaaaacactcaagaatattgggaagaacgcggacgcaaagcaatcgagaatgagttgaagcgtgataaaactaaagctgaagaaatagaacgtatattgaatatgatgattaagcgcattgaaaaagagatcaatgcgtttattgttaagtacggagattttgcaggcgttacattacaagaagcacaaaagattattgatgagttcgatgtaaaagcgtttcaagaagaagcaaaaagattggtcgaaaacaaagattttagcgaaagagcaaacgaggaattaaagaagtataacactaagatgtatgtatctagagaacaaatgttaaagattcaaatcgaattcttgattgcttatgcaacagctcaaactgaattatcgatgaggcaatatttcgaatcaacagcttatcgtgtgttcagtgatcaagcaggtattttaggtgaaggtgtacaagtagctaaagaggttatagatacaatcgttgatacacaatttcatggtgttgtttggtcagaacgattatggactaataccgaagcaatgaaacaagaagtagaagaaataattgctaatgtagttattagaggtcgacatccaaatgaatacgttaaagatatgcgcaagcacttaaataaattcgaaggaacagcacgacaaaagaccgcagcaatcaaatcattactttatacagaatcagcacgtgttcacgcacaatcaagcattgacagtatgaaggaaatctctccagaaggctactacatgtatattgcgaaaattgataatagaacaactaaagtatgtaaagggcttaacggaaaaatattcaaagttaaagacgctaaaatcggtattaatttctaccctatgcatattaactgtcgttcagattgcgctttactacctaaatccatgtggccgaaaaaaccaagcaagaaacgaaaaacaaaatacttcggagggaaagtgaaaagcggtgattga

SEQ ID NO: 411071 - DNA, 150 bp, Staphylococcus aureus
atgagtaatactgacaaataccttagagacatagcaagcgagttaaaaggtatacgtaaagagttacaaaagcaaaacgcaacagtttttgttgataccaaagtagacggcgaaaagttgaaagtattaaccaacgaacctctcttttaa

SEQ ID NO: 411072 - DNA, 804 bp, Staphylococcus aureus
atgaaatcaatcccggaaaaagagagtgatgaaatgataaaacgtgtaaataaattagtgcttggtattagtcttctgtttttagtcattagtatcactgctggttgtggcatgggtaaagaagcggaaataaagaaaagttttgaaaaaacattgagtatgtatccgattaaaaatctagaggatttatacgataaagaaggatatcgtgatgatcaatttgataaaaatgataagggaacatggattgtaaattctcaaatggcaattcaaaataaaggagaagctctaaaaataaaaggcatgcttttgaagatagatagaaatacaagaagtgcaaaaggattttactatactaatgaaataaagacggagaaatacgaagtagctcaggataatcaaaaaaaatatccagttaaaatgattaataataaattcatttctactgaggaagttaaagaagaaaacataaaaaaagaaatcgaaaactttaagttttttgcgcaatatagcaattttaaagatttaatgaattataaagatggagatatatcatataatccagaggtgccgagttattcagctcaatatcaattaactaatgatgattataatgtaaaacaattacgtaaaagatatgacataccaacaaataaagcgccgaagctgttgttgaaaggtacagggaatttaaaaggttcatcagttggatataaaaaaattgaatttacttttttagagaataaaaatgaaaatatttactttactgatagtctacatcttgaaccgagcgaggataaataa

SEQ ID NO: 411073 - DNA, 1908 bp, Staphylococcus aureus
atgtttgctgctaatgcaccacaaacaacaacacataaaatattacatacaaatgatatccatggccgactagccgaagaaaaagggcgtgtcatcggtatggctaaattaaaaacagtaaaagaacaagaaaagcctgatttaatgttagacgcaggagacgccttccaaggtttaccactttcaaaccagtctaaaggtgaagaaatggctaaagcaatgaatgcagtaggttatgatgctatggcagtcggtaaccatgaatttgactttggatacgatcagttgaaaaagttagagggtatgttagacttcccgatgctaagtactaacgtttataaagatggaaaacgcgcgtttaagccttcaacgattgtaacaaaaaatggtattcgttatggaattattggtgtaacgacaccagaaacaaagacgaaaacaagacctgaaggcattaaaggcgttgaatttagagatccattacaaagtgtgacagcggaaatgatgcgtatttataaagacgtagatacatttgttgttatatcacatttaggaattgatccttcaacacaagaaacatggcgtggtgattacttagtgaaacaattaagtcaaaatccacaattgaagaaacgtattacagttattgatggtcattcacatacagtacttcaaaatggtcaaatttataacaatgatgcattggcacaaacaggtacagcacttgcgaatatcggtaagattacatttaattatcgcaatggagaggtatcgaatattaaaccgtcattgattaatgttaaagacgttgaaaatgtaacaccgaacaaagcattagctgaacaaattaatcaagctgatcaaacatttagagcacaaactgcagaggtaattattccaaacaataccattgatttcaaaggagaaagagatgacgttagaacgcgtgaaacaaatttaggaaacgcgattgcagatgctatggaagcgtatggcgttaagaatttctctaaaaagactgactttgccgtgacaaatggtggaggtattcgtgcctctatcgcaaaaggtaaggtgacacgctatgatttaatctcagtattaccatttggaaatacgattgcgcaaattgatgtaaaaggttcagacgtctggacggctttcgaacatagtttaggcgcaccaacaacacaaaaggacggtaagacagtgttaacagcgaatggcggtttactacatatctctgattcaatccgtgtttactatgatataaataaaccgtctggcaaacgaattaatgctattcaaattttaaataaagagacaggtaagtttgaaaatattgatttaaaacgtgtatatcacgtaacgatgaatgacttcacagcatcaggtggcgacggatatagtatgttcggtggtcctagagaagaaggtatttcattagatcaagtactagcaagttatttaaaaacagctaacttagctaagtatgatacgacagaaccacaacgtatgttattaggtaaaccagcagtaagtgaacaaccagctaaaggacaacaaggtagcaaaggtagtaagtctggtaaagatacacaaccaattggtgacgacaaagtgatggatccagcgaaaaaaccagctccaggtaaagttgtattgttgctagcgcatagaggaactgttagtagcggtacagaaggttctggtcgcacaatagaaggagctactgtatcaagcaagagtgggaaacaattggctagaatgtcagtgcctaaaggtagcgcgcatgagaaacagttaccaaaaactggaactaatcaaagttcaagcccagaagcgatgtttgtattattagcaggtataggtttaatcgcgactgtacgacgtagaaaagctagctaa

SEQ ID NO: 411074 - DNA, 498 bp, Staphylococcus aureus; identical to SEQ ID NO: 405598

SEQ ID NO: 411075 - DNA, 279 bp, Staphylococcus aureus
atgatttatattgataaaaatgaaagtccagttacgccgttggatgaaaaaacaatgacgtctattattagtgcaacgccatataatttatatcctgatgcagcatatgaacaattcaaggaagcttatgctaagttttacggattatcgcctgaacaaattattgcaggaaatggatctgatgaattgattcaaaagttaatgctgatcatgccagaaggtccggcattaacgctaaatcctgattttttatgtatcaagcatatgcggcacaagtaa

SEQ ID NO: 411076 - DNA, 759 bp, Staphylococcus aureus; identical to SEQ ID NO: 405607

SEQ ID NO: 411077 - DNA, 345 bp, Staphylococcus aureus
gtgacaaaagagaaattgaaaattgcgaatttaactaatttaactagtaatgcaatcaaagctggcgatgatggatttagaaagtattttgtaaattaccaaacattaaaaaagattcataaaggaataacaaatccaagcgatgaacaaggaatagattatttgccatttcaatatttagctgattatattcgaagccttaaatatgacgggataatgtatgagagcatattacaagatggtacttttaactttgtgttttttgatcaaagtttatttgaatgtgttaattatgaaagaaaaagagtaagtgacgttaaatatacattgactaagctaagttga

SEQ ID NO: 411078 - DNA, 1203 bp, Staphylococcus aureus; identical to SEQ ID NO: 407398

SEQ ID NO: 411079 - DNA, 243 bp, Staphylococcus aureus; identical to SEQ ID NO: 407422

SEQ ID NO: 411080 - DNA, 1617 bp, Staphylococcus aureus
atgagatttacaccccgaggaattttgaacaacaccgattatgaactaaattctgaattttattatgtgccagcaagtgataaacaaatgaatgatcaaagagatatgactaataaaagcatagtaggtaatttagtctatagaaataatttctataacgaagtgtatactcaaccagtttatgatttagacgattctaacgaaaaatatcaaacaccacatattataagtatagatgattctgaatttgattataacttaactaatttagatgattattttactaaagatacagcaaataaaggttatgaaaagctagtaaatgccattaaatcagaagaaattacctattttgacagtgatattaatgaagttgatgattttacacaacaagatgaatattcaaatgattggtatactaacacttttgtggatttagtattaagtatgaaaggatattcatatcatgtagaaccaaatagagaatctgttattgaggattcacatatcataacagaaaatgatattacttataatgtaagctataaccccgaaaaacatcatttatatattaatgacttcccagcaattccaatagaagaaaacgataatataagattattaaatgataacttaactcaagacatggaaaaaacttacgataatataaactataatttttcatacaatgattttaaaacacttgaagatgattcttatatttatattgatttaacagattataaagataacgaaggtaaatttgttaaaaatctaatagaagatataccacctaatgaaattattaaagatagattaaaacaaaatattaatttatttgacgaacgagcaaattataatgccttagctgtttatagaagggatttagaagatttttcagatagaaataatttagatagcttagataaagttaaagatttaaaaacattctatgatacggaaattaatattaaaggattgaacattaacaacgatattgagaaaaaggctttaaataatcaattagcctttaacctttataatgaaccgttaaataacatgtttagagataacaatgttttatatgaagtttatgaaaaagaaatttatgatgaaaaaattcccctttctatagaagatagaaaagaagtgaaaacttatttagatgacgctagaaacaatttttcaaataatttctatgaatatacaacgaacaaatcatctattttagctgaaaatagtttaactgttttagataaagctaaatatgatttagaatttgcccctgtatctaatcatttatacaaagaaagagaaaatttttacgaaggaatgaaacaagctaccctgcccttacacaatattactaaagaacaatataaagaaagagaaaatgatattgaaataatcggtcattttaaaaactatatcaatactgaattacatggaacaaagagttctgaattcaaacctaatttcgtaaatgattctttagaaaatgaaactaactcaatagcttttgaagatattataaatggatcagaagaaacacatagtaatattattaattctattaaaaatgaattaaagcaagaaagagataatttagaaatgtag

SEQ ID NO: 411081 - DNA, 273 bp, Staphylococcus aureus
atggctgatattcaaaaaatgttagaacaaaaagaaaaacttcaagaaaaaattaaagaagaaaagaaaaaagaatatgaaaaatttggaagatggttcttcaataaatttaaagtaaatagatcagcagacgcaaagaaaattataaataaaaatttgcttaatattgaagatactaaagaacacaatttagaaagaaatgaaattatagaagaaactaaaaattccaatgaagaaaacaaagaaataaatgaaatcaaccacaatatttaa

SEQ ID NO: 411082 - DNA, 624 bp, Staphylococcus aureus
atgaaaagaactgacaaatatagagaagaatatgaaagagaacaagagagagaaagacaatcaagaaataactatgacatcaacgaggaaaataaaagaaggttttatgaacatcaacaaagaatgtatgaagaacaaaaaaataaaaagtacaaaaagcgtaataaatggtttggatttatcattattattttagtaattcttttagtggctttaggtgtgaaatcatgtagtaataatgatgaaacacaagaatcaagtaataatcaagcgcaacaagataatacagatcaatacgttcaacaaaaagatgatgaattacaaagtaaaattgaagatacaaagacaagtatagaaaattctaatgatgatacgcaatctaaacttcaagaattaaaagacgaagtaaataatctaaagaataatgctaatgatgataagacagaaaaagtagcaaatgattatcaagatacagtaaaccagttagacaatgcacagacagctaaagaaaatggtaatgatagtaaaatgaaagaagaactgaataaagtaaatagtaagttagatgaaataaaagataaaataacatcttggcttgataaagataacaacaaaaacgaataa

SEQ ID NO: 411083 - DNA, 615 bp, Staphylococcus aureus
ttggggaatttagattttgatcacgaaggatacagaaaactattaccattaaaagatttcaaacattttataaaacatagcgacagcaagactagaaatcattttattggtatggcttttaataataaaacagatgtgtttagtcgtaacttctctaataaaatgataaacatattccctaaaaatgaattttatattcatatacaacaatttccagagaatgatagcccttcttatatggtatacaacactgatattacagcatttattcagtttaggttagttgggcgatcagaaaataagtatttagaaaacattatcagagattatggcgtattaatagaagttgaggccttacattcatttaaaaaaggtatgggggcaatgcttgtaagtcaattggaaaagttatcagataaactgtttatacctatatatctttatgatactaatttaaaagatgaattatattatcaagacttaggattctttgatactactaaaaaagggaatcatggagaaccacttttagtatataaacctaaaaatctagaaactaataaaaaagaaaagcctattaaatctttattcaagaaagtattcaatatcaattag

SEQ ID NO: 411084 - DNA, 429 bp, Staphylococcus aureus; identical to SEQ ID NO: 410577

SEQ ID NO: 411085 - DNA, 1137 bp, Staphylococcus aureus
atggatttgagttcaacgcgactaggtaacaatgtcaaagaacgtactgctttaatctctaaagtcatggttaatcttgacgacttaccattcgttcacagtgacatggaaattgatatgttaggtgatgcatatgaattcctaatcgggcgctttgcggcgacagcgggtaaaaaagcaggcgagttctatacaccacaacaagtatctaagatactggcgaagattgtcacagacggtaaagataaattacgtcacgtgtatgacccaacatgtggttcaggttcactgttgttacgtgttggtaaagaaacacaagtgtatcgttatttcggtcaagaacgtaacaatactacatacaacttagcacgcatgaatatgttattacatgatgtgcgttatgagaacttcgatatccgtaatgatgacacattggaaaacccagcctttttaggcaatacatttgatgcggttattgcgaacccaccgtatagtgcgaaatggactgcagattcaaagtttgaaaatgacgaacgattcagtggttacggcaaacttgcgcctaagtctaaagcagactttgcctttattcaacacatggtacattacctagacgatgaaggtaccatggccgttgtactcccacatggtgtattattccgaggtgctgcagaaggtgtcattcgtcgttatttaattgaagaaaagaactacttagaagctgtgattggtttgccagcgaatattttctatgggacaagtattccaacatgtattttagtatttaaaaaatgtcgccaacaagacgacaacgtactatttatcgatgcatccaatgattttgaaaaaggaaaaaatcaaaatcatttaagcgatgcccaagtcgaacgtattatagacacatataagcgtaaggaaacaattgataaatatagctacagcgcgacactacaagagattgccgataacgattacaacctaaatataccgagatatgtcgatacattcgaagaagaagcaccgattgatttagatcaagtccaacaagatttgaaaaatatcgataaagaaatcgcagaaattgagcaagaaatcaatgcatacctgaaagaacttggggtgttgaaagatgagtaa

SEQ ID NO: 411086 - DNA, 627 bp, Staphylococcus aureus
atgaagagaattagtaaagatatatgggcagtatttaaattactgtatcaaaataaagggcgttttagcattaatgccttactattacagttaatcatgatttttattagtagtacatacttaattttactatttaatatgatgttaaaagtagctgggcaaagccaacttacgattaacaattggatggaaatcgtaagtcagcctgccagtgtgatacttcttattatattcatattaagtgttgcctttctgatttatgtagagttttcattgttagtttatatggtttatgccggctttgatcgacaaattattacatttaaatccatttttaaaaatgcctttgtaaatgtgcgtaaactcataggtgtaccagttattttctttgttatttatttaatgttaatgatacccattgccaacctaggactaagttcagtattaacaaaaaatatttacatacctaaatttttaacggaagaacttatgaaaacgacgaaaggtataatcatttacggtacctttatgattgctgtatttatattaaactttaaattaatatttaccttaccgttaacgattttaaaccgtcagtcgttatttaaaaatatgagactaagttga

SEQ ID NO: 411087 - DNA, 1089 bp, Staphylococcus aureus
ttggaactcatcattggtgcgattttaacattaattatttcaggagcaacatatcttgctatttgtgtagatgaagaaggagataagtttttagtctcatcaattttatttgttgtattgaaaagcgcattgttcttctattatttatttacgaaattatcattaatcagtgtgttagtactgcacttaaaacaagagaatgtattagaccaaccgggcttagaatttaaatacccaaaaccgaaacggaagtctaggttctttataatttcaatggtacttgcagtgacatgttttatcggttataacatgtacttactttacaataatactatcaatacaaatatctccattattggccatcgtggtttcgaagataaaggcgttgaaaattctattccgtcattgaaagctgctgcaaaagcgaatgtcgaatacgttgagttagatacaattatgacgaaagataaacaatttgttgttagtcatgataacaatttgaaacgtttaacaggtgttaataaaaatatttctgaatctaatttcaaagatgtcgtcggtttgaaaatgcgtcaaaatggacatgaagcaaaacttgtatccttagacgaatttattgaaacggctaaacaatcaaatgtgaagctactagtagagttaaagccacatggtaaagaaccagcagattatacacaacgtgttattgatattttgaaaaagcatggtgttgaacatcaatatcgtgtgatgtcattggattatgatgtgatgactaagttgaaaaaagaagcgccatatctcaagtgtggttatatcattccgttgcagtttggtcattttaaagaaacatcattagatttctttgtcatcgaagatttttcttattcgccaagacttgttaatcaagcgcacttggaaaataaagaagtctatacttggaccattaacggcgaagaagatttaacgaaatacttacaaaccaatgttgatggtattatcacagatgacccagcattagctgatcagattaaagaagaaaagaaagacgaaacatacttcgatcgttctataagaattttgtttgaataa

SEQ ID NO: 411088 - DNA, 927 bp, Staphylococcus aureus
gtgaatcaaaatcgcacgttacaagggacaatcattagtgagaagcgagtaagtcatgaagattcacaaaaagtacaagcactgcttacagctattcaaacaaatatggtagccggagaattaaatatcaacaaagaagacttacaaaaattacaatcacaaagtaaagttgataataaggtgatttctaatgatgaagtcgataaagtatcagaaggacaaaagattttcaactatgctttagcttacggcattatctttctaatgttctttattgttttaaattatgcatctcaaatagctatggaaattgctagtgagaaaacatcgcgtgtcattgaaatgattattacaagtatttcaccaatccaacatatttttgctaaaattttaggcgttatagcagttgccgtgactcagattattttaattgtattgatggcagttatatgcatttttgcctttgacttaaaagacttgctacaaggttttaacgtggaaatgaatcaattgtcttggcaaattattattgtcggaattataagtagtattgttggaattatggcgtatgtattacttgcagccatcctcggatcattaacatctagaatagaagatttaaatcaatctttgatgccactgacattacttggtatgattgcattttatatcgcgatattcacgataaataatcctgatggacaacttgctttaatcacaagttatattccgtttttagcgccatttcaattagttgtacgcgctcaaacttcagggcttcaaatatatgaggtcatcttaagttctttaatctcaattgtaatggtagctgtcttgatatggattgcaattaaaacatataaagattcagtacttacatttgaacgtggcttatttaattcaatgaaacgtgtatttaaaaaataa

SEQ ID NO: 411089 - DNA, 309 bp, Staphylococcus aureus
atgcataagttttgggcgacatttactttgacatatatcaaaaaaattaaagctaaatcatttgtaatttttatgattattattgctgccttaatgattggcctatctaacattgataagattattaacatgtttgatgatggtccagataaaattggtgtagcagcaccgaatgaacaaatctataaggttttcaagcaacaggcgaatacatttcatagtgatgctaagtttactaaagtttctatagaagatgctgaaaaagaagtaaaaaacataaacttgataaagcttatattatcaaggtga

SEQ ID NO: 411090 - DNA, 621 bp, Staphylococcus aureus
atgatgatttcacacttgataatggctactacgaagaagaaacatcagatagcgactcagattcagacagtgactcagactcagatagcgactcagactcagacagtgactcagactcagacagcgattcagactcagatagtgattcagattcagatagcgactcagattcagacagtgattcagattcagacagcgactcagattcagatagcgactcagattcagatagcgactcagactcagatagcgattcagactcagacagtgactcagactcagacagcgattcagactcagatagcgactcagattcagatagcgattcggactcagatagcgattcagactcagatagcgactcagactcagacagcgactcagactcagatagtgactcagattcagatagcgattcggactcagacagtgattcagactcagatagcgattcagattcagacagcgactcagactcggatagcgattcagattcagacagtgattcagattcagacagcgactcagactcagaaagtgattcagactcggatagcgattcagattcagaaagtgatgccgattcagattcaggtaagcacacacctgttaaaccaatga

SEQ ID NO: 411091 - DNA, 699 bp, Staphylococcus aureus
atgaaatttacagcattagcaaaagcaacattagcattaggaatattaactacaggtgtgtttacaacagaaagtaaagctgttcacgcgaaagtagaacttgatgagacacaacgcaaatattatatcaatatgctacatcaatactattctgaagaaagttttgaaccaacaaatattagtgttaaaagcgaagattactatggctctaacgttttaaactttaaacaacgaaataaagcttttaaagtatttttacttggtgacgataaaaataaatataaagaaaaaacacatggccttgatgtctttgcagtacctgaattaatagatataaaaggtggcatatatagcgttggcggtataacaaagaaaaatgtgagatcagtgtttggatttgtaagtaatccaagtctacaagttaaaaaaatcgatcctaaacatggcttttcgataaatgagttgttctttattcaaaaggaagaagtatcgttgaaggaactggattttaaaataagaaaaatgttagtcgaaaaatatagattgtataaaggcgcgtcagataaaggtagaatcgttattaatatgaaagacgaaaagaaatatgtaattgatttaagtgaaaaattaagttttgatcgtatgtttgatgtaatggatagtaagcaaattaaaaatattgaagtgaatttgaattaa

SEQ ID NO: 411092 - DNA, 1446 bp, Staphylococcus aureus; identical to SEQ ID NO: 407891

SEQ ID NO: 411093 - DNA, 156 bp, Staphylococcus aureus; identical to SEQ ID NO: 409125

SEQ ID NO: 411094 - DNA, 663 bp, Staphylococcus aureus
atgaaatttgagaaatatatagatcacactttattgaagcctgagtcaacacgtacgcaaatcgatcaaatcatcgatgaagcgaaagcatacaattttaaatctgtatgtgtgaatccaacgcatgttaaatatgcagcagagcgactagctgattcagaggtgctcgtttgtacggtaataggattcccattaggtgcgtcgacaactgcaacgaaagcatttgaaacagaagatgcaattcaaaatggtgcagatgaaattgacatggtcatcaacatcggcgcattaaaagatggacgttttgatgatgtacaacaagacattgaagcagtggttaaagctgcgaaaggtcacacagtaaaagtgattattgagacggtattgttggaccatgacgaaattgtaaaagcgagtgaattaacaaaagcggctggtgcggacttcgttaaaacttcaacaggttttgcaggtggcggtgcgactgcagaagacgttaaattaatgaaagatacagtaggtgctgatgtagaagtaaaagcatcaggtggcgtacgtaatttagaagatttcaataaaatggttgaagcaggtgcgacacgtattggtgcgagcgcaggcgttcaaattatgcaaggtttagaagcagattcagattactaa

SEQ ID NO: 411095 - DNA, 714 bp, Staphylococcus aureus
atgattccacaagaagtcacaccaatgattccttcaagcttagttgcaacctacccatttaacaatgaatcacctatcgtgacattgattaaacgttatcaatcagctgcatcattgtctgattttgaatcatcggcgaaatcgtggattgaaacttatagtaaagcattgcttggtctcgtaatcccactagttactaaatatggcattgcattagaggctcacttgcaaaatgctattgcaacatttcggaaagatggtctattggacacgatgtatattagagactttgaaggtttaagaattgataaagcacaactaaatgaaatgggatacagtacatctcatttccatgaaaaatcaagaattcttactgattcaaaaacgtctgtgtttaacaaagccttttattctaccgttcaaaaccatttaggcgaattaattcttacaatctctaaagcatcaaatgattcaaacttagaaagacatatgtggtatatcgttcgtgatgtactagataacatttttgatcaacttgtactttcgacacacaaatctaatcaagtaaatgagaatcgcataaatgaaattaaagataccatgttcgcgccatttatagattataagtgtgttacaacaatgcgtcttgaagatgaggcacatcattatacttatattaaagttaataatcctttgtatcgagaaaataattaa

SEQ ID NO: 411096 - DNA, 123 bp, Staphylococcus aureus
atgttaggaactgatgaattgtataaattgttatataggcatatgggaccgcaaaattggtggcctgctgataatgacattgaactgatgttaggtgcaattttagttcaaaatactagatga

SEQ ID NO: 411097 - DNA, 987 bp, Staphylococcus aureus
atgaatgtaattatcgatgaaagaaaagagaatgctatgacatttaataaagtattattgagctggatagtcatattgattataacaactagcatatatctattttggcagttgggggatatcaatgatgtatttaaccagtctattttaatcaatgttagattaccgagattattagaagcattgttgacaggtatgatattaacagttgcaggtcttatatttcaaacagttttaaataatgcattggcagatagctttacattaggattggcaagcggtgctacatttggttcaggattagcattatttttaggtttaacaacgttatggattcctgtattttcaataacatttagtttgataacattaataactgtattagtcattacgtcggtattgagccaaggctatccagttagaatcttaatattaagtggtttaatgattggtgcattattcaattcacttctatattttttgattttattaaaacctcgcaaattaaatacaattgccaattatttgtttggtggctttggtgatgcagaatactcaaatgtatccataatagcaatcacatttatcattgcactgtttggtatatttatcattcttaatcaactaaagttattgcaattaggagaactaaaaagtcagtcactaggcttaaatgttcaattgattacatatatcgcgttatgtatagcttctatgataacggcgataaatgtcgcatatgttggcatcattggattcattggtatggtgataccacaactcattagaaaatggcagtggaaacaatcattaggaagacaattggctttgaatattgtaattggaggacaaataatggttatggcagattttattggtagccatatactgtcaccagtacaaataccggcaagcattattattgcattaattggtataccagtgttattttacatgctaatatctcagtcgaaacggttacactag

SEQ ID NO: 411098 - DNA, 372 bp, Staphylococcus aureus
atgttttatgaagatgagaaagaattacatgctaggtttcaaaagattaaagataatttctttgagactttaaaagaaaaaatgccagtctttaataaaggcatgtggtatttatatattttaaaattagaatatgattttatctatgttggtattactagtgatccacgaaaaagaataagaaaacatttttttggaaagggagcgaagataactcaaaaatttatgccattagaagtattagatattattgaatgtagaccagtaagagatgaagtagaacatgttgaaaacattgttactgaaaatttgtttgatgtatatggcagagataaagtttttggagggaagtattgtaatactaaaaaataa

SEQ ID NO: 411099 - DNA, 945 bp, Staphylococcus aureus
atgagtagaaaagagcaagaaattcattcaaagcaaagcacattacaagaagttacaaattacacctcaaccggatactctaatagccggttggacgcacatactgtgtgcatatctgatccaaaattaagttttgatgcaatgacgatcgttggaaatctcaaccgagacaacgctcaagccctttctaaatttatgagtgtagagccccaaataagactttgggatattcttcaaacaaagtttaaagctaaagcacttcaagaaaaagtttatattgaatatgacaaagtgaaagcagatagttgggatagacgtaatatgcgtattgaatttaatccaaacaaacttacacgagatgaaatgatttggttaaaacaaaatataataagctacatggaagatgacggttttacaagattagatttagcctttgattttgaagatgatttgagtgactactatgcaatgtctgataaagcagttaagaaaactattttttatggtcgtaatggtaagccagaaacaaaatattttggcgtgagagatagtaatagatttattagaatttataataaaaagcaagaacgtaaagataatgcagatgctgaagttatgtctgaacatttatggcgtgtagaaatcgaacttaaaagagatatggtggattactggaatgattgctttagtgatttacatatcttgcaaccagattggaaaactatccaacgcactgcggatagagcaatagtttttatgttattgagtgatgaagaagaatggggaaagcttcacagaaattctagaacaaaatataagaatttgataaaagaaatttcgccagtcgatttaacggacttaatgaaatcgactttaaaagcgaacgaaaaacaattgcaaaaacaaatcgatttttggcaacatgaatttaaattttggaaatag

SEQ ID NO: 411100 - DNA, 630 bp, Staphylococcus aureus; identical to SEQ ID NO: 409261

SEQ ID NO: 411101 - DNA, 657 bp, Staphylococcus aureus
atgagtttgcggtcgcaaatgaacggagagaattcgaacaacagttatcaaaacacgagccaaccgaaaccgagcacagatttagagacacagaaacgcattttgaacgtcctagaaaacttagaatcaaatcacgagaagacgactttgaacttgagtaatgacgacaagttatatatcactagattaactgaacggataaaacgctcaaatgagcataaaatcaatattgagattgatgataagttaggcaaattgatacaacaaaaaattgataaaaacctcgataaaaaaattccagattttcattcaacgcaaacaatggagcgattcaagcaatctttgttaagtattgagcagaaacaagaaagactagatgatagccttgagagcgtacacaaatggtctatgtactttaaatcgctattgatgttgtcgttatttgcagttttatttattggtgtagtaggaacgtttatgggagggatttttaatgccttaggtgttcaacatgtgtatcaaggcttagaataccaaataaagcactcagaaggctttgtagcgtttttgtggcatttaggatatatcataccttatttaatgttagcagggcttatatggcttctatttgctttgaatgacaaatttaaatattag

SEQ ID NO: 411102 - DNA, 543 bp, Staphylococcus aureus; identical to SEQ ID NO: 408578

SEQ ID NO: 411103 - DNA, 189 bp, Staphylococcus aureus
atgggaaagaatttagaaatagtaacaagcttatttgtattaatacttgctataggcttttcaatttggaatttttataaccattcatatacaacagccataattatgttagttattggagtaatcaatattggttatttaattcaagaaataatagaaaaacgacgtgatgatgatggcaacaactaa

SEQ ID NO: 411104 - DNA, 330 bp, Staphylococcus aureus
atgaataacgaagaattggaatctaaacttttattaattaaacaatcgatagatgctttacaggaggaactagcacctaatctaaaaacaaaagatttagttttattgcgttatggttataacgttgacgaaattaaaaagttgaatgattatttgtttaaattaacaatgaataaaaatagagtaactaaaaaagaatttgaagagtttttgtgtagtataagaaatgttcctgaaattccgaatagacaagttattgatattttggaaggttataaaaatagtgatctttatgtagatttaattgactatattttgaatagtgattaa

SEQ ID NO: 411105 - DNA, 258 bp, Staphylococcus aureus
atgcaaaataaaaagactactcattttttgagtagccagggaattgtttttgatatattaaatgaaaggagtaatacattaatcatatcacacgcatttatgccgagaaaatttttggttggaatgagctatgtgttagctaactatgttagcgagttggttggtggtttgttgggattaatcccaacgaagtaccaactcaacaacacattatgctccgttggttccaaccaaaaagcaattggaataaagcaataa

SEQ ID NO: 411106 - DNA, 201 bp, Staphylococcus aureus
ttgtttaaagaagcgagaaagaaattaaagaatggtgaattggattatttaaaagatattgatccaactgaatacgtgtatcagattttttacatgtggaataaaaatgaatatttagcgagtgaaatttttgatttaacagacgaagaaaaacaaaaaataaatcatcaaatgataaatgaaattgaagaagaaaaataa

SEQ ID NO: 411107 - DNA, 1161 bp, Staphylococcus aureus
atgacactttcaaaagagacagaagtgatattcgattggcgtagaggtgtggaatatcattcagctaacccaccactctatgattcttcaacattccatcaaacaagtcttggtggcgatgttaaatatgattatgcacgaagtggcaaccctaaccgtgaacttttagaagagaagttagcacgattagaacaggggaaattcgcttttgcttttgcatcaggtattgctgcgatttcagcagtacttttgactttcaaatctggtgatcatgtcatcttacccgatgatgtatatggcggtacttttcgcctcactgagcaaattttgaatcgatttaatattgaatttacaaccgtagatactaccaagctcgaacaaatcgagggtgccattcaatcaaacacaaaattaatttatatcgaaacaccatcgaatccctgttttaaaattactgatatcaaagctgtttctaaaatagccgaaaagcatgaactactggtagctgtggacaatacattcatgacaccgttaggtcaatcacctttattacttggcgctgatattgtcattcatagtgctacaaaatttttaagtggacatagcgatttaattgctggtgctgtcattactaataatgaggcaattagtgaagctctttatttaatacaaaatggtacaggcaatatgttatctgctcaagatagctggacacttgctaaacatttaaaaacatttccaatcagatttaaacaatctgtcgaaaacgcgcaaaaaatcgtgtcatttttaataaagcaagatgaaatttcagaagtttattatccgggacttactgcatctcatttagaacaagctaaaaatggcggtgccgttattggcttacgtttagctgatgagtctaaagcacaacaatttgtcgatgcactgacattaccactcgtttcagtgagtctaggtggtgtggaaacaatactttcgcacccagcaacaatgtctcacgcaacactacctgaagaagtgaggcaagaacgtggtatcactttcggtctattccgattaagtgttggtctcgaagatcctgatgaactcattgcagacatcaaatacgcattaaaggaggcattcaatgagtcaattcctcacacaattgaaagataa

SEQ ID NO: 411108 - DNA, 1383 bp, Staphylococcus aureus; identical to SEQ ID NO: 411031

SEQ ID NO: 411109 - DNA, 267 bp, Staphylococcus aureus
atgataaatatttctttaaaccttgctatatcttctttagttgtagtagccccaaatgataatcttatactaccttcaatagatttgtctgataatcccattgcagccaatacttcatttaatttattacgtttagatgaacaagcactcgtcgtagatatcataatgtcatattttgaaaaagcattaactaatacttcaccttttacgccaggaaaactaatatttaaaacgaatggtgaacctgaagttgaagaattaatataa

SEQ ID NO: 411110 - DNA, 1128 bp, Staphylococcus aureus
atgaaaagtaaatacgaaccattgtttgataaagtagaattaccaaatggagtagagttgagaaatcgatttgtgttagcccctttaacacatatttcttcaaatgatgatggtactatttcagatgtagaacttccttatattgaaaagcgttcacaagatgttggtattacaattaatgctgcgagtaatgtgagtgatgtcggaaaagcatttccaggacagccatcaatcgcgcatgacagtaatattgaaggactaaaacgattagctacagcaatgaagaaaaacggtgccaaagcactcgtacaaatacatcatggcggtgcacaagcattgcctgaattaacacctggtggagacgtcgtagcaccaagtccaatttctttaaaaagtttcggtcagaaacaagaacatagtgctagagaaatgacgaatgaagagattgaacaagcaatcaaggattttggtgaagcaacgcgacgtgcaattgaatcaggatttgatggtgttgaaatacatggcgcgaatcattacttaattcatcaatttgtatcaccatactataatagaagaaatgatgtatgggcaaatcaatataaattcccggttgctgtgattgaagaagtgcttaaagcgaaagaagtgtatggcaataaagactttatagttggatacagattatctccagaggaagcggagtctccaggaatcacaatggaaattacagaggaactcgttaataaaattagccatatgccaatcgactatattcatgtttcaatgatggatactcatgcaacgacacgtgaaggtaaatacgctggacaagaaagactgcctttaattcacaaatggataaatggtcgtatgccacttatcggtattggttcaattttcacagctgacgaagctttagatgcagttgaaaatgttggtgttgacttagtagccattggtagagagctactactggattatcaatttgttgaaaaaattaaagatggacgggaagatgaaattattaattactttgatccagagagagaagataatcatcacttaactcctaatttatggcatcaatttaatgaaggattctatccattaccacgtaaagataaataa

SEQ ID NO: 411111 - DNA, 693 bp, Staphylococcus aureus
atgaaaaatcaaaaaattaattatgacaaggtgttgaagaaattaatcgggcagtgggaaagagaagcaatcagacctaaaatcttattgcatagttgttgtgcaccttgtagtacatatacattagagtttttaacacaatatgcagacattgcaatttatttcgcgaattcaaatattcatccgaaaaatgaatatttacgacgtgctaaagtgcaagaacaatttgtggaagattttaatcgcaagactggtgcgaatgtgaagtatattgaagcaccttatgaaccgcataagtttgtgaaaatggtgaaggataaagaattagctgatgaaaaagaaggcggcttacgttgtaccgcttgttttgaaatgcgtttggatattgtagcgaaagcagctgtagaacatggctatgattattttggcagtgcaatcacattatcacctaaaaagaacgcacaattaatcaatgaacttggtatggatgtccaaaaaatatacgatgtgaactatttgccaagtgattttaagaaaagtaaaggttatgagcgttccatagaaatgtgtaatgactataatatctttaggcagtgttattgtggatgtgtctttgcagcgatgcaacaaggtattgattttaaaacagttaataaagaagcgaaagcatttttagaacaatatccagattaa

SEQ ID NO: 411112 - DNA, 1002 bp, Staphylococcus aureus
gtggaagaatttaagcaacattataagggtttaattgatgaaagtttaacgtgccaagataaagtagaattgataaaaaagtgtgagaaatacactgacgaagtgattcgtaaggacgtcttgcctgaagacattgtcgatattcacaaaaactatatattgacgttaaacttaacgcgtgaagatgtgttcaagacattagatgtcttacaagaaatcgttaaaggctttggttatagttatcgagattatcaaagattggtagataaacttcaagttcacgataaagagatagacttagcttctagcttacaacaaacaatgcttaaaacagatattccacaatttgatagtattcaaattggcgttatttcagtggcggcacaaaaagtaagtggagattattttaatttaattgaccataacgatggcacaatgagctttgctgttgcagatgtcattggaaaaggtataccagctgctttagcaatgagtatgataaagtttggcatggattcttatggacactcacaattaccgagtgatggtttaaaacgtttaaatcgtgttgttgaaaagaatattaatcaaaatatgttcgtcacaatgttttatggtttatatgaagaaatgaaccatttattgtattgtagttcagctggtcatgagcctggatatatttatcgcgctgaaaaagaagaattcgaagaaatttcagctagaggtagagtgttaggaatcagttcacaaacacgatatcaacaacaagaaattccaatataccttgatgatttaattatcattttaacggatggtgtgactgaagctagaaatagtgaaggtacctttatagataaacaaaaacttttagaatatattaaaaaacataaacatatgcacccacaagatattgttcaaattatctatgaagcaattttaaagcttcaaaacccaaataaaaaagatgatatgactattttgattataaaaagagtaaattaa

SEQ ID NO: 411113 - DNA, 1320 bp, Staphylococcus aureus
atgtgtaatgataccttagaattactaagaataaaagatgaaaatataaaatatataaaccaagaaattgacgtcattatcaaaggaaaaaaagcaacagtggttaatgctgtactaacgtataagccttcggcctgttattgttgtggagttaaaaatgaaggacaaattcataaacatggtaagcgtgtttctcgtattactttacttaaaactcaagggtataacacatacctcaacttagctaaacaacgttttaaatgcttagaatgcaatggcacttttactgctaaaacgtcaattgttgatgagtcgtgttttatctcaagatgtgttactcaaaaagttatagaagaagctactaaagttaaaacagagattgatactgcagaagataactgtatctctccatctactgtaagtcgtattagaactaaagcggctaattcattacgaattaaaccctttaattgtttgccagaacacatcgctatggatgaatttaaaagcgttaaaaatgtaactggatcaatgagtttcatttttatagataatgatactcatgatgttatagatattttagaaaatagaactacaagattcttgcgtgcctatttcgagcgattcgatttaaaaaatcgacaacaagttaagacggttactattgacatgtatgaaccctatgtccgattatttcgcgacctatttcctaatgcagctattatttttgacagattccatatcgttcaacatttaaatagagaacttaataagtatcgtgtacaagttatgaatgaataccgtaataaaaaaggacctgattatacaatttttaagaataactggaaagtcctattgatggatactagtaaaaccatatttagtaaatacagatggaataaatcttttaaggcttataaacgctcatctgacattgtagaattcatgctttcaaaagacgatatactacgacactcctacgaacttgtccaaggattacgaaaagacctaaggttatgtaattggcctaaatttattaatcgtttaaattcagttagtaaaaagtctgtgagtaagggtgtatggaaagcggttaaatattatagaaaacatcaaaggatgttaagaaatacaatttattacccagcatttaataatggtgctatagaaggaattaataataagataaaattaatcaagcgaatttcttttggttacagaaatttcaacaactttaaagcacgtataatgatgattttcagcttgtacaaaggagaaaaaaagaagacaaccaagcccaataatggactggccgcctaa

SEQ ID NO: 411114 - DNA, 1038 bp, Staphylococcus aureus; identical to SEQ ID NO: 409930

SEQ ID NO: 411115 - DNA, 825 bp, Staphylococcus aureus
atgtatccaaactggggacaatataaacgcgctgatttaatcggacaatcttcttatattaaaaataatgatgtcgtaatattcaatgaagcatttgataatggtgcatcagataaattattaagtaatgtgaaaaaagaatatccttaccaaacacctgtactcggtcgttctcaatcagggtgggacaaaactgaaggtagctactcatcaactgttgctgaagatggtggcgtagcgattgtaagtaaatatcctattaaagaaaaaatccagcatgttttcaaaagcggttgtggatttgataatgatagcaacaaaggctttgtttatacaaaaatagagaaaaatggtaagaacgttcacgttatcggtacacatacacaatctgaagattcacgttgtggtgctggacatgatcgaaaaattagagctgaacaaatgaaagaaatcagtgactttgttaaaaagaaaaatatccctaaagatgaaacggtatatataggtggcgaccttaatgttaataaaggcactccagagttcaaagatatgtttaaaaacttgaatgtaaatgatgttctatatgcaggtcataatagcacatgggaccctcaatcaaattctattgctaaatataattaccctaatggcaaaccagaacatttagactatatatttacagataaggatcataaacaaccaaaacaattagtaaatgaagttgtgactgaaaaacctaagccatgggatgtatatgcgttcccatattactacgtttacaatgatttttcagatcattacccaatcaaagcctatagtaaatag

SEQ ID NO: 411116 - DNA, 1068 bp, Staphylococcus aureus
atgatatatagaaataatttcattgtgttcgttttatcattttttattagtattatattgtattcatcgcacgtattactcccatttatgtttggtcctattatcgcatcaatcatttgtgtgaaagttttcaaacttgatattaaatggccattcttacttagtgaattagggattgtactattaggggtgcaaatcggatcaacgtttacgaaaaatgtcgttatggatattaaagacaattggctttcgattattgttgtatctatttcgatattattaattgcaatagtaatggcatttatttttaaaaaaattgcacgtattaatacggaaacagctattttaagtgttataccaggagcactaacacaaatgctggtcatggctgaacaagacaaacgtgctaatttgttagttgttagcttaacgcaaacatcacgaattatatttgttgttgttttagtaccgttcatttcatatttttttcatgatggtaacatgcatgcgaatggaaagttaacaaaagtcttgcctttatcacaagtattaaacatagggcaaatagttattttagcgatagctatctttatagtttatctaattatgtctaaaataaagtttccaacatttcaattattagcaccactcattgtattaattgtttggaatttttctacaggtttaacatttacactagatcattggttgttgaacatggcacaactaatatatatgattagaattggagttcaaattgcgcatttattgtcagatttaaaaggtagactagcaatcgcaattacaattcaaaatattatgttgataattggtgcgctaatcatggtttatatcatacatttctttgataataatcctattaatgaattgtttcttggtgcagcaccaggaggggttaatcagatagttttagttgcattagctactggtgccgatgttgctatgattacgagttatcatattttccgaatctttttcatcctatttattattgcaccaggaattaattactttttaaaatatcgttcgaataagcgtgaagattag

SEQ ID NO: 411117 - DNA, 1176 bp, Staphylococcus aureus
atgactgaagaattcaatgaatcaatgattaacgatattaaagaaggtgacaaagtcactggcgaggtacaacaagttgaagacaagcaagttgttgttcatatcaacggtggtaaatttaatgggattattcctattagtcaactatctacgcatcatattgatagcccaagtgaagttgtaaaagagggcgacgaagttgaagcatatgtcactaaagttgagtttgatgaagaaaatgaaactggagcttacatcttatctagaagacaacttgaaactgagaagtcttatagttatttacaagaaaaattagataataatgaaatcatcgaagcgaaagtaacagaagtagttaaaggtggtttggttgttgatgtaggacaaagaggttttgttccggcttcactaatttcaacagacttcattgaggatttctctgtatttgatggacaaacaattcgtattaaagttgaagaattggatcctgaaaataatagagtcattttaagccgtaaagcagttgaacaagaagaaaacgatgctaaaaaagatcaattattacaatctttaaatgaaggcgatgttattgatggtaaagtagcgcgtttaactcaatttggtgcatttatagacattggtggtgttgatggtttagtgcatgtatctgaactttctcacgaacatgttcaaacaccagaagaagtagtttcaattggtcaagatgttaaagttaaaattaaatctattgatagagatacagaacgtatttcattatcaatcaaagatacgttaccaacacctttcgaaaatattaaaggtcaattccacgaaaatgatgtcattgaaggtgtcgtagtaagattggcaaactttggtgcatttgttgaaattgcaccaggtgtacaaggacttgtacatatttctgaaattgcacacaaacacattggtacgccaggtgaagtgttagaacctggtcaacaagtaaatgttaaaatattaggtattgatgaagagaatgaaagagtatcactatctattaaagcaacattaccaaacgaagatgttgttgaaagtgatccttctacgactaaggcgtacttagaaagcgaagaagaagataatccaacaattggcgatatgattggtgataaacttaaaaatcttaaactataa

SEQ ID NO: 411118 - DNA, 879 bp, Staphylococcus aureus; identical to SEQ ID NO: 409123

SEQ ID NO: 411119 - DNA, 636 bp, Staphylococcus aureus
atgatcgagttcctacatgaacatggtggacagttgatgtcgaaaacactggaacatttctatatttctatagtggcattattacttgccatcattgttgcagtacctataggcattttattatcaaaaacaaagcgaactgccaatattgtattaactgtggcaggtgtcttacaaactattccaacactagctgtacttgctattatgataccgatttttggtgttggtaaaacgcctgcaattgtagcgctatttatttatgtattattacctattttaaataacacggtactcggtgttcaaaatattgatagcaacattaaagaagctggaaaaagtatgggaatgacacaatttcaattgatgaaggatgttgaattgccgttagcattgccgcttatcattggtggcattcgtttgtcatctgtgtatgtaattagttgggctacacttgcaagttatgtaggtgcgggtggattaggtgatttcattttcaatggtttaaatttatatgatccactgatgattgtaactgcaacggtactcgttactgcactagcattaggtgttgatgccttattagctttagttgaaaaatgggtagttcccaaaggcttaaaagtatctggataa

SEQ ID NO: 411120 - DNA, 1926 bp, Staphylococcus aureus
atgaacaaacagcaaaaagaatttaaatcattttattcaattagaaagtcatcactaggcgttgcatctgtagcaattagtacacttttattattaatgtcaaatggcgaagcacaagcagctgaagaaacaggtggtacaaatacagaagcacaaccaaaaactgaagcagttgcaagtccaacaacaacaactgaaaaagctccagaagctaaaccagtggctaatgctgtctcagtatctaataaagaagttgaggcccctacttctgaaacaaaagaagctaaagaagttaaagcccctaaggaaacaaaagcagttaaaccagcagcaaaagccgataacaatacatatcctattttgaatcaggaacttagagaagcgattaaaaaccctgcaataaaagataaagatcatagcgcaccaaactctcgtccaattgattttgaaatgaaaaagaaagatggaactcaacagttttatcattatgcaagttctgttaaacctgctagagttattttcactgattcaaaaccagaaattgaattaggattacaatcaggtcaattttggagaaaatttgaagtttatgaaggtgacaaaaagttgccaattaaattagtatcatacgatactgttaaagattatgcttacattcgcttctctgtatcaaatggaacaaaagctgttaaaattgttagttcaacacacttcaataacaaagaagaaaaatacgattacacattaatggaattcgcacaaccaatttataacagtgcagataaattcaaaactgaagaagattataaagctgaaaaattattagcgccatataaaaaagcgaaaacactagaaagacaagtttatgaattaaataaaattcaagataaacttcctgaaaaattaaaggctgagtacaagaagaaattagaggatacaaagaaagctttagatgagcaagtgaaatcagctattactgaattccaaaatgtacaaccaacaaatgaaaaaatgactgatttacaagatacaaaatatgttgtttatgaaagtgttgagaataacgaatctatgatggatacttttgttaaacaccctattaaaacaggtatgcttaacggcaaaaaatatatggtcatggaaactactaatgacgattactggaaagatttcatggttgaaggtcaacgtgttagaactataagcaaagatgctaaaaataatactagaacaattattttcccatatgttgaaggtaaaactctatatgatgctatcgttaaagttcacgtaaaaacgattgattatgatggacaataccatgtcagaatcgttgataaagaagcatttacaaaagccaataccgataaatctaacaaaaaagaacaacaagataactcagctaagaaggaagctactccagctacgcctagcaaaccaacaccatcacctgttgaaaaagaatcacaaaaacaagacagccaaaaagatgacaataaacaattaccaagtgttgaaaaagaaaatgacgcatctagtgagtcaggtaaagacaaaacgcctgctacaaaaccagctaaaggtgaagtagaatcaagtagtacaactccaactaaggtagtatctacgactcaaaatgttgtaaaaccaacaactgcttcatcaaaaacaacaaaagatgttgttcaaacttcagcaggttctagcgaagcaaaagatagtgctccattacaaaaagcaaacattaaaaacacaaatgatggacacactcaaagccaaaacaataaaaatacacaagaaaataaagcaaaatcattaccacaaactggtgaagaatcaaataaagatatgacattaccattaatggcattattagctttaagtagcatcgttgcattcgtattacctagaaaacgtaaaaactaa

SEQ ID NO: 411121 - DNA, 927 bp, Staphylococcus aureus
atgaaaaaagtaaacagaaacattttaaatgcggtactagtcggtgctggatttttaagtagtctattaatgatcaataaaaataaagtgattactaaaaagcaaaccatccctgcttttttcaaaggcaatgcaccatatatatttgcgcatcgcggtggtatggctttaagaccagagcaaacgcaacttgcatttgactatgctaaacaattaggcgttgatggctttgaaacagatgtgagactcacaaaagatcaacagcttatcgtttttcatgacgcaactgttgatagaacgacgaacggctctggaaaagttagtgcccatacattagcagaattaaagaaattagacgcagcttatcacttcaaagatatcaatggactaacaccatatcgtggtcatgcacacacagctatactaaccttcgatgagttgctgaagcaatatcctgatatgtatataaacgtagacttaaaagatgctcctgaatcctatgaaggctcaatcgcaccacaaattatgtttgatacaattgcagaaaatcaagcatttgaccgcgttcttgtgacaagtttttataaagaacaaatcgttcgttttaataaaattgcacaaggatccgtcgcaattggtgctagccaacaggaagttacagaagcatttttaaaatatcatttattaggtggtaggtactaccaaccattagcacaaacgttccaaatgcctactcattttaaaggcattgatttgacttcatctcgttttatcaaatggttaaatgatatgaatatcgttccaggctattatggcgtaaatagtatagatctgatgaatgatttataccaaaaaggtgcacacacgattgtgacagatcgaccagatttagcacaacaattcaaacaaacaatcccgaacaaataa

SEQ ID NO: 411122 - DNA, 840 bp, Staphylococcus aureus
atgttgaatgagatacaaatattaaataatggatacccgatgccttcagttggattaggtgtttataaaatctctgacgaagatatgactaaagttgtaaatgctgcaattgacgcaggctatagagcgtttgatacagcatacttttatgataatgaggcttcactaggacgagcattaaaggataatggcgtcgatagagaagatttgtttataacaacgaagttatggaatgactatcaaggttatgagaaaacattcgaatatttcaacaaatcgattgaaaatttacaaactgattatcttgatttatttctaatacattggccttgtgaagcagatggtctatttttagaaacatataaagctatggaagaactttacgagcaaggtaaggtaaaagcaataggtgtatgtaattttaatgttcatcatctagaaaaattaatggctcaatcaagtatcaaaccaatggtgaatcaaattgaggtacatccatattttaaccaacaagaattacaagaattttgtgatcgtcacgatattaaagtgactgcatggatgcctttgatgagaaatagaggactactagacaaccctgtcattgttaaaattgctgaaaaatatcataaaacaccagcacaagttgtattacgttggcatttagcacacaatagaattattattccaaaatctcagacacctaaacgcattcaagaaaatatagatattttagattttaatttagaattaacagaagtagctgaaattgatgctttaaatagaaatgcaagacaaggtaaaaatccagatgatgtgaaaattggggatttaaaataa

SEQ ID NO: 411123 - DNA, 720 bp, Staphylococcus aureus
atgaatcaaattaaatccgaacaacaagaaaaaacagaactgattcaaaacttagcccatgatttaaaaacacctttagcaagcattatttcatattctgaaggactacgtgatggtataatcacaaaggatcatgagattaaagagtcatacgacatattaattaaacaagcaaacagattatcaacattatttgatgatatgactcatattatcactttaaatacaggtaaaacatatcccccagaattaatacaactagaccaattacttgtatcaatattgcaaccatatgagcaacgtatcaaacatgaaaaccgcacattagaagtgaatttctgtagcgaaattgatgcattttatcaatatcgaacgccacttgagcgtattttaacaaacttacttgataatgcgctaaaattttcaaatgttggtagtcgcattgatattaatattagtgaaaacaaagatcaagatactatcgacattgctattagcgatgaaggtattggcattataccagaactacaagaacgtatattcgaacgtacattcagagtagaaaactctcgtaatacaaaaacgggtggttctggattaggcttatatatagctaatgaactcgcgcaacaaaataacgcaaaaatcagtgtaagcagtgatatagatgtaggaactacgatgactgtaacattacacaaattagacattacgtcataa

SEQ ID NO: 411124 - DNA, 1029 bp, Staphylococcus aureus
atgaagaaaacagtcttatatttagtattagcagtaatgtttttattagcggcatgcggtaacaattctgataaagaacaatcaaaatcagaaactaaaggttctaaagatacagtgaaaattgaaaataactataaaatgcgtggcgagaaaaaagatggtagtgacgctaaaaaagttaaagaaactgttgaagtaccaaaaaatcctaaaaatgcagttgtgttagactatggcgcattagatgtaatgaaagaaatgggcttatcagataaagtaaaagcattacctaaaggggaaggcggtaagtcattaccgaatttcttagaatcatttaaagatgataaatatacaaacgttggtaatttaaaagaagtgaattttgataaaattgctgcgacgaaacccgaagtaatctttatctctggacgtacagctaatcaaaagaatttagatgaattcaaaaaagctgcacctaaagcgaaaattgtttatgttggtgcagatgaaaagaacttaattggttcaatgaaacaaaacactgaaaatatcggtaaaatttacgataaagaagataaagctaaagaattaaataaagatttagataacaaaattgcttcaatgaaaggtaaaacgaaaaacttcaataaaactgttatgtatttactagttaacgaaggtgaattatcaacatttggacctaaaggtcgttttggtggattagtttacgatacattaggattcaatgcagttgataaaaaagtaagtaatagcaatcatggacaaaatgtttctaacgaatatgttaataaagaaaatccagatgttattttagcgatggatagaggtcaagcgataagtggtaaatcaactgcgaaacaagcattaaataatcctgtattaaaaaatgttaaagcaattaaagaagacaaagtatataatttagatcctaaattatggtactttgcagctggatcaactacaactacaattaaacaaattgaggaacttgataaagttgtaaaataa

SEQ ID NO: 411125 - DNA, 1776 bp, Staphylococcus aureus
gtgaagaaaatcattagtatcgcaattatagttttagcgttggtattaagtggttgtggtgtccctacgaaatcagaagtggctcaaaagtcatcgaaagttgaagtgaaaggcgagcgaccaacaatacatttcctaggacaagcaagttatgaaaatgatatgaatatcgttaaagatcaattggaaaatgcaggatttaacgtgaagatgaatatccaaccagattatggtagctatcgtacacaacgtcaagccggcaattatgatatccaaattgatgactggatgacagtgtttggtgacccgaactatgctatgacggcattatttagttctacaggatcaaatagtttattgaaagataaacatgtagaccagttgttaaataaagcttctactcaaaatgaagcagatgttaaacaaacatataagcaaattgaagatgaagttgtatttgataaagggtatatggcgcctttatatggatcaaaaaagaatttagtatatgacaataaagtgttagataaaaatagtgttggattgccaaattcacgtgcattaatatggcaacaatttgattacaacaatagtagagaacgagatacgcggccacttgtgatgacacaacaagatggtgaaattcctacattggatccaatacgttcaattgcgccgtcagtatattcaattaatatgaatatgtacacaaggttattattattagatgaaaatgatcatttaacaacgaaaggttcgttaagtcatgattatgctgtgaataaggacaataaagcattttatttcttgttaagagatgatgattattttgcgaaagtggtcaatggacaagcacgtaatactggagagcgtgtatcggctgaagatgttaagttttctttagatagagcacgtgataaaaagtctgtgcctaacaataatacttacaatatgcacaaacatataaatgacatcaagatattaaaagatgaggacatcgatcagttgcgtaaagagaaagacaaggacgataaatcaacctatgataagttgattaaagcttataacgtcaaatcgttaacgacagatggtcaaaaagtaaataataaagacggtatttatcaaattgttaaaattacgacagatcaatcgatgcctcgagaggtaaattacttaacacactcttcggcaggcattttatctaaaaaatttgttaatcaagtaaatcaagaatatccaaaaggatatggggatagcagtacaattcctgcaaattcagatgggaaaaatgcgctgtatgcaagtggcgcatacattatgacacagaaaaatgcatatcaagcaacgtttcaacgtaatccaggattcaacgaaacagaaaaaggtagttatggaccagctaaaattaaaaatattacattgaagtttaatggtgacccgaataatgcattgtcagaacttagaaatcattcaattgatatgttggtagatgtgaatcaaaaacattttgatttaattaagtcggataaaaatttaagcattattcgcaaaaatggacgcaagtcagtctttttaatgctaaatattaaaaaaggtatatttatgacgcatccaaacttgagacaagcagtagttaatgcgatagatcaggatcaatttattaagttttatcgtggcgataaatttaaaattgcatcaccgattacaccacttgtcgatactggtaacgagcaacgtcaagatttagaaaaagtagaaaaagccatcaatcaataa

SEQ ID NO: 411126 - DNA, 774 bp, Staphylococcus aureus
atgaaagcacataaaattttctggttaaacttagcagcaattattattatttcaattgtagtcagtggcggtatgtttttggcaatgaagtgggaacaaattcatttgaaagatggtcttaaaaaagtactaagtacgtatcctattaaaaacttagaaacgctttatgaaattgatggtcacgataatccccattatgaaaataatgatcaagacacatggtatatagaatcctcttattcagttgttggatcagatgagcttttaaaagaagaccgtatgttgttaaaggtagataagaacacacataaaataactggtgaatatgacacaactacaaacgatagaaaaaatgctactgactcgacatacaaaagttatccagtaaaagtagttaataataaaatcgttttcacaaaagacgtaaaagatcccgcgctgaaacaaaaaatcgaaaacaatcaatttttgattcaaagtggtgatttaacaagcattttaaatagcaatgatttgaaagtcacacatgatcctaccactgattattataatttatctggtaagttgtcgaatgataatccaaacgttaaacaattaaaacgtagatataatattcccagaaatgcatcaacaaaggtggaattaaagggaatgagtgatttaaaaggcaataatcatcaagatcagaaactttatttttatttttcaagtcctggaaaagaccaaattatatacaaagaaagccttacttataataaattaagtgaacattaa

SEQ ID NO: 411127 - DNA, 543 bp, Staphylococcus aureus
atggatttaaatgaaaaaacaattgatcgaacagttatttataatggcaaaattgtagatgtagaaattcatacagtgacattaccaaacggtgaaacgtcaacaagagaattagtttatcataatggtgcagttgctgtttgtgcagtgacacctaaaaaagaagtcgtattagtgaaacagtatcgtaaaccagtagaaaaaccattgctagaaattccagctggtaaattagaagatgatgaagatagagtcgaagcggcaaagcgtgaattagaagaagaaacaggatatattgccaaagagttaacacatgttgtagatatgtatggttcaccaggtttttgcgatgaacaattatcaatatattttacggataatttagaagaaggtacagttcacttagatgaagatgaatttgtcgaagtcattaaagttccgattgagaatgttaaatcgatgctaatgaataaagaaatagaagatgcgaagactatcattgcattgcaacacctattattaaattataatcattctaaataa

SEQ ID NO: 411128 - DNA, 552 bp, Staphylococcus aureus; identical to SEQ ID NO: 407829

SEQ ID NO: 411129 - DNA, 456 bp, Staphylococcus aureus
atgttgcaaaaaggagaacaatttccaatatttaaattagaaaatcaagacggaactgtcattacaaatgatacattaaaaggtaaaaaggcgattatatatttttatcctagagataatacacctacttgtaccacagaagcttgtgactttagagacaatttagaaatgttcaatgatttagatgttgcagtatatggtataagcggtgattcaaagaaaaaacaccaaaattttattgagaaacacggattgaatttcgatttattagtagatgaagattttaaattagctaaagaaactggcgtatatcagttgaaaaaatcatttggcaaagaaagtatgggcattgtaagaacgacttttataatagatgaacaaggtaaagtattagatgttatcgagaaggttaaggttaaaacacaaatagaagaacttaaaaacattttggggtga

SEQ ID NO: 411130 - DNA, 795 bp, Staphylococcus aureus
atgcaattatattatttaggccctaaaggtacattttcatatttggcttgtcgtcagtatttttctgaaaatgaagcaacttttcaaccaaagtcaaatttatttgaagtcatcaaggcagttgcagatgatgacacatcgattggtgttgtccctattgaaaattctatagaaggaacaatcaacattgtggcagatgcacttgcacagcaagatgtctttgcacacggtgaaatacgcttagatattaactttgcattatatggtaatggaacagattccatttctgatattaaaaaagtgtattctattgcaccagcaatcagtcaaacaacaaattacatacatcaacatcaatttgactatgattatgtcgacagtacaattcaaagtttgactaaaattgaaaatggcgttgcagcaattgcacctttaggtagtggcgaagcttatggttttacacctattgatacacatattgaagactatccacataacgtgacacgttttttagttataaaaaatcagcagcaatttgatcaaaatgcgacatcattgatgtttttaattacaccaatgcatgataaacctgggctgttagcaagtgtgcttaatacatttgctttgtttaatattaatttatcctggattgagtctcgtcctttaaaaacacaattaggtatgtatcgatttttcgttcaggctgattctgcaattacaaccgatataaagaaagtcattgctattttagaaaccttagatttcaaagtagaaatgattggtgcttttaattaa

SEQ ID NO: 411131 - DNA, 468 bp, Staphylococcus aureus; identical to SEQ ID NO: 406968

SEQ ID NO: 411132 - DNA, 2046 bp, Staphylococcus aureus
atgatgaaaagtcaaaataagtatagtattcgtaaatttagtgtaggtgcatcttccattttaatagctacattactatttttaagtggtggacaagcacaagcagctgagaagcaagtgaatatgggaaattcacaggaggatacagttacagcacgatctattggggatcaacaaactagggaaaatgctaattatcaacgtgaaaacggtgttgacgaacagcaacatactgaaaatttaactaagaacttgcataatgataaaacaatatcagaagaaaatcatcgtaaaacagatgatttgaataaagatcaactaaaggatgataaaaaatcatcgcttaataataaaaatattcaacgtgatacaacaaaaaataacaatgctaatcctagcgatgtaaatcaagggttagaacaggctattaatgatggcaaacaaagtaaagtggcgtcacagcaacagtcaaaagaggcagataatagtcaagattcaaacgctaataacaatctaccttcacaaagtttaacaaaggaagcaccatcattaaataagtcagatcaaacaaatcaacgagaaattgttaatgagacagaaatagagaaagtacaaccacaacaaaataatcaagcgaatgataaaattactaaccacaattttaacaatgaacaagaagtgaaacctcaaaaagacgaaaaaacactatcagtttcagatttaaaaaacaatcaaaaatcaccagtagaaccaacaaaggaaaatgacaagaaaaatggattaaatttattaaaaagtagtgcagtagcaacgttaccaaacaaagggacaaaggaacttactgcaaaagcgaaagatgatcaaacgaataaagttgccaaacaagggcagtataaaaatcaggatcctatcgttttagtgcatggtttcaatgggtttacagatgatattaatccttcagtgttagctcattattggggcggtaataaaatgaacattcgccaagatttagaagaaaatggttacaaagtttatgaagcaagtataagtgcttttggaagtaactatgaccgcgcagttgaactttattattatatcaaaggcggtcgtgtagattatggtgcagcacatgcagcaaaatatggacatgaacgttatggaaaaacatacgaaggaatttacaaagactggaaaccaggacagaaggtacacctagttggacatagtatgggcggtcaaacgatacgtcaactagaagaattactgcgtaatggtaatcgtgaagaaatagagtatcaaaagaaacatggtggcgaaatttctccactattcaaaggtaatcatgacaatatgatttcatcaattactactttaggaacaccacataatggtacacacgcatcagatttagctggtaatgaagctttagtgagacaaattgtatttgatatcggtaaaatgtttggtaataaaaactctagagtagacttcgggttggctcaatggggtctaaaacagaagccaaatgaatcatatattgattatgtcaaacgcgttaaacaatctaatttatggaaatcaaaagataatggattttacgatctgacgcgtgagggtgcaacagatttaaatcgtaaaacgtcgttgaaccctaacattgtgtataaaacatacactggtgaagcaacgcacaaagcattaaatagcgatagacaaaaagcagacttaaatatgtttttcccatttgtgattactggtaacttaatcggtaaagctactgaaaaagaatggcgagaaaacgatggtttagtatccgttatttcttcacaacatccatttaatcaagcttatacaaatgcgacagataaaattcaaaaaggcatttggcaagtgacgcctacaaaacatgattgggatcatgttgactttgtaggacaagacagttctgatacagtgcgcacaagagaagaattacaagatttttggcatcatttagcagacgatttagtaaaaactgaaaaggtgactgatactaagcaagcataa

SEQ ID NO: 411133 - DNA, 777 bp, Staphylococcus aureus
atgatgattcactcaaaaaggttgaggctctggctgtatttagtattattagctgtttttataggggcttgcggaatgaaaaaggaagaaagcagtaaagataaacaaattaaagaaaacttcaacaaaacgttgagcttgtatccaactaaaaatcttgaagacttttatgataaggaaggctttcgagatcaagagtttgaaaagggcgacaaaggcacttggataattcactctaaaatgacaatagaaacaaatggaaagaatatggaatccagaggcttggtcctgtatgtagaccgcaataccagaacgacaaaaggtgaatttattgtgagggaattatgggaagataaaaaaggatactcacgtagtaaagaaaaagaatatccagtaaaaatggaacataataaaattatcccaaccaaaccgatagctgatgataaattaagaaaagaaatcgaaaactttaaattctttgtacaatacggtgactttaaagatattagtgattataaagatggtgacatttcatataatccgaatgtgccaagttattcagcaaagtatcaattaagtaatgatgactacaatgtgaagcaacttagaaagaggtatgatataccaactaagaaagcacctaaattattaataaaaggcgatggtgatttaaaaggatcatctataggacacaaaaatttagagtttacatttatagaaaataaagaagaaaacatctattttacggatagtattaatttcaaacctactgaatag

SEQ ID NO: 411134 - DNA, 579 bp, Staphylococcus aureus
atgataagactaagcgatgcatttactaatgctctaagtaatcaaacatttaaaatatttttagaagatcttattgaattatcaaagtataacaatgaaaaataccaaaaaggtaaaaatggactgattttatataataaatattcaagagaagattttagcaaaatatttaattggaataaaaatggttcgtctgtaatcatgggatacatgataagaagccaagaaatgccaatatttatcacttatgataagcatgaggatataagtgatagcacaaaatatgaagatgaatttttaagtcaagatgaattaaaatggtttactaaatctaatagaacgctaaaatcaaaagaagttcagaaaattttgtcccatagagcaaaaggaattaaaatgtatatttttgtacagaaaaaagatgatgatggtatatatttttattatttaggaactgctggatatatagaaggttcagaaaagcaagataaaatgccgaatggttcaaacgtagtaacgatggatttagcactggataaagctgtaagagatgatatatatcgttatctaacaaattaa

SEQ ID NO: 411135 - DNA, 2172 bp, Staphylococcus aureus
atgagtagattactaaatgatttcaatcaatctttacataaagggtttatagacaaagatatttctcataaaggtaattatacaccgaagcttttagtaaataataaaaatgaaaaagttctttcaacaattatagatgaacttcaaaaatgtgaaacgttctatttttctgtggcttttataacagaaagcggtttagccagcttaaaggctcaactattagatttaagcaataagggtgttaaagggaaaatattaacatctaattacttagggtttaatagtcctaaaatgtatggagaattacttaaattaaaaaatgtagaggtaagattaaccgatattgctggattccatgccaaaggatatatttttgaacataaggattatagttctatggtaataggaagctctaatttaacatctaatgcgttaaaggttaattatgagcataatgttttactgtctactatgaaaaatggcgatttagttgatagtgtaaaaaatgaatttgacttgttatggcaaaagagtaccccacttactgagcaatggattaattcatataaagaatcatttgagtaccgttccttagaaaaattagcggaggttgaacaaactcaaatgctgctagctgataaggtgaaaaaatcagtggaaattgtacccaatttaatgcaagcagaagcattaaggtcattaaaagctattagggataaaaccaaagataaggcgttaataatatctgcaactggtacaggtaaaacgattttatgtgcattagatgttagagaagtaaaccctaataaatttttatttattgttcataatgaggggattttaaatagagctaaggaagaatttaaaaaagtattacctataaaaaatgatagtgattttggattgttgacaggaaaacatagagatgtcgatgccaaatatttatttgcaaccattcaaacattatctagagatgataattttaagcaatttgatgaaaatgaatttgattatattgtttttgatgaagcacatcgttctgctgcatctacttatcaacgagtatttaactacttcaaacctaagttcatgctgggaatgactgctacaccagaaagatcagatgaattaagtatatttgaactgtttgattataatattgcatatgaaataaggttacaagcagcgttagaaagtgatattttatgtccatttcattattttggtgtgactgattatgtacatcaaggtattaaagaagatgatgtaactaaactgagatatttaacttctgatgaaagagttaattatattattcaaaagacagattactatggatattcaggtgaaattttacaaggattaatttttgtgagtagcaaaaaagaagcttatgatttagcggataaactaagttcaaaagggattaaaagtgttgctttaacaggagatgatagtgttaattatcgccaaattgtaatagaaaaattaaaagaaggtaagattaactatattataactgtagatctttttaacgaaggtattgatattccagaagtcaatcaagttgtaatgttgagaccaacagagtctagtattatattcattcagcaacttggtagaggattaagaaaaagttcaaataaagagtatgttacagtaattgattttattggtaattataagacaaattatttaattccgattgcgctttctggggatcaatcgcaaaataaagataattataagaagtttttaacgaataacgattcgattaatggagtatctacaattaattttgaagaagttgctaaaaaacagatttacaattcattggatgcagtatcattaaatcaaaataaattaatattaaaagcttatgaagaagttgaaaatagattgggacacatgccgttactaatggatttcatacaacaacattctatagatccaagcgttatattttctaaatttagtaattattacgagttcttagtgagatataaaaaaatagatacattattgacggaaaatgaatctaaaaatctggttttcttttcaaggcaaatagcacctggattgaaaagaatcgatagtttagttttagaagaacttttaaaaaatgaaagacagactcaggaattgaaaaaatctatggaagtcccattatag

SEQ ID NO: 411136 - DNA, 393 bp, Staphylococcus aureus; identical to SEQ ID NO: 407551

SEQ ID NO: 411137 - DNA, 1362 bp, Staphylococcus aureus
atgcttcgttgtttaattgcgaacagaggtgaaattgctgtaaggattataagagcttgcagagaatatgggattgaaactgtagcagtttatgcaaaaggggacgagcaaagcttgcatgtacatttagcagatcaagctatatgtattggggaagctaatgctttagatagttatttaaatattgaccgcatcatatctgctgcacaaatcactggtgctaatgcaattcacccaggatatggctttttatcagaatcaacaaaatttgctcaaaccgttgaggaacaaggcatagcgtttatagggcctactaaaaaaacgatggaaatgatgggggataaaataacagcaagacaaacagttcatcatgcaggtgttcctgtgattccaggatcaaatggtgctgtgaatcatgtgtctgaaattgagaatcttgccaaagacatcggttatccagttgttatcaaagctgccagtggcggtggtggtaaaggtatacgtattgtaaagaaagctgaagatttagaaaaggcatttaaagaagctaaaagtgaaggaaaaaaatactttgatgatgatcgtgtttatgttgaggcttttatacctgttgcaaaacatgttgaagttcaagttatgggagatgggcaggataattatgtacatttaggggaacgtgattgttctgtacaacgtaaaaatcaaaaattaatcgaagaatctccttgtgcagcattaactgaagaaagacgacaacaaatatgtaacgatgctgttaaagttgcacgtgcagcaaattatagaagtgcaggtacgattgaatttttagtaactgataccgcacattactttattgaaatgaatgctcgaatacaagttgaacatactgttacagagatgcgagcagaacgtgatttggttgcagcacaactgtatttattggaacataatcatttacctttttcacaaagcgatattcaatttaatggtcatgtgatagaagcgagaataaatgccgaaaatcctgaaaagaaatttcaaccaacaccaggtaaagtgacagcgttacatttacctcaaggctttaatgtgcgagtcgattctttactatatcacggttatcaagtttcaccatattatgattctttagtagctaaagtaattgtaaaatctcatgatagagcttcagcaattgataagttgaaagtcaccttagatgaaatggtgatagatggattttctacaactgccgattttttatatgcagttttaaattatccactatatcgtgatggagatgcaaaagatgttgatattaaatttttagaaaaacatcaaattgttaaaggggtggaattataa

SEQ ID NO: 411138 - DNA, 1011 bp, Staphylococcus aureus
atgtcaattaagattttacaaccaggtctcttttcaacggtacaagatctaggaagaaaaggttatgaacatattggattttcaggcgcaggtgccatggatcaatttagttttaaggttgcgcagtcattaattaacaatgatggtccagcgattgaatatactttgattggtcctaccattcaatttaatacgcaaaatacatttgttataaccggtggtagtattaatgcttcgctaaataataaaactatatcaatgaattctgtcatattagctgagaaaggtgacattttaaaaataggtgctataaccaaaggtgcacgcggttatcttacttttggtcattctatcaacgtaccttctattgctgaaagttatgcaacacatacccgaagcagtataggaggattcaaaggtagaaagttattagctaatgatgtaataacagtgaaaataaataatgactttaaagaaaacattggaaagactattcatttacaggacgatttattgccagaaaataatattatacacattcttcaaggacctcaattcgaggcattttctgaagaggctagagcgaaaattgtaaatcatccatatttaattactgaacaatcagaccgtatgggctatcgtttggaaggtgacagcgttgcaccaattaatcaagcagatatcatttctgaaccggttgctcttggtagtgttcaagtaccaaatgatggtcaacctattattctgcttaatgataaacaaacgataggtggttataccaaaattgcaactgtatgcaaatttgatctgccaaagttagcacagatgaaaccacaagatacaattcaatttaaatggatatcattccaagaagctgtagataagaatcgggaacaaatgtctctgtttaatgaaattcttaagagtcatcaaaagactccaatttttgaaacatctagcttgcgacatacttcgaaaaaattagcaacaattttaaaaggggatttgtaa

SEQ ID NO: 411139 - DNA, 774 bp, Staphylococcus aureus
  misc_feature (197)..(226): n is a, c, g, or t
gtggatgtaagatttattaacgagcagacaattatgatttattttgaaaataaaatatccgaagagacatatcgtaatgtcacagcaatggtacggtggatacgagaaaaagaaatattagaaattcaagatattgtcccttcgtatcgagcagttctaatatattttgatgaacaagctataacatcttctaaatnnnnnnnnnnnnnnnnnnnnnnnnnnnnnncttctaaattaattgaaaatttagaacttaacaaatttaatgaaaaaaatgttcatgctgtgaatcaaaccaatcgtattattaaaatacctgttcaatatggtggtacatatggaccagatattgaagaagtagcaaagcataatcgaataactgttgagcaagttattgaaaaacatacaagtaaaccttatttaatatatatgctaggatttatgccaggatttccatacttaggcggacttgatgaacaactacatacacctagacgtaatcagccaaggttaaaaattcatgcaggttctgtaggtattgcgaataatcaaacaggactatatccatcagattctcctggcggatggcaaattattggacgcacaccgttaaaagtatttagcagcgagcgtgaaccaatgtcaatgtacgaagcaggagaatggatacaattttatgcaatagatgaacagaaatttatacaaatcgaaagagatatatcagatggcaactttaatgttgatgactgggtggtgattgaaaatgtcaattaa

SEQ ID NO: 411140 - DNA, 783 bp, Staphylococcus aureus
atgaagtctataaaaaggattggattgtgcataagtctgttgattttaatcatttttgcaacatcttgtggtagtaataagattactggagactcaaaagaagaacaaatcaaaaagagttttgcgaaatctttagacaagtatcctactgaaaatctagaagagttttatgataaagaaggatatagagatggagaatttgaaaaagatgataaagggacttggctaattagatctgaaatgaaaatccaattaaaaggagaaaatctggaatctaggggagcagttatagaaattaacagaaatactagaacggctaaagggaattatattgttagagaagttgttgaagatagcgatggaatgacacacaatcatacaaaaaggtatcctgtgaaaatggaaaataataaaatgattccattaaaatcaattgatgatgaaaaagtaaaaaaagaaattgaagaatttaaattctttgtacaatacgggaatttcaaagaattggaaaactataaagaggacgaagtgtcatataacccagaagtaccaatatactctgcacaatatcaattgaaaaacagtgattataatgtagaacaattacgtaagcgatataatatcccgacgcaaaaagcgcccaaattattattgaaaggctcaggtaatttaaaaggttcatcagtcggatataaaaatattgaatttacctttgttgaaaataaggaagaaaatatttacttcacagatagtgtctactttaatccaagcgaggataaataa

SEQ ID NO: 411141 - DNA, 801 bp, Staphylococcus aureus; identical to SEQ ID NO: 409960

SEQ ID NO: 411142 - DNA, 780 bp, Staphylococcus aureus
atgggatatttaaaaaggattggattgtgcataagcctgttgattttaagcatttttgtaacatcttgtgatagtgataataagatcactggagattcaaaagaagaacaaattaaaaagagctttgcgaaaacgttagatatgtacccaattaagaatctcgaggacttatatgacaaagaaggatatcgagatggcgaatttaaaaagggtgataaaggaatgtgggttgttagatctgaaatgataattcaaccaaaaggtaaaagtttaacttcaagaggcatgatattatacatgaatagaaatacaaggaccgcaacggggtatttttcaatagaagaaatagattcaagaaaaaaccttgacgagagagaaacagaaaaaaagtatcctgtgaaaatgataaacaataaaattattccaaccgtaaagataaaagatgaaaagttgaaaaaggaaattgaaaactttaagttttttgttcaatatgggagttttaaaggaatagagaattatgaaaatggtcacatttcctacaattctgaaggtcctatttattccgcgagatatcaactgaaaaatgatgattataatgttaaagaattacgaaaaagatatgatataccaacagaaaaggcgcccaaattattgttgaaaggttcgggggatttgaaagggtcttcagttggatataaggaaattgaatttatatttctagaaaataaaaaagaaaatatatatttttcagatggattaaacttaattccaagtgactaa

SEQ ID NO: 411143 - DNA, 783 bp, Staphylococcus aureus; identical to SEQ ID NO: 409349

SEQ ID NO: 411144 - DNA, 984 bp, Staphylococcus aureus
atgttttattatcattcaaaaccaaaaaataattcattttcaaaatttgtaactgtaatggttttatcaatattgccattagcacttgtgaaagtgttacaaagtacatggttaggtggacatcagattcacttccatgaaagtaaattaattgaatttgttggtttcttaggaatttcttatgttacattcaaaagtgtgcagttaattatggaaattcgtgatggttctatcaaagaaattaaagtatggaaattaattcaatttatttcattcttcccaacgatttcatctggaccaatcgatcgttacaaacgtttcgttaaagacgataaaaaagtaccaacaggcaatgaatatcgtgaattagtattaaaagcaattcacatgattatgcttggtttcttgtataaatatattgttgcttactttattaacacatatgcaatcatgccgttacaattagacttacatggctttgtcaatttgtggttatatatgtacgcatacagcttatatttattctttgactttgcaggttatagtttatttgcgatagcatttagttatttattcggtattaaaacaccaccaaacttcgataaacctttcaaagcgaaaaatattaaagatttctggaatagatggcatatgacattatcattctggttcagagattgtatttacatgagatctttattctacatgtctcgtaaaaaattattgaagagtcaatttgcaatgtctaacgtggcattcttaatcaacttcttcataatgggaatttggcatggtatcgaagtgtattacattgtttatggtttataccatgcagcattgtttataggttatggctattatgaacgttggcgtaagaaacatccgccacgttggcaaaatggtttcacaacagcacttagcattgtgattacattccactttgtaacatttggctttttaatcttctcaggtaaacttatataa

SEQ ID NO: 411145 - DNA, 468 bp, Staphylococcus aureus
gtgaattatcttaaacataagttttataacttgttaactacaatgattgttctctttatttttgtactttctggtgcgatttttttaacatttctagggtttggtttatatggattaagtagaatacttatttattttaggttgggtgactttacatataatagaagtatgtacgataacctattatattatggcagttatataatctttgggtacttcatcatatttgcagtcgagcatttaatggattattttagaaaaatgttgcctgaaaatgcatattttagaggcgcgacttttcatttgatttcttacacagttgcaacaacgttattttattttattattcatctgaactatgtgtatatcaatatcgatttttgggtaatcatggttattatagggttcttatatgtttgtaagcttcaattttaccctgaaagtaaaaatttaaataatagaaaatag

SEQ ID NO: 411146 - DNA, 1443 bp, Staphylococcus aureus
atggctaaagttgaattaacaacccggagacgaaacttcatagttgctgttatgttgattagtgcgtttgtagctattttaaatcaaacattattaaatacagcgttacctagtataatgagagaattaaatattaatgaaagtacatcgcaatggctagttactgggtttatgcttgttaatggcgtcatgatacctctgacggcatatctaatggatagaattaaaactagacctttatacttagcagcgatggggacatttttattaggttctattgttgcagccttagctccgaattttggagttttaatgttagcacgtgtaattcaagcgatgggtgcaggcgtacttatgcccttaatgcaatttacgttatttacattgttcagtaaagaacatcgaggttttgcaatgggactagcaggtttagtaattcaatttgcaccagcaataggccctacagttacaggattaattattgatcaagcgagttggcgagtaccatttattataattgtaggaattgctttagttgcctttgttttcggcttagtttcaatctcaagttacaatgaagtgaaatatacgaaattagataagcgctcagtaatgtattcaactattggattcgggttaatgctatacgcatttagtagtgcaggagatttaggatttacaagtccaatagtaataggtgcgttgataataagtatggttattatctatttatttatacgtagacaatttaatattactaatgcacttttaaatttaagggtttttaaaaatagaacatttgcattatgtacgattagttcaatgattataatgatgtcaatggttggacctgcgctgcttataccgctatatgttcaaaacagtttatctttatctgccttgttatcaggacttgttatcatgcctggtgcaataataaatggtattatgtcagtttttacaggtaaattttatgataagtatggtcctagaccattgatttatactggttttacaattttaacaattactacaattatgttgtgtttcttgcatacagacacatcttatacgtatttaatagtcgtatatgcaattagaatgttttcagtttctttactcatgatgccgataaatactacaggaattaattctttgagaaatgaagaaatctcacatggcacggctattatgaaatttggtcgtgtaatggctggttcactaggcacagctttaatggttacattaatgagttttggtgcaaaaatatttttatctacatcgccatcgcatttaactgcaactgaaattaaacagcaatccattgctataggggtggatatctcatttgcttttgtagctgtgcttgttatggcagcttatgtgatagcactttttataagagaacctaaagaaatagaaagtaatagaaggaaattttaa

SEQ ID NO: 411147 - DNA, 927 bp, Staphylococcus aureus
atgaaattgatgaaggatttgccgaatgaagataaacctgcgtttggtcaaaaagtgaatgaattgcgtcaaacaattcaaaatgaattagatgaaagacaacagatgttagttaaagaaaaattaaataagcaattggctgaagaaacaattgatgtatcattaccaggtcgtcatattgaaatcggttcaaagcatccattaacacgtacaatagaagaaattgaagacttattcttaggtttaggttatgaaattgtgaatggatatgaagttgaacaagatcattataacttcgaaatgctgaatttacctaaatcacaccctgcacgtgatatgcaagatagtttctatattacggatgaaattttattacgtacgcatacatcaccagtgcaggcacgtacgatggaatcacgtcatggtcaaggtccagttaaaattatttgccctggtaaagtgtatcgtcgtgactctgatgatgcgacacatagtcatcaatttacacaaatcgaaggattagttgttgataaaaacgttaaaatgagtgatttgaaaggtactttagaattgttagctaagaaattatttggtgctgatcgtgaaattcgtttacgtccaagttacttcccattcactgaaccttctgtagaagttgatgtgtcatgttttaaatgtaaaggaaaaggttgtaatgtgtgtaaacacacaggatggattgaaattttaggtgctggaatggtacatcctaatgtattagaaatggctggttttgattcttcagagtactctggatttgcatttggtatgggaccagaccgtattgcaatgttgaaatatggtatagaagatattcgtcatttctatactaatgatgtgagatttttagatcaatttaaagcggtagaagatagaggtgacatgtaa

SEQ ID NO: 411148 - DNA, 222 bp, Staphylococcus aureus
atgaaaacattattcatagactatataaatttagcgagagattactatcaacaaattatgaatgactatagtactacagtaaccaataaacagctttatgttacatatatcataggcggtcaagctggggtgtttattaattggctttcgaatggttgtaatgaatcacctgaagaagttgctgacattttattggctaatacgattaaacttcaaaactaa

SEQ ID NO: 411149 - DNA, 1023 bp, Staphylococcus aureus
gtgaatcagcatcaagaactctcaaaggagattgaagataagttaatgcaattgtctcaaagaaagttaattgagcaaaataatctaaatcactatgaaaatcaactagaaacttacaataatgacttagaattgaatgaacaatctattgaaatggaaatgtcgaggctgaatttaactgacgacaatgatataaatgaaataatagcctggaggggcgagcaagaggaattagagcagaaaagggatacttataaaaaacgttatcatgaatttgaaatgggaatagctaggttagaatcattaaccaaggataaagagttattggactctgataaattaaaagatgaatatgagctaaaaaaagaaaagatgaatacactgatagatgaatactctgctgttcattatcaatgtcaaaataatattaataaaacacaatctatagtttcgcatattaattacttaaatcaagaattaaaggatcaacaagaaatttttcaattggctgaaattgtcagtggtaagaataacaaaaatcttacattggaaaactttgtcttaatttactatttagatcaaattattgcccaagcaaatctgagattagcaacaatgtcagataatcgataccaactaattaggcgagaagcggtttctcatggtcttagtggcctagaaattgatgtatttgatttgcattcaaataagtctagacatattagctcgttatcaggtggagaaactttccaatcgtcgcttgcattagctttagggttaagcgaaattgtacagcagcaatcaggaggtatttcactagaatcaatatttattgatgaaggattcggtacattagatcaagaaacgcttgaaacagcgttagacactttattaaatcttaaatcaactggtagaatggttgggattatttcacatgtgagcgaattgaaaaatagaatacctttagttttagaagtgaaatcagatcaatatcagagttcaacaagattcaaaagaaattaa

SEQ ID NO: 411150 - DNA, 435 bp, Staphylococcus aureus
ttgagaactgagggtgaacaattaggtgatgaattaaatgatctaattaaaggtttagaaacggtcgaagattcaataggtaataacgaaagtgattacgagaaaattatcgaactaaataatacgataacgaacataaataatgaaattaatataattaaagaaaatgaaaaagctaaagctgaattagataaactattaggtagtaagcaagagttagagaatcaaattaatgaagaaacatctatattgaagaatctcgaaataaaattagatcgctacgataaaacaaaattggacttaaatgataaagaaagctttataagtgaaattaaatctgctgtaaatattggagatcaatgtccgatatgtggtaatgaaattcaggatttagggcatccctctctattcgtcggcagcgtcagatgtgtataa

SEQ ID NO: 411151 - DNA, 417 bp, Staphylococcus aureus
atgcttgttatatttattgcacttcaaattagaatttttacaattaaagaagataatatttataataaattgatcaaagatgatatgactagtggtaattatgataatgctcaaaatattgtgaagcagacaataaataaaaattatgccgatgatcaaacatattatttaagtggtatgattatggctactatcaattctaagtccgaaggtatgacagaatgggagcgaggacttagaatgtttcctaaatcaggtttattaaattttgagttagcgatagcaaatcgttcattaaatgatgatgaaaaagcattaaaatatgtgcgtaaagcattaaatgcagaccctaaaaatgcagattatattaacttagaaaaagagttgactaaatcaaatgagtcgaaaaataaataa

SEQ ID NO: 411152 - DNA, 2145 bp, Staphylococcus aureus
atgggtatggcaacctatgccgttgtggatttggaaacaacaggcaaccaattagattttgacgatatcattcaaattggtataacgtttgtgcgcaataaccaaattattgatacatatcattctatgattagaacaaatttagagattccgccgttcattcaagcgttaacatccattgaagaaaatatgctacaacaagcgccatattttaatcaagttgcacaagaaatctacgataagataaaagattgcatttttgtcgctcataatgtagattttgatttgaattttattaaaaaggcatttaaagattgtaatattcaatatcgtcccaaaaaagttatagatacactagaaatctttaaaatagcttttcctacagataaaagctatcaattaagtgaattagcagaggcacatggtattaccttagcaaatgcccatcgagctgacgaagatgccgctactactgctaaattgatgatattagcttttgaaaaatttgaaaagttaccgttagatactttgaagcaattatattatttaagtaaacagttgaaatacgatttgtatgatattttctttgagatggttaggcaatatgatgcaaagccattggataaatcgtacgaaaagttcgaacagattatctatcgtaagcaagttgattttaaaaagccgacaacaaattataatggcagcttgaagtctttatatagcaaagctgtagatcaacttggcttaacatatcgaccgcaacaattatatttagcggaaactatattagatcagctcatgcatagtgaaaaagcaatgattgaagcatcactaggcagtggtaaatcattagcatatttacttgcggccttgatgtataatattgaaactgggaagcatgtcatgatttctaccaatactaaattactgcaaagtcaattgttagaaaaagatattccagcaatgaatgaagcgttaaattttaaaattaatgcactattgattaaaagtaaaagtgattacatttcattgggacttattagtcaaattttaaaagatgacacaagtaattacgaagtgaatatcttgaaaatgcaattgttaatttggattacagagacgccgtccggagatatacaggaattaaatttaaaaggtggtcaaaagatgtattttgaccagaaaattgaaacatatgtaccggcacgtcacgatgttcattattataattttattaagcgaaatgcacagaacattcaaattggtattacaaatcatgcacatttaattcattctgatgttgaaaattcaatatatcaattgtttgatgattgtatagtggatgaagcacatcgcttaccagactatgccttaaatcaagtgacaaatgagttgagttatgctgatattaaatatcagcttggtttgattggtaaaaacgaaaatgaaaaattgttaaaggcaatcgatcaactggaaaagcagcgaattttggaaaaattagatattgcaccaattgatatttttggcttgaaggctagtatgaatgagattcatgagttaaatgagcaattgttctcaacgatatttacgattatcaatgattctgatgtttatgatgatgatattcatcgcttccataatgtatttacttttgaaacaaaagacattctgaaggatttacatgcgattatcgataagttaaataaaacgctagaaatattcaatggcattagtcataaaacagttaaatcattacggaaacagttgttgtatttaaaagataaatttaaaaatatcgaacaaagtttaaaagctggacatactagtttcatttcgattaaaaatttatctcaaaaatcaacaatacgtttatatgtgaaagattacgctgtaaaagatgtattaacgaaacaagtattggaaaaatttaaatcactcatttttatatctggtactttaaaatttaatcattcgtttgaagcttttaaacagttattcaacaaagatgttcactttaatacatttgaagttaacacgtcgttacaaagtgcaaaaaatacaagtgtatttataccgagtgatgtagcatcttatcctgtctcttatacacatctgacgctgccgacgaatagagaggtgtag

SEQ ID NO: 411153 - DNA, 2139 bp, Staphylococcus aureus
ttgattaattcaatcatagagaaatatcaatttagtaaaaaacaaattgaagcagtattaacactgctagaagaaaaaaatacagtaccatttattgcgaggtatcgaaaagagcaaactggtggactagatgaagttcaaataaagcaaattgatgacgaataccaatatatggtcaatttacaaaaacgtaaagaagaagttatcaaaaatatagaacagcaaggattacttactgaggaattaaagaacgatattttaaaacagaacaaattacaacgtgttgaagacctatataggccttttaaacaaaagaaaaagacaagggcaactgaggcgaaacgtaaaggattagagccattagcgatatggatgaaggcacgtaaacatgaagtctcaattgaagaaaaagcacaacagtttataaatgaagaagtgcaatcggttgaagatgctatcaaaggtgcacaagatattattgcggaacaaatttcagataatcctaaatatagaacaaaaattttaaaagatatgtatcatcaaggtgtgttaactacatctaaaaagaaaaatgctgaagatgaaaaaggtatttttgaaatgtactatgcatatagtgagccaattaaacgcattgctaatcatagagttttagctgttaatcgtggtgaaaaagagaaagtattatctgtaaagtttgaattcgatacgacatcagtagaggatttcattgcacgtcaagaaatcaatcataataatgtaaatcgcagttatattttagaggcgattaaagatagcttgaaacgcttaattgtcccttcgatagagcgtgaaatccatgctgatttaactgaaaaagctgaaaatcatgcaatagatgtttttagtgaaaacttaagaaatctattactgcaacctcctatgaaaggtaagcaaatattaggcgtagatccagcatttagaacaggttgcaaattagcagtcattaacccattcggtacttttatagcaaaaggtgtgatttatccgcatccaccagtttctaaaaaagaggcagcagagaaggattttgtacaaatggttaaagcgtatgatgtgcaattaattgcaattggcaatggtactgcaagtcgtgaaacagaacaatttgttgcagatttaattaaaaagcatcagttgccagtacaattcatcattgtcaatgaagcgggcgcttcagtatactcagcatcagaaattgctagagatgaatttcctgattttcaagtggaagaaagaagtgccgtatcaattggacgacgcgttcaagatccattaagtgaattagttaaaatcgatcctaaatctattggtgtcggacaataccagcatgatgttaatcaaaaagcactagaaaatgcattaactttcgtcgttgaaacagcagttaaccaagtaggtgttgatgtcaatacagcatcatcatcattattacaatatgtgtctggtctaagttcgcaaattgctaaaaatataattgcatatagagaagaaaatggcgcaataaagcataataaagagttaagcaagattaagcgtttgggtgctaaaacttttgagcagagtataggatttttaagaatagtagacggttcagagccattggataatacatcgattcatcccgaaagctataaagtaacgtatcagttattagataaactcggatttggtggcaatgatttaggtagtgatgcattaaaagataaattaaattcattggatatggatgaactggcgattgaattacaagtcggtgtacctacattagaggatattattaaatccttgaaagcacctaatcgagatccaagggacgagtttgaaacaccaatccttaaatccgatgtgctatcaattgaagatttacaagaaggaatgaaattgagtggcacagttagaaatgtagtagattttggagcatttgtagatataggtgttaaacaagatggacttgtccatgtttcgaaactttctaagaagttcgtaaaaaatccaatggatattgtcagtgttggtgatatcgttgacgtttggatttacagtattgacaaaaataaagacaaagtatcattaacgatgattgatccacatgaataa

SEQ ID NO: 411154 - DNA, 210 bp, Staphylococcus aureus
atgatgttaaaaaatatgtatgttttatcaatattagttttgaaaaatagtatcccagaaatcattatcggaatcactaatacaatcatcattgctgctaaaatattaatatttaatccaattgcagataatacaccgaaaactaataaattagcaactaaactaaggataagatatttcataaaatcacctcgtcgttgtacaccataa

SEQ ID NO: 411155 - DNA, 204 bp, Staphylococcus aureus
atgtttttttcgaaaatacctaaagtatttggattagttaacataatagctgctgtattttcatttacaacacgtttcaagtcatcaatatcaacttcgccacgttcgtttgattttacagtaactgatttaaatcctgcaaatgaagctgaggctggattcgtaccatgcgcagaatctggcacaatgacttcatcacgatga

SEQ ID NO: 411156 - DNA, 741 bp, Staphylococcus aureus
atggaacaaattacttctgcacaaaataatagaattaaacaagcgaacaagctaaaaaagaaacgtgagagggataaaactggattagctttaattgaaggtgtgcatttaattgaagaagcttatcaaagtggaattgtaattacacaattatttgcaattgaaccggcaagattagatcagcaaattatcgcatacgcgcaagaagtttttgaaataaacatgaaagttgctgaatctttatcaggtacagtgacaccacaagggtttttcgcaatcattgagaagccgcattatgatatttctaaagcacaacaagtattgctcatcgatcgtgttcaagatcctggaaatttaggcacattaattagaactgcggatgctgctggaatggatgctgtaataatggagaagggtacgacagatccttatcaagataaagtgttgcgagcgagtcaaggtagtgttttccatttgccagtaatgacacaagatctcgatacgtttattactcaatttaatggtcctgtttatggtacagcacttgaaaacgcagtggcatacaaagaagttacttcaagtgattcttttgcattactattaggtaatgagggagaaggtgttaatcctgaattattagcacatactacacaaaaattaatcatacctatttatggtaaagctgaaagtttaaatgtagcgattgcaggtagtattttactttatcatttgaaaggttga

SEQ ID NO: 411157 - DNA, 684 bp, Staphylococcus aureus
atgaaatttactgcattagcaaaagcaacattagctttaggaattttaacaacaggaactttaacaacagaagttcattcaggtcatgcaaaacaaaatcaaaagtcagtaaataaacatgacaaggaggcactataccgatactacactggaaagactatggaaatgaaaaatattagtgctttgaaacatggtaaaaacaacttacgttttaagtttagaggtattaagattcaagttttactgcctggaaatgataaaagtaaatttcaacagcgtagttatgaggggttagatgttttctttgttcaagaaaaaagagataagcacgatatattttatactgttggtggtgtaatacagaataataaaacatctggagttgtcagtgccccaatattaaatatttcaaaagaaaagggtgaagatgcttttgtgaaagggtacccttattatattaaaaaagaaaaaataacattaaaagagctggattataagttgagaaagcatctaattgaaaaatacggactttataaaacaatctcaaaagatggtagggtcaaaattagcttgaaagatggcagtttttataaccttgatttaaggtctaaattaaaatttaaatatatgggggaagtcatagaaagcaaacaaattaaagatattgaagttaacttaaagtaa

SEQ ID NO: 411158 - DNA, 756 bp, Staphylococcus aureus
atgttgctagaagtgaaacatgtaaaaaaggtttatggtaaaggtttgaatgctacgacagcacttaatcaaatgaatttatcagttggagctggtgaatttgttgcaattatgggtgagtctgggtcagggaagtctacactactaaatttaattgcttcttttgatggactaactgaaggtgacattattgtggatggcgcacatttaaataatatgaaaaataaaagtaaagcattgtatcgtcaacaaatggtaggttttgtttttcaagattttaatcttttaccaacaatgacgaataaagaaaatataatgatgccattaattttagctggtgctaaacgaaaagatatagaacaaagggtacatcagttggcagtacaattacatttagagggattcttaaacaagtatccttctgaaatctctgggggtcagaagcaacgcattgccattgcacgtgcattagttactaagccgacgattttactagccgatgaacctacaggtgcacttgattcaaaaacatcaaaggcattgatgatgttatttcaagagattcatcaattggaacagacaattttaatggtaactcattcaaatatcgatgcgtcttatgcagagcgagtcatttttattaaagatgggcgtctatatcatgaaatatatcgtggcgaagaaagtcaattagcttttcaacaacgaataacagatagcttagcacttgtgaatggaggaagtgtcaatatatga

SEQ ID NO: 411159 - DNA, 303 bp, Staphylococcus aureus
atgatagaacaattaataaataatgcacttaagtatgcgagaggtaaagatatatggattgaatttgatgagcaatccaatcaattacacgtaaaagataatggtatcggtattagtgaagcggacttgcctaaaatatttgataagggctattcaggttataatggccagcgccaaagtaactcaagtgggattggtttatttatcgtaaaacaaatttcaacacacacaaaccatcctgtttcagtcgtatctaaacaaaatgagggtacaacatttacgattcaatttccagatgaataa

SEQ ID NO: 411160 - DNA, 810 bp, Staphylococcus aureus
atggaagcttcaaaatatgttggacaaggcttccaaccacctgcagaaaaagatgcgattgaatttgcgaagaagcatcgtaaagaatttgaaaaagtaggtgaacaattctttaaagacaactttggactgaaggtaaaggctaccaatgttgtaggtaaagatgatggtgtagaagtttatgtgcattgcgatgatcatggcattgtatttaatgcaagtctacctttgtacaaagatgccatccatcaaaaaggatcaatgcgtagtaatgacaatggtgatgatatgagtacgatggtgggtacagtgctgagtggctttgaatatcgagcgcaaaaagaaaagtatgataacttatataaatttttcaaagaaaatgaaaagaaatatcaatatacaggttttactaaagaagcaattaacaagacgcaaaacgtcgggtatcaaaatgaatatttttatatcacatatttatcaagaaatttaaaagaatatcgtaaatattatgaaccattgattcataaaaatgataaagaatttaaagagggtatgcaacgagctagaaaagagctaaactatactgctaatacaaatactgtagcaacgttgtttagtacgaatgatgaaaggaatagaaaagaaaagataaataatgtaatagatttatccgagaaaattgaaagaacaaaagatatgccaatcaagaatactataactactcaattaggaaataaacttattggcacaaaaaaagctcgttttgatgataagaaagtagtgtcgtttggagcatttgaagatgaataa

SEQ ID NO: 411161 - DNA, 147 bp, Staphylococcus aureus
atgaataaaataaatgatagagatttaacagaattgagtagctatagggtttatcaagacatcaataaagataatgactttacagttaacgaaaaacgatttaagcaggcagatgtatttgaagatttatatagagagaaactataa

SEQ ID NO: 411162 - DNA, 495 bp, Staphylococcus aureus
atgaggagattattcagtctattactagctagtacaatgattttagtcgcatgtgggaatgctagcaatgaaaataaggaatttgaagacgaaaaaaaatcagaagtaaaaaaagaagctaagaaaaataataataaaccaaagaacgtaaagaagaatcaagatataaacaaaaacaataatgagcaagttcaaaatgcaaataataatcaaccagtcttaaataataatagtaatcataacaatcaacaacaaagcaataaaaacaattacacagttatagaaaacgggaatacagttacagaaatttataatggacaagcatttacaactacaaataaccctattagagaaggatatgtagagggagaaacagacccgatatataaaagagagtataagcatttttatacacctgaagaagctcaaagagcacaagaaaatagcgaccaaattttaagagaaatgggtctcgaaccagaaaggtatgaataa

SEQ ID NO: 411163 - DNA, 1155 bp, Staphylococcus aureus; identical to SEQ ID NO: 405338

SEQ ID NO: 411164 - DNA, 1011 bp, Staphylococcus aureus
atgacttcattaaaagagagagattatttttttgacaacgcaagagcaattttaatattattagtcgtatttggacatatgttacaaccctacactagtggcgataaatatttatcagcattatacctagttatttatagtttccatatgccaacatttttgtttatatctggttatttcgcgaaaaatattgataaaccatactatttagaaaaaatttcaaaacgtttgatagtaccttatatgatattttttgcattcttttcaatttattatttcttaacaggtaaaagtgacgaattacaacttgatccttttaacccagtatttgcgttatggtttttgatcacgctatttttctttcatgtcattttagtaatagttagaagatttaatccatataaagtgctatcagtttcaattattatatctattggagcaggtttttcagataacatcgatagctacttaagcatttcaaggacaatcgtatttttcccaatattttatctaggttacattttcaccaaaaaacatacggctatttttaaaaataaaaaactaataccagtatctatcattacctttattttgttttttatcgtttacgtgattcatcctatcaatgcagattggttattaggaagttcaccatatacttcacttgaaaatgaaggacagagtgtattcagtccttttaaacgacttatattatatggaattatattaatcgcaatgactgcgtttctaaatttaatgtcaacaaagaaaaaattatatacttatattggtagtcgtacgctatacgtatatttattacatggtttaattattggcattgttagaggatttgaatggtatccattcgataatcctatatcattaatgacgtatctttatttaataagtatatctgtaatcatcgtatatgtattatctacaaactttgtttgtaaatggacaaatccaataattaatttacaaagaccatcacagtttaaagattcataa

SEQ ID NO: 411165 - DNA, 351 bp, Staphylococcus aureus
atggataagctagcaatgaaaagtaatattgcaatattgacaacggttttaaatatatttgaattacgtaaaaatttgagggaacattatgggcttactcttgatgattatttagtactgatctatttgaatgaatttaaaaatagacaaggaaaatattttatgagagatgtaattacatatattggtttagaccaatctaggatagttaaaagcgtaaaagaattagtgaaaaagggctacttatctaaatctagggatcttaaagatagtagaaatgtaatattaacacttactgaactacaacaaaaaacaattgagaatattttgaatgaaataatttatcgttaa

SEQ ID NO: 411166 - DNA, 843 bp, Staphylococcus aureus
atgaagaaattcttttttattgggcttttagtgtttgttgtcttttttacagcagcaaccattatttggttcagctatgataaaaacaaatatggtactaaacaatatgataaaacattcaaagacgatgcttttgacaatgtatctataaatttggatagtacagaacttcgtataaaacgggggaatcaatttagagttaaatatgatggtgacaatgatatattaattaatatagtagataagacgttgaagattagtgataaaaggtctaagacaagaggatatgcaattgatatgaatccttttcatgagaataagaaaacgttaacgattgaaatgcctgataaaatgattaaacgtttaaatctatcatctggggcaggaagtgttagaatcagtgatgttgatttagagaacacaagtattcaaagcattaacggtgaagtagttattaaaaactcaaatcttgacgcactagattcaaagacaaataatagttctacttatattagtaaaagtaacattaaaaatagcaatattaaagttgttattggtacgctacaaatcgacaagagtcaaattaaacaatccatatttttaaatgatcatggtgacattgaatttaaaaacatgccatcaaaagtagatgcaaaagcttctactaaacaaggagatattctttttaagtatgatagtaaacctgaagacactatactaaagctaaatccgggaacgggtgatagcgtagttaaaaataaaacatttactaatggtaaagttgggaaaagcgacaatgttttagaattttatacgattgatggtaatatcaaagttgaataa

SEQ ID NO: 411167 - DNA, 672 bp, Staphylococcus aureus
atggtaacttcagaaatgccaagagaacgtttgttaagccatggtgcaaaaagtctttcgaatacagaattattagctatattaattaacaccggaagaaaaggattctcgagcatagacattagtaatgaactgcttaaatctgcttcgaatctgaatgaattgaaaaaatcttcaattaacgatttgatacaagttaaagggattggattacaaaaagcaattactttaaaagcagcatttgagttaggggaaaggatggggagaagagctgaaaataatcgtataaaaataacgcaaccaagtgatgttgctgattatatgattccaacaatgaaagatttaacacaagaacattttgtcattttattgttaaattcaaaaaatgtagtgattaaagaaacctgtgtttttaaaggtacattaaatagttcgattgtacatccacgtgaaatttttagtattgcggtgagagaaaatgccaatgcaatcatcgcagttcataatcatccatccggtgatgtaacgccctcacaagaagatatcataacaacaatgaggttgaaggagtgtggtttgattttagggatagatttattggatcatattataatcggtgataatagatttaccagtcttgttgaagcgggttactttgatgaaaatgattga

SEQ ID NO: 411168 - DNA, 1809 bp, Staphylococcus aureus
atgagtcaacaattatcgagagaagaacaggaacgtaaatatcctgaatatacatgggacttaacaacaattttcaaagatgatgaagcttttgaggctgcatttaaagaagttgaaaatgagttaggcaaagaagaacaatttaaaggacacattggtgatagtgctgagacattatacaatgcgttagaattagaagatacattaggtactaaattagaaaaagtatatgtatacgcgcacctaaaacaagaccaagatacaacgaacgacaagtatactggtatggagtcaagagcacatcaattaattattaaatttagctcggcatggagtttcttagtgccagagattttacaaattgatgaagataaaattcaatcatttgtaaattcatatgataaattacaaaaattcgcatttgatttgaagttgattaatgaaaaacgtcctcatattttagatgctgaaactgaaaagttattaacagaagcgcaggacgcgttatcaacgccatcaaatgtatacggtatgtttagcaacgctgatttagtatttgaagatgcgatagataaagatggaaatgcacacccgttaacacaaggtacatttattaagtatttagaaacagatgatcgcaaactaagagaaagtgcttttagaaatgtatataaagcatatggtgctcataataatacgcttggcgctacgctagcaggtgaagtgaagaaaaatgtatttaatgctcgtacacacaattacaaaactgcaagagaaaaagcattgagtaataatcatattccagaaaatgtatatgacaatctagtaaaaactgtacataaatatttaccattgctacatagatatactgaattgcgcaaagaattgctaggtttagatgacttgaaaatgtatgatttatatacaccattaattaaagatattaagtttgaaatgccttatgaagaagctaaagagtggatgttaaaagctttagaaccaatgggtgaagaatatttaaatgtagttaaagaaggcttaaacaatcgttgggtcgatgtctatgagaataaaggtaaacgttcaggtggctattcatcaggtgcacatttaactaatccatttattctacttaactggtctaatactatttcagacttatacacattagttcatgaatttgggcattcagcacatagttacttcagtagaaaattccaaccgtcaaattctagtgactacactatttttgtcgctgaagttgcatcaacttgtaacgaagcacttttaagtgattatatggataaacatcttgatgatgaaaaacgcttattattattaaaccaagaattagaacgtttcagagctacattattccgacaaacaatgttcgcagaatttgagcataaaattcatgcaattgaagaagcaggtgaaccattaacgccaactagaatgaatgaagaatatgccaaattaaataaattatacttcggtgattctgtagaaactgatgaagatattagtaaggaatggtcacgtattccacacttctatatgaattattatgtatatcaatacgcaactggttacagtgcagctcaaagcttaagtcatcaaattttaacagaaggtaagccagcagtagatagatatattaatgaattcttgaaaaaaggtagctcaaattatccaattgagatattaaaaaatgctggtgtagatatgacaacacctgaaccaattgaacaagcttgtgaagtttttgaacaaaaattgaacgcttttgaaaaattaatgaaagcttag

SEQ ID NO: 411169 - DNA, 1410 bp, Staphylococcus aureus
atgagtattgacatgtatttagacagatctcgaaaccaagcttcaagtgtggggaatttgagtcaaacaatgaattcaaattatgatgcgttggaaaaagcaattactcaatttatcaatgatgatgcgcttaaagggaaagcgtatacgtcagctaagcaattttttagtacggtgttaattccattatcaacaagtatgaaaacattgagtgatttaacgaagcaagcttgcgataattttgtgtcacgttatacgagtgaggttgatagcatatctttaaaagaatcagagcttgaagaagatatcagatcattaagtcaacaaattacgcgatatgaaaatttaactaacaatttgaaaaagcatgcttccgataatcagcaagccatttcatcgaaccaacaaataatacaaacattaggtcaacaaaaacatgaattagaagagaaactacgtaaattacgtgagtttaatcaaaaatcaccagaaatatttaaagaagttgaagaatttcaaaaaattgtccaacaaggacttacccaagcgcagaatttttggaacttttcaacaaatcaatttaatataccttcaggtaaagaacttgattgggctaaagcaagtcatggaaaatatttgaaagttgctatggggaaaattgaacataaagcagagaaagaaactttaaataaagcagactttgctgttataaaggcatatgccaaagaacatccagaagacgatatcccgaaaagtataatgaaatatataaatgacaataaagatagtattaaacgagatataggattagatattacgtcaacacttttagagcaaggcggtataaatgcaagtaaattcggtgtatttatcaatacagcaggtggagtgaaaggcccagccggtccaaattcatttgtggaagtcaaacgtacatcaggtaatgtgtttatagaaaatggtagtaaatttgcaaaaggtggaaaatatctaggtaaaggtgttgcaggtgtaggatttggtataggtatgtatgatgaccttgcaaatgatgataaaacatttggggaggcgttgtcgcataatggtatgacgcttgcagctggatctgcagggacagcagttggagctggattagcgacttttgttttaggaagtaatccagtaggatgggtgattttagcaggtttggctatgagtacagtatttgcattaggaacagatttaatttatcaaaataatatttttggattaaaagataaagtagactgggtagggcataaaatcgataatagtatagatgttgttaaaaaaactacagaaaaatccatggatagtgttgggaatgctgttagtgaagctaaaaatattattagcaatcatataaatccaatgaaatgggcgtggtga

SEQ ID NO: 411170 - DNA, 858 bp, Staphylococcus aureus
ttgaataagccgcttgattgtgtgaaaaaggctatagattttataatagataattatatttatgaaaagggagataaagcttttatatttgatgatacaaataatataaatgaaattaaattaggtcaaaatgcttcttttataattgcagtttgtgaatatttaaaagttcacgaaaatggttattatcttaaaaaagcacagaaagtagcaaatggtatattgtatatgattgatgaaaataaatgggatacaactcatgttttaaattatccagatttatctataaaagaaaagttcagaattatttattatgatggggaagctgctttagctttaatgagattatttcaacaagataataatgaaaaatggcttaacatagttaggaaattagttgatcagtttatttttaaagaatattttaaataccatgatcattggcttggatattgcacaaatgaacttgtccagatttatccggaagcaaaatactttgaatttggtataaaaaatgtgagtacttatttagattacataaataatcgtgaaacaacgtttccaacatttctagaaatgttaatggcaacatataaattaatacaaaaagctaaggttgaaggttatggtgaattagtagaatctttaattgatgaaaatgaattgttgtctgttattcataaacgtgcaaattatcaaagaacaggatatttttatcctgaaattgcgatgtattttaaaaatccatctagagtattagggagcttctttattaaacatcatggctatagagttagaatagatgacattgaacactatatttcagggtatgtacaatatcaaaaggtgtttaattaa

SEQ ID NO: 411171 - DNA, 1518 bp, Staphylococcus aureus
atgtcacaacaagacaaaaagttaactggtgtttttgggcatccagtatcagatcgagaaaatagtatgacagcagggcctaggggacctcttttaatgcaagatatttactttttagagcaaatgtctcaatttgatagagaagtaataccagaacgtcgaatgcatgccaaaggttctggtgcatttgggacatttactgtaactaaagatataacaaaatatacgaatgctaaaatattctctgaaataggtaagcaaaccgaaatgtttgcccgtttctctactgtagcaggagaacgtggtgctgctgatgcggagcgtgacattcgaggatttgcgttaaagttctacactgaagaagggaactgggatttagtagggaataacacaccagtattcttctttagagatccaaagttatttgttagtttaaatcgtgcggtgaaacgagatcctagaacaaatatgagagatgcacaaaataactgggatttctggacgggtcttccagaagcattgcaccaagtaacgatcttaatgtcagatagagggattcctaaagatttacgtcatatgcatgggttcggttctcacacatactctatgtataatgattctggtgaacgtgtttgggttaaattccattttagaacgcaacaaggtattgaaaacttaactgatgaagaagctgctgaaattatagctacagatcgtgattcatctcaacgcgatttattcgaagccattgaaaaaggtgattatccaaaatggacaatgtatattcaagtaatgactgaggaacaagctaaaaaccataaagataatccatttgatttaacaaaagtatggtatcacgatgagtatcctctaattgaagttggagagtttgaattaaatagaaatccagataattactttatggatgttgaacaagctgcgtttgcaccaactaatattattccaggattagatttttctccagacaaaatgctgcaagggcgtttattctcatatggcgatgcgcaaagatatcgattaggagttaatcattggcagattcctgtaaaccaacctaaaggtgttggtattgaaaatatttgtccttttagtagagatggtcaaatgcgcgtagttgacaataaccaaggtggaggaacacattattatccaaataaccatggtaaatttgattctcaacctgaatataaaaagccaccattcccaactgatggatacggctatgaatataatcaacgtcaagatgatgataattattttgaacaaccaggtaaattgtttagattacaatcagaggacgctaaagaaagaatttttacaaatacagcaaatgcaatggaaggcgtaacggatgatgttaaacgacgtcatattcgtcattgttacaaagctgacccagaatatggtaaaggtgttgcaaaagcattaggtattgatataaattctattgatcttgaaactgaaaatgatgaaacatacgaaaactttgaaaaataa

SEQ ID NO: 411172 - DNA, 801 bp, Staphylococcus aureus
atggttaaggctattgcggtagatatggacgggacgtttttagattcaaaaaagacatatgataaacttagatttgaagcgatttttactgaacttagaaatagagatattacatttattgctgcgagtggcaatcaatatgcgaagttgaagtctattttcggggatagagatatgtattttatttctgaaaatggtgcagttatttataatggcaatgagttatataattataaaagctttaatcgtcaggtgtttcaacaggttgtcgattacttaaatatgaagcaaagtattgatcaactcgtcatctgtggtttgaaaagcgcgtatattttaaaacatacttctgaagcgtttaaagaagatacgagattttattatcatcagttaaaagaaattgacagtctacagcaattacctgaggatgattatgtcaaaatagcatttaatattaatcgtgagacgcatccgaatgttgacgaagaagtagcaacgcaattcagcaatgatattaaacttgtctcaagtgggcacgatagcattgatattattatgccaaacatgactaaagggcaggcattaaaacgattgttagataaatgggaaatgtctccttcagagctcatggccttcggagatgcgaataatgataaagatatgttagcgttcgctaagcatagttatgtgatggaaaatagtcatgatgaagaattgttcaatattgcctctgctgtcgctccaagtaatgataagcagggtgtattaacgattatcgaacaagaagtgttgaaaaagtaa

SEQ ID NO: 411173 - DNA, 1458 bp, Staphylococcus aureus
atgacagatattattaacaagctgcaagcgtttgcggatgcaaatccacaaagcattgctgttagacacacaactgatgaattaacttatcaacagttaatggatgagtctagtaaattagcacatcgattacaaggtagtaagaaaccgatgattttattcggtcacatgtcaccatatatgattgttgggatgattggtgccattaaagcaggatgtggatatgtacctgtagacacttcaattcctgaagaccgtattaaaatgattattaacaaggttcaaccagagtttgtatttaatacgactgatgaatcatttgaaagtttagaaggcgaagtatttacaatagaagatattaaaacatctcaagacccagtaatttttgatagtcagattaaagataacgacacagtatacacaatctttacatctggttctactggggaacctaaaggagttcaaattgaatatgcaagtttagttcaatttactgagtggatgttagaacttaataaatcaggaaatgaacaacaatggcttaaccaagcgccattttcatttgatttatctgtaatggctatttatccatgtttagcatcaggcggtacattaaatcttgtagataaaaacatgattaataaacctaaattattaaatgaaatgctaacagcaacaccgattaacatttgggtatcaacaccatcatttatggaaatgtgtttattattaccaacgcttaatgaagaacagtatggtagtcttaacgaattcttcttctgtggcgaaatcctacctcacagagcagcaaaagcgttagtaagccgtttcccaagtgcgacgatttacaacacatatggtccaactgaagctacggtagcagttacaagtattcaaattacacaagaaatcttagatcaatatccgacattacctgttggcgttgaaagaccaggcgcaagattatctactacagatgaaggtgaacttgttatcgaaggtcaaagtgtaagtttaggatacttaaaaaatgaccaaaaaactgctgaagtatttaatttcgatgacggtattcgtacttatcacactggtgataaagcgaagtttgaaaatggtcaatggttcattcaaggtcgtattgatttccaaatcaaattgaatggctacagaatggaattagaagaaattgaaacacaattacgccagtctgagttcgtaaaagaagcgattgttgtacctgtatataaaaatgataaagttattcatttaattggtgcaattgtgccaacgactgaagttacggacaatgcagaaatgactaaaaatattaaaaatgacttgaaatcacgcttaccagagtatatgattcctagaaagtttgaatggatggaacaattgccattgacttcaaatggtaaaattgacagaaagaaaattgcagaggtaattaacggatga

SEQ ID NO: 411174 - DNA, 1167 bp, Staphylococcus aureus
atgaataaacagatttttgtcttatattttaatattttcttgatttttttaggtatcggtttagtaataccagtcttgcctgtttatttaaaagatttgggattaactggtagtgatttaggattactagttgctgcttttgcgttatctcaaatgattatatcgccgtttggtggtacgctagctgacaaattagggaagaaattaattatatgtataggattaattttgttttcagtgtcagaatttatgtttgcagttggccacaatttttcggtattgatgttatcgagagtgattggtggtatgagtgctggtatggtaatgcctggtgtgacaggtttaatagctgacatttcaccaagccatcaaaaagcaaaaaactttggctacatgtcagcgattatcaattctggattcattttaggaccagggattggtggatttatggcagaagtttcacatcgtatgccattttactttgcaggagcattaggtattctagcatttataatgtcaattgtattgattcacgatccgaaaaagtctacgacaagtggtttccaaaagttagagccacaattgctaacgaaaattaactggaaagtgtttattacaccagttattttaacacttgtattatcgtttggtttatctgcatttgaaacattgtattcactatacacagctgacaaggtaaattattcacctaaagatatttcgattgctattacgggtggcggtatatttggggcacttttccaaatctatttcttcgataaatttatgaagtatttctcagagttaacatttatagcttggtcattattatattcagttgttgtcttaatattattagtttttgctaatggctattggtcaataatgttaatcagttttgttgtcttcataggtttcgatatgatacgaccagccattacaaattatttttctaatattgctggagaaaggcaaggctttgcaggcggattgaactcgacattcactagtatgggtaatttcataggtcctttaatcgcaggtgcgttatttgatgtacacattgaagcaccaatttatatggctataggtgtttcattagcaggtgttgttattgttttaattgaaaagcaacatagagcaaaattgaaagaacaaaatatgtag

SEQ ID NO: 411175 - DNA, 723 bp, Staphylococcus aureus
gtgtctggtatttataaagctaatccaaatatcatcaaagatcctgaattaatcgaagaaatcacttatcgagaaatgcgtgaattatcttatgctggttttagtgttttccatgatgaagccttacaaccactttataaagatcgcatccctgtggtgattaaaaatacgaaccgccctcaagataaaggtacatttatagtgcatgatagagaaataaatgcgaaaaatgtgattagcggtataagttgtgataaagattttaccgttattaatatcaaaaagtatttaatgaatagacaagtcggctttactagaaagatattaggtgtcttagaggataataatatttcatttgatcatatgccttcaggtattgatactatcagtatcgttatgcgctcaaaacaaattcaaaataaagaaacaaaagtattaaatgaaattcgtcaaaaatgtgatgttgatgagctaagtattgagcatgatttagcaattttaatgattgtcggcgaaggtatgaataaagtcatcggtactgcaaataaaattacacatgccttagctgaatcaaaaattaacttaaaaatgattaaccaaggtgcttcggaaatctcgatgatgtttggaattcatgtagatgatgctgaaaaagctgtattatctacatatgagttttgctatcacggggttgcattaaaaaacttgtgtgataaaaactaa

SEQ ID NO: 411176 - DNA, 417 bp, Staphylococcus aureus
atgaaaactaaagaagtcgtagcgctcatgaatatatctcaagacactttaagatattatgaaaaggttggtgtgattccacctgttaatcgagatgaaaatggatatagaatatataatgatagtgatttaaattggatttatttagtgaaaaatttgcgaaatgcaggcgtcagtattgaatcgcttatcgaattttgcaggttagcgcagcttcctaaaaatgaaaatattcaagcacagcaaaagcaaattttaaataagcaactcgaagaattaaatgaaaacttaaagacaattcatgatgcgagagatttactacaatataaaattgataattatgataatcatattgctaaaatcaatgctagtgataatcatgatgtaaatgttgaacgtctttgggagagaaagtaa

SEQ ID NO: 411177 - DNA, 903 bp, Staphylococcus aureus
atggttattatgaagaaaacaattttactgacgatgacaactcttactttatttagtatgtcgcctaactcggctcaagcttacacgaatgatagcaaaacattagaagaagcaaagaaagcacacccaaacgcacagttcaaagtgaataaagacaccggcgcgtatacttatacttatgacaaaaacaacgcgccaaacaacaatcatcaaaatcagtcacgtacaaacgacaatcatcaacacgcaaatcaacgtgattttaacaacaatcagtaccattcttcattaagtggtcagtatacgcacattaatgacgcaattgattcacacacaccgcctcaaacgtcaccaagcaatcctttgacaccagcaataccgaatgtcgaagacaatgacgatgaattaaataacgctttttcaaaagataacaaagggcttattacaggcatcgatttagacgaattgtatgacgaattacaaatcgccgaatttaatgacaaagcaaagactgctgacggtaaacctttagctttaggtaacggtaaaatcattgatcagcctcttatcacaagtaagaacaacttatatactgctggacaatgtacatggtatgtctttgataaacgcgccaaagatggacacacgattagtacattttggggagatgctaaaaactgggcaggccaagcttcaagcaatggcttcaaagtagatagacacccaacacgaggatcaattttacaaacagtaaatggtccatttggtcatgtagcctacgttgaaaaagttaatattgatggaagtattctaatttcagaaatgaattggattggtgaatatatcgtttcatcaagaaccatctctgcttcagaagtttcatcatataattacatccattaa

SEQ ID NO: 411178 - DNA, 273 bp, Staphylococcus aureus
atgacaattattttattcgttgttattcatgcaatcattttaatgggtatcgttcaatattacttaaaacgtggtcaaaaaattactaaagataaagtaaaaacagctgacaagaataaaaaagttgtcactgaaccaaaaaatacaaaagtagaaaatgataaagtgacaacatctgttgaaacaaaaacagaaaaagcacaagattcattaaatgataatacaacaaaaacaatgacttcagataaaccagaagacaatcaaccaaaataa

SEQ ID NO: 411179 - DNA, 345 bp, Staphylococcus aureus
atggatcataaacgtatttttgtaccgaaaatggattatttaaatcatcaaatgacttttaaagaaatatttaatctcaaagatattgatgtcgataataaggggatttactatccaacttcaaaaggtgaaacaacgaataacctagatttaattgttgttcctggtgttggatttcaagacgatggatatagaattgggtatggtggtggctattacgacaggtttttagctaattatcagacaaagacaataagcttattatacgattttcaaataacatcatttgaaccggaatcattcgatcaaccagtcgataaattgattatatatcaatcagcatag

SEQ ID NO: 411180 - DNA, 816 bp, Staphylococcus aureus; identical to SEQ ID NO: 408182

SEQ ID NO: 411181 - DNA, 174 bp, Staphylococcus aureus
atgaatgtcaaaggctcatatatcgtttatgaaccattcgttcatcctgaaactgataaataccgtttagtttatcaaggtggaattacaactattaaaaatggtcaaaatattcattatgatttttatgcagatgcatatactggtgaagtcattaacattgtagagcgttaa

SEQ ID NO: 411182 - DNA, 693 bp, Staphylococcus aureus; identical to SEQ ID NO: 405624

SEQ ID NO: 411183 - DNA, 948 bp, Staphylococcus aureus
atgagacttcaaaaagcacctctagtaacgtcaggactagtcttaggattattaggcctgggtaatctattaaaagacttatctcttactttaaacgctgtttgcggaatctttgctttcttgatttggattcaccttttatgtactatgatcaaatattttaataatgtgaaagaacaattaaacagtcctctagtttcatcagtgttcacaacatttttcatgtctggctttttaggtactacttatttaaatacattttttagtaacataacttttatcaatagcttaataacgcctatttggattttatgtcttgtgggaattatgacgcatatgattattttttcaataaaatatttaaaagatttttcacttgaaaatgtttatccttcgtggactgtactttttattggtattgctatcgcaggattgacggcacccgttagcggatattttttcataggtcaattaacagtaatatatggctttgtagctacttgtattgtcttacctatagttttcaagcgattaaaagcatttccattgcagacgtcaatcaaaccgaacacatcgacaatttgtgcaccattttctttagtcgctgcagcatatgttatagcctttcctaaggcgaatgcttttatcgtaattatatttttaatattagctcaaatattttatttttatatcattatacaattgcctaaattactaaaagaacctttttcgcccgtattttcagctttcacattccctttagtaatctcagcaactgctttaaagaacagtttgcctgtacttatgtttccagacatttggaaaggtcttttgtttatcgaagtgttattagccactgtaatagtacttagagtctttataggatatcttcacttctttttaaaaaaggaaaaacaagataaatttcttcgtaatgcgtctcagtaa

SEQ ID NO: 411184 - DNA, 642 bp, Staphylococcus aureus
atggaattgaaagtcgatgattttgtaaagaatataaaaagaccgtacttaactgtattgggagtatttgtagttgcctattcattattttttgattcattgatgtttttctatggcaaactatatgataaattgcctgtatatttgctggtgtttatggcctttacagctgtaattttgattatgatgtacatacaagagaaaaatgagaattacaaagttgaaaaaagatatgtggttaaatatctcacacttaacgttattgtgggatatactttgccattgcttttggcatctatttatgtttttggggtagctggttttggatttgacgtttttaattattggctaggtatagtgatgatgctatttatttcttggttaggcttatttttattttataaaaataaatttgatagtgaaaatccgaataaagcagttaatgtcatagcaattataataaaattatttgcatttggtggattattctatattagtacaattgtacctaacactgcagatgaagctaaatttatatatacaagtattctaataaatttagcttctgatgctcttcttgttaggtcatattttaattacgcgttatacaagagtattaagaaagatatcgaaaaagtttag

SEQ ID NO: 411185 - DNA, 1008 bp, Staphylococcus aureus; identical to SEQ ID NO: 406080

SEQ ID NO: 411186 - DNA, 531 bp, Staphylococcus aureus
atgtggggcgaacaccaagaatactggtatttatatacaggtataatgctaattgctggtatcagttatgtattttatcaaagagatattgaatctaagcggttgcttacatcaattggtgttggtattattacagcaattattttaattatgcttcaacttttattctcacttataacttctaatttaagttatagttcattaattaaagaattagcaagaacaggtgtcaattggaagtggcaaatgttagtaactttactttttgtcattccatgtcacgagttatatatgagaactgttttacaaaaagaattaacacatttttcaataccgaaatgggtagctatattaataactgcaatttgttctagttcattatttatttatttagataattggtggatagtaacatttatatttgttgcacaagtgatattatcattaagttatgagtatactcgacgtatagcaacaacatccgttgcacaaattgtagctattatattgttattaatttttaatgcttaa

SEQ ID NO: 411187 - DNA, 702 bp, Staphylococcus aureus
gtgtataagagacagcatcttatcactaaaaaccaacactatcatcaaactgacactcattttgaacagtataagaaatttattttagattcaggtatatcatcaacacaatttgtatataataacctgtctgtaagcggatttaaatatactaatgatggtaagaatccaattcaattatctgacatagtgtatcacttaatcgcattattacgatatggcggtggcattagctatcaattattagatgaccattcaaattatatttccttgtacaacaaatatggtagccccctaccattaatgcatttatataaaatgtttagaccttttgttaatgaagatattgaaattacaaataattatgtattgagtcgtaaagataataactaccatttcttattattcaataaaattaatgatagatatatgtcagacgtaaaacaagatttcattttccataatgaattacctcaagactctttgatgattattaaaacattgaatcatgaacatggttcaattcaacatttgcttccaataagcgatcaacttgtttatatagaaaaagaaattttagatgaattagacaaaacgaattaccctaaaacggagcttgcagttcaagaagaaactggtcgtacatttgaactcaagttaaatcatgacgaggttaaatatatttgctttaaaccaagctaa

SEQ ID NO: 411188 - DNA, 1128 bp, Staphylococcus aureus
atgacagataattattcactacatatttataaaagtatgaaaatgagtagtgtgaaggaagcgaacttaaaaattatatattggctacaaggtacaggtgtagtttcaatcaatctacaacaatatgatgtaaaaagaaatgatgtcaccgttattatgttgaatgatttgtatcaaattgatggtcatgatgatagtgtatgttgtgttgttgaagtaagtgcaaagacatttttgaagtttatgaatgcaaactatatgatgcgtggcaagatattaacaaatgaggttgctagcacttttagaatcttgattaagtatttaatctacagcaaaattaaacaacagtcttataatgctaatgataagattattaattacatgtgtgttgaattaatgtcattaaatacatacgatggtagtcgtcatttagtagccgaagaagtgcacgattatttaacaaacaaccaccataaaaagataaataggaaagatgtcattaatcaagttagtattacaaacaaagctttaagtgacatgtttaaagcgacaccttatagtaattttattcaatatttaaatcatattagactggagcattgcttaattgatattttaacttctaagaagcctattgaagaaatcgcaagtagtcatggttttaatcattattctcgttttatacacctctttaaagaaacgtatggtaacactcctaaattaattagaaaaagatatagtccaacatctcattcaattaaccattcccaattagttgaaattgataaaaatataattgaattatttgatgatactaatcaaagttcttcaagtatgcgcgagattgatataccttttgagcctacaaaaaggagtcaaatgtatcaacctaaaaacatttatattaaaggaagtaatttttattggatggattattatactattaaacaaatcattcaaagattaggtgttaatcctgaaaacttgcatataattgttacaatcgacacaagcaatgagctatcgattgaacaaatcactttattacttcaaaagatagtgaattacaatgtaaatgtagtatttcgtatctgtctcttatacacatctgacgctgccgacgaatag

SEQ ID NO: 411189 - DNA, 684 bp, Staphylococcus aureus
atgactactaaggaaaatatagacattcttcgaaagccaggtgcacaagccttaagtttaatatcattgtttttgatacttttttcatgtctaactttcttttttggtttagattatgaaaggtttccaaactatttaaagataacgacaattatagaattaataattattgtaattagtttacttcaatggattagatttatagatttcgaaaaggaaagcgcacagaaatacaaaaaaatatatgcccgatttttagttgttataaatgtgctaactactatcactgcagtatttgcactgtgtaacctttattattttgcagctgtacaaaaccattatgatttattcaattattggttaatgggtacgatttcaatcataattagctatttattattagtaattggcggaatgtttacgttgttaaaattacctaaagtaacaaaacgttggggtggtaaaactaaaacacatttcggtttattattaaccgcgttgagcgcatttatatatattgaaagaattatcgaatatatattggtgcccaatgtcgtagaatccaagtttgtcataatggtaagtatcattattattgcttgtacacaatttgtagcctttcaatttattatgcaatacagtagattctatatttttgaattaaatacagaagatgatgactaa

SEQ ID NO: 411190 - DNA, 411 bp, Staphylococcus aureus
ttgaacaaagttcgagaaattattgatgatgtaaaattaccatcatttattgaagagattgatagtatacgtaaagttttaaaagatgctgatattgattttacatttgaaaataaagaattagcgcaagtattaagtcctactaaacaatctatgttagttatgattacgcgtgaagcgataaataatgttattaaacatgcaaatgcttcaaaagttcatggtaaattaaaaactgtaaacaatcataaattactgcttatgattgaagatgatggcaaaggtatcgatagtgattgtgaggtgaaaagtatttcacagcgtgtacaacatttaaatggaactttagcagtcgactcaacaaatggaactaaaataatcattgaaatctcaacaggaggaatagcatga

SEQ ID NO: 411191 - DNA, 873 bp, Staphylococcus aureus
atgattattaaaggatacttagactttagcggtaatagtgctggaaagggcaatgaagcactatatcattctaatttttcaagttttgctgaaggctttacacaaggctatttaacaatggatgccattgcagcaattgctttttcaatgattgttgttaatgcagtaaaactaacaggcattactaaaacaaatcaaatattcaaacaaactttgactgctggtttaattgcagccgtagctttaattttcatatatatttcattaggttatattggtaatcatatgccagtaagtgacatggcgttagatcaattgaaatccaaagatcgaaacattgggacatatttattaacgacaatggcttcaacaggatttggttcattcggaaaatatttattgggcatcattgtggcgctggcatgtctaactacagcatgcgggcttattgttgcagtttctgaatatttccatagaatcgtacctaaagtatcatacaaagcatttgtattagttttcattttaatgagttttattattgctaaccaaggtttaaatgctgttatctcaatgtcaattccggtattaagcattgtatacccagtagcaataactgttgtattattaattttaattgccaaattcataccgacaaaacgcatttcacaacaaattccagttattatcgtatttatattgtcgattttcagtgttattagtaagttaggttggctgaaaattaactttatagaatcattgcctctaagagcgtattctttagagtggttcccagtagcaattattgcaacgatattaggctatctagtcggcatatttgtaaaacaagatccaattaaatatcaacaggaataa

SEQ ID NO: 411192 - DNA, 399 bp, Staphylococcus aureus
atggaaaaatcgatcaaaataatgacaataataggaattgttattcagggtttagcaacggtatttagtttactattgatggttttagcagcatcaggtgtaatgactacagatgtgtcaacaacagttaatggtgaggttgacccagttgatgcagaaacagcagcagcaattttcactgtattattcttattcctattcatatttggaatcatttcaattattttaggtgcaatcggtatgtttaaagcatctaaaaacaaaaaaatgagtggtatattgttgattattggagctgtaataagtggtaacataattacatttgctttatggttagtcagtggtattaaactacttactaataacaagcctaaagatgaaataagcgacttatcataa

SEQ ID NO: 411193 - DNA, 738 bp, Staphylococcus aureus; identical to SEQ ID NO: 406312

SEQ ID NO: 411194 - DNA, 849 bp, Staphylococcus aureus
ttgaaacaagcattgtatgattcatatgttcaagcgataagatgggctacagatagaatagggagtaagggggttataagttttgtaactaatggagcttttatcgataatcaaagtttcgatggatttagaaaatgtgtttatgaagaatttaactatatttatatttataatttacgaggtgatcaacgaacacaaggtgaaaaatctagaaaagagggggggaaaatatttggctctggaagtagaacaccaatagcaattacagttctagtgaaagacgaaagtgaaaaacacgaaattaagtattgtgatataggtgattatctgtccacacaagaaaaacttgaaatcattaaaaataatagttcgattgctggagtgaaatggaaaacaattcaacccgatgataataatgattggataaatcaaagagatgaaaaatatcaagattatatttctctgtacgaaaatgatggagaatcaatttttaatgattatactttaggagttcaaacaggtagagactggtggacaacgggttttagtaaattagagaccataaataatagtgaacgaatgatagaaaactttaattcagaaattaaaagattatggtttgaagaagaaccaatcaaaaaaataaatttggatccctcttttataaactggtcagacgtattaaagaaaagattagtaagaaaagattcaatacgaaaaaaagaaaatccgatgattataacttcgtttagaccatttacaaaaaagtggatgtattatgatgaagcaattattcatagacagagaaaatactgtctcttatacacatctgacgctgccgacgaatag

SEQ ID NO: 411195 - DNA, 213 bp, Staphylococcus aureus; identical to SEQ ID NO: 407844

SEQ ID NO: 411196 - DNA, 696 bp, Staphylococcus aureus
atgcaaggcttcatcagctctagaacaacatattcagacttaaaaaaatatccatatattaaaagaatgatatggccatttcaatataatatcagtttgaaaacgaaagactctaatgttgatttaatcaattatcttcctaaaaataaaattgattcagcagatgttagtcagaaattaggctataatatcggcggaaacttccaatcagcgccatcaatcggaggcagtggctcattcaactactctaaaacaattagttataatcaaaaaaactatgttactgaagtagaaagtcagaactctaaaggtgttaaatggggagtgaaagcaaattcattcgttacaccgaatggtcaagtatctgcatatgatcaatacttatttgcacaagacccaactggtccagcagcaagagactatttcgtcccagataatcaattacctcctttaattcaaagtggctttaatccatcatttattacaacattgtcacacgaaagaggtaaaggtgataaaagcgagtttgaaatcacttacggcagaaacatggatgctacatatgcttacgtgacaagacatcgtttagccgttgatagaaaacatgatgcttttaaaaaccgaaacgttacagttaaatatgaagtgaactggaaaacacatgaagtaaaaattaaaagcatcacacctaagtaa

SEQ ID NO: 411197 - DNA, 294 bp, Staphylococcus aureus
atgaaatttaataaaaaagataaatcaataataatttttaataatgatattaaaatcgaaaatatacctttggaagcctataaatacgttataaatggaaaatcagctattgagtggattatggatcagtatcaagtgaaaaccgataagaagtcagggattgtagataatcctaataagtttagtacagatccacagtatattttaaaattattattgtctgttataacagtaagtgtgaaaacgcttgaattagtagaagaattacctggttttgagataattcattattaa

SEQ ID NO: 411198 - DNA, 324 bp, Staphylococcus aureus
ttgcaagaatgtattaacactgcagatataattgctactggtggtggtattattgaaagtgaagaggcatttaattttttgaaaaatcaaaaaaacattatttggttagattgtaatattgatattatatatagtcgaatcaatgatgacccacatcgacctaatgcaaataataagacaatcaagcagttaaatgacttgtattgctcgcggattttaagatataatgaaatcgcattcaagaaatttgatagtcatttgctatcaatttcagaaatatattatgaattgctaaatttaataaaagcgagtgatcagtattag

SEQ ID NO: 411199 - DNA, 390 bp, Staphylococcus aureus
atggaaaaattaatcaaagtgacgtctttaattggaattattattcaaagttttttaacattgttatttttattatttttaattttatcagcaacaggcattatacagccagaattgaccacaactgttaatggtgaacaaactatacaaagcccagaaactgctcaagcaacattcgtgacaatattcgcaatattatttgttgtttctttagtttcagatttattaggcattatagctatgaaaaagttgtttgtgaataataaagcgagtggtattttgtatattattggtgcagtgatcagtgccaatttattaacatttattgcttggttaataagtgggatttctgttttaagatataacaaaataggaaaagaagtgtcatag

SEQ ID NO: 411200 - DNA, 273 bp, Staphylococcus aureus; identical to SEQ ID NO: 406404

SEQ ID NO: 411201 - DNA, 135 bp, Staphylococcus aureus; identical to SEQ ID NO: 405310

SEQ ID NO: 411202 - DNA, 135 bp, Staphylococcus aureus; identical to SEQ ID NO: 405310

SEQ ID NO: 411203 - DNA, 762 bp, Staphylococcus aureus
atgatagaaaatactagtgttattaaagatttgaataaaataaaggaaactgagaaatattggaatgtattagatgattattacacgattgaatttgcaccttatcacgaaacgaaacaaagtttgattgataatatgctgcgatcagaacaattagtaaaggctagtgaagcagaaaataatgcgattttattcaaaccaaagggtgactccgttgacaatgacaacttttcgcctgatgaggggaatgtaatattagtaaataatcagttctggtcgatttattacaagcagtttcaacctgatattccgataaaaaatcaaaaaaataatgtcgaagtaattattccacaaaagtttcatgcaatgcgtaatgaaatcaatcaagcatatcattcatggtttgaatttgtacaaaataaaaataataaagagaataagttatctatacagtttatcaacaaaaatgattatcgaattttttcatttgatgcacgagatagtcgccatttgtcatttatagaggcgccaatcattgtgaatgttcaggcatcagatttatcgaatgatttttattatgccatgatcagtcaaggcgggtatttattcaaaaattatgacgcgctagtaaaaaatattgaaaagtatcatcttgatggggaaatcagtggaataaccaattataaagatagcgtgatggaaatgtatcatgaaaacaatttgaaattaacagtactcaacctgtctcttatacacatctga

SEQ ID NO: 411204 - DNA, 375 bp, Staphylococcus aureus; identical to SEQ ID NO: 406125

SEQ ID NO: 411205 - DNA, 564 bp, Staphylococcus aureus; identical to SEQ ID NO: 406647

SEQ ID NO: 411206 - DNA, 603 bp, Staphylococcus aureus
atgattaagaaattactaatcgaatttattatagacaacaaagatagcaaaatcgttagcgcggaaccatttgaattaaacctagaagctttttatgctatcaaacaaaattgtaatattagtaataacaataaacccttagatgaatatattattacatattttgaggatttattgtctaatataagtaacacattaacaaataataatagggctaatggaaataacccaataataaattacatctatgttactcaaagaaaagatggcatggtttgcgtagttggaaaatcacatttcaaatatgaatttaagggtaatgaatataaattagttaaaaatcaagaaggtgacttatttaagaagatggatgaagataaaggttccggaaaaatattatcttcattgtatataaaagacaatgaattaaaaaaacaatattctacatgtagagaatttctagatgattatttatatacagcatggattattcctgttttgctgaatgaacatgcaacaagtcaattagaggaatatttaggtagatatttaattaaccaaaacgtaccaatccttaatttactttcacatactttcaaataa

SEQ ID NO: 411207 - DNA, 126 bp, Staphylococcus aureus
atgactgaaaaacctaatattgagaacttagtaaaatttattaaattaaaggaaagcataggtaactacatttttgttagtttagggaatccgttagttaaagctctgtctcttatacacatctga

SEQ ID NO: 411208 - DNA, 558 bp, Staphylococcus aureus; identical to SEQ ID NO: 409332

SEQ ID NO: 411209 - DNA, 198 bp, Staphylococcus aureus
atgtctgtaagatctggtcaaccgggtattaatagtgaagaatatgcaaaattacctttagttttgcccaataagttagaacagcaaaaaatagcagaattcttagatagatttgaccaacaaattgaattagaaaaacaaaaaatagaaatacttcaacaacagaaaaaaggcttacttcaatcgatgtttatttaa

SEQ ID NO: 411210 - DNA, 126 bp, Staphylococcus aureus
atgacatataaacacttttctattattacattaattacaggtataattatgcatatgacaatgtactttgtaccatatgaatgtcggaaaatgccattatttatgatgattatttttacaatctaa

SEQ ID NO: 411211 - DNA, 138 bp, Staphylococcus aureus; identical to SEQ ID NO: 405565

SEQ ID NO: 411212 - DNA, 342 bp, Staphylococcus aureus
ttgaattattacacatatatccctagagagtataatgtctctgaaaaagtattttatgatttgtggacggatttatatagattgtttaagaagttaagaaatgcatttaaagaagaaggacttgaaccatggacatcatgtgaatttgactttacaagcgaaggtaaattaaaagtatcatttgattatattgattggatgaatacagagtttgatcaattaggccgtgaaaattattatatgtataaaaaatttggggttataccagaaatggaatacgaaatggaagaaattaaagaaatcgagcaatatgttaaagagcaagatgaagctgaactatag

SEQ ID NO: 411213 - DNA, 474 bp, Staphylococcus aureus
atgtacaacgagattgcgaataaaattagtagcatgataccggtagagtgggaaaaagtatatgcaatggcatatatcgatgaagaatgtggagaagtgttttacaattatactgaaccaagcagtgatgaattattttactatacaagtgtgataaagaagtataatttattgaaatcaagctttatggattcagtatatgagttgcatgatcaatttgaggaactaagggaaatatttaaagaagaaggtcttgaaccatggacatcatgtgaatttgactttacaagcgagggtaatttgaaagtatcttttgattatatagattggataaatacagagtttgatcaattgggccgtgaaaattattatatgtacaaaaaatttggggttataccagaaatggaatatgaaatggaagaaattaaagaaatcgaacaatatattaaagagcaagaagaagctgaacaatag

SEQ ID NO: 411214 - DNA, 309 bp, Staphylococcus aureus
atgattgatttagtaagcacatggttagttttgttctttccgtttattaattggttaatcccaaaaaaatatgtccaaatcagcagagaagattttgataatttaaatattgtcaaaccagttaaaaataaagctttatggccagctataggtagcatacttttatttggcactatgtttagagataaaatatatatacctgattctcatttagaaaaaaattgcgttattatcatttgttcggttttattattaagtattctagtgttttatatatatttaaatcacaaagcaaagattcttgaatga

SEQ ID NO: 411215 - DNA, 195 bp, Staphylococcus aureus; identical to SEQ ID NO: 409310

SEQ ID NO: 411216 - DNA, 177 bp, Staphylococcus aureus; identical to SEQ ID NO: 405914

SEQ ID NO: 411217 - DNA, 285 bp, Staphylococcus aureus
atgaaagtgacagattttcataaaaatccaatggggggatattttgttgtaggttatattaatgataataaaaaatatgaattccaagctagtattgattcgggaagcgatgatcagtttcataaagatattggatatgatggagataaaataggggaattattcaaagaaaaagaccctaaatataaactctcagtcgatgaaataattgaaaaagaacacttagacaaaagtgattatgaagcggaaccaccattattcttcttttcaggatcgatggattag

SEQ ID NO: 411218 - DNA, 2610 bp, Staphylococcus aureus; identical to SEQ ID NO: 410939

SEQ ID NO: 411219 - DNA, 765 bp, Staphylococcus aureus; identical to SEQ ID NO: 407805

SEQ ID NO: 411220 - DNA, 150 bp, Staphylococcus aureus
ttgaatgatggttcatcattttcttatgacttatttgatactggaacaggacaagctgaaagtttcttaaaaatatataatgacaacaaaactgtcgaaactgaaaaattccatttagatgtagaaatatcttataaggacgaaagttga

SEQ ID NO: 411221 - DNA, 1647 bp, Staphylococcus aureus
atgattagcaaaattaatggtaaattatttgccgatatgattatacaaggggcacaaaatttatctaacaatgcagatttggtagattctttgaatgtgtatccagtgccagatggtgatacaggaacaaatatgaatcttactatgacttcaggtcgcgaagaagtagagaataatttgtcgaaaaatatcggcgaattaggtaaaacattctcgaaaggtttactaatgggtgcaagaggtaactctggtgtcatcttgtcacaattattcagaggattttgtaaaaatattgaaagtgaatctgaaattaattcaaaattgttagctgaaagttttcaagctggtgttgaaacggcatataaagctgttatgaaaccagttgaaggtacaatacttacagttgcaaaagatgctgcgcaagctgcaatagaaaaagcaaataatactgaagattgtatagaattaatggagtacattattgtaaaagccaatgaatcacttgaaaacacaccaaacttattagctgtacttaaagaagttggtgttgttgatagtggcggtaaaggtttgttatgcgtttacgaaggattcttaaaagcgcttaaaggtgaaaaagttgaagccaaagttgcaaagatagataaagatgaatttgtacatgatgaacatgatttccatggtgtaattaatactgaagatattatttatggctattgtactgaaatgatggttcgttttggaaagaataaaaaagcctttgatgaacaagaattcaggcaagatatgagtcaatttggtgattctttattagtcattaatgatgaagaaattgtgaaagttcacgtgcataccgaatacccaggtaaagtgtttaattatggtcaacaatatggtgaattaattaaacttaaggttgaaaatatgagagaacagcaccgtgaagtgattcgaaaagaacagcacacagctaaaccgaaaatggaaacggttgaaacagcaattattactatttctatgggtgaaggtatttcagagatattcaaatcaatgggtgccacacatatcattagtggtggacaaacgatgaatccttctacagaagatatcgttaaagtcattgaacaatcaaaatgtaaacgtgcaattattttaccgaataataaaaatattttaatggcaagtgaacaagcagcgagtattgttgatgcagaagcagttgttattccaacgaaatctattcctcaaggtataagcgcactattccaatatgatgtggacgcaacacttgaagaaaataaagcgcaaatggctgattcagtaaataacgttaaatctggttcattaacgtacgctgttcgtgatacgaaaattgatggcgttgagattaaaaaagacgcgtttatgggcttgattgaagataagattgtaagcagccaaagtgatcaattaacaacggttactgagttgttaaatgagatgttagcagaagatagtgaaatattgactgtgattattggtcaagatgcagagcaagcagttacagataacatgataaactggatcgaagagcaatatccagatgtagaagtggaagttcatgaaggtggacaaccaatttatcaatatttcttttcagtagaataa

SEQ ID NO: 411222 - DNA, 210 bp, Staphylococcus aureus
atgatattcgcctctgccaaaggattttgtagtgctgcttgtaataatgctccagaaactgctaacattgcgccaaccatcaatgcaattaatatacgtggcaatcgcaaatcaatgattgaatccactgcttcattgctaccagttgtaaattttgtaaataggtcattaaatgacaatttaattgtaccggttacaaacgaaatataa

SEQ ID NO: 411223 - DNA, 501 bp, Staphylococcus aureus
atgaaagttaatcctaataatattgaattaatcattagtgcagtaaaagaagaacaatatccagaaacagaattgtctgaagttgcactgagcggtcgatctaatgtaggtaagtctacatttatcaatagtatgattggcagaaaaaatatggcacgtacatcacagcaacccggcaaaacgcaaacgttaaatttttataatatagatgaacaacttatttttgtggatgttccagggtatggatatgctaaagtaagtaaaacacaacgtgaaaaatttgggaaaatgattgaggaatatataactaagagagagaatttgcaattagttattcaattagttgatttaagacatgatccaacacaagatgatatcttaatgtacaattatttgaaacattttgatattcctactttagttatatgcactaaagaagacaaaattccaaaaggtaaagttcaaaagcatattaaatgtaagcacgaaacttttaattag

SEQ ID NO: 411224 - DNA, 1293 bp, Staphylococcus aureus
atgaaaacaacgattaaacaagcgaaagatcatttaaaccaagacgttacaattggtgcttggttaacaaataaacgttcaagtggtaaaatcgcctttttacaattacgtgatggaacaggctttatgcaaggcgtagtagttaaatcagaagttgatgaagaggtattcaaacttgcgaaagaaattgctcaagaatcatctctatacgttacaggcacaattacagaagataatcgttctgacttaggatacgaaatgcaagtgaaatcaattgaagttatttcagaagcgcatgactatccgattacacctaaaaatcatggtacagaattcttaatggatcaccgtcatttatggttacgttctaaaaaacaacatgctgtaatgaaaattagaaatgaagttattcgtgcaacgtatgaatttttcaacaaagatggatttacaaaggttgatccaccaattttgacagcaagtgcaccagaaggtacaagtgaattattccatactaaatactttgatcaagatgcgtttttatctcaaagtggtcagttatacttagaagctgcagcaatggcacacggaaaagtattttcatttggtccaactttcagagctgaaaaatcaaaaacacgtagacacttgatcgagttctggatgattgaaggggaaatggctttcacaaatcatgctgaaagtttagaaattcaagaacaatatgtaacacatgtagtaaaatcagttttagaaaattgtaaactagagttgaaaattttagagcgtgatacatcaaaacttgaaaaagttgcgacaccattccctagaatttcatatgatgatgcaattgaattcttaaaagcagaaggctttgatgatattgaatggggtgaagattttggtgcgccacatgaaactgccattgctaatcattatgatttaccggtgtttattactaattatccaactaaaattaagcctttctatatgcaaccaaatcctgagaatgaagaaactgtcttatgtgcagacttaattgcacctgaaggatacggtgaaattatcggtggatctgaacgtgtggatgacttagaattgttagaacaacgcgttaaagaacatggattagacgaagaagcatatagttactacttagacttacgtcgttatggtagtgtgccacactgtggatttggtttaggtttagagcgcacagtagcatggatttctggtgttgaacacgttcgtgaaactgcgccattcccaagattattaaaccgtttatatccataa

SEQ ID NO: 411225 - DNA, 2694 bp, Staphylococcus aureus
atgggtatggcaacctatgccgttgtggatttggaaacaacaggcaaccaattagattttgacgatatcattcaaattggtataacgtttgtgcgcaataaccaaattattgatacatatcattctatgattagaacaaatttagagattccgccgttcattcaagcgttaacatccattgaagaaaatatgctacaacaagcgccatattttaatcaagttgcacaagaaatctacgataagataaaagattgcatttttgtcgctcataatgtagattttgatttgaattttattaaaaaggcatttaaagattgtaatattcaatatcgtcccaaaaaagttatagatacactagaaatctttaaaatagcttttcctacagataaaagctatcaattaagtgaattagcagaggcacatggtattaccttagcaaatgcccatcgagctgacgaagatgccgctactactgctaaattgatgatattagcttttgaaaaatttgaaaagttaccgttagatactttgaagcaattatattatttaagtaaacagttgaaatacgatttgtatgatattttctttgagatggttaggcaatatgatgcaaagccattggataaatcgtacgaaaagttcgaacagattatctatcgtaagcaagttgattttaaaaagccgacaacaaattataatggcagcttgaagtctttatatagcaaagctgtagatcaacttggcttaacatatcgaccgcaacaattatatttagcggaaactatattagatcagctcatgcatagtgaaaaagcaatgattgaagcatcactaggcagtggtaaatcattagcatatttacttgcggccttgatgtataatattgaaactgggaagcatgtcatgatttctaccaatactaaattactgcaaagtcaattgttagaaaaagatattccagcaatgaatgaagcgttaaattttaaaattaatgcactattgattaaaagtaaaagtgattacatttcattgggacttattagtcaaattttaaaagatgacacaagtaattacgaagtgaatatcttgaaaatgcaattgttaatttggattacagagacgccgtccggagatatacaggaattaaatttaaaaggtggtcaaaagatgtattttgaccagaaaattgaaacatatgtaccggcacgtcacgatgttcattattataattttattaagcgaaatgcacagaacattcaaattggtattacaaatcatgcacatttaattcattctgatgttgaaaattcaatatatcaattgtttgatgattgtatagtggatgaagcacatcgcttaccagactatgccttaaatcaagtgacaaatgagttgagttatgctgatattaaatatcagcttggtttgattggtaaaaacgaaaatgaaaaattgttaaaggcaatcgatcaactggaaaagcagcgaattttggaaaaattagatattgcaccaattgatatttttggcttgaaggctagtatgaatgagattcatgagttaaatgagcaattgttctcaacgatatttacgattatcaatgattctgatgtttatgatgatgatattcatcgcttccataatgtatttacttttgaaacaaaagacattttgaaggatttacatgcgattatcgataagttaaataaaacgctagaaatattcaatggcattagtcataaaacagttaaatcattacggaaacagttgttgtatttaaaagataaatttaaaaatatcgaacaaagtttaaaagctggacatactagtttcatttcaattaaaaatttatctcaaaaatcaacaatacgtttatatgtgaaagattacgctgtaaaagatgtattaacgaaacaagtattggaaaaatttaaatcactcatttttatatctggtactttaaaatttaatcattcgtttgaagcttttaaacagttattcaacaaagatgttcactttaatacatttgaagttaacacgtcgttacaaagtgcaaaaaatacaagtgtatttataccgagtgatgtagcatcttatcaatataaaaatatagatgagtatgtagcatcgattgtaagctatattattgaatatacgactataacgtcatcaaaatgtttagtcttatttacgagttataaaatgatgcatatggtacaagatatgctaaatgaattgccagaatttgaagattatgttgtattaacacaacagcagaaccaaaattataaaatagtacaacagtttaataattttgataaggccatactgcttggtacgtcaacattttttgaaggttttgattttcaagcaaatggtattaaatgtgtgatgatagcgaagttaccgtttatgaacaagcataatgcaaaatattggcttatggattctgaattcacttcaactttcaaggaatatgtattacctgatgcagttacacgttttagacaaggacttggaagattaattagaaatgaaaatgatcgcggcataatagtttcatttgatgatcgactcataaacagtaattataaaaacttttttgaacaaacacttgaaaattatcgtcagaaaaaaggcgacattcaacagtttggaaaattattaagacaaattcaaaaaaagaaaaagtga

SEQ ID NO: 411226 - DNA, 1014 bp, Staphylococcus aureus
atggcgattaaatattcagcattaaaccttgtccctattcgagaaggtgacgatgaacgaacagcaattaatgatatggttaagctcgcacaacatttagatgaattatcgtatgaaagatattggattgctgaacaccataacgctcccaacctagtaagttcagcaactgctttattgattcaacatacgttagaacatacgaaacacatacgtgtaggttctggaggaatcatgttacctaaccatgctccattaatcgttgcggaacaattcggcacgatggcaacattatttccaaatcgtgtcgatttaggattaggacgtgcacctggaacagatatgatgaccgcaagtgcattaagacgagatcaacatgatggtgtttataaatttccagaagaagtttcattattacaacaatatttcggcccagctcaccaacaagcatatgttcgtgcttatccagcagtaggtaaaaatgtgcctttatacattcttggttcttcaacagattctgcacatttagctgctcgcaaagggcttccatatgtgttcgctggacattttgcacctcaacaaatgaaagaagctatcgaaatttacaaaacgttatttgaaccttctgatgtattagacgaaccttatgttattgtatgtttaaatacaatcgttgctgaaaatgatgacgaagcacaatatttagcttcatctatggcacaagtaatggttagtatcactcgtggcagaatgcagcccgttcaaccgccaacacatgatctacaaaatatattaacgccgagagaatatgcgatggctatggaaagacagaaaatatcattaataggttcagaaaatactgttcaacaaaaaattcaagattttatggaaacttatggtgaagtcaacgaaattatggcaataagttatatttatgataaagatatgcaattagactcttatcgtcggttcaagaatgttataaatcagataaatgaaaaaaacactttataa

SEQ ID NO: 411227 - DNA, 759 bp, Staphylococcus aureus
atgtcagaatttaaaactggtaagattaataaacatgttttatatagtaatattttaaatagagatgtcacgataagtatttatttaccagaatcttataatcaacttgttaaatataatgtcattctttgctttgacggattagattttttacgtttcgggagaatacaacgtacatatgaatcgttaatcaaagaagcgcgtattgatgatgcgatcattgttggattccattatgaagacgttgataagcgtagagaggaatttcatccacaaggaagtcgttctcatttaactattcaatcagtcggtaaagaaatattgccatttattgactcgacgttttctacactgaaagtaggtaatgcaaggttattagtaggggatagtttagcgggtagtattgccttattaacggcgttgacctatccaacgatttttagtcgtgtagcaatgttaagtccacattcagatgacaaagtattagataagctaaatcaatgtgctaataaagaacaattgacaatttggcatgtcattggtctagatgaaaaagattttactttaccaacaaatggtaagcgtgccgatttcttaacaccgaatagagaattagctgaacaaattaagaaatataatataacttattattacgatgaatttgaaggtggtcaccaatggaaagattggaaaccattgctgtcagatatattattgtattttttacgtaaaaacacagatgatcaacattatgagtaa

SEQ ID NO: 411228 - DNA, 1359 bp, Staphylococcus aureus
atggcaatgaatgaaattgctttatttaaaggcgtacgtatacagccttatcagaagtatattgattttatgtttgcaagtgtattagcatttatttttttggtatatcgtatatatattttgtttattgattataaatcagttaataaaaaattggatatattgacgttgtttgcatattttaaaccgcatttattgtatttattaattggtacagcaattatatttgtgatatgtaagcttattgctcagtttttaatacgttttaaaacaaaagatttggctgaaatgattgaaacacaaggttttcataatcgtacagtaatcaagaaaacaactgagtatatccctattgattataaacaaactgaatatgattattatccaacaatgttttataagcgtggtaaaaaatcttttgttattcatattaagaaagacggttcgaggtttcaagataattatttagagttagagacgattattgaaccaatgtttaattctgaattagtagaaaaaaagcatattggtcgttatttgagatatgaatttatgccacttaaatataaaaagcgtattgttatgaatggcgaacaagaatcaaatacaattttttatgatacaaaaattgctattacgcatcaaattacttgggattttgtgaaagcacctcatggattggttacaggtataaccggaggtggtaaaacatattttttattttatgtgattcgtgagttattccgtagacattcagaagtacgtttattagacccaaaagtttcagatttgagctttatgaagcgcgttattggtgatgataaagttgcagatactaaaggtcaaatattaaaacaattgagagaagctaataatgaaatggaagagcgttttagattaatgaatgatagttcggattataaaatcggaaatgatttccgtaattttgatatgcgcccctatttcattatttttgatgaggtaacggcttttacttcaactttagataaaaaagaattacaagaaatgaatgattatttaattaatattattatgaaaggtcgtcaagctggtgtatttatgtttttaacagcacaaagaccagatgcagatgtgattaaaggtaatgtgcgtgaccaattagggttacgtgtgtctttaggtaatttgtcaaatgatggttatcgtatgacctttggtcaaactgataaagaatttcaaacgattcatgatagtgatatcggccgaggttatatatctatacttggacaatataatgaaccaattttatttgatgcacctttaatggaacaatatgattttgtggaagatgtgaaacaaatattaaataaggagtga

SEQ ID NO: 411229 - DNA, 1047 bp, Staphylococcus aureus
atggtaaataaaaaagatattgctaaaaaagtaataggtaaaacgccaataggtgttaaattgaaattagcgaaagtcatcatcattttgtgtgtggtggctttttttacatttccagtaattgtaatgtttttgttagcgcctgattcaaataaagataaagatgatgctggttgtactgttagtggcggtaatgtttcggcaaatggtattgataagtttaatgaaaatgctaaaggtggaaaattagagggtaaaggaaaagaaatacagaaaattgcagaaaaaaataaagtgcctgtgaatatttttatggctattattgcgagtgaatcacaatggggtaaaggagaaaatgcaacaagacaaaataatcctttgtctgttatgggttcaaaatcgattcatgattcaacatatccaactattgaagacggtcttaatgcgggagctaaaaatttgtatgatgtttatatttctaaaggtttagatactcctaaaaaaataggtcccaaatatgcgcctgttggtgcgtcaaatgaccctaataatatgaatgcccgttggataccaacagttgaaaaaattatgaaagatttaggcggttcagaagctaaaacgtcatgtagtaatggtaaaggaaagtctataaagtttaatggtaaattgccacattggtcaaatgatgaccctggaaaaggtaatttatacactgccggtcaatgtacttggtatgcatacggtatgcgtcaaaaaatgggtaaacctgtatcaacttattggcatgatgcacataaatggaatgatagggctaaggctgagggttataaagttgataaaaatccggaacctggtgcattatttattgctgaacaaggtgcaggcggtcatgatgggcattatggtcatgtggctgttgttattggtgtaagtgatggtggtaaaacatttagaataacagaaatgaattgggaaggtgcttttaaagttaatgaacgtacattgaaaatgactgatggatatagttttattcatgataaggagtga

SEQ ID NO: 411230 - DNA, 591 bp, Staphylococcus aureus
atgaagcaaaaaattattatgtttactcttgtaacagtaatattattttgtgctgttttaattggttatcagattcctaaacaacaagttaaaatgaaacaaaatcaaattgaagatttacaggaagaacaacgtatattaagagataaaaatggagagttaaataaactagtaaagagacaatcaaaaacagttatttctgatgaagaaaagcaaatacgtgaagtttcttcaaattttgttaaacagatgtttgaaatgaaaaaagattcttcttttaaatcaaaagcaccacaaataaagcctttagttacaaaggattattacgatacattatttaaggattctaaagataaatatgatttatatgatgatataacggttaatgatattcatgtttattttgatacttatgaccctaaaaaagatagttataaagtttttgttcagttcgacgaacgtattgaaacagatggagatgataaaattgaacatcgtcaaacatctgcacaattggatttagttcgtacagctgaaggttggcgcattgataatttaaaacgtttcaatttaaaacctctaggacgttag

SEQ ID NO: 411231 - DNA, 342 bp, Staphylococcus aureus
atgaggcgatggtttgtattaattttaggattagttatattattatctgcatgtggtcagaaatatgataaagagattgatgcagttttaaattctgaaagaaaaagtatgagtgagtcttcttttaagaagcctgaaaaaagtaatagtgattttaaagtatatgaagatggtaaatttataactatttcttttgtttatgataaagatggtacagtgtggacaagtttatataaaaaaaatgagacaacagataaatatgtaaaagttgaagatatgaatgaaaaagaatatcaaagtaatcataaaccagtttatgaagaaaataatatgaaaaaataa

SEQ ID NO: 411232 - DNA, 504 bp, Staphylococcus aureus
atgaaaaaaagaaaaaaacgtaaagaattagattataaaacacgtctagctatcgcaaagtatttaaatgatggtttaaacatcattcagatttctaagattttaggtcgtgatgatgcggttctttatagagaagtaaataagcgttctgttgatggtgtttataatcctttattagctgaggaagatgctataaaatcgcgtagtatttcagatgaacaagttgctaaacgtagacgtttgaatgatgaaacaaaagcatatattgaagaaaaactttcattaaaatggtctcctagacagatagcaagtcaaattgaaaaagatacagggtattatataagttatcctactatatatagatatattcgcaatggattggtaaaagttgatgttaagcgtgatatgagacaagcaggcaagaaatataataagtcttctgaaaagcgtggcaaattagacgtagggtctcgtgttataaagtatcggctcaaaaagtattaa

SEQ ID NO: 411233 - DNA, 354 bp, Staphylococcus aureus
atgaaaccattattacccaaaagtataactatggatagaggtaaggagtttgctctatttgaacaaatagaagatgaattgaattgtagtatttattttagtgatttgggttgtccatatcaacgtggttctattgaaaatgtaaatggacttttaagacagtattatcctaaaggtacggattttgcaaatataacacaaaagtcattagatgaagctgttaaacaaattaatacacggcctcgaatgatatttgactataaatcgagtgaggaaatgctaaagtaccatgtaagcacacaaaattgtgaacctatattaaatgactgtgtgaggcacgaacccgtcaattaa

SEQ ID NO: 411234 - DNA, 1083 bp, Staphylococcus aureus
atggataatgtaacaagatataaaataacagagagttcgcaaagttcatcacaagcatattatcatctctcatttgaattgtcggaacagcagtcttatgcctcagaacatattgttcgagccattagaatgagacaaacgattttgttatatgccgtaacaggtgcaggtaagacagaaatgatgtttcaaggcattcaatatgcaagacgacagggagataatatagctattgtgtcaccgcgtgtagatgttgttgtagaaattagtaaacgtattaaagacgcatttcttaatgaagatatagacatactacaccagcaatcaagtcaacaatttgaagggcattttgttgtatgcacagtacatcaactttaccgattcaaacagcactttgatactatttttattgatgaagtcgatgcctttcctttatcaatggataaaagtttacaacaagcattgaagtcatcttctaaagttgaacatgcaacgatttatatgacagcaacaccaccgaaacaacttctgtcagagattccccacgaaaatataattaaattgccagctcgctttcataaaaaatcacttccagttcctaaatatcgttatttcaaacttaataataataagattcagaaaatgttataccgaattttacaagatcaaattaataatcaacgttatacactggtgttttttaacaatatagaaacaatgattaaaacattttcggtttataagcagaaaattactaaattaacatacgtccatagcgaggatgtttttcgctttgaaaaagttgaacaattaaggaatggacatttcgatgtcatttttactacgacaatattagaacgtggatttacaatggcaaatttggatgttgttgttatcgatgcacatcaatatactcaagaggctttaatacaaattgctggacgtgttggacgaaaattagaatgtcctgctggaaaagtattgttttttcatgaaggagtaagtatgaatatgattcaagctaaaaaagagattcaaaggatgaacaaattagcattaaaaagaggttggattgatgaataa

SEQ ID NO: 411235 - DNA, 924 bp, Staphylococcus aureus
atgacagaattacttgtcacacccaagtcattaagccatatggaaacacttattgatttaggtgcagatgcttttgtaattggcgagcaaaagtttggtttaagacttccaggggaattcaatagacaacaaatgacagaggctgtcgcattagctcacaaaaacgataaaaaagtatatgcggcagtgaatggattatttcataattatcatttagatgctgtagaagattatattaattttttacatgaaatacgagttgacagaattattttcggggatccagcagtagtaatgtatgtgaaggcgcaagaaaatccaataccacttcattggaatgcagagacgttagtaactaatcattttcaatgtaattactggggtaaaagaggcgcatcaagagctgtcttagcacgtgagctgaatttggatgaaattattaatataaaagaaaattcaaatgtggaaattgaggtgcaagttcaaggaatgacttgtatgttccaatcaaagcgtatgctactaggcaattattatacgttccaagatcgccaaatgaaaattgaacgtcgcaatgatgaacaatctttattactttatgatgaagaaagacaaaataattacccagtttacgaagattacaatggtacgcacattatgtcaccaaacgacatttgtttaattgaagaattagcaccattttttgaggcgggtatagattcatttaaaatcgatggtattctacaaacggaagaatatattaatgtggtaacggaacagtatcgtcaagcgatagatttgtacaatgaagatcctgaaatctatgaagatgagaaatttatgttgattgatccaattgaagaaattcaacctgatcatcgaccatttgacgaaggtttcttatataaacaaacagtatattaa

SEQ ID NO: 411236 - DNA, 549 bp, Staphylococcus aureus
atgtgtataagagacagattagtaggtgttgcgttattcgtattattaaatggtgttttagaaattttaactcaaaaccctttaatgaaaattcctcaaggcttaacaatgaaaatatggagcgacgtatacatattagcagtatcagcattattgggattaatattaacattactattgtcccctaaattgaatttactaaatttagacgacatacaagcgcgaagtatcggttttaatattgatcgttacagatggttaacaggtttattagcagtatttttagcaagtgcaactgttgcgattgttggacaactagcctttttaggtattattgtgccacatgtggttagaaagctagttgggggcaattacagagtacttattccgttttctacagttattggtgcatggctattgttagtggctgatttattaggacgagtgatacagcctcctttagaaattccagccaatgctattttaatgattgtcggtggtccaatgctaatttacttaatttgtcaaagtcaacgaaatcgaatctaa

SEQ ID NO: 411237 - DNA, 327 bp, Staphylococcus aureus
ttgaaaataatcggaacgaatacacatgtaatgactgcgcttaaaattaatatacctgacgtttcagctgaaatagcatttaatctttctgaaattttggctgcagctatcacgagcgataatgttgatgttaataaaaatgctgatgcaatcgttgttttcatatcaaaccaacgtcgaataaacatgactggaattaattttgaaatgataaatgcaacgattaaaatcggtatgataattagtaatttcggttctttaattaatgaaggtatgtttaaatctacaccaaccattataaagaaaataggaataaagaacccataa

SEQ ID NO: 411238 - DNA, 360 bp, Staphylococcus aureus
atgccttcaggtattgatactatcagtatcgttatgcgttcaaaacaaattcaaaataaagaaacaaaagtattaaatgaaattcgtcaaaaatgtgatgttgatgagctaagtattgagcatgatttagcaatattaatgattgtcggcgaaggtatgaataaagtcatcggtactgcaaataaaattacacatgccttagctgaatcaaaaattaacttaaaaatgattaaccaaggtgcttcggaaatctcgatgatgtttggaattcatgtagatgatgctgaaaaagctgtattatctacatatgagttttgctatcacggggttgcattaaaaaacttgtgtgataaaaactaa

SEQ ID NO: 411239 - DNA, 927 bp, Staphylococcus aureus
atgaaaaaattcattggatcagttttagctacgacattaattttagggggatgttccatgatggaaaatgaatcaagtaaagacacgaatacagaaacaaaatcagtaccagaagaaatggaagcttcaaaatatgtaggacaaggcttccaaccacctgcagaaaaagatgcgattgaatttgcgaagaagcatcgtaaagaatttgaaaaagtaggtgaacaattctttaaagataactttggactaaaagttaaagctacaaatgttgtaggtaaagatgatggtgtagaagtttatgtgcattgcgaagatcatggcattgtatttaatgcaagtctacctttgtacaaagatgccatccatcaaaaaggatcaatgcgcagtaatgacaatggtgatgatatgagtatgatggtgggtacagtgctgagtggctttgaatatcgagcgcaaaaagaaaagtatgataacttatataaattcttcaaagaaaatgaaaagaaatatcaatatacaggctttacaaaagaggcaattaacaagacacaaaacgttggatatcaaaatgaatacttttatatcacatatttatcaagaaatttaaaagaatatcgtaaatattacgaaccattgattcataaaaaggataaagaatttaaagaaggtatgcaacgagctagaaaagagttagattatactgctaatagtaatacagtagcaacgttgtttagtacgaatgataaaaaaaatagaaaagaaaagataaataatgtaatagatttatccgagaaaattgaaagaacaaaagatatgccaatcaagaatactataactactcaattaggaaataaacttattggcacaaaaaaagctcgttttgatgataagaaagtagtgtcgtttggagcatttgaagatgaataa

SEQ ID NO: 411240 - DNA, 357 bp, Staphylococcus aureus
atgctagggaaaattgggtatctccatcaaggttatacaacaggatattcaaataaaagtcaaattaggtggatttctgtattggatttaaaagataaagatgagaatcaacttttaaaagaaatggaataccaaactagaagaaatataaaaaagactattgagattggtgttaaggttgaagatttatctattgaagaaacaaatcgattttataaattgtttcaaatggctgaagaaaaacatggttttcatttcatgaatgaagattattttaaacgaatgcaagaaatatataaagataaggcaatgttaaagatagcttgtataaatcactgtgaacagagcattaaatga

SEQ ID NO: 411241 - DNA, 1218 bp, Staphylococcus aureus
atgtcatatacttctgtattgtttaataagaactttactttttatttaatagggatagctttttctaacatgggcagtgcttttactacgtttgtttttccattaatgattttaaagcttactggatctgcatttcaagttggcatagtttctgcactaagttttataccttatgcaattttaggattgccagctggtgctttaattgacagattgaataagaagaccataatgaaatgtgctgatataattaggttcgtttcatatttaagtataccagtattaagttttttcaatatgttaagcatctttcaaatttatgtagttgcaatcatttcaggtattggattagtatttcacagtatttctgaggtttcgataatcccaagtattgtaaaagaagaagatttggcgagcgcaaacagttatatatacgctactcaaaatgtttcggaatttttgggccctataattggaggtttactttatacatatatgggatattcaatattgatttttatagattctatgacttttttactctcatttttcagtttgatattaattaaaattgaaacaaagagtatattcaatcaagaaaagttgagtggaaaaaattttttgagcgatgttaaagttggatttgattatctattatctaattcaactattagagtaatggctgttgttgtaagtttatccaatctaattatctcaccttattatatttatatagtaatgtttgtaaaggaagacatgaatcaatcatctcaagcattggggttagttttaggtatctcatcattaggtgcgctaatcggttcattatctgcaagttttctcttgaaattatttaatttcggaaaactaattgtaattatattatttttagatacaatttttagattaatgttaccatttagtacttatatttttatactcatcccacttttagggttgacatatatgacacaatccattttaaatatagcgataatcacactgaggcaaaagaaatgttcagaaaatatgttaggacgtgttaatagtgtttttaaaacaatggtttttgcattcagacctataggcctttttttaggcggtatattacttgaaaataaaggtggattttatgcacttacgatcagtgctgtgttatttataccattagtgttatatatactgaaaaatagattttatcaagttgaagaatattaa

SEQ ID NO: 411242 - DNA, 2097 bp, Staphylococcus aureus
  misc_feature (192)..(201): n is a, c, g, or t
ttgctgtatgtcgcgttatcaatgattgtaggagtgctttggaattctagcaaagtgctctctacatttcttttcattttacttttgtatattacttatcgtaaaaataaaatcgtttatgcccctatttctctctttttaatcattttctcctcatggtatttacattattcacaacaagcaatatttaannnnnnnnnntatcctttctttttaacagataaaaagaattttgatttaaagaaaattgaaagtcgtaattgtattgttaaaggacaattcaaagttaatgaaaataagtttgtaactcttaaattacaaagtatagttgtacaaagctgcctagaatcgaaccggtctaatttaattgagaaacataaacagtttataatgaatcgaatttatgattcgggtattaagtttccggatcgtattatggcattgattactggtgacgtaaaagaaattaatgagcaatttaaggaacgtgttaaagagataggtatatatcatttgctggcagttagtggctcgcatatagctgcaattgtattcttaatttaccaacctttaaaacgattaaatttacctttatttgtcattaaaggaattacaatcattgtattaactttatatgctcaatacacaaattatgcacctagtgctgtaagagctataataatgacaactcttgtactgcttattactaagcaaattaaaataaagggtattcagctattagcatttgcatttataattatgtttattttaaacccactagttgtttatgatattggatttcaattttcattcatcatttcattttttattatgctactttttccttttttacagcaattgtcaaagttacaatcattattcataattacgtttattgcacaattagcttcatttatcgttgccattccaaactttcatcaacttcaatgggtgggatttttatctaatttgatttttgtaccgtactattcgattatattgtttccgctatctattttattctttattacaagtcattttattgtgggattaacgccgctaaattacttggttgacctaagttttaattttcatgactggttactagacctattcacaagaattaagcaatcacatttttctgttcccaagtttaatgattggatatttataatatttataatttctgtttattacatattttggttattggctaaacgtaaatatatattggttacgttttggactataattattctgacattattaataacgtttccaacaaattcacatcacaaaattacaatgttaaatgtggggcagggagacagtattttatatgaaggcggtaagaaccaaaatgtcttgattgatacaggtgggaaagtgattgatgatactaaacaacctagttattcaatttctaaatatcatattttaccaacgctaaatgaaagagggataaatgaattagagtatctaattttaacacatccacacaatgaccatattggtgaagtggaatatattattagtcatattaaaattaaacatatagtgatatacaataagggatatagtagtaatacattgatgttattatcgaaattaagccataagtacaacattaaacttatggatgtaagacaagttagtagttttaaacttggagatagtagttttctattttttgatagttttattccaaatagccgagataaaaatgagtattcgattattactatgattacatatcaaaataaaaaagttttattaatgggcgatgctagtaaaaataatgaatctttactactaaaaaaatataacttgccggagattgatattttaaaagtaggacatcatgggagcaagacaagtagttctaaagaatttatagagatgattaagcctaaaataagtttgatttcttctgggaagaacaatatgtatcatcttcctaatatagaagttgttaaacgattgcaaaggattcgcagtcgcatttacaatagtcaacaaaacggtcaagttacaattgacttagatgataatttaaaagttgattcaaactcttatggaaatgcaagtggtttatag

SEQ ID NO: 411243 - DNA, 2610 bp, Staphylococcus aureus
atgttaactatacctgaaaaagaaaatcgtggatcgaaagaacaagaagtggcaattatgattgatgctctagctgacaaagggaaaaaagcattagaagcattatctaaaaagtcacaagaagaaattgatcatattgttcatcaaatgagcttagcagctgttgatcaacatatggtgctagcaaaattagcacatgaagaaactggaagaggtatatacgaagataaagcgattaaaaatttatacgcttctgaatatatatggaattcaataaaagacaataagacagtagggattattggtgaagataaagaaaaaggattaacgtatgtagcggaaccaattggtgttatttgtggtgttacgccaacaacaaatcctacgtcgacaactatttttaaagcgatgattgcaattaagacaggaaatccaatcatttttgcattccatccaagtgcacaagaatcgtcgaagcgtgcagcagaagttgtattagaagcggcaatgaaggcaggtgcacctaaagatattattcagtggattgaagtgccttctatcgaagcaacaaaacaattaatgaatcacaaaggtattgcattagttctagcaacaggtggttcgggcatggttaagtctgcatattcaactggcaaaccggcattaggtgtgggaccaggtaacgtgccgtcttacattgaaaaaacagcacacattaaacgtgcagtaaatgatatcattggttcaaaaacatttgataatggtatgatttgtgcttctgaacaagttgtagtcattgataaagaaatttataaagatgttactaatgaatttaaagcacatcaagcatactttgttaaaaaagatgaattacaacgcttagaaaatgcaattatgaatgaacaaaaaacaggtattaagcctgatattgtcggtaaatctgcagttgaaatagctgaattagcaggtatacctgtccccgaaaatacaaaacttatcatagccgaaattagcggtgtaggttcagactatccgttatctcgtgaaaaattatctccagtattagccttagtaaaagcccaatctacaaaacaagcatttcaaatttgtgaagacacactacattttggtggattaggacacacagccgttatccatacagaagatgaaacattacaaaaagattttggactaagaatgaaagcttgtcgtgtacttgtaaatacaccatcagcggttggaggtattggtgatatgtataacgaattgattccgtctttaacattaggttgtggttcgtacggtagaaactcaatttcacataatgttagtgcgacagatttattaaacattaaaacgattgctaaacgacgtaataatactcaaattttcaaggtgcctgctcaaatttattttgaagaaaatgcaatcatgagtctaacaacaatggacaagattgaaaaagtgatgattgtctgtgaccctggtatggtagaattcggttatacaaaaacagttgagaatgtattaagacaaagaacggaacagcctcaaattaaaatatttagcgaagtcgaaccgaacccatcaactaatacagtatataaaggtctggaaatgatggttgatttccaaccagatacaatcattgcacttggtggtggttcagcgatggatgctgcaaaagcaatgtggatgttctttgaacaccctgagacatcattcttcggtgctaaacaaaagttcctagacatcggtaaacgtacttataaaataggcatgcctgaaaatgcgacgttcatttgtatccctacgacatcaggtacaggttcagaagtaacaccatttgcagttatcacagatagtgaaacaaatgtaaaatatccgttggctgattttgctttaacacctgacgttgcaattattgaccctcaatttgtgatgagtgtgccaaaaagcgttacagcagatacaggaatggatgtactaacgcatgcaatggaatcatatgtatctgtaatggcttcagactatacaagaggtttgagtctacaagcgattaaattgacgttcgaatatttaaaatcatctgttgaaaagggtgataaagtttcaagagagaaaatgcataacgcatcaactttggctggtatggcatttgcaaatgcattcttaggcattgcacactcaattgcacataaaattggtggcgaatatggtattccgcatggtagagcgaatgcgatattactaccgcatattatccgttataatgccaaagacccgcaaaaacatgcattattccctaaatatgagttcttcagagcagatacagattatgcagatattgccaaattcttaggattaaaagggaatacgacagaagcactcgtagaatcattagctaaagctgtctacgaattaggtcaatcagtcggaattgaaatgaatttgaaatcacaaggtgtgtctgaagaagaattaaatgaatcaattgatagaatggcagagctcgcatttgaagatcaatgtacaactgctaatcctaaagaagcactaatcagtgaaatcaaagatatcattcaaacatcatatgattataagcaataa

SEQ ID NO: 411244 - DNA, 1809 bp, Staphylococcus aureus
atgagtcaacaattatcgagagaagaacaggaacgtaaatatcctgaatatacatgggacttaacaacaattttcaaagatgatgaagcttttgaggctgcatttaaagaagttgaaaatgagttaggcaaagaagaacaatttaaaggacacattggtgatagtgctgagacattatacaatgcgttagaattagaagatacattaggtactaaattagaaaaagtatatgtatacgcgcacctaaaacaagaccaagacacaacgaacgacaagtatactggtatggagtcaagagcacatcaattaattattaaatttagctcggcatggagtttcttagtgccagagattttacaaattgatgaagataaaattcaatcatttgtaaattcatatgataaattacaaaaattcgcatttgatttgaagttgattaatgaaaaacgtcctcatattttagatgctgaaactgaaaagttattaacagaagcgcaggacgcgttatcaacgccatcaaatgtatacggtatgtttagcaacgctgatttagtatttgaagatgcgattgataaagatggaaatgcacacccgttaacacaaggtacatttattaagtatttagaatcagatgatcgcaaactaagagaaagtgcttttagaaatgtatataaagcatatggtgctcataataatacgcttggcgctacgctagcaggtgaagtgaagaaaaatgtatttaatgctcgtacacacaattacaaaactgcaagagaaaaagcattaagtaataatcatattccagaaaatgtatatgacaatctagtaaaaactgtacataaatatttaccattgctacatagatatactgaattgcgcaaagaattgctaggtttagatgacttgaaaatgtatgatttatatacaccattaattaaagatattaagtttgaaatgccttatgaagaagctaaagagtggatgttaaaagctttagaaccaatgggtgaagaatatttaaatgtagttaaagaaggcttaaacaatcgttgggtcgatgtctatgagaataaaggtaaacgttcaggtggctattcatcaggtgcacatttaactaatccatttattctacttaactggtctaatactatttcagacttatacacattagttcatgaatttgggcattcagcacatagttacttcagtagaaaattccaaccgtcaaattctagtgactacactatttttgtcgctgaagttgcatcaacttgtaacgaagcacttttaagtgattatatggataaacatcttgatgatgaaaaacgcttattattattaaaccaagaattagaacgtttcagagctacattattccgacaaacaatgttcgcagaatttgagcataaaattcatgcaattgaagaagcaggtgaaccattaacgccaactagaatgaatgaagaatatgccaaattaaataaattatacttcggtgattctgtagaaactgatgaagatattagtaaggaatggtcacgtattccacacttctatatgaattattatgtatatcaatacgcaactggttacagtgcagctcaaagcttaagtcatcaaattttaacagaaggtaagccagcagtagatagatatattaatgaattcttgaaaaaaggtagctcaaattatccaattgagatattaaaaaatgctggtgtagatatgacaacacctgaaccaattgaacaagcttgtgaagtttttgaacaaaaattgaacgcttttgaaaaattaatgaaagcttag

SEQ ID NO: 411245 - DNA, 1155 bp, Staphylococcus aureus
atgaaactttctttaaattctaattctaaatatttaagagcaccaagtattcgccaattttcaaatcgtatgaataatttggatgattgtgttaatttaactattggccaaccagacttcccgatgcctgatgttgtgaaaaaggcatatattgatgctattaacaatgacaagacatcatactctcacaataaagggttattagaaactcgcgaagcaattagtcaatacttcaaaaatcgttatcatttttcctatgatcctgaagaaattattgtgacaaatggagcaagtgaagcaatagacacaacgttacgttctatcatagagcctggagatgaaattataataccgggaccaatttatgcaggctacataccactcatcgaagtactaggtggtaaaccaatttatattgatacaacagcaacacaattcaaaattacacctgatgcattagaaagtcatatttctccaaagacaaaagctgtcttgttaaattatccgactaatccaactggcgtagttttaaaaagaaatgaagttttaaatatcgtaaatgtattaaaaaaatatccgatatttattattagcgatgagatttatgctgaaaatacatttagtggtaaacatgtatccttcgctgaatttgaagacattcgtgatcaattaatattaattggtggtttaagtaaatcacactcagcaaccggaataagaattggttttctattagggcctcaatatttgattgataaattaacatttatgcacgcctataattgtatttgtgccaatgttccagctcaaatagcatgtataacagcacttaacgaaggattagaagctcctaaatatatgaacgaagcttatgtagaacgaagaaattatttagtatctgaattaactaaattaggttttgagattaccgctcaacctgaaggcgcgttttatattttcccaagtattaaacatatcaccgatgacgatttcgaattttgtgtcgatttacttgaatcaacacatttagcaatcgttccaggctcatcctttacagaattcggtaaaggatttgtaaggatttcctatgcttatgaaatggatgttttaaaagaaggtatgaagagacttgctaaatatttaaatactaaataa

SEQ ID NO: 411246 - DNA, 1026 bp, Staphylococcus aureus
gtgatctcatttgaaaatgattatttagaaggtgctcatgaaaaagtattaaaacgattagtagatacaaatcttgtacaagcttcgggatatggctttgatcaattcacagctcaggcaattgaaaagattaaagatacaattgattgtccaaatgctacaattcgttttttagtaggtggaacacaaaccaatcaggttgttattaattcaatgttagaaagttacgaaggggtcatttcagcagacactggtcatgttgctgtgcatgagggtggtgcaattgaatatagtggacataaagtaattactataccctctaaggaaggaaaagttagtgcttcagatgttgaaacttacatggagacatttaaaagtgattttaaaaaggaccatatggtattcccaggaatggtatatatttctcatcctacagaatatggcactttatactctaaatcagaattggaagagttatgcaaagtatgtaagcaatatcagcttccattatttatggatggtgcacgattagggtatggattgatgagtgatcaatcagatatgactattaaagacatcgctaaatattgtgatgtattttatataggtggtacgaagataggtgcattatgcggggaagccattgtttttacgaaaaataatgaaccgaaacaatttaccactcgaatcaaacatcacggtgcccttttagcaaaaggacggttaacaggcatacaatttttagaattatttacggacaatttatattttaatataagcagacatgctatcgaaatggcaaataagatgaaagacgggtttaaaaataaaggctatcgtctttactttgattctccaaccaatcaacaattttttattttaagtaacgagaaaatagcagagttagaacaaaaagttaaatttgctgtttgggaaaaatacgatgatcaacatcgtgttgttagattcgcaaccagctgggcgacaaccgaagaaaatttaaacaaactattagaattaatctaa

SEQ ID NO: 411247 - DNA, 849 bp, Staphylococcus aureus
atgttttccaatccaaattatcgcaaaattttatttgaaggatcagaatatcaacaagtttcaaataatcaaggtatcttttcaaaatttgcagaaatgatatcaacgtcacttccatatggtgtcattttcagtcagattataattttaagtatgattgcagcgcttattatttatctactgcttagaagtgatcggtatgtacatttaacaatattaaagcgtcgtatcattatgataggatttatcactttaccgctttattatttactattttacaatcagtttttattaaataaaaatacagatattggattggttggttttgtgaacgtaattgtatgtggttactttgcgttttcgatatttgtaggtatttatttgtctattaatgatcgtaaaacacaaatcactttatattccttacttattgcaatatgtgtttcggcgtcgacactagtcattgttactccaatagaaccaggtaattttttgattgtttatacgatacatgtaatcattttaattattttattaaaagaatttcggaaatataagtcaatcaatgttaattttattaaaggtgcatcactagttttagctgtgatatatcttagtgcatttatttatgttcattatgaacatgaaaaaagagttcagttattaaaacaacaaattaaagatcatccacgacaagaggtttatacagtggaatcattgccgtttgaacattatatgcatcatccgtcaccaatcaataaaaattaccaagagtggtttaataattatgaagaattaccgaaaatgaccaaagttaaatatattccatttggttcagacgattcataa

SEQ ID NO: 411248 - DNA, 390 bp, Staphylococcus aureus
atgggttatttatcttcacgttatttaactaaatacttgaactataagtttgtgtcagaaatttgtttaataatatttttaataatatatacatatcaaagtttcatagcagttactatttctatgatatttttaggtatttcttcagggttaactcgtccacaaactataaataaactttctagcagtagtaacttaagagtgatgcttaattatgcagaaacgttatattttatttttaatatcgcatttttacttattggtggttatctatattcaattggaactattcaatatttaatgttatttatgtcattattgacgtttatatatttactaacattattttatttaaggagagatcaacatgaaaatcaacacagaatttaa

SEQ ID NO: 411249 - DNA, 177 bp, Staphylococcus aureus
atggcaaaatcatgcttgcatatacttactaataatgaatatgcgacaacgcgttgccaagatggcatagtcttattttggccaattgacggggaaatcgaactacaaaaatttcgtaaaagtaaaataattgaagatgatatatatattattaatcatctggatgtatttgagtag

SEQ ID NO: 411250 - DNA, 318 bp, Staphylococcus aureus; identical to SEQ ID NO: 405326

SEQ ID NO: 411251 - DNA, 630 bp, Staphylococcus aureus; identical to SEQ ID NO: 408581

SEQ ID NO: 411252 - DNA, 210 bp, Staphylococcus aureus
gtgaaatctgtattaaaaagtgaaagaggtatcagtgatcttgacttaaaatttgcgaaacaagcaaaatatacagtatatttcaaaaatggaaagaaacaagtagtgaatttaaaatcagacatctttacacctaatttatttagtgccaaagatattaaaaagattgatattgatgtaaaacaatacactaaatcaaaaaaaaaataa

SEQ ID NO: 411253 - DNA, 405 bp, Staphylococcus aureus
atgtttatcatttggacgatactacagttttacattgataaaaaattaaaacctgtatacattacagaccaaaaatttattgctatcatattaacgattgttgtcagtttaacgcaacgtgttaccgacttttcaagtacacaatcaatatatatgtctattccatttttagcccctgcaattttcatcattggtggtattatgttgtttatttcaacatttaatagcttagatgaaactgctgaaaataataacaaaataaagaaactaatgattaaaggacttatcattattaacatttcatttatcgttatgatggttttaacaccatattggtacttgtatttaatcgtctatcttattttcttgttgtttttattgtggcaaaaggtttataaattttaa

SEQ ID NO: 411254 - DNA, 1002 bp, Staphylococcus aureus
atgaaaaatttacgaaacagaagttttttaactttattagacttttcaagacaagaggtagaattcttattaacactctccgaggatttaaaacgtgctaaatatattggcactgaaaagcctatgttaaaaaataaaaatattgcactgttgtttgaaaaagattctacaagaacgcgatgtgcatttgaagttgcagcgcatgatcaaggtgcaaatgtaacttatttaggcccaactggatcacaaatgggtaaaaaagaaacaactaaagatactgcacgtgtgcttggtggaatgtatgatggcattgaataccgtggtttttcacaaagaacagtagaaactttagctgaatattcaggcgtaccagtgtggaatggtttaactgatgaagatcatcctactcaagttcttgctgatttcttaacagcaaaagaagtcttaaaaaaagattatgcagatattaactttacatatgttggagatggtcgtaataacgttgcaaatgcattaatgcaaggcgctgccattatgggtatgaacttccatttagtttgtccaaaagaattaaatccaacagatgaattattaaatcgctgtaaaaatattgccgctgaaaatggtggcaacatattaatcacagatgatattgaccaaggtgtaaagggttcggatgtaatttacactgacgtttgggtatcaatgggtgaacctgatgaagtatggaaagaacgacttgaattattgaaaccatatcaagtaaataaagaaatgatggataaaactggtaatcctaatgttatttttgagcattgcttaccatctttccacaatgctgatactaaaattggacaacaaatttttgaaaaatatggaattcgagaaatggaagttacagatgaagtattcgaaagtaaagcttcagttgtattccaagaagctgagaacagaatgcatacaataaaagcagtcatggttgctacattgggtgaattttaa

SEQ ID NO: 411255 - DNA, 171 bp, Staphylococcus aureus
gtgtcagtcattattaactttttaatttttttagcaattttcggatatgccttgtatacgttagttaaatttttcaaacgttcgaaacaaggaaaatgtggtacatgtgacattgatcatgattgttgtggaacagaacaacacacagcgaatcattttcctgggaaataa

SEQ ID NO: 411256 - DNA, 228 bp, Staphylococcus aureus; identical to SEQ ID NO: 404851

SEQ ID NO: 411257 - DNA, 1545 bp, Staphylococcus aureus
atggtagtagaatttaaaaatgaacctggttacgatttttcagtccaagaaaatgtggatatgtttaagaaagcattgaaagacgtggaaaaagaattaggtcaagacataccattagtgattaatggagagaagattttcaaagatgacaaaattaaatcaatcaatcctgcagacacatcacaagtgattgcaaatgcatcaaaggcaacaaaacaagatgttgaagatgcatttaaagcagcaaacgaagcttataaatcttggaaaacatggtcagcaaatgatcgtgcagagcttatgttacgtgtttcggcaattattcgtcgtcgaaaagcggaaattgcggcaattatggtttatgaagcaggtaaaccatgggatgaagcagttggtgatgcagctgaaggtattgattttattgaatactatgcgcgttcaatgatggatttggctcaaggtaagccagtacttgatcgtgaaggtgaacacaataaatatttctataaatcaattggtacaggtgttacaattccaccgtggaatttcccgtttgcgattatggctggtacgactttagcaccagttgttgcaggtaatacagtgttattgaaacctgctgaggatacaccttatatcgcttataaattaatggaaattttagaagaagcaggattaccaaaaggagtagttaactttgttcctggcgatccgaaagaaattggtgattacttagttgatcataaagatacgcatttcgttacatttacaggttcacgtgcgacaggtactagaatttatgaacgtagtgccgttgttcaagaaggtcaaaacttcttgaaacgtgttatcgctgaaatgggtggtaaagatgccattgtagttgatgaaaatattgatacagatatggcagcagaagctattgtaacgtcagcgtttggtttctctggtcaaaaatgttcagcatgttcacgtgcaattgtgcataaagacgtttatgacgaagtattagaaaagtcaatcaaactaacaaaagaattaacgttgggcaatactgtagacaatacgtatatgggcccggttattaataaaaaacaatttgataagattaaaaattatatcgagattggtaaagaagaaggtaaattagaacaaggtggcggcactgatgattcaaaaggttactttgtagaaccaacaatcatttcaggacttaaatctaaagatagaatcatgcaagaagaaatttttggtccagttgttggctttgtgaaagttaacgattttgatgaagcaattgaggttgcaaatgatacagattacggtttaactggtgcagtgattacaaataatcgcgagcattggattaaagcggtaaacgaatttgatgtaggtaatttataccttaacagaggctgtacttcagcagttgttggataccatccatttggtggtttcaaaatgtcaggtacggacgctaaaacaggtagcccagactacttattacacttcttagaacaaaaggttgtttcagaaatgttctaa

SEQ ID NO: 411258 - DNA, 723 bp, Staphylococcus aureus
atgcttgttgatgttgagtcgcttattgaaactgacgcactttccgaattagacgtacttaatgacgttgatgcgcttgttgacactgattctgagtcactcattgatgttgagtcagatacactcgttgaaccagatgtacttaaggaactagacgtactcgatgagtcagatacgcttgttgaacctgaattagacgtactcaatgattctgagtcactgatagaagttgaatcacttgttgagccagatgtactcaatgattctgagtcactgatagaagttgaatcacttgtagattctgattctacagcactttgtgaaccactgatacttattgaagtcgaatcacttatactgtctgatgttgataatgacgtcgacaccgacgtgctttgtgatttcgatgtacttgcacttgctgacattgatgatgatatcgatgtgcttaacgaacctgatgcgcttgtgcttgttgactggctttgtgccatagaatcacttagcgactctgatgtactcgttgagctcgagtcacttacacttattgaacctgatattgagtcacttaaacttgtcgatgttgaaactgatacgcttccgctcattgaatcagatgttgaaagtgatgtactcgttgaatttgatccactgatgctagacgaatcgcttgtagacattgagtcactttctgatgcactgatgctcatagagtcaaattga

SEQ ID NO: 411259 - DNA, 1287 bp, Staphylococcus aureus
gtggaaccacttaaagatattgatccacttaatgagtcggagtcacttgtactagtagaatcactcattgacattgaatcacttagcgagctagactcgcttacactttctgaaccacttaatgatgtcgaagtgctcaatgaacctgatgtacttgttgaagtcgaaccacttgttgattttgaatcacttaatgaatcagattcactcacgctttctgaacttcttagtgacgtcgatacacttaatgatgacgaatcgcttgtgcttactgaatcactcatcgattgtgagccactcaatgaactagactcgcttacactttctgattttcttaatgacgttgagacgctcaatgagccagaatcacttacgcttgttgaaccactcatcgattttgagtcactttcagaattagattcacttacactttctgaatcatttacagattctgacatactttgtgaatcagatatgcttgcgctcattacttcactagccgatgttgatgtgcttgtcgaatcacttaacgatatagacgcactcatcgaaccagatgtactcgtacttgttgagtctgatgttgaatcactcacactatcagataatgacgttgaatcactcacacttgttgatgtacttgttgaaagcgacatactttgtgaatcaagcgtacttgtacgcatcgaagtactagttgaagctgatgtactacgagagtcacttgttgatgttgatgtacttgccgatccagatgcacttgtacttcttgatgtgctttgtgaatcgcttaatgatgttgatgttgaatcggattcacttgtactttctgatgttgagccagattctgatgtactttccgatactgactcacttgcaatagtagacattcggtttgatgttgatgtgctttgtgaattacttaatgatgttgatgtgctttgtgaatcggattcactgctttgcattgacgctgactttgaatcacttaatgatgttgacgacgaatcggattcactaatgctcgctgagttactgagcgatgttgacgtacttgctgatcctgagttgcttgtacttgttgagtcactgagcgatgtggatgtactttctgattttgactcacttgtgcttgttgatatgctttgtgaatcggattcgctttctgaaccacttaatgatgctgatgtgcttgtcgaacctgattggctcgtacttctagaaatacttgttgaatcgcttagtgacgtagatgtcgatgttgattcactttggcttgttgactga

SEQ ID NO: 411260 - DNA, 627 bp, Staphylococcus aureus
gtggaatcacttaatgatgttgacagacttgtagagtcagacaaacttgtactcgttgatgtgctcaatgatgttgagacactctcgctcttaaccgttgatgttgatgcgctaccacttgttgacgttgaaatggatgtactaccacttgttgaattgcttaatgatgttgatgtgctaccagattcagaattactatctgataaagacgtactatcgcttgttgaaccacttaatgactctgatgttgattcggatgtgctttcactcaatgattcacttaaaaaagcagatgcacttttcgactctgaatcacttgtactatttgattcacttaatgatatagacgtactctctgaaccagatatcgcttcactgatagaatcgctcgtcgacgttgagtcgctcgttgaatcagactctgatgtacttaagcttgtggaatcactcatagatgttgatgtgcgttctgaattacttgtacttaacgatgtcgaagtacttaccgaaccagatgtacttgttgatacactttgtgatattgattcacttgatgcagttgaagctgatttgctatcactcgttgaatcactaaacaacgttgatatgcttgttgaatcggattga

SEQ ID NO: 411261 - DNA, 915 bp, Staphylococcus aureus
gtgctcattgaactacttacagacattgatttactgtctgatgcagctaatgatccacttgtactcatagaatcgcttatcatttcagacgtgctcattgagtctgatgtgcttgttgagacactttgtgaccccgctacacttaatgatccagatactgaatcacttgtgctcgttgaatcgcttaatgactctgatgtactcatcgatttagaatcgcttgtacttaatgatattgatgtactttgtgattccgatttgcttgttgatgcactcactgaattcgaaatgctattagaaatacttatagattctgatgtactaactgactcactcaatgattctgacgtactaattgaatttgatgtactatcacttaccgattgtgacgtactagccgaatcggatgtacttgttgataagctttgtgacttagacaagcttcctgatgtactcatgcttactgaatcacttaacgatgttgatgtacgcaatgaatcagatgtacttgttgatagactttcggacttttcagtactgctagaggtcgaaatagaatcgcttaatgatgttgatttactaactgaacctgacatgcttgatgatacactttgtgaattcactaaacttgtgcttgttgagcttgatacactattactttcagatgtacttaatgacttagatgcactcactgaatcagataaacttgtacttgttgatttcgaagtactaactgatgttgaagtcattattgaaccagatgtgctcgttgatgcactttgtgaatcagctttacttgttgacacactttgtgattgttgggtacttcccgatgttgatacggaatcactcatactatttcttgttacttcatatttaaaatggttgtcgttttgttaccgctcgcatctgtag

SEQ ID NO: 411262 - DNA, 2244 bp, Staphylococcus aureus
atgagtaaaagacagaaagaatttcatgacagcttagcaaacgaaaaaacaagagtaagactttataaatctggaaaaaattgggtgaaatccggaattaaagaaatagaaatgttcaaaataatgggactaccatttattagtcatagtatagtgagtcaagataatcaaagcattagtaaaaaaatgactggatacggactgaaaacgacggcagttattggtggtgcattcacggtaaacatgttgcatgaccagcaagcttttgcggcttctgatgcaccattaacatctgaattaaatacacaaagtgaaacagtaggtaatcaaaactcaacgacaatcgatgcatcaacatcaacagccgattccacaagcgtaacgaaaaatagtagttcggtacaaacatcaaatagtgacacagtctcaagtgaaaagtctgagaatgtcacttcgacaactaatagtacaagcaatcaacaagaaaaattgacatctacatcagaatcaacatcctcaaagaatactacatcaagttctgatactaaatctgtagcttcaacttcaagtacagaacaaccaattaatacatcaacaaatcaaagtactgcatcaaataacacttcacaaagcacaacgccatcttcagccaacttaaacaaaactagcacaacgtcaactagcaccgcaccagtaaaacttcgaactttcagtcgcttagctatgtcaacatttgcgtcaacagcgacgacaaccgcattaactgctaatacaattacagttaataaagataacttaaaacaatatatgacaacttcaggtaatgccacttatgaccaaagtaccggtattgtgacgttaacgcaagatacttacagtcaaaaaggtgccattacattaggaacacgtattgactctaataagagttttcatttttctggaaaagtaaatttaggtaataaatacgaaggtaatggaaatggtggagatggtatcggctttgccttttcgccaggtgtattaggtgaaacagggttaaacggtgccgcagtaggtattggtggcttaagtaacgcatttggtttcaaattggatacgtatcacaatacatctaaaccaaattcagctgcaaaggcgaatgctgacccatctaatgtagctggtggaggtgcgtttggtgcctttgtaacaacagatagttatggtgttgcgacaacgtatacatcaagttcaacagctgataatgctgcgaagttaaaagttcaacctacaaacaacacgttccaaaattttgatattacttataatggtgatacaaaggttatgactgtaacgtatgcaggtcaaacatggacacgtaatatttcggattggattacgaaaagtggtacgaccaacttttcattatcaatgacagcctcaacaggtggcgcgacaaatttacaacaagtacaatttggaacattcgaatatacagagtctgctgttacacaagtgagatacgttgatgtaacaacaggtaaagatattattccaccaaaaacatattcaggaaatgttgatcaagtcgtgacaatcgataatcaacaatctgcattgactgctaaaggatataactacacatcagtcgatagttcatatgcatcaacttataatgatacaaataaaactgtaaaaatgacgaatgctggacaatcagtgacatattattttactgatgtaaaagcaccaactgtaactgtaggcaatcaaaccattgaagtgggtaaaacaatgaatcctattgtgttgactacaacggataatggtacagggactgtgacaaatacagttacaggattaccaagcggattaagttatgatagtgcaacgaattcaatcattgggacaccaacaaaaattggtcaatcaacagtgacagtagtatctactgaccaagcaaataacaaatcgacgacaacttttacaataaatgttgtggatacgacagcaccagcagtgacgccaataggagataaatcatcagaagttttttctccaatatcaccgattaaaattgctacgcaggacaatagtggtaatgcagtaacaaatacagtcacaggattgccgtctggattaacattcgatagcacaaataatactattagtggtacaccaataaacattggtacaagtactattacaatcgtttctacagatgcgagcggtaacaaaacgacaaccattttaaatatgaagtaa

SEQ ID NO: 411263 - DNA, 1671 bp, Staphylococcus aureus
atgagaaaaaatgatcatataaccgatttagatgctattgaattaagtagtgggtggaattacaatgacaaaataaccttgtcagacgagattcatgttaatggaaataaatataaagttattaaagatcaaaaaccgactaatacaggtctcggttacaagttatatgaacgttatgataatgatagaagtacaggaaagttaatcatatcatttgatggtactgactttagtgacccgaacgatgtaggtacagatttaagactcgctggagactccattccaaatcaattggaagaagcacacaaagtgtattctgatttaaaacaaaaatacagtgatgcaagttctttaagtgatattgaattttataataaatataaagaagagtctattgattacaaaggaaaatcaatcacaaatgcagggggtaattcactctctggagccatagcccagtatttaggtgtattagatccaggtcttaacgtaactactacaaattctgcacctataccaaaatctcttacccgtatggctcgtcgagatgcaaataatatacataattaccacagtagaagtgataccttaactagaattaacataggtggacttatgtatcattccatggtcggaaagcacattttcctagaaaatggtgtgtctacgtttggagcattggtacctgctcatactggatacaactttgaagaaaaagagaagttagaccattttgatcaaaacaatattattaacaaggaagtctacacgagtcgcaatggattgaaaatttatgctgacatggatgaacacactccaatatttgtatggagtggtgatgctattggtgctggtacatcaaaaataaaattagacaaaggacatctggcggatctgaatgactatgtgcatggtagattaaccgaatatgtaaataatattgatattaaaatgaaagacattcgaacatccgttgaacgtgaaaataataattttagtcaacatgtaaatgaaacgaaagatcattttaaaaaagtaataaaacttaacgaattagaaggttggattcacaacatatccaatctgattaggactaaaattgaaagtaaagcggatgaattaaaaggtaacctcagaacacttagagaccaagataatattttagatttagtaggtgccgatcatattattaattcaattattgattttattgataaaattaccgataaaatttcaaaattcattaaatatggtgatgatttcatggaagctgcttttgatatagttagcaacactattgtcaaaatgtttgtcaacttatcagaaggatttgaggatggtgttagagaagaagttttagcccatttgaatgttgtcataccaaatattcaaattatcaaaaatcaagtcactaatttcggtgatggcattaatgatatattgacccaaatgacccatttggatgacaatgtaatggttaacaacgtacccatcaataaaaatgctacaaagcaaacatcaaaaccacttgcagaatctaagaatttattattaaatttagaaatccgaaataaagtgatggaatctggtttggctacacttgcgtcaaatataaatctttttattagtaccagaaacactaagaatcattgcgctcatttctatagttga

SEQ ID NO: 411264 - DNA, 2076 bp, Staphylococcus aureus
ttgttaaaaagactaaaagaaaaatcaaatgatgaaatcgttcaaaatacaattaacaagagaattaactttatatttggtgtgattgtatttatttttgcagtactagtactacgtttaggttatttacaaatcgcacaaggctcacattataaacaaattataaaaaatgatgaaaacattacagtaaatgagtctgtgccaagaggtcgtattttagacagaaatgggaaagttttagttgataatgcttctaaaatggctattacatatactaggggtcgaaaaacaacacaatcggaaatgttggatacggctgaaaagttatcaaagctaatcaagatggatactaagaagattacagaacgtgataagaaagatttctggattcagttgcatcctaaaaaagcaaaagcaatgatgacaaaagaacaagctatgttagcagatggaagtattaaacaagatcaatatgataaacaactgttatcgaaaatcggaaaatcacaattagatgaattgtcttctaaagatttacaagttttagccatttttcgagagatgaatgcaggaacagttttagatccacaaatgataaaaaatgaagatgtcagtgaaaaagagtatgcagcagtttctcagcaactttccaaattaccaggtgttaacacgtctatggattgggatagaaaatatccatatggcgacactttaagaggtatatttggagatgtatcgacacctgctgaaggtattccaaaagaattgacagaacattacttatccaaaggatattcacgcaatgatcgtgttggaaaatcttacctagaatatcaatatgaagatgtattgcgtggtaagaagaaagaaatgaaatacacaacggacaaatctggaaaagttacatcttcagaagtgttaaatcctggcgctcgcggtcaagatttgaaattaacaatcgatatagatcttcaaaaagaagtagaatcattattagataaacaaattaagaagcttcgcagccaaggtgccaaagatatggataatgctatgatggttgtacaaaatcctaaaaatggagacattcttgcgcttgccggaaagcagattaataagagtggtaaaatgactgattatgacattggtacgtttacttctcaatttgcggttggatcttctgtaaaaggtggaacattattagctggttatcagaataaagctatcaaagttggagaaacaatggtcgatgaaccattacatttccaaggtggtttgacaaaacgatcatactttaataaaaacgggcatgtatctattaatgataagcaagctttgatgcattcatcaaacgtatatatgtttaaaacagcattaaaattagcgggagacccttattattctggtatggctttaccttcagacataagttcacctgcccaaaagctaagaagaggattaaatcaagtaggtttaggtgtgaaaacaggtatagatttaccaaatgaaacaagaggtcaaatcgaaccattaacaaataatccaggtaattatctagatttatcaattggtcaatatgatacctatacaccattacaattatcacaatatgtttcaactatagcgaatgatggttatagaatacagccacacattggattaacgattcatgaatcaactaataaagatgaggttggtccactcaagaagaaaattaatggcaccgtattgaataaggttaataatactgaaaaagaaatcaaacaaattcaagaaggattcaaaatggcatttaatgataaagatggtactggatatgttagttttaaagatacagtagtccctactgctggtaaaacgggtaccgctgaagtgttccaaaacggagagccaagagttaactctacttatataggatacgcgccaattgatgatccaaaattagcgttttcaattgtatatacaaatcagcctgtaccaccaccatggttaacaggtggagacttaggtagagatgtaattaactactactttaagcagttaggtaaagatgataaaaataaagacaaagacaaataa

SEQ ID NO: 411265 - DNA, 801 bp, Staphylococcus aureus
atgcctatagaaacacctacaaagtatgactcccttttaaagaaaaaggttgctttaaaaacgagttttaccttcatgttaatcattgtgcttatcatttggagcttcatttatacggggtttaattttggagatttaatgataggaatacctcaaataggtgatctattcaaacaaatgattccacctgatttcgagtatttacaacaaattacaacgccaatgttagataccattcgaatggctatcgtaagtacagtattaggtagcatcgtttcaataccaattgcgttattatgtgctagcaatatcgttcatcaaaagtggatttcaataccctcgcgttttattttaaatatagttcgtactataccggatttgctattagcagcaatctttgtggctgtatttggaatcggtcaaattccagggatattagcattgtttattttaactatctgtattattggaaaattattatatgaatcattggaaacgatagatccaggtccaatggaagcaatgacggctgttggcgctaataaaataaaatggattgttttcggtgttgtaccacaagccatatcgtcatttatgtcatacgtattatatgcatttgaagtaaatatacgtgcttcagctgtgcttggattagtcggcgctggcggtattggattgttttatgatcaaacacttggtttatttcaatatccaaaaacagcaacgattattttatttactttagttatcgtcgtcgtcattgattacatcagtacgaaagtgagggcacatctcgcatga

SEQ ID NO: 411266 - DNA, 1206 bp, Staphylococcus aureus
atgagtgaaaaaaagattttgattttatgtcagtatttttatccggaatatgtatcttcagcgacgttaccaacacaattggcggaagatttaattgcgaatcacattaatgtcgatgtcatgtgtggatggccatatgaatatagtaatcataaacaggtttctaaaaccgagatgcatcgtggtattcgcattcgacgtctcaagtattcgaggtttaataacaaaagtaaggttggaaggatcatcaacttctttagtttattttcaaaattcgtaattaatatacctaaaatgttgaaatatgatcagattcttgtttactctaatccaccaatcttgccattaataccagactttctacacagactgtttaagaaagaatattcttttgtggtgtatgatatagcacctgataatgcgattaagacaggtgcaacacgtccaggtagcatgattgataaattgatgcgttacattaataaacatgtctacaagaatgctgaaaatgtcattgtccttggtacggaaatgaaaaactacttagtaaatcatcaaatttctaaaaatcctgacaatattcatgtgattcctaactggtatgacatgcgtcagttacaagacaatcatatctataatgacacatttaaagcttaccgtgagcaatacgacaaaattttattgtatagcggtaatatggggcagttacaggatatggagacacttatctcatttttaaaattaaataaggatcggcctcaaacgttaacaatactttgtggtcatggtaagaaatttgcagatgtcaaaacggcaatagaagaccatcgtattgaaaatgttaaaatgtttgagtttttaacaggtacagactatgctgacgtattaaaaattgcggatgtatgtattgcatcgctgattaaagaaggcgttggtttaggcgtgccgagcaagaattatggctaccttgcagctaagaagccgttggtactcatcatggataagcaatctgatatcgttcaacatgttgaacaatatgatgcgggtatccaaattgataatggcgatgcacatgccatttataacttcatcaacactcactcgagtaaggaattgcacgagatgggtgagcgcgcacatcaactgtttaaagataaatatacgagagaaattaatactatgaagtattacaatctgttgaagtga

SEQ ID NO: 411267 - DNA, 1722 bp, Staphylococcus aureus
atgatgaaattttcagtaatagttccaacatacaattcagaaaagtatataacagaattactcaatagccttgcgaaacaagattttccgaaaactgaatttgaagtggttgtagttgatgactgttcaacagatcaaacgttacaaatagttgaaaagtatcgtaataaattgaacttgaaagtaagtcaactcgaaacaaattctggtggtccaggtaaacctagaaatgtggcgttaaaacaagcagaaggtgaatttgtattatttgtggactccgatgactatataaacaaagagactttaaaggatgcagcagcatttattgatgaacatcactcagatgtcttgttgattaaaatgaaaggtgttaatggtcgtggtgtaccacaatctatgtttaaagaaacagcgcctgaagttactttgttaaattcaagaattatctatactttaagcccgactaaaatctatagaacagcattactaaaagataatgacatttattttccagaagaattaaagagtgcagaagatcaattatttacaatgaaagcatatttgaatgcaaatcgaatcagtgtgttaagtgataaagcgtattattatgctacaaagcgtgaaggggaacatatgagtagtgcgtatgtttcacctgaagacttttacgaagtcatgagattgattgctgtagaaatattaaatgcagatttagaagaagcccataaagatcaaatcttagcagaatttttaaatcgtcattttagtttttctcgtacgaatggcttctcacttaaagttaaactagaagagcaaccacaatggattaatgctctaggagactttatacaagcagttccagaacgtgtagatgcattggtgatgagtaaattacgaccattgttacactacgcgagagcgaaagatatagacaactatagaactgtagaagaaagttaccgtcaaggtcaatactaccgttttgatattgtagatggtaaattaaacattcaattcaatgaaggcgaaccatactttgaaggcattgatatcgctaagccaaaagtgaaaatgacagcatttaaatttgataatcataaaattgttactgagctaacgttaaatgaatttatgattggcgaaggacattatgatgtcagacttaaattacattcacgaaacaagaagcacacaatgtatgtacctttaagtgtcaacgcaaataaacaatatcgttttaacattatgttagaagatattaaagcgtatttacctaaagaaaaaatttgggatgttttcttagaagtccaaataggtacggaagtatttgaagtgcgtgttggtaatcaacgtaataaatacgcttatactgcagaaacaagtgcattaattcatttgaataatgatttttatagattaacaccgtatttcacaaaagactttaataacatttcgttatactttacagctattacattaacggattcaatctcaatgaagttaaagggtaaaaacaaaatcattttaactggtctggatcgtggttatgtatttgaagaaggtatggctagtgtcgtgctaaaagacgacatgattatgggaatgttaagccaaacgtcagaaaacgaagtggaaatcttacttagtaaagatattaagaagcgagacttcaaaaatattgttaagttaaacactgcacatatgacttactcgctaaaataa

SEQ ID NO: 411268 - DNA, 1062 bp, Staphylococcus aureus
atgaggcttacgataatcatacctacatgtaataatgaggcaacaattcgacaattgttaatatctattgagagtaaagaacactatagaatcctttgtattgatggtggttctactgatcaaacaattcctatgattgaacggttacaaagagaactcaagcatatttcattaatacaattacaaaatgcttcgatagctacgtgtattaataaaggtttgatagatatcaaaatgacagatccacatgatagtgacgcatttatggttataaatccaacatcaattgtattgccaggtaaattagataggctaactgcagctttcaaaaataatgataatattgatatggtaatagggcagcgagcttacaattaccatggtgaatggaaattgaaaagtgctgatgagtttattaaagacaatcgaatcgttacattaacggaacaaccagatttgttatcaataatgtcttttgacggaaagttattcagtgctaaatttgctgaattacagtgtgacgaaactttagctaacacatacaatcacgcaatacttgtcaaagcgatgcaaaaatctacggatatacatttagtttcacagatgattgtcggagataacgatatagatacacatgctacaagtaacaatgaagattttaatagatatatcacagaaattatgaaaataagacaacgagtcatggaaatgttactattacctgaacaaaggctattatatagtgatatggttgatcgtattttattcaataattcattaaaatattatatgaatgaacacccagcagtaacgcacacgacaattcaactcgtaaaagactatattatgtgtatgcagcattctgattatgtatcacaaaatatgtttgacattataaatacagttgaatttattggtgagaattgggatagagaaatatacgaattgtggcgacaaacattaattcaagtgggcattaataggccgacttataaaagattcttgatacaacttaaagggagaaagtttgcacatcgaacaaaatcaatgttaaaacgataa

SEQ ID NO: 411269 - DNA, 1296 bp, Staphylococcus aureus
atgaaaaatttaatatctattatcatcattttatgtttaacattaagtattatgacaccatatgcacaagctgctaacagtgacgtaacccctgtacaagcaggaaatcaatatggttatgcaggtttgtcggctgcatacgaaccaacgagtgctgttaatgtaagtcaaactggacaattactgtatcaatacaatatcgatactaagtggaatccagcgtctatgactaaattaatgacaatgtacttaacattggaagctgtaaataaggggcagctttcacttgatgacactgtcacaatgacgaacaaagaatatattatgtctacactacctgagctgagtaatacgaagctatatcctggacaagtatggacaatcgcagacctattacaaattacagtatctaattctagcaatgccgcggcattaattttagctaagaaggtatcaaaaaacaccagcgatttcgttgatttaatgaataacaaagctaaagctatcggaatgaaaaatacacatttcgtcaatccaacaggtgctgaaaattcaagattacgtacatttgcaccaacaaagtataaagaccaagaacgtactgtaacaactgctagagactatgccattttagatttacacgtgattaaagagacacctaaaatattagactttacaaagcagttagcaccaacaacgcatgcagttacgtattacacattcaacttttcattagaaggtgcaaaaatgagtttgcctggtacagatggtttaaaaactggatcaagtgatacagcaaattacaaccatacgattactaccaaacgaggtaaatttagaattaatcaagttatcatgggtgcaggagactataaaaaccttggtggcgagaagcaacgtaatatgatgggaaatgcattaatggaacgttcatttgatcagtataaatatgtaaaaatattgtctaaaggtgagcaaaggataaatggtaagaaatattatgttgaaaatgatctttacgatgttttaccaagtgattttagtaaaaaagattataaacttgtagtcgaagatggtaaagtacacgcggactatccaagagaatttattaataaagattatgggcctccaactgtagaagttcatcagccaattattcaaaaggcaaatactgttgctaaaagtatgtgggcagaacatccattattcactatcattggtggtgcatgccttgtcgctggattagcactaattgttcatatgataatcaatcgtttatttagaaaaagaaaataa

SEQ ID NO: 411270 - DNA, 144 bp, Staphylococcus aureus
atgaatgatattgatttgattcattacatgttactgatgaacatacctgcatatgtgtttctagcttgtttgttacgtattgcatttagacttgggcaaaaatttatgtccgaggcgctacaatgttatattggcagtgtttga

SEQ ID NO: 411271 - DNA, 441 bp, Staphylococcus aureus
atgcgtaggttattatattcatttcttttttatatggtcatgggtttatttagtggctttttctatagagagctaacaaaagcatatgattttactggtacaacacaattatcacttgtacacacacatacacttattttaggtatgtttatgtttttaatattattaccattggagaagttatttaaattatcaagttactacttatttaactggttcttctatgtatataacataggtgttatcgttactataggtatgatggtgacaaaaggattcttccaagtcactggtaaatcatactctccagaagcatttgcaggctttgcaggtattgggcacacaggtatgcttgcaggtttattgttgctatttttccttttaagacaagcaattcttaaagaaccacgtgatgagtcttttaaaaaaaaatataactag

SEQ ID NO: 411272 - DNA, 630 bp, Staphylococcus aureus
atgaaaggtatgttcctaagtagtttttatgcaacgagaaagcaaacatatatttattttatagtcgctatcatagctgcgggatactttgcagtatttaatccgttgatgagttctgcaatggctggggttatgttaatcacacctattactgataatattaaacatgaaaaagactcaagatggatgtattatgtatctactttaccggttaaacgtagtgattatattaagtcatactttgccttttatttaatcttattcggtgcaagtttaatgattggattagttgtgactacgatcgtgacccaaagtgtgatgattggtattatgtcaggtttaatgagttttggtatcataggggcatactctatcattttcccattgacatttaaatttggcgctgaaaactctaatgtcattatgatatttgcatctatcctactacttttttctttcgtggtctttttctttatatatggtatggttagtggtgcatctgcattagaatttgaaaaaattagcactgaaggatggctagttgtcatagcatatgcggtcattggtatagttataacgagcgtttcttatatattgtctattaaaatttttaacaaacaagaactataa

SEQ ID NO: 411273 - DNA, 567 bp, Staphylococcus aureus
atgaatattgtattattgtcaggttccacagtaggttctaaaacgagaattgctatagatgatttaaaaaatgaactagaagtcatcaatgagggacatcaaatagagttgatggatttacgagaacttgaattagaatttagtgttggaaagaattatctagatactacaggagatgtatataaattaacgacgtcgttaatgcaggctgatgtgatttttattggttttccaatttttcaagcttccatccctggtgctttgaaaaatgtatttgatttacttccggtcaatgcgtttcgcgataaggtaataggacttgtagcgacagcaggttctagtaaacattatttaattcctgaaatgcatttaaaaccaatattgagttacatgaaagcacatacgatgcaaacgtatgtattcattgaagagagggacttttcaaatcaacaaattgtcaatgatgatgttgtatttcgtttaaaagcgttggcacaatccacaatgcgaactgccaaagtacaacaacaagtgcttgaagaagaaaacaaccaatacgacttttaa

SEQ ID NO: 411274 - DNA, 837 bp, Staphylococcus aureus
atggatgaacaacaatggactgggcaacttgatttaacagtgttttttgatggcaatcgatcagtatcaagagatattttctttgaaaaagcacttaaagtgatacgtccagtttatctaaatcaatctaccattcctacattttatatagtgaatgtaggtggtggttatttaaatggagatcgttaccgtatgaatgtgaatgtcgaagataacgctaaagtgacattgacatctcaaggtgcaacaaaaatatacaagacaccttccaatcatgttgagcagtatcaaacttttaatttgaaagataacgcatatttagaatatgtcgctgatccaatcatcgcatatgaaaatgctaaattttatcaacacaatacgttcaatctcaataattctagttcattattttatactgatattttaactcctggttattcaaaaactggcaaagccttcaagtatcaatatatgcatttaataaatgaaatttatattgaagatgagttagtcacatatgataatttattattgaatcctaataaacaatcgatcaatgaaattggttatatggaacattactctcattatggctctgcttacttcatacatgaagatgttaaccaaaaactaatcgattcagtttatgaaaccattaattattatagcaatacattcgattgtcgtgttgctatttctcaattgcctacacatggttttgcagttagaatttttgcttatcgcacacaaattatagagaaaatacttggaaccatccaaagctatatcgcagaaaatatttatgatcgtaaacttgattttctaagaaaatattaa

SEQ ID NO: 411275 - DNA, 195 bp, Staphylococcus aureus; identical to SEQ ID NO: 408775

SEQ ID NO: 411276 - DNA, 1455 bp, Staphylococcus aureus
atgaataaagaagattatttaaaaaatattgtttccgaaaaaataagtaacggcgctgaagattcaactactgaatttaaagtaaataacgatgaccctaaaacaattggagaatatatctcagctctaggaaattcagcaactttagaagacaaagactatgcttatatgatatggggaattgaggatgaatcaaaaaaggtggtcggtaccaaattccatcctaataatgctaaaaaaggacaagaagacttacaaaattggcttcataggatgattaaaccttccatagattttacttttgatactatagattatgatggaaaaaatataacaatattgagaattcctaaagccattcaccaaccaatttcatttaacggtgaagaatttataagagtaggatcctataagaaaaagctgagggattatcctgaaaaagaaaaacaactatggaagaaattccaagagttaccttttgaatcactttctgcatatttagtaaaaaactatgatgaaatttttgaattactagactacgaatcgtattacaaactattaaaacaacctcttccaattcaaaaagatttaattattgatcatttcaaacatgaggaaatcataaaagaaaatgaaggtaatgtttatattacaaatttaggagcgattttattggctaaaaatttagataattttaaaccacttaaaagaaaagctcctcgcgttattaaatataaaggtaataacaaaatcgaaactattagtgaacaagtcggtattaaaggatatgcttgtggatttgaaggacttattaagtatattaataacttattaccaagcaatgaagttattggtgaagtttttagagaaacagttcaaatgtatccagaattagctataagagaattagtagctaattctcttatacatcaagatttacttattagtggcgctggacctgtgatagaaatatttgataatagaattgaaatagttaatccaggcactccattaattaaagttgaaagatttttagattcgccaccaaaatctagaaatgaaagtctagcttccttattaagaagaatgggcatttgtgaagaacgcggaacaggaattgacaaagtaatttcagaaactgaaaaatatcagctccccgctccattaataactttatatgacgaatttattaaagttactctatacgcctacaaagatattaatgacatgactagagaggaaaaaattcgtgcaacatatatgcatgcttgcttgaaatatgttgagagtgaaagtattacaaatcaatcactgcgaaaaagatttggattggaagataaaaaaatctcagttatttcaagaattataaaagacacagttgctgaagaatatatcaaacctgtagatccggagacttcacccagacacatgagatatataccatactgggcatga

SEQ ID NO: 411277 - DNA, 681 bp, Staphylococcus aureus
atgaaatttaaagcgatagcaaaagcaagtttagcattgggaatgttagcaacaggtgtaattacatcgaatatacaagccgtacaagcgaaaacagaagttaaacaacaaagtgaatcagagttgaaacactattataataaaccaattttagagagtaaaaatgtgactggatatggatttactgataagggtcagcactatttagaagtcacagtagggcaacagcattctctaataactttacttacatctgataaagataaatataataaagatgtaaacccaaatttagatgtgtttatccttagagaaggtgacagtagacaagcaacgaattactcaattggaggtgtaacgaaaacaaatagtgtgcagtatattgattatatcaatacgccaatcttagaggtcaagaaaggtaaagaagaaccacaaagtagtttataccaaatttataaagaagacatctcactaaaagaacttgattttaaattaagaaagcaattaattagtcaaagtggcttgtattcaaatggtcttaaacaaggtcaaattacaattacgatgaatgatggcacaacacatacaatcgatttaagtcaaaaacttgaaaaagaacgtatgggtgagtcaatcgacggcagacaaatacaaaaaattctagtagaaattaaataa

SEQ ID NO: 411278 - DNA, 798 bp, Staphylococcus aureus
atgatggagtacataaaaaaaattgctttgtacattagtgtattacttttaatcatttttattgggggatgtggaaatatgaaagatgaacaaacaaataaaacaggttcaaaagaagaacaaatcaaaaagagctttgcgaaaacgttagatgtataccctacgaaaaatctagaagccttttatgacaaagagggctatcgagatggagaatttaaaaaaggtgataaaggtacatgggttattagatctgaaatgacaactgaactaaaaaatgaaaatatggaatccaaaggtatggtcgtacgtctaaatagaaatagcagaacatgcactggtgaatattttgttaggatagttaaagaagacagtgagggcaaggtatatagtgatgaacgaaaataccctataaaaatagaaaataataaaattattccattaaaaccaatcgatgatgaaaaaattaaaaaagaaattgaaaattttaaattctttgtacaatatggggattttaatggatttgaaaattataaagatggtgaagtgtcttataacccagaagcaccaatatattctgcgcagtatcaactgaaaaacagcgattataatgttgaacaattaaggaagcgatacaatataccgacgaaaaaagcgcctaaattattattgaaagggtcaggtaatctaaaaggctcatcagttggatataagaatattgaatacacctttgtagaaaatgatgaagaaaatatttatttcacagacagtatcaattacaatccgagtggagataaatag

SEQ ID NO: 411279 - DNA, 741 bp, Staphylococcus aureus
gtggaagatacggttattgttggtaggcatgctgttagagaagcgattattactgggcatccgataaataagatattgattcaagaaggtattaaaaagcaacaaattaatgaaattttaaaaaatgcaaaagatcaaaaaatcattgttcaaactgtaccaaaatctaaattagattttttagcaaatgcaccacatcagggtgttgcagcgcttattgcaccatatgaatatgctgacttcgatcaatttttaaaacagcaaaaagaaggtttatcgacagtacttatattagacggcttagaagacccgcataacttgggatcaattttaagaacagcagatgcaacgggagttgatggtgttattattcctaaacgtcgttcagttacattaacgcaaacagttgcaaaagcctcaacaggtgcaattgaacatgtaccagttattcgagtaacaaatttagctaaaactatcgatgatctaaaagataatggcttttgggtagctggcactgaagctaataatgcaacagattatagaaatcttgaagcggacatgtcattggctattgtaattggcagcgaaggacagggtatgagtcgtctagtaagtgataaatgcgatttttatattaagattccaatggttggacatgtaaacagtttgaatgcttcggttgcagcaagtttaatgatgtacgaagtatttcgaaaaagacatgatgttggagaaatataa

SEQ ID NO: 411280 - DNA, 318 bp, Staphylococcus aureus
atgaattgggaaattaaagatttaatgtgtgacattgaagtgataaaacaaaaaattaatgatgtagctaccaaacatgcttggtttgttgaagatagatttgtaaaaaatgaattagaaacaaaacgggaacatattaatttttctgatagctatttagaacatcgtatacaaaatgaacatacagttgagttattacatgtgtacttaaaagaattcggtgaacttatacaaaaatttcatgaaatagaaaaagcatcatctgagaactttggcgaggtatcagatgacgcacaaaaattaaaaatcacagagtaa

SEQ ID NO: 411281 - DNA, 900 bp, Staphylococcus aureus
ttgattcaaatatctaatattaataaatcatttaagaaaaagcgtgttttaaaaaacatttcatttgatattgaaaaaggtacatgtaccgcattaatcggaaaaaatggtgctggaaaatcaacattagttgatattttaagcaataaaataattgctgatgatggcgtgattttggataaagacaaattattgcaaagtgaaaatcgcagtataatgtttcagaaaacgatgtttccagatcaattgaaggtaattgaaattatcaaattatatcaatcattttatgaaaatccattaacattggacgtaataatagaactaacaaagtttaattctaatcaattgaatcaatttgcaaataaattatctggaggtcaacaacgattacttgattttgtaatatctttaataggacaaccacagcttattttgttagatgaaccaacgtcaaatatggatattgaaatgagagaatatttttggtcaataatagctaagttaaaagaagaaaatcggacgattctttatacatcgcactatatagaagaagtagagcgcatgtctgacaaaattattttgatagaaaatggagaaatcaaacttaatgattcaacgtcacatattagaaccaatcagcaatctcagattacgttatccgatgaatataaaagaaagttaaaaccagataaagatgatttagttattcaaaaaaatcataatggcactatcaaaattattacttcaaatgtaaatgatacgattttatatcttcaacaacttcatattaatttggatgatattgaaatacaaaaagtctcaattgttgattcatacttcaacaataaaaagcaaaggggatctaattatgatactaagttacttgaaaatcgaatttaa

SEQ ID NO: 411282 - DNA, 732 bp, Staphylococcus aureus
atgatactaagttacttgaaaatcgaatttaaagttatactgcgtaaaaaaacaacattaatattatctattttatttcctgttattttctatatattatttacttcgatattggatttgccggaagatgttaaacctaaattttataaagagtatatgtatagtatgacggtttatagtttgataagttttagtttaatggcctttccgatagatattattaatgaaaaacaaaatggatggcgtcaaaaactaatggcgacaccattaacacctgctagttactatctttctaaaatagttaaaacaatggcacaatttgcaattgctattatagtgatttttatgataggacatttttataaaggtgttacactaagtataagtcaatggatagaatcaggtgtattgttatggctaggtgcatcattattgataacttttggtgtattattttcgttgattaatgatattcagaaagcaagtgctttaggtaatatcgtgacaatcggattagcggtgctgggcggattatggtttccagtcaatacatttccaaattggcttcaacatattgctcatgttttaccaagttatcatttgcgcaagttaggtttagacattgtttcaaattatcatattgatttaagatcatttggcatactaattttatatgctgtaggtagtttaatagtggtatattgtattagacattttaaaagggcggaataa

SEQ ID NO: 411283 - DNA, 1092 bp, Staphylococcus aureus
atgaaatttttaaaagatacttcaattgctgaaatatcgtctatactttatctgatttttcctattgccggtatattttttaatgaagtgtatggtcccaaatggttgtatattatatcagtcattgtcttttcgctgtcgtatcttatattagttatagtaaataatagacttaatacattaatgttttacattttgttgattattcattattttattatttgttattttgttttcagtgtacatccaatgctaagtttgtttttcttttatagtgcttttgccattccatttacttttaaaaataatgttaaaaaaatggcaactaatcttttcatattaacgatgattatatgttttacaattacttacttagtacataacgactattttgttgcaatgacgacttattatgttgttattttgttaatcgtgtttgataatttaaaaaaagtgaaagatcgtgagtataaaaaagaaatagaagaaaaaaatcggtatattaatacgttaataactgaacaagagcgtcatagaataggtcaagatttacatgatacgcttggtcatgtgtttgcaagtttatcattaaaatcagaattagcttataaaattattgattctgatactgaaaatgcaaaagctgaattgttagcgattaataagttgtcgcgggaatcattgaacaaagtacgcgaaatcatcgatgatataagattaccatcatttattgaagaaattgagagtatctgtaaaattttaaaagatgctgacattcagtttacgtttgaaaataaagaactggcacaattattgagtcctacaaaacaatccattttagtaatgcttgctcgtgaagcgataaacaatgtgattaagcatgcaaatgcttcaaaagttcatggtcaattacgagctatgaatgaacataaattacagttcattatacaggataatggagaaggtattgacagcggttgtgaaataaagagtatttcacaacgagtaaaacatttaaatggaacattagaagttgaatcgaataaaggtactaaattaatcatcgaaatgcctacagggggaatagcatga

SEQ ID NO: 411284 - DNA, 603 bp, Staphylococcus aureus
atgatttctttaattattgcagaagatcaaaatatgttacgacaggcaatggttcaattaattaaactacatggtgattttgaaattttagccgatgtagataatggtctcgatgcaataaaaattattgaggcacaccatcctgatgtagttattttagatattgaaatgtcaggcatgactggacttgaagttttatcagaaattagaaagaagcatttgaatattaaagtgattattgtaacaacttttaaaaggccggggtattttgaaaaagctgttgcaaatgatgtggatgcatatgttttaaaagaacgttctatagaagaattagtggaaacaatttataaagtgtataacggtaagaaagaatatagtgcttctcttatgacttcatttttcacagataaaaacccattaacaccaaaagaacaaattgtattaagggaaattggcaatggtttaagtagtaaagaaataagtgaaaaattatttttgacagatggaacagttagaaattatacatctgttataattgataaattatttgcagataatcgctttgatgcttggaaaaaggcgaatgaaaaaggctggatctaa

SEQ ID NO: 411285 - DNA, 189 bp, Staphylococcus aureus
atgaacatttcaaatgaaaatacagtcacattaattgcagtaattatcgcaattatcattggtattttcctacaaatatttttcaaattaccattaatagtgacggcagtactatctattttattgggtatctttgtaggttttatcgtttacctgattgtttcgttttataataagcgaaaaaattag

SEQ ID NO: 411286 - DNA, 534 bp, Staphylococcus aureus
atgaagtcaaataaatcgcttgctatgattgtggtagccatcattattgtaggtgtattagcatttcaatttatgaatcatacgggtccttttaaaaagggaacaaatcatgaaactgtacaagatttaaatggtaaagataaagtacatgttcaaagagttgtggatggtgatacatttattgcaaatcaaaatggtaaagaaattaaagttaggcttataggggttgatacgccagaaacggtgaaaccgaatacgcctgtacaaccatttggcaaagaagcatcaaattatagtaagaagacattaacaaatcaagatgtttatttagaatatgataaagaaaagcaagaccgctatggtagaacattggcgtatgtatggataagtaaagatcgtatgtacaataaggaattagtggaaaagggacttgctagagagaagtatttttcaccaaatggcaaatatagaaatgtatttatagaagcacaaaataaagctaaacaacagaaattaaatatttggagtaaataa

SEQ ID NO: 411287 - DNA, 855 bp, Staphylococcus aureus
atgtctttttatgttgtacttatcattatcattgtagcattaattggtatattagttttaaatcaaaggtatagtaatagtaaaatagataccgaagtttatgcaagaaagcaacttattaaaaagaacaaagcattaagtgcagaaaatgctgaattaagaagtcaaatgctgagttctaataatgatgttggccaccatgcatacaaaaatgctaaaagagaattacgcaagattttagatagctatctcgaaaatggtaaattaaaatattacgatattatcgttacaagcaatttagctactaaacatccgtttttcgagtatgcacgttcatttgattttatcattgtttcagatatcggtttaataaacgttgatgtaaaaagttggggtgaaaaaacattttatcactttgatgtacctgatgagcatgatacagaaatgagcaatagtaatattgaaaaagttgtcggtcattacattagtcagcaatatcatgatcagtttaattcatcaagaaagtctatctatacttttacagaaacagttcaaccaaatcgtgttatttatgatttttatgattatgatccgtatcaattagcagcaaataatgctaaagcattaaaggatcatattgaacaaaactttaactttaaagttcaaagtaccggtgttatttactttagtgatggtacagttaatatcattcaaggttctgaagaaagagataaatatgttgatacagtttcaacaaaatcttcgttacgacgtattattagcgaagccatagagctatctaaacaccctttaaataaagaacaggttgatcaaatcacagctatattcaagtaa

SEQ ID NO: 411288 - DNA, 585 bp, Staphylococcus aureus
gtgaatgaaatgaatgctaaagaacaattagtggacaatttaatgaaaacatcatcgcaattatttaaatttcacggtgaagttgccatgcagcttttcttaaatgatgaattaaaattaccttctattgttgaaatatgcgtggaacgtaagcgtttaagtgatattgtgaaagttattccgcaatcatatgcgttactatacatagataagcaagatcaagcaatagctaaagaagatttatcactttcaaaaattgcaaaagtttatgtgcaatatgatgatacaacaataatgagtattttcgtttatgatgtagtaaacgatgaatggatttttagattggatccgaatatacgtatacctaagagtaacatttacttccatagtttaaattgggatgtggattatattaaaccggagatcgttctaatgtatgatctaatgcaacaccatcagtatcatcattattccaattataaacgtgtcatagatgcattaagctactatcaattttttattttaaaatttgtagtaggtgagcaacgtattaaggatgcaatccagagaacaataaataattaa

SEQ ID NO: 411289 - DNA, 1281 bp, Staphylococcus aureus
atgaaaaaattaaatatagcattattaggattaggtactgtcggatctggtgttgttaaaatcatcgaagagaaccgacagcaaattcaagatacattaaataaagatattgtcataaagcatattcttgttcgagataaatctaaaaagagaccgctaaatattagccaatatcatttaactgaagatgttaatgaaattttaaatgatgattcattagatattatcgttgaagtcatgggaggaattgaaccaactgtagattggttaagaacagcacttaaaaataaaaaacatgttattaccgcaaataaagatttattagcagtacatcttaaacttttagaagatttagcagaagaaaatggtgtagctttaaagtttgaagcgagtgtagcaggtggtattccgatcgtaaatgccataaataatggtttgaatgcgaataatatttcaaaatttatgggaattttaaatggtacctctaattttattttatctaaaatgactaaagagcaaacgacatttgaggaagcacttgatgaagcgaaaagacttggttttgctgaagcggatccaactgatgatgtagaaggggtagatgcagcgcgtaaagttgtcattacatcatatttatcatttaaccaagtcattaaattaaacgacgttaaacgaagaggaattagtggtgtaactttaactgatattaatgtagccaatcaactggggtataaaattaaattgattggtaagggaatatatgaaaatggcaaagttaatgcatcagtagaaccaacgttaattgataaaaagcatcaattagcagctgtagaggatgaatataacgcgatttatgtcattggtgatgccgttggtgacacgatgttttatggaaaaggagcaggcagtttagcaacaggtagtgccgttgtcagtgatttattgaatgtagcattattctttgaatcagatttacacacattgccaccacattttgaattaaagacagataaaacaagggaaatgatggattctgatgcagaaattaatattaaagaaaaatccaatttctttgtggtagtgaatcatgtcaaaggttcaattgaaaattttgaaaatgagttaaaggcaatattaccattccaccgatcattaagagttgcaaattacgataatcaatcatatgccgctgttatagttggattggaatcatcaccggaagaattaatcactaagcatggatacgaagttgacaaagtatacccagtagaaggagtttaa

SEQ ID NO: 411290 - DNA, 1062 bp, Staphylococcus aureus
atgagaagatggcaaggattagtagaagagtttaaagcacatttaccagtaaatgaaaatacaccaaaattaacattgaacgagggaaatacaccactcattcattgtgaaaatatgtctaaaatactaggtatagatttatatgtgaagtatgaaggtgccaatccgacaggttcatttaaagatcgcggtatggtaatggctgtgacaaaagcaaaagagcaaggtaagaaaattgtaatatgcgcttcgactggaaatacatcagcgtctgcagcagcatatgcagcgagagcaggtttaaaagctatcgtcgtaataccagaaggtaaaattgcattaggtaaattgtcgcaagcagtaatgtatggtgcagaaatcgtttctattgaaggaaactttgatgaagctttagaaattgtaaaagaaattgcaaaaagtggcgaaatcgagcttgtaaactctgtcaatccatttagaatcgaagggcaaaagacaggctcatttgaaattgtgcaacaattagacggtgaagcacctgatattttagcgattcctgtaggtaatgcaggcaatattactgcatattggaaaggctttaaagaatatcatgaagctaaagggtcacaattgccgaaaatgtttggcttccaagctgaaggcgcatcaccaattgttcaaaataaagtcattaaaaatcctgaaacgattgcaactgctattcgaattggtaatcctgctagttgggataaagcgactaatgctcttaaagaatcaaatggattaatagatagtgttactgatgatgaaattctagaagcatatcagttaatgacaactaaagaaggtgtctttagtgaaccagcaagtaatgcttctattgcaggtttaattaaattgcatagacaaggtaaattacctcaaggtaaaaaagtagttgcgattttaactggtaatggattaaaagatcctgatactgctatttcactactagataatccgataaagccattgccaaatgataaagatagcattatcgattatattaaaggagctttataa

SEQ ID NO: 411291 - DNA, 915 bp, Staphylococcus aureus
atgtcgaatgttttggagttaacaattcctgcatcaacagccaaccttggagttggctttgattctataggtatggctttagataaatttttgcatctgtctgtaaaggaaacatcagggacaaaatgggaatatattttccatgatgatgcatcgaagcaattgcctactgacgaaacaaactttatttatcatgtggcacaacaagttgctgctaaatatagtgttgacttgcctaatttatgtatcgaaatgagaagtgatattccattggcaagagggttaggttcgtcagcttctgctttagtaggagctatatatatcgcaaattattttggtgatatccaactatctaaacacgaggtattacaattagcgactgaaatcgaaggacatcctgataatgttgcgccgaccatttatggtggtttaatcgctgggtattataatgatgtctcgaaagaaacgtcagttgcacatatcgacataccagacgtggatgtgattgtaacgataccaacttatgaactaaaaacagaagcatcaagacgtgctttaccacaaaaattaacacatagtgaagcggttaaaagtagtgcaattagtaatacaatgatttgtgcattagcacagcacaattatgaattagcaggtaaactcatgcaacaagatggctttcatgaaccgtatcgtcagcatttaattgctgaatttgatgaagtgaaaacaattgctagtcaacataatgcctatgcaacagtgattagtggtgctggaccaactattttaatatttagtcgcaaagaaaatagtggcgaattagttcgcgctttaaatagaaatgtagttacatgtcattctgaattagtagatattaatgttagtggtgttaaagaacgaattgtataccaatag

SEQ ID NO: 411292 - DNA, 804 bp, Staphylococcus aureus
atgacaaattataaagttgtcgttttagatatggatgacacattgctaaattcagataatgtgatatcagaagaaactgcaaattatttaacagcaattcaagatgaaggttattatgttgttttagcatctggtagacctactgaaggtatgattccaactgctagagatttaaaattacctgaacatcatagctatattattagttataacggcagtaaaacgattaacatgactaatgaagaagtagaagtaagtaaatcgattggtaagcaggatttcgatgaaattgtagattattgtcgagatagaggctttttcgttcttacatatcatgatggtcaaattatttacgacagcgaacatgaatatatgaatattgaagcggaattaactggtttaccgatgaaacgtgttgatgatatcaaagcatatattcaaggcgatgtacccaaggtcatgggagttgattatgtagcgaatattactgaagctagaattgatttaaatggcgtgttcaatgataatgtagatgctacgacaagtaagccattcttcttagaatttatggccaaagatgtttcaaaaggtaatgcaattaaagcgttatgtcacaaattgggatattcggtggatcaagtcattgcttttggtgatagtatgaatgataaatcaatgtttgaagtcgcaggtctagctattgctatggggaatgcatcagatgaacttaagcaatatgcagatgatgttacgttggatcataatgaaaatggtattccacatgcgctcaaaaaattgttataa

SEQ ID NO: 411293 - DNA, 315 bp, Staphylococcus aureus
atgattggacaaacaaatttatttgatgatgtactaaagcaagatgagagatttgttattgtagttcaagcattagaagaaaagaacggacaattattaaagcgaactttaagggaatatcccggtttaaaccataaacaaatgaatgatttatttacgcacttaaaggaattattttacgaagaatcatttgctgaaaaccaatcagcgttcagtattacagtttatacaaatttagattatactgctgaccaaatatatgctcatgtaaaacgcttcagagggaagcatgactggacacaaacagctaaataa

SEQ ID NO: 411294 - DNA, 1455 bp, Staphylococcus aureus
atggaagataataaaatgaaccgtagtcttaactcaagacacatttccatgattgctataggtggtgcaattgggactggtctatttgtagctactggtaatatcatttctcaagctggtcctggaggcgctatactcgcttatcttgttattggtgtcatgctatatttcttaatgtcatcaattggagagttggcaacattttatccagtatcaggttcattcagctcttattcaacacgctttattgactcatctctaggctttaccatgggatggttgtattgggcattgtggtcattagttacaagtgttgatgtcatagtagcgtcaaatgtgctttatttctgggacacatttaaatttttccaccccattacttggagcttaatctttattacaattttactattattaaacattttttctgtaaaatcatttggagaaactgagttttggttatcattgattaaagtgttaacaattatcgtattcgttatttttggctttttaatgattttcggtatcttaggtggtcatgcatatggatttgaaaactatacaaaaggccaagcaccgtttgttggtggtatctctggtttcttaggcgtattattagtcgccggattttcggttggtggtacagaagtagtagcagtaactgctggtgaatcagatgaccctaaaaagtctatgcctaaggcaattaaacaagtattttggcgtattcttttattctatgtcttatcaattgcagtaattggtgcaattattccgtacacagatccatcattattaagagcaagtagttcaataagtcaaagcccatttacaattgtattcgatagagtaggcatagcctttgcagcatcagtaatcaacgcggttattttaacttcattattatccgctgcaaattcaggtgtttatacaacaggaagaatgttgtattccttaagttcagacaaaaaagcaccccaatttttaagtaaattaaacaagacaacaaagttacctttaagagcactattaactacttatgcagtcgttgttattgttattatttatgcaaactttaattcaaatgccgtttttaatttacttgaaattattggttcaatgattatagttgtttggggatcaagcatttggtcacaaatacgattgcgacaagctattaaaaaacaaggtcaagatcctaataaggtcctaccatataaagcacctttttatccattaggaccaatcattgtcatcactacgctattattcttgctatttggtggttcagttgaatatattttaaaagatcaatggttaaatgcttttaaaaactttttacctttaatcattctagcgttgatttactttattcataaaatcattcacaaaacaaaatttgtaaagctagaaacaattaatttaaaaccacacgattatgacaatcaaaaataa

SEQ ID NO: 411295 - DNA, 1518 bp, Staphylococcus aureus
atgtcacaacaagacaaaaagttaactggtgtttttgggcatccagtatcagatcgagaaaatagtatgacagcagggcctaggggacctcttttaatgcaagatatttactttttagagcaaatgtctcaatttgatagagaagtaataccagaacgtcgaatgcatgccaaaggttctggtgcatttgggacatttactgtaactaaagatataacaaaatatacgaatgctaaaatattctctgaaataggtaagcaaaccgaaatgtttgcccgtttttctactgtcgcaggagaacgtggtgctgctgatgcggagcgtgacattcgaggatttgcgttaaagttctacactgaagaaggaaactgggatttagtagggaataacacaccagtattcttctttagagatccaaagttatttgttagtttaaatcgtgcggtgaaacgagatcctagaacaaatatgagagatgcacaaaataactgggatttctggacggggcttccagaagcattgcaccaagtaacgatcttaatgtcagatagagggattcctaaagatttacgtcatatgcatgggttcggttcacacacatactctatgtataatgattctggtgaacgtgtttgggttaaattccattttagaactcaacaaggtattgagaacttaactgatgaagaagctgctgaaattatagctacagatcgcgattcatctcaacgcgatttattcgaagccattgaaaaaggtgattatccaaaatggacaatgtatattcaagtaatgactgaggaacaagctaaaaatcataaagataatccatttgatttaacaaaagtatggtatcacgatgagtatcctctaattgaagttggagagtttgaattaaatagaaatccagataattactttatggatgttgaacaagctgcgtttgcaccaactaatattattccaggattagatttttctccagacaaaatgctgcaagggcgtttattctcatatggcgatgcgcaaagatatcgattaggagttaatcattggcagattcctgtaaaccaacctaaaggtgttggtattgaaaatatttgtccttttagtagagatggtcaaatgcgcgtagttgacaataaccaaggtggaggaacacattattatccaaataaccatggtaaatttgattctcaacctgaatataaaaagccgccattcccaactgatggatacggctatgaatataatcaacgtcaagatgatgataattattttgaacaaccaggtaaattgtttagattacaatcagaggacgctaaagaaagaatttttacaaatacagcaaatgcaatggaaggcgtaacggatgatgttaaacgacgtcatattcgtcattgttacaaagctgacccagaatatggtaaaggtgttgcaaaagcattaggtattgatataaattctattgatcttgaaactgaaaatgatgaaacatacgaaaactttgaaaaataa

SEQ ID NO: 411296 - DNA, 150 bp, Staphylococcus aureus
gtgcgcgtaaacgtaacattagcatgcacagaatgtggcgatcgtaactatatcactactaaaaataaacgtaataatcctgagcgtattgaaatgaaaaaatattgcccaagattaaacagatatacgttacatcgtgaaactaagtaa

SEQ ID NO: 411297 - DNA, 270 bp, Staphylococcus aureus; identical to SEQ ID NO: 406976

SEQ ID NO: 411298 - DNA, 978 bp, Staphylococcus aureus
gtgaaaatatttgattacgaagatattcaattaatacctaataaatgcatagttgaaagtaggtctgaatgtgatacaactatccaatttggtccgaaaaaattcaagctacctgtagttcctgcaaatatgcaaacagttatgaatgagaaattagcgaaatggtttgctgaaaatgattacttttatatcatgcatcgttttgatgaagaagcaagaataccttttataaaacatatgcaaaattcaggcttatttgcatctatttcagttggtgtaaagaaagcggaatttgattttattgaaaagttagctcaagaaaaattaatccccgaatatattacaatagatattgcgcatggtcactcagattcagtgataaacatgattaaacatataaaaacccatatacctgatagttttgttattgctggtaatgttggtacgccagaaggtgttagagaattagaaaatgctggtgctgatgctaccaaagtcggtataggtcctggtagagtttgtattacaaagattaaaacaggttttggtactggtggttggcagttagcggcattaaacatatgtagtaaagcagctcgtaaacctttgattgccgatggtggtataagaacgcatggcgacatcgctaagtcaattagatttggtgcatcaatggtcatgattggttcattatttgcggcacacgaagaatcacctggtgaaactgtagaacttgatggtaaacagtataaagaatattttggtagtgcatctgaatttcaaaaaggcgaacataaaaatgtagaaggtaaaaaaatgtttgtagaacataaggggtcattaatggataccttaaaagaaatgcaacaagatttacaaagctcaatttcatatgccggtggaaaagacttgaaatcattacgtactgtagattatgttattgttagaaactctattttcaacggtgatagagattaa

SEQ ID NO: 411299 - DNA, 864 bp, Staphylococcus aureus
ttggatacgccgaagaaacaacaatttgcctttaacaatatacaaatgaacatgtcgaaatcagatgttgagaaaacattaaataaaccaaaaagagtgacatttaatgaatatggtacgaagtggtatacgtattatgatgacgattacaataattttataatgataagttacattaaagataaagttaatgcgttatatacaaatcaaaatatcatcacttcaaaatcaaaaattaaatacaatacaccgaaatcggttgtaaggcaaagattaggcgaaccagaaacagagattgttaaaggtagagtgcgttacgaacaaaataataaagaatatgatgttttccataaaaatcacatttatacgacggtattttatgataagcatcgacgtaataatgtaacagctgttttacaagtaagtgatgctatggaaaatagattaaaagaacaatatggagcaccttcgaaatcgcttgcagatagttttgaactacaaaattttgatttagttaatgctgaaagaaaacaacatcaattatctacattgaagtattctaaacagaattctgaaactgctcgtaagcatagtaaagatatggccaaaaatcattattttgatcatacaaatttaaaaggtcaatcaccatttgatcgattgaaaaaagatggtattacatttaactcagccggagagaatttagcatatggtcaagttagtagtatctatgcacatcaaggattaatgaattctattggtcacagaaaaaatattttaaatgatacgtttaaaatattaggtgttggtgttgattttaatgatgaaaaacaacctttttggacagaaaattatactggttaa

SEQ ID NO: 411300 - DNA, 624 bp, Staphylococcus aureus
atgagagaattaacaaaacgacaaagcgaaatatataactatattaaacaagttgttcaaatgaaaggttatccgcctagtgttcgcgaaattggtgaagcagttggcttagcatccagttcaactgttcatggtcacctttcacgtcttgaagaaaaaggctatataagaagagatccaacgaaaccacgtgctatagaaattgtaagtgatcaaacaaatgataatattaatatggaagaaacgattcatgtgccagttattggtaaagtcacagcaggtgttcctattaccgcagtagaaaatattgaagagtattttccattacctgaacacttaacatcgacacataatagcgacatattcatattaaacgtcgtaggcgacagtatgattgaggctggtatattagacggagacaaagtaattgttcgcagtcaaaccatagcagaaaatggagacattattgttgctatgactgaggaagatgaagcaactgtcaaacgcttctataaagaaaaaaatcgttatcgattacaacctgaaaatagtacaatggagccaatttacctcgacaatgttgctgtaattgggaaagtaattggtttgtaccgcgaaatgtaa

SEQ ID NO: 411301 - DNA, 237 bp, Staphylococcus aureus
atgatgttttacaataaatataaaaacgtatcaacatatatcatcatatttttagtttcaagtgcagcctttgcaatattcttgttaagtgcgaacgttagtgctcactcggaacaagtgtacgaaatgactgaccatcaaattaagaacaatacgataaataaatcatacgaacataaagaccctacaaacaatggcgaacaaagagatgggaaagtgttcgctttaataaattga

SEQ ID NO: 411302 - DNA, 240 bp, Staphylococcus aureus; identical to SEQ ID NO: 406971

SEQ ID NO: 411303 - DNA, 1989 bp, Staphylococcus aureus
atgtttaatgaaaaagatcaattagctgttgatacgctacgtgcactaagtatcgacacaatcgaaaaagcgaattctggtcatccaggattacctatgggagctgccccaatggcttacactttgtggacacgtcatctgaattttaatccacaatctaaagattacttcaatagagaccgtttcgtattatcggcagggcatggttcagcattattgtatagcttgttacatgtttctggtagtttagaattagaagaattaaagcaatttagacaatggggttctaaaacaccaggccatcctgaatacagacatactgatggtgtagaagttactactggaccacttggacaaggttttgctatgtcagtaggattagctttagcagaagatcacctagcagggaaatttaataaagaaggatataatgttgtagatcattacacatatgtattagcttctgacggtgatttaatggaaggtatttcgcatgaagcagcttcatttgctggacataataaattaagtaaattagttgttttatacgattcaaatgatatttcattagatggcgaattaaacaaagctttttctgaaaacacaaaagctcgttttgaagcatatggttggaattacttactagttaaagatggtaatgatttagaagaaattgataatgcgattactactgctaaatctcaagaaggaccaacaattatcgaagttaaaacaacaatcggatttggttcaccgaataaagcaggaactaatggtgttcatggggcacctttaggtgaagatgaaagaaaattaacatttgaaaattacggtttagatcctgaaaaacgttttaatgtttcagaagaagtatacgaaattttccaaaatactatgttaaaacgcgctaatgaagatgaatctcaatggaattcattattagaaaaatatgcagaaacatatcctgaattagcagaagaatttaaattagcgattagtggtaaattgcctaaaaattataaggatgaactaccacgttttgaacttggtcataatggtgcatctcgtgctgattctggtactgttattcaagcaatcagtaaaactgtcccttcattctttggtggatcagcagaccttgctggttcaaacaaatccaatgtaaatgatgcaacagattatagttctgaaacacctgaaggtaaaaatgtgtggtttggtgtacgtgaatttgctatgggtgctgctgtaaatggtatggctgcacatggaggtttacatccatatggtgcaacattcttcgtatttagtgattatttaaaaccagcgttacgcttatcatcaattatgggattaaatgctacgttcatcttcacacatgattcaattgcagtaggtgaagatggtcctactcatgaaccaattgaacaattagctggactaagagccattccaaatatgaatgttatccgtcctgctgatggtaatgaaacaagagtagcatgggaagttgccttagaatctgaatctacacctacttcattagtattgacacgtcaaaacttaccggttttagatgtaccagaagatgtagttgaagaaggcgttcgaaaaggtgcctatacagtttatggctctgaagagacaccagaattcctattattagcttcaggttcagaagttaatcttgcagttgaagctgctaaagatcttgaaaaacaaggtaaatcagtgcgtgttgtttcaatgcctaactggaatgcatttgaacaacaatctgaagaatataaagaatcagttattccatcaagcgtaacaaaacgtgttgcgattgaaatggcttcaccgctaggatggcataaatatgtaggtactgcaggtaaagttattgctattgacggctttggcgcaagtgcacctggcgatctagtagttgaaaaatatggctttacaaaagaaaatatcttaaaccaagttatgagcttataa

SEQ ID NO: 411304 - DNA, 288 bp, Staphylococcus aureus; identical to SEQ ID NO: 406969

SEQ ID NO: 411305 - DNA, 1122 bp, Staphylococcus aureus
atgaaaattatacatacagcagactggcacttagggaaaatattaaatggcaaacagcttttagaagatcaagcgtatattttagatatgttcgtagaaaaaatgaaagaagaagaacctgatatcattgtgatagctggagatttatatgacacaacatatccaagtaaagatgcaatcatgttattagaacaagcgattggaaagctaaatttagaactgcgtataccaataattatgattagcggaaatcacgatggtaaagagagattaaactatggggcgagttggtttgaacataatcagttatttataagaacagattttacatcgattaattcgccaatagagataaatggggttaatttttatacactcccttatgctactgtgagcgaaatgaaacactattttgaagatgacaccattgaaacgcatcaacagggaattacgcgctgtattgaaacaatagcaccggcaattgatgaagatgccgtcaatattttaattagtcatctgactgttcaaggtggaaagacatctgattctgaaagaccattaactattggaacggttgagtcagttcagaaaggtgtttttgatatatttgattatgtcatgctaggtcacttgcatcatccatttagtatagaagacgacaaaattaaatatagtggctccttattgcagtattcattttcggaagcgggtcaagctaaagggtatagacgtgtaacaattaacgatggcattattaacgatgtatttattcctcttaagccgcttagacaattggaaattatctcgggcgaatataatgatgttattaatgaaaaagttcatgtgaaaaataaagataattatttacattttaaacttaaaaatatgtcccatattactgatccaatgatgagtttaaaacaaatttatcctaatactttagcgctgacgaatgaaacttttaattacaatgaagaaaataacgctatagaaataagagaaaaagatgacatgtcaatcatcgaaatgttttataaacatataactgataaagaattatcggatatccaatctaaaaagataaaaaatattttagaaaacggattgagaaaggaggattaa

SEQ ID NO: 411306 - DNA, 3030 bp, Staphylococcus aureus
atgaaaccattacatttaaagttgaataatttcggaccctttttaaaagaagaaattgatttttctaaaattgataataatgaattgtttttaataagtggtaagactggatcgggtaaaacaatgatttttgatgcaatgacttatgccttgtttggtaaagcatcaactgaacaaagagaagaaaatgatttgagaagtcatttcgctgatggtaaacagccgatgtcagtaacgtttgaatttcaattaaatcatcgaatttataatgtgcatagacaaggcccttatatcaaagaaggtaatacaacaaaaacgaacgctaaatttgatgtatttgagatggtggatggcaagtatgaaattagagaaagtaaagtaatttcaggtacccaattcattattgaattattaggagtaaatgcagatcaattccgacaattgtttattttgcctcaaggtgaattcaaacgctttttaatatcaaacagtcgtgaaaagcaagggatattaagaacactgtttgacagtgaaaaatttgaagctatacgagaaatattaaaagaagaagtaaaaaaagaaaaagctcaaatcgagaatagatatcaacaaattgaccttttatggcaagaaattgaatcatttgatgatgacaaaataaaaggcttattagaggttgccactcaacagatagacaaagtgattgaaaatataccacttttacaagctaggtcgaaagaaatactagcatttgtgaatgaaagtaaagaaactgctattaaagaatatgaaataatagaaaagaaaacactagaaaataatatattaaaagataatattaatcaactcaacaaaaataaaattgatttcgttcaattgaaagagcaacaacctgaaatagaggaaattgaagctaagttaaagttgttacaagatattacaaacctattgaattatattgaaaatagagaaaaaattgaaagcaaaattgctaatagcaaaaaagatatttctaaaaccaataataaaatattgaatcttgattgtgataaacgaaacatagacaaagagaaaaaaatgttagaagaaaacggagatttaattgaaagtaaaatctcttttattgataaaactagagtattatttaacgatattaataagtatcaacaaagttatctcaatattgaacgcttgagaactgagggtgaacaattaggtgatgaattaaataatctaatcaaaggtttagaaaaggtcgaaaattcaataggtaataatgaaagtgattacgagaaaattatcgaactaaataatgcgataactaacataaataatgaaattaatgtaattaaagaaaatgaaaaagctaaagctgaattagataaactattaggtagtaagcaagagttagagaatcaaattaatgaagaaaaaactatattgaagaatctcgaaataaaattagaacgctacgataaatcaaaattggacttaaatgataaagaaagctttataagtgaaattaaatctgctgtaaagattggagatcaatgtccgatatgtggtaatgaaattcaggatttagggcatcatattgattttgacagtattgctaaacgtcaaaatgaaattaaagaaattgaagcaaatatccacactatgaaatcgaatattgctgtgcataattctgaaattaaatttgttaatgaaaaaatatcgaatattaatattaaaacgcaaagtgatctttcactcgaagtattgaataagcgtctgctagaaaatgaaaatgcattgaataatcaaagagatcttaataaatttatagaacaaatgaaagaagaaaaagataatctaacgttgcaaattcataataaacaattgcgtctaaataaaaatgaatctgagttgaaattatgtcgagatctcatcactgaatttgaaacactctcaaaatataataatatcactaattttgaagtggattataagaagtatgttcaagatgtgaatcaacatcaagaacactcaaaggagattgaagataagttaatacaattgtctcaaagaaagttaattgagcaaaataatctaaatcactatgaaaatcaactagaaacttacaataatgacttagaattgaatgaacagtctattgaaatggaaatgtcgaggctgaatttaactgatgacaatgatataaatgaaataatagcctggaggggcgagcaagaggaattagagcagaaaagggatacttataaaaaatgttatcatgaatttgaaatggaaatagctaggttagaatcattaaccaaggataaagagttattggactctgataaattaatagatgaatatgaactgaaaaaaggaaagatgaatacactgatagatgaatactctgctgttcattatcaatgtcaaaataatattaaaaaaacacaatctatagtttcgcatattaattacttaaatcaagaattaaaggatcaacaagaaatatttcaattggctgagattgtcagtggtaagaacaacaaaaatcttacattggaaaactttgtcttaatttactatttagatcaaattattgctcaagcaaatctgagattagcaacaatgtcagataatcgataccaactaattaggcgagaagcggtttctcatggtcttagtggcctagaaattgatgtatttgatttgcattcaaataagtctagacatattagctcgttatcaggtggagaaactttccaatcgtcgcttgcattagctttagggttaagcgaaattgtacagcagcaatcaggaggtatttcactagaatcaatatttattgatgaaggattcggtacattagatcaagaaacacttgaaacagcgttagacactttgttaaatcttaaatcaactggtagaatggttgggattatttcacatgtgagcgaattgaaaaatagaatacctatagttttagaagtgaaatcagatcaatatcagagttcaacaagattcaaaagaaattaa

SEQ ID NO: 411307 - DNA, 1647 bp, Staphylococcus aureus
atgaattcttcttcaccagagaatccaaatggaaagaagtattcaccagtcttcatctatagtgcaattgttgttgctatagtcgtattacttggtgcatttttacctgaacaattcaactatgttaccaataatattaaaatgtggattacagaaaagttaggttggtattatcttattcttactacgattatcgtgttcttctgtatattccttatttttagtcctattggaaaacttaaactaggtaaaccaaatgacaaacctgagtttaatacaatttcatggtttgctatgttgtttagtgctggtatggggataggtttggtgttttatggtgcagctgaaccgatggcgcactttgctacgccacctacagcagatcccaaaactactgaagcttatactgaagctctacgttcaacatttttccattggggattccatgcttgggctgtttatggtgttgttgcgttagcgttggcatattcgcaattccgtaaaggtgaaccaggtttattatctagaactttacgtcctcttttaggtgataaagtggaaggacctattgggatttttattgacgttttatctgtatttgcgacaatcgttggggtagccgtttcgttaggtatgggtgctctacaaattaatggtggtttacattacttgttcaatgttccaaacaatacgtttgtacaagcgattatcatcattgttgttactatcttatttatagcaagtgcatggtctggattaagtaaaggtattcaatacttaagtaacttgaacattggtttaggtactattttaatggtagctgctttaattgttggaccaactgtccttattttaaatatgttaactagctctacgggtagtttactaaacacattcttgtttaatagttttgatacagctgctttaaatcctcaaaaacgtgaatggatgtcttcatggacactttattactggggttggtggttaagttggagcccattcgttggagtgtttattgcacgagtttcaaaaggacgttcaattagagagttcatttctggtgtcttgctagttccagcaattgttagttttgtatggtttagtgtctttggtgtattaggcatcgagacaggtaagaaacacaaagaaatttttgatatgactcctgaaacacagctatttggagtgtttaatcatgtgccatttggtattgttttatcgttgattgcattattattaattgcatcattctttattacatctgctgactcagcaacatttgtattaggaatgcaaacaacatttggttcattaaatccatctagtatggtaaaagttgtttggggaatttcacaggccttaatagcatttgtacttttattagctggtggcggtaacggcgctgaagctttaaatgcgattcaaagtgctgcaattattagtgcattcccattctcctttgtcgtcatactcatgatggtaagtttctacaaggatgcgaaccaggaacgtaaattcctaggtttaacattgactccgaataaacaccgcttacaagaatatatcaagagtcaacaagaagattatgaatctgacattcttgaaaagcgtcagtcacgtagaaatatagagaaaaaagataactaa

SEQ ID NO: 411308 - DNA, 477 bp, Staphylococcus aureus
atggagacaatttatgattttgtagtagaaacaaataaaggtgttacttacaaattagatgcatataagggtgacgttatgctaattgtcaatacagctagcgaatgtggctttacttcacaatttgaaggtttgcaatcattatacgagaaatacaaagatcaagggtttgtaattctaggtttcccttgtaatcaatttggtggccaagaacctggatcaggcgaagaagcagctcaaaactgtaaattaaactatggtgttaccttccctatgcatcaaaaaatagacgtaaaaggggaacatcaattacctttatttagatatttgactgcggcacaacacggattctttaatgagaaaatcaaatggaatttcactaagtttttagtagatcgtgaaggcaacgttgttaaacgatttgcacctcaaaaaaagcctgttcaaatcgaaagagaaatagaaaagttattataa

SEQ ID NO: 411309 - DNA, 1239 bp, Staphylococcus aureus
atggctcagcaacaaattcatgatactaaaaataaactagaaaaagctgtcttagtcggtgtacatgctcaagatgataagcaatttaattttgagtctacaatggaggaattatcatctttatcagagacttgccaacttgaagtgttgggtcaaattactcaaaacagagatcttgtagatcgcaaatattatgttggtaaaggtaaaattgaagaaattcaagcatttattgagttcaaagatattgatgtagtcatcacaaatgatgaattaacgactgcacaatccaaatcactaaatgaagctttaggtgtaaaaattattgatagaactcagttgattcttgaaatatttgcattaagagcaagaagtaaagaaggtaaattgcaagtagagctagcacaacttgattatttattacctagattgcaaggccatggtaaaagtctttctcgtttaggtggcggtattggaactagaggccctggtgaaacgaagttagagatggatcgcagacatattcgaactcgtatgaatgaaattaaacatcaattgcgaacggtagaagaacatcgcgaaagatatcgaaataaaagaaatcaaaatcaggtgtttcaagtagctttagttggttatacaaatgctggtaaatcatcatggtttaatgttttagcaaatgaagagacatatgaaaaagatcaattatttgcaacgttagatcctaaaacacgacaaattcaaataaatgatggatttaatttaattatttcagatactgttggttttatacagaaactacctacgacgttaattgcagcttttaaatcaactttagaagaggctaaaggtgcagatttattagtacatgtcgtagatagtagccatcctgaataccgcacgcagtatgacacagttaatgatttaatcaaacaattagatatgaaccatatttctcaaatagttatttttaataaaaaggatttatgtgatcatgcatcaaatcgtccagcaagtgatttgcctaatgtttttgtttcttctaaaaatgatggtgataaattacttgttaagacgttatttattgatgaaatcaaaaggcaattaacttattatgatgaggcaattgcgacgaataatgcagatcgattatattttctaaaacaacatactttagtgactgaacttaaatatgatgaaattgaaaatgtttatcgtataaaaggatttaaaaaataa

SEQ ID NO: 411310 - DNA, 198 bp, Staphylococcus aureus
atgaattgctatgatgaaatattcaatacaatcaaagagttgatagaaattaaagagatatcgagttatcaaattaataaagatactggtataagttacggtaatattaatgctatgcgccgtggagaaagaagaatagaaaatttaagcttaaagaatgcaaaaatcttatatgaatatgcgaaaaaggtattataa

SEQ ID NO: 411311 - DNA, 423 bp, Staphylococcus aureus
atgccgtataattacaagaaacaaaatggagagttaatgtctgtaatgagccaaggtgaaaagtttattcatcaatcacccgttaatgatgaacttagtgcattgattaagttattaatttcaaaaattaacggttgtcattattgtgttgatatccataaaaaagaattaaaggaattgggtgtaacacaaatgaaaattgatgaagtcttgagttttagacatttagatttatttacagatcaagaaaaagtgacgcttgaatttgcagaaatgttaaattcaatcaaagactttaaaaagtttgaaattattgaccggctaaaatcattttatgatgaagaacaaattattgatcttgtctttgttgtaaaccaaattaacggttggaacagactaaatattattagtgataaactataa

SEQ ID NO: 411312 - DNA, 831 bp, Staphylococcus aureus
atggcaaagaatgaatatgaaatccaacatggtaatataactagtcactccgaagaaacaagtgcgatatctaaaattagctatgaaatagaaaatgctaataataatggattaagtaagaaaaaaattaacggacaattggaaaagttacaagatcatgatagttttcctaaaaacttgaaatacttaaaaagttatactgatccaaacactggtacaactacgactgcgttcaaaaataaagacactggcaaagtgactttaggtatgacaggtacaaatgtacatcttgaagctatgggaaatgttttggaacatccatttaatcactccgatcaagacgagaaagatgcggacgaaacattgaaagatttcagggccgatgtcaatattggtctaggtactgtaacggataaagatccacattttaaagatactcaagactttattaaagatatcaaaaaagaatatgaaattgacacaataactgggcactcacttggcggtagggatgcagttattttaggagttagtaacgatatcaaaaatattgttgtatataatccggcgccattatcaattagagattttcgtatatttgctgcggaaaatatgccggcaagtgcaatcggagatatagaaattgagaaaatgttaaaaaattataatggacatatagtaaggtttgtttctgacaaagatgagttagatgcttttgttagtcagtttatgtatgatacagctggtgagaaaatagttttgaacaatggggaaggccatgatatggaagcctttttaaggaaatatgcacaagctaaaattttagcataa

SEQ ID NO: 411313 - DNA, 267 bp, Staphylococcus aureus
atgaaaggctctaaacaaatacttttgattatgggcattatatctcttattgttttatttatttttacactattcatcatggcgcaatatgcaaaacattatgaacaaaaatccgacagttccaacgcacatactttaaattcatcatcagtcataattgaccaacatactatgtcgaatttagcgtctctagatttatacgctcctgttcgtaacattacttctagtcgtgatatttatcccatttatttcatgacaaaagattaa

SEQ ID NO: 411314 - DNA, 765 bp, Staphylococcus aureus
gtgtcagaggtaactaggtttaatgttggtaatgaaagtaatggtttgataggagcgttacaattaaaaaataaaatagattttagtaaggatttcaattttaaagtcagagtggcaaataaccatcaatcaaatactacaggtgctgatggttgggggttcttatttagtaaaggaaatgcagaagaatacttaaataatggtggaatactagggaataaaggtatggaaaatacaggaggatttaaaattgatactggattcatctatactagttctatggacaaaagcgaaaagcaagctggacaaggttatagaggttacggtgcttttgtgaaaaatgacagttctggcaattcacaaatggtcggagaaaatatcgataaaccaaaaactaattttttaaactatgctgacaattccactaatatttcagatggaaagtttcatggacaacgtttaaatgatgttatcttaacttatgttgcatcaactggtaaaatgagagctgaatatgctggtaaaacttgggagacttctataacggatttaggtttatctaaaaatcagacatataatttcttaattacatctagtcaaagatggggacttaatcaagggataaatgcaaatggatggatgagaacggacttaaaaggttctgagtttacttttacaccagaagtatccaaaacaataacagaattagaaaaaaagttgaagaaattccattcaagaaagaacgtaaatttaatcctgatttag

SEQ ID NO: 411315 - DNA, 567 bp, Staphylococcus aureus
atgagagataagaaaggaccggtaaataaaagagtagattttctatcaaataaattgaataaatattcaataagaaaatttacagttggaacagcatctattttaattggctcactaatgtatttaggaactcaacaagaggcagaagcagctgaaaacaatattgagaatccaactacattaaaagataatgtccaatcaaaagaagtgaagattgaagaagtaacaaacaaagacactgcaccacaaggtatagaggctaaatctgaagtaacttcaaacaaagacacaatcgaacatgaaccatcagtaaaagctgaagatatatcaaaaaaggaggatacaccaaaagaagtagctaatgttgctgaagttcagccgaaatcgtcagtcactcataacgcagagacacctaaggttagaaaagctcgttctgttgatgaaggctcttttgatattacaagagattctaaaaatgtagttgaatctaccccaattacaattaaaggtaaagaacattttgaaggttacggaagtgttgatatacaaaaaacccaacagatctag

SEQ ID NO: 411316 - DNA, 288 bp, Staphylococcus aureus
atggaaaaggggattttcaattacgataatgcgaatgtattaaaattagatactaatcagttaaatgaaaacataaaagtcattgacgatatatttaaaaattatgagcagatagagccaacgatagaaatagaaaagggaaatgcaattttgaaattgaatggttattttgttgcatctattttagaaacgttgaatttgaatagagttaaaaagttatatgttgatgaagattattattatacatataacgaattaattgttaaatatactgaggtaaaggaataa

SEQ ID NO: 411317 - DNA, 1011 bp, Staphylococcus aureus
atgacttcattaaaagagagagattatttttttgacaacgcaagagcaattttaatattattagtcgtatttggacatatgttacaaccctacactagtggcgataagtatttatcagcattatacttagttatttatagttttcatatgccaacatttttgtttatatctggttatttcgcgaaaaatattgataaaccatactatttagaaaaaatttcaaaacgtttgatagtaccttatatgatattttttgcattcttttcaatatattatttcttaacaggtaaaagtgacgaattacaacttgatccttttaacccagtatttgcgttatggtttttgatcacgctatttttctttcatgtcattttagtaatagttagaagatttaatccatataaagtgctatcagtttcaattattatatctattggagcaggtttttcagataacatcgatagctacttaagcatttcaaggacaatcgtatttttcccaatattttacctaggttacattttcaccaaaaaacatacggctatttttaaaaataaaaaactaataccagtatctattattacctttattttgttttttatcatttacgtgattcatcctatcaatgcagattggttattaggaagttcaccatatacttcacttgaaaatgaaggacagagtgtattcagtccttttaaacgacttatattatatggaattatattaatcgcaatgactgcgtttctaaatttagtgtcaacaaagaaaaaattatatacttatattggtagtcgtacgctatacgtatatttattacatggtttaattattggcattgttagaggatttgaatggtatccattcgataatcctatttcattaatgacgtatctttatttaataagtatatctgtaatcatcgtatatgtattatctacaaactttgtttgtaaatggacaaatccaataattaatttacaaagaccatcacagtttaaagactcataa

SEQ ID NO: 411318 - DNA, 930 bp, Staphylococcus aureus
atgtatgataaaaaagcaatcggtcaaagaattaaaaatatccgattaaaacacggtcaaactcaggaagaatttggcaaagttttttctgcaagtaaaggaaatgttgctacatgggaaaaaggcttatctttacccaataaagaaagattaagtatgataagtaaatacggcgacattaatgtaacgcaactgttatacaattcaaatgacgataactcagaattagaagaaaaaatttttaatgatatgctaaaaaaatatcctaaagaaagccatataggtaaagctttacgttttccagattatcaaaaaagaaaagaattaatgcaagcgggtataaatcgaactttatcagttcctttattaaaaaataaatttcatactcccgaattaatacttgaaagttcaacatatttattcattacagatgaatttctcaattattatataaacaattataaatcaaatagtaatatattaaaatttttagaacgtggtttagaagatttacaaagtacagtctatgattatgacttacttgacttccactatgaattacaaaatattttcaatgatataactttaattttttccagcagagataaaagtgtaaataaaaatttgttgaattatcttgaaacattactagataaaacaataaatgaaattaaagaattacaaataaaatatcccgataataaaaaaagcgaagaaataatagcaatcgctatacctaataaacaacctaaattcaaatcagaatattcttttgatattgatattggtaaaactaaagatgaaaaaatagataaaatcaatgatgaattatcaactattattaaaaatcttataaaaaatgaaccatctttaaagagttatttaaaagaaaattcttcagaaaatataggtgattacgatagaacataa

SEQ ID NO: 411319 - DNA, 138 bp, Staphylococcus aureus
atgaaaaactatctaacgtacattggtacgatttcgtttataacattagcagtagcattagttgcaaacgtatttattgctttcgctttatatattttagcgtcggcatatggaattaaattattggaggttgaatag

SEQ ID NO: 411320 - DNA, 609 bp, Staphylococcus aureus
atgcctagatttaatagtaatgttacttctaaaaaaagaaaaaagaacgttcacgttgaaatagttaataaagattttttaccaactagaaatgaatttgaaactgataaagtagaaatagagttaagaaatgctgaagtaaaaaaagttgttttttttaatgaagaagtaaagtattcaaaacaaaataatgatctgaaatttactaatttcatttctgattttacacaacaaaatcaaattaatgctataacccatttcagtaaaaatataagcatagtcaaaaataaccccgatgaagctacgaatataaattatgatgagagaatgttatcaattttatctttatatactcaacaagatattagaaatataaagggcttaatgaaaacagatattagagggttacttgatgttcaagagggcttaagagtatattggtattacgatttgattgataacgaaataaaaatagtttgtattgatccacaacatttagttttaccaagtcagcatggtaaaatgaataaagataaaatgatgattacaacctatcaatcagttactaatagcaaaaaacattgtattagtcggtattttattaattag

SEQ ID NO: 411321 - DNA, 510 bp, Staphylococcus aureus
atggctgagcaaaaatacctgacaacagttgaaaatataattggtttaatgaaagaagaaataaaaaacatttctcctttaagactacaaaaaacattatactttttatttgcatattatggtgcttcatatgggcaactatctaaaagtaaagaatatgaagttacaaaaagtgaaagtttaaacttgcctgaatatttatttgacgctcaatttgaagcttggcaatacggccctgttattcgagacgtatataagaacaataaatatagttttggctataatgacatagagttttcaatgagtaattttgaaatagaagataaaacaatgcagcaggaaattacagaatatttgagagaaattattaagagtactttaaaaattagtgattttggtttagtagaacgttctcatgaagatgaagagtggaaaaataaaattactcagcaagaaattatgaataacgatttaattattaaggaatatataggattggtaaatgcctag

SEQ ID NO: 411322 - DNA, 561 bp, Staphylococcus aureus
atgaataaaaaactattaacaaaaacattgatagcaagtgctttagttttaacaacagtaggttcaggttttcattcttcttcaaattataatggtattaataacgttgcaaaagctgagcaaacgacagataacgcattgtggaaaaatgtaagagacgctttaaaagacgcgaatattatcgataaaacagataatgaaaatgtcaaggttacgtataaaatagaaaatggtggagaaaataccatagaaggaacagctaatttagaaaatattagtacttcaaacaatcctaaaataaaccctcaaaatgttacaaaaattaatataactagaaaaaattcgaactatcctaatattgatgctaataatacatggaaaaaattaacagaaaaattgaaagaaaaaaatatagtgaacaacggcgacaatgtttcaatcttaagtacagaccctaaagatgagactgtattcggtaaagtaggagaagataaatcaaacgtaagcaatagatacatcaatcctaaagatataaatgaaattcaaatcactaaaaaataa

SEQ ID NO: 411323 - DNA, 414 bp, Staphylococcus aureus
atgaccaaaaaacatgtttttataattattggtgttattttatgtatatgtatagtcgctacggtcatacattttaaaatgaaatatgatgaaaaagaaaaacaaaaagctatttattataaagaacaacaagcgcgtattacactttatctcaagcataatactaaagaaccgaacacgatcaaatctgtacatttcactaacttggaaacaagtcctatgggaagtgctgtgattgaaggatacataaacgaaaacaaagaagatgattttgttgcttatgcatcgcctgaaaataactttcaatttgtaggtgatataatactaagcaaaaatttatcggaaataattaaaataaaaacaaaatcaccagaaaaaatcaaagaagaattagataaaaaagaaggccactag

SEQ ID NO: 411324 - DNA, 417 bp, Staphylococcus aureus
atgtcgaaaaagaaaattttaatattaactagtattatgttaatcatattaatcagtgttgcaggtatccatttaaaaatgaaatatgacgaaaaagaaaagcaaaaatcagtttattataaagaacaacaagcgcgtattacactctatctcaagcataatactaaagaaccgaacacgattaaatctgtgcatttcacaaacttggaaacaagtcctatgggaagtgctgtgattgaaggatacatcaatgaaaataaagaagatgattttgttgcctattctaccccggaaaatgactttcaatttagtggtgatttaattaaaagtgaaagattaagtgaattactaaaaccagcacaggaattaaaatcacctgatgatataaaaaaagaactaaataaaaagagtcactaa

SEQ ID NO: 411325 - DNA, 1143 bp, Staphylococcus aureus
gtggaaaaggtattggaggttattcgtggtattcaagtaataaaatcattcgcgaaagaaaatacgagtcttaaaagttttaaccaagcagtcaatgaaagtaaacgtataaatacaaaaatagaaatgcaatatatcccattcaatttattgcatttacttagtttaaaagttgtttcaataatgattgtattagttgcatgcttattatatatgaatcatagtattgatttacctacccttattatgatttcaattttttcatttgtgatatttgatagtgttgaaaatattaatagtgctgcacacgtacttgaaatgatagatatgacgatagatgatattgaaaagataaaaaatgctccagaactggatgagaatggaaaaaatttgacgattaaaaatgaaaatatcgcttttcaaaacgtgaatttttcatatgatgataaacaagtgataaagaatgtgaattttgagatacctacacaaacatcaacagcaataattggaccttcaggaagtgggaaatctacattatgtcacttactcttgcgcttttatgatatcgatgatggaaatattcgcatcgatggtgttgatattaaagatatgacattaagtacgttaatgtcgaaaattagtgcagtatttcaaaaggtgtatttatttaatgatacgattgaaaataacatattgtttggcaatccaggtgcaacgaaagaagaaattattcgtgcagcgaagcaagcatgttgccacgacttcatcatgtcattacctgagggatatcaaacaatgctaaatgaaaaaggtagtaatttatctggcggagaaaagcaaaggatttctattgctagggcgatattaaaagatgcaccaataattattttagatgaagcaactgcaagtattgaccctgaaaatgaacagctgattcaaacggcaattaatgaattaagtaaaggcaaaacagtaattacaattgcacataaacttgaaacttttaaaaatgcagatcagattatagtgctcaatgaaggtgaaataattcaaaaaggtagtcatgatgaattaattcgaaaaccaggaatgtatcaagactttataagaataaaaagtaaatcagcaggctggaaattataa

SEQ ID NO: 411326 - DNA, 591 bp, Staphylococcus aureus
atgtttcaaattacatttaaaattttaaactggataagaccatataaagcaagaatgattttaggatttagcatgtcatttttaaatgctatttttattgcgttacctatctttttagctgcaaaaatatttaataatgtgctatctcataaacctatttatatgaaagatatattgaatgttgtaattatcatggttttattagtgattggacgatttattacagcatatttcaaaagcaaaagccatgagagcatcgcttatgaaatgagtgcgaaagaacgtttagatataggggataaattgaaaaatgtaaggttaggttattttaattcgcatcattcaaatgagttaacaacaattgttactacagatttaacatttctagaaaactttgccatgaaaatggtggatattgtcattaatggatacatattaatttcagtacttatcttgtctttattggtcgtatcatggcaagtagcattattagcatgcattggtgtattattatcatttttagctattcaattattggaaaacaagagtaaaaaaatgcgccagcgtatcataatgtacaaaaccaattag

SEQ ID NO: 411327 - DNA, 1764 bp, Staphylococcus aureus
atgaacaatcagacaaattggataaagatactcagcggatttgcttctgatagtaaatggaaaattatgttatcaattttgttgtctatcatcagtgtcttttctggattagttccatattgggcagtctttaaaattattttaatgatgattaacaatgcatatacgattaattcgattatggtttatatctttattgctttaatcgcttatatttcacaagtgtgttgttttggagcgtcaacgatgctatcacatattacggcatatgaaattttatctgaaattcgtaaaaaattagctcaaaaattaatgcgtctccctttaggcgtagtggaatctaagaaaataggtgaattaaaaaatatatttgtcgataaggttgaaacaatagaattacctttagcacatatgattcctgaagttataggaaacttacttttgtcagctgctatctttttatacataatgctcattgattggcgtatggctagtgccttattagtaacgataccaatttcaattttcgcttttaaaaaagttatgtctggatttaatgagacatatgctgaacaaatgaaatcgaataattatatgaatagcgcgattgtagagtttatcgaaggcattgaagtgattaaaacatttaatcaatctcaaagttcatataaaaaatataaagatgcagtagataattataagattcacactttgaattggtttaaaaatacatggggatatatgaatttaggttcaagtgtattaccttcaacatttttagggattttaccggtcggcatgtatttgatatctatcaaccaattaaactatgcggaatttttcctatgcatcgtattatctttaggtgtagtagcaccgattaagaattttactaattatgtaaatcatttaaaatcaatccaatatgcgttaactgaagtaaatcaattattaatcttagaagagttagcattgtcatcacgatttatggaacctcaacattatgaaattacttttaataatgttggattttcatataacaaagataaggacgatctggtctttaagcatttatcatttacagtaccagaaaataatttcacagctatcgtcggggcatctggtagcggtaagtcaaccattgccaagcttatatcacgatactgggatgtgacttcaggtgaaattacgattggcggtataaatataaaagatattgaatcgaaacaacttaacgatttagttggttttgttggacaagataactttttattaaatcttacttttaaagaaaatattaaacttggcaatccagaagctacggatgaggcagttgaaaaagctgccaagttagcacaatgtcatgaatttattgaaaagttgccagatggatatgatacgaatgttggtacagtgggagataaattgtctggtggtgaaaaacaacgagtcactattgcaagaatgatattaaaagatgcgcctatcattgtattagatgaagcgactgcttacgttgatccagacaacgaacaaaaaattcaagaagcattaaatgtgttgacgcaggataaaacattgattgttattgcacatcggttatctacgattcaacatgcagatcaaattattgttttaggtaaacaacaaattttagaaaaagggtcacatcacttattgctaaaattaaacggtaattataagaaaatgtgggatacgcacatgcatacaaaagattggggaatcaatactggacataattaa

SEQ ID NO: 411328 - DNA, 426 bp, Staphylococcus aureus
atgtccaaaaaacatggttttataattattggtgttgttttatgcgtatgtatgcttattgcaggtatccattttaaaatgaaatatgacgaaaaagaaaagcaaaaagcaatttattataaagaacaacaagcgcgtattacactctatctcaagcataataccaaagaacccaataccatcaaatctgtacatttcacaagtttaaaaagaggacctatgggcgatgcagtaattgaaggatacatcaatgaaaacaaaaaagctgattttgttgcatatgggtcacctgaagaaaactatcaattcactggaggattgacaggaagtaatgaagtcttaggaaaattaaagaacgctgaaaatttaaaatctcctgaaaaaattaaagaagaaataaacaaaaagaaaaacactaaacagtga

SEQ ID NO: 411329 - DNA, 717 bp, Staphylococcus aureus
atgaataaaaatataatcatcaaaagtattgcggcattgacgattttaacatcagtgactggtgtcggcacaacaataattgagggtattcaacaaacggctaaagctgaacataatgtgacacaagtacaaaacacaagtatctcaccttataaaggtattgttagaattggatcagctacaggatttgtggtaggaaaaaacacaattttaactaataagcatgtattaccaggagttcaagttggtagtacaattattgctcatccaaatggcgaaaatgatacaggtggattctataaagttaaaaaaatcattccatatgcaggttcagaagatttagctattgtgcatgttgaagaagattctgtttatcctaaaaataaaaaattcagtgaaaataccgaagtccttaaatttgcgagtggtgctaaagtaaatgatcgattgtcaatcgttggttatcctaaaccttacaaaaataagcatcatatgtttgaatctactggaaaggtattatcaatcaatggtaatcaaatgctttcagatgcatttgctgaaggaggcaattcgggatcaccagtgtttaattcaaatcatgaagtaattgcaattgcatatgctgtcgatgtcaaaaatgatgcaacaaaaaaatcatatttagtttatttcacaccagaaattaagaaattcatcgcagataacatagataaataa

SEQ ID NO: 411330 - DNA, 198 bp, Staphylococcus aureus
atgagaatagcaagggcctatggtcataaagttaaagtgattttaaaagataataataatatagttggaaatgtcattaattttgaaaacccaatcgaaagtgatactgggaatttcgtaatggatttagagacctcaatgggtatatattctatagatgactctgaaattaaagacatacaaataattacaaaatag

SEQ ID NO: 411331 - DNA, 285 bp, Staphylococcus aureus
ttgtttaaaaatagtaaaagacaagcattaataaataattatttattaccaagttattccactgtatcaattcaaaaacttaatgaattattaacagacaaagtagggacaggtggaattttattattaagaggtaagtttaatcaaaaagagatcatagattttgaatttgtaattggaaaatcatttgtagaaggtaaatatatagatacaacttttggaaaagtacattattctagaacaggaacacatgtggttccatatgttaaaaaggaggttgaataa

SEQ ID NO: 411332 - DNA, 501 bp, Staphylococcus aureus
atgatgaatgggaagttattcggtcatgtatatattaaagattgtaaagtaaggcaatcatttgaattagcgtcacctaagcacactgaggggcttataagaagtatagaaggtcattatgtaggttatgaattacatgacggtaaacagctttctattagtgatatgatggccagtcaattatttgaagatgagtattttatgtatgggctacaaacatatgtagaatcaaataatagtgatgtgtttgagtacctagaaaatggatttgatacagatacacttgagggcattcaatcgagtaatactgatgtgatagcgaatattgaaatgttgtatcagttagctacgggaatcaatgaaccagcaccagagttagttgagggattaaaattagtaactgagtttgtacaagatgagaatgcgacacaagaggattacaaggctttagaacgtaaattgaatgatctaaaagcgtcttactatagcttgagtaaataa

SEQ ID NO: 411333 - DNA, 294 bp, Staphylococcus aureus
atgaattgggaaattaaagatttaatgtgtgatattgaagtggtaaaagaaaaaatcaatgatgtagctatcaaacatggttggtttgttgaagataaatttgtcaaaaatgaattagaaacaaaacaggaacatattaatttttctgctagctatttagaacatcgtatacaaaatgaacatacagttgagttattacaagtgtacttaaaagagttcggtgaacttatacaaaagtttcatgaaatagaaaaagcgtcacttcaagccgaccaaagcgaaagtaacgcatag

SEQ ID NO: 411334 - DNA, 417 bp, Staphylococcus aureus
atgccctttacaatgaaaggttaccccgaaaaatggaaagaatttgaagtaattaaacggcaaaaagcgatagaaattgcgaatgcaatgttaaaagaaggatatcttgaaaaagatgttgttcctattgcggcgaaaaaagcgaaagattggtatcgagcgttatcgaaagaagaaatcaaagcattagaagaagagaacttcgtacaattccatacagcaacaatggaaaaaccagaggtggatagtgaatatgcaacaactgataatgaagaacatattcaagaacaatcaaatcaagataaatcgtactttgatagcgaatcaattggcaaccaaagtggtggcattcgacaaagagaaccgcttatggatggtccgcatccaaaagttgtggaatcatttaaagacgtataa

SEQ ID NO: 411335 - DNA, 285 bp, Staphylococcus aureus
atgacagagtttacaccatatttttatgattttagtcatttagattatcgaaattttgttgttttaagatttcatggatattctaaacgaaaaatctgtaaaatgtataaacttgcgtatttttgtatattgcgtgtttgtgaacaagctcaaaaaaatgactatcgatttacttataaggattatgtttatttaaaatcttatgatgtgactaatgaatttatttgtaagatgtatcgtattgatttattagatttagaattttttgaggtgatgaaccgatag

SEQ ID NO: 411336 - DNA, 321 bp, Staphylococcus aureus
atggaaccagtattagattttgagaaaacattaggtagcttgaactttttaggtgtggatgaaaaatacaagtatgaaaatggtgaacgtacaaatgaaacggtttacgcttataaattgggtagtaaagcacaaggtgaacaaattgtagttaaaacgccaaataaagttgaattagattatttacaagagtgtgagctcgttaatccagaatgtaaaatgtacgtacaaatgaacggtgatttcggtacaattggttacagttttaaagctgatgatattaaagcgtcaggtggattgtctcctaaatcaaataaataa

SEQ ID NO: 411337 - DNA, 309 bp, Staphylococcus aureus
atggacttttatactgctgaagaattaaagccttacgctcatcatcttaaactttcagatgatattttgcattatgttgccagtcgcattaattggggtgacaagttgtcattgatgcaattatcaaaagaaatacaatcaaaatttaatgatagttatgttaaacaaaatacgcctaaaggtcgccctattgtatacggtgacctttgtctgttatgtatcaatttgagtcaagatggtcatggtagaatgctgcaagttgatttaacggattgtgtatatattggtgatgtagaacgttattcataa

SEQ ID NO: 411338 - DNA, 1008 bp, Staphylococcus aureus
gtgactttccatgtaggtgccatttcagcaatagttaatgatgtaattggtttaccttttgatttgtttaaacatcaggaaaaaggtttgtacttttacaatcgcacttatgagttttcaaatattaaactttattattcttctaacgatgaatcgatgggaatccatttgcaactgacaggctcaggctgtcgagaaatggaacaccatttaagtcaacttaatcagaattggacagatttttttaaaagatgtttagaagtgaaagcaaattttactcgtattgatatagcgattgatgattttaaaacgtatttaagtatccctaaattgataaaaaaagccgaaaaagcggaatgtgtatcaaaattccgtgcaggtagttcaattaatggttttaatttgtgcgatggtaaaagtaaaggagcaactttttatattggctctaaaaaaagtaatttatattgtcgtttttacgaaaagaactatgaacaagcattcaaattgaattgtgatgttgaagaattcgggaattggaacagatatgaaattcagatgcgaaaatcatatgcgatgaattgtgcagaacatttgagtaaaactgataacatcgcttttttagttaagtcaattttaaataataatttacgttttgtgactgagccgaaagataaagcggatacaagaaaaagaagatggccgttatatagaccttgggcattgtttatggctaatgctgaaaaaattaatttaacaatggagccaagtttcaaatcaattgaggataatatagagtggttgacaagacaagttgcgacaactttagacacagtgattacagctgaagcgactgcgatttctgagggtttattaagtgaatcatcaagttttttagatatgattttagcacattctaaatttggtgatgagcatagagaacgtattaaacgttatataacggaacttgaaagaaaaaaggcgttgagcctatgcgggactcaacgctaa

SEQ ID NO: 411339 - DNA, 1098 bp, Staphylococcus aureus
gtgcttaacattttaaaattcatagttgaactcagaaaaaattttttgaaaatcattaataaacacattatagcacgattttcaaaaaacggaaagagttataaagttgcagatgccgaaagaaaaataatacccaaatttaaaaataaaagaaaatggattgtaggtattttttattcgttgttaggtttactcttaatattgttgttagcttcttttgtcaaagcgactaaagcaaataatttaagtcatgaagcaaaagaacaatcaaatttgattcaacaaaagtatgaggataatgctgaaacagtgcaatataatcctaatctaaagttatatgcagatgaatttgttgaaacatatatggctatccctaaggatagctcagacttagagcagcgacagaaaaagttagcagaatttttcccatcagactataaaatacctgatgaacagactaaagatactgagagaaaattaaatagtaaagaattttacaacattaagcgtaaagataaacagaccattattcagtatatcgttaattatgatgtgattattactgaaaaaaaagaagttaaggtgaaaaagaaaaaagaaaaaggtaagaaacagcaatatgaaacaaaaacagaagaaaaagaaagaaaagtaactcaaaatgttttgattaatattcctgttaagagtgagaataataagtatgttgttgttgaatatccttatttcacccctattcctagtaatcaattgaaaaaagaaaaaatgattgaggataatttgaaagagcataagcgtgaagataatccgaaagttaaagtatttattgaggaattttttgataagtatgcgtctagtaaatcagatgatatggcttatttaatggaggacccacaaggtttagagggcacacgtgaagtttctaaaattagtgaattaagactttatcctgacggtaatagttatattgctaaagttgaaattttaatgaaagataaagattctcctttagagaatctagaacattatactttaaaaattgttgaaaaagatggcaagtattacgttaaagatttaaaaaatactattggaggttaa

SEQ ID NO: 411340 - DNA, 264 bp, Staphylococcus aureus
atgaatacattatatagtttgttgtttgtactaggtgctggcagaccgtcgattaatggtttaggtgattggattagtagcgaggttggtacaggtattggcattgttgtgttgattattggtgtgattcattgggcaagtggtaaatatggtcgtatgttagcgttgttcattgttggtggtttattatttttagtaagtaaaggacctgaaaatgtatttaatgcgatttcagcaatttgggaaatgatttttgggggctga

SEQ ID NO: 411341 - DNA, 384 bp, Staphylococcus aureus
ttggataaaaaggcatacaatttaaagcggacttttgaacagcctattgtgatgtatgaatttacaaatggttttagggttaatcgtggtttacgtgttgatttttggataacttttttagttgtttggttaatctttttagttgcttttttgtatttgttaaaacctctagtaatgtctataagtggactaatgtttatttattttacaatagcaccctactatttggctaagtatattaataaacttaagcaagatggtaaaaaattatttttctttcttttagactttactgtatatctttttagtattcagatgaaacggtcaaaatatagttttgatgaagaagttcagtaccataataaaaaaataacttttaaatag

SEQ ID NO: 411342 - DNA, 2496 bp, Staphylococcus aureus
atgaatttaaaagccccttatgtaggtttgaaagataatttgttgttaactaagtctggtgaagtttgggcgtattatcgtgtacgttctgaatcaatatcaacagcgaattatgatgctaaagaagaatctaaaaaacgtatgaagtattttttggagtctattaaaggttatcaagattttcattttgaaatgtatgaccatgatttagatttaagaaataagtttaaagaaattagtcaggattttgacgatgatgcttttgatgtagctgaatattattcgaatgaaacgattgatgtgttagagcaggaactacaaatgattacgcataattcttttgtaatgggcgtgaagttgcgtgaattgacggacgatgctgttacagttaaagagattcttaaaagtaccttgtcggatacggctgaaaggattgtctctaattttggttttgatgtaaatttagatgataagttattgaagcaatataaagtctttgaacgtgatttagctgatagctttttaggtattggcggtgagcgattaactgagaatgaacttgcatatattataagaaagccttttatatcaaatgcaacgcatgatgttcaagaagaatctgcacgacgtgcaacaacagatatttataacgctgtcattgaccctacaaaattaagtgttttagagattgaaaacgaaaacgaaacattttattcaacaacggttgttgttgatgattttcctttggatatggagtacactcatttatttgagaaagcgcaaaatatgcccttttctgtggaatgccatgtgaaagcgaaaatagttgaaaatgagaaagtaaaaaagaaatttgaccgtgcaaaaattaatcataaggcgcaggcaaaagaaaagatgaacacaggtgatgaagcgtcggaagaaattcaagataatttatttgtgttaaatcaaatggaaaaagaagtgacaggctcaggcgtatttattgaatgggtctttatgtttgtgattaaaagtgatgattttaaagattgtaaacgtaaagctaaacgtttgattaaacgtttgaaagaaacagaaacatatgcggttaatcctctagcagaccaactacaattattttatcaatgtttgcatggtaattcgttatttattaataagtattggatacagcgtacaactgcgacgggtattgctgaaaatctttttggtgtaactcaaagcctaggaacaaaaacaggtttttatattggccgtattgataaatttttgcgttcggtatcacgtgaggaagctgttgcaagttctagggatattattttatttagtttactgcttgctgctaaaggtattaaaggggctgttagtgatagcccacacgtgcttattactggccagacgggtaaaggtaaatcatttttagctaaattattatggatatatacatcattctttaaaggtcaaatgatttattgggaccctaaaagtgaatttgctgaatggtttgaccgtgttaccgatgataaagaaatgcaacgtaaataccccctatttattaatcatcttaaaacgtttaagtatgtaacgttagattatcaagattcaacaaattatggttgtttagaccctatcgtttttctttcaggaattgaagctaatgagatgttaaaatctgtttttgatgaaattaaatcttttgaaaattatcatcatattgaaacagcgatttataaagcaatagcggaaacagtggacgaaagagaaaatgggaaacaagttggttctttaaatgtgattgaaaaacttcaaaatgatgaagatgaacatgtaagtaatgcaggtgatttactttttgaaaaaacgcaaaataacattttaaaacttgtattcagtgatggcagtaatcccgctttaaatgttcgagaaaaagcaacgatattgcaggttaaaggtttagatatgccaaaggctgatgatgacccatcaggatattcaacgagtgaaaaaaatggtatcacattaatgttattaattggtaagtttttggaaaagtttggttctcgtagagaagtgcaaacaacattatttattgatgagggttgggcttttagtgcttctcgtcaaggtaaaaaggttggtaaacgtattaagcgtactggtcgttctgaaaataattctcttgtttttattacacaatcggtaagggataaagctgatgatgatagtggtaactttggttgtcattttgcttttgatgaaaaagatgaacgtcaggatattttaaagtctttaggtttagagtattcaaaagaatcaccggaaaatatggagatgcttaaagatttgaaaaaaggtcaatgtattttcagtgatttttatggacgtgttgggaagatggttgtacattgtccatttgaagaaatgacggaagcatttagaacacaagaagattctgcaagctcgaaagcagaagaaaaatttgcaatataa

SEQ ID NO: 411343 - DNA, 1395 bp, Staphylococcus aureus
atggcgatgaatgaaattgctttgttcaaaggtgttcgtattcaaccctatcataaatatgtcgattttattgttgctggtgctattgcatcagcttttttgatttatcgtatttatgtattgattcaatcgtataatgaaaaatattcaacatttgatgttcgtactttttttccttttgtaaaatcttctttaattccttttttaattggaactgcaattgtgtttttgatagttaagttgattgcacatttattgattcgttttaaagtgaaagatttagctgaaatgattgaaacccaaggctttcataatcgtatagtgattaaaaaacgtactgagtttttagatattgattatcgacaaactgaatatgattattaccctactcttttttataaacgaggtaagaaaagttttattttgcatattaaaaaagatggttcacgttttcaaaatgattatttagaattggaaacgattattgaacctatgtttcattgtgagctagtcgagaagcgccatattggccgttatttaagatatgaatttatgccattaaaattcaagaaacgtattattatggataatcattcagactctgaaagcaagatttatgatacaaaaattaaaattacagaacaaataagttggaattttgtgaaagcgccacatggacttgtcacgggtattactggtggtggtaaaacatattttttgttttacattattcgtgaacttttcagacgagaatcggaagtacgattattagaccctaaaatttcagatttatcttttatgaaacgtgtgattggttctgataaagttgcagatacaaaaggtcagatatttaaacaattaagattagcgaatgaagaaatggagaatcgttttcgattaatgacagaaagcgaagattatcgcattggacatgattttagaagttttgatatgcctgcgtattttgttatttttgatgaggttacagcatttacatcaacattagataaaaaagaattacaggaaatgaatgattatcttgtaaatattattatgaaaggtcgtcaagcaggtgtgtttatgtttttaacagcgcaacgtcctgatgcagatgttattaaaggtaatgtgcgtgaccaattaggtttgcgtgtttctttaggtaacctttcgactgatggttatagaatgacctttggtcaaactgataaggaatttcaatcaattcatgaatctgatattggtcgtggttatatttctattttaggacaatataatgagccagttttatttgatgcgccattgatggaacaatatgattttgcgaaagatgttgaacaaattttatcacaacaagatattgataaggagaagcaaagaacagttgttttataa

SEQ ID NO: 411344 - DNA, 1878 bp, Staphylococcus aureus
atgaagcgtaaaggattatatcttttatgctttttaattttgcctgttttacttttgacatctgtaagtgcgttagcagcacaaacagcagatgaatctgatgtgtcgaaagtagaacctaaaattgaaaagtatgatttaagtcattatcgttcgctttatcacgaggagggagattggaatcctttcggtcaagaagagattacacgtcagattaataatgtttcagaatttttcttatctatgactaaaatgatggcaagcatgacagattatgcgattgaaaagttatttaatcttgatgtacttgatgaattcggcgataaaatcggtgattttgttgcgaatatttatcaaagtttgttgaacaacttggcgttatctttatttattattgtttgttttaatgcgttcattatttttagtgttaaaggtgatgcaagagaagctttaaaacgtgcatttttgattatttgtttaattggttttggtgttggcgttttaggtaatgcaggcacgattattcgagcatctaacagcttaggccaagatttaaataatattgtgatgaatagtacatcatcaattaatcaaggtgttgactataaaaatagtcaatcaggcgtgaatcatatacgaaatgaatttttcgatatgacagtgtacagaacgtatttgatgatgaactacggttcagttgatgaaaatgcgattaaggaaaaaggtaaagatagaattgataatattttaaagttagatttcagtaagaaatctgaaaaagatttgaaagattatattaaaaatgaggtagataagaaagataatgtgtacatgactcaaggatacgcatttcaaaaattagctgtggcggttgttgctttctttattacattgtttatgtcgattgttttcttatcgattagttttgcgaaattgatattttctactttttcattagttttagtgatatttttagtgtttagttggattatgagctttttgccaggttttgaaatttctgtatttcgagcaggtgcaaaaaccttaggttatattattttaagtgcatgtatgacgtttttatttgtgattgttggcttttgtattcagttagcaaatttatttatcaagccaacgagccaagaggcgtatatgttaaattgcttatttgtgattatcattattttcgttctgtataaaaaacgtgatgaaattattcactttgtgagccgtggtaatgtgagtttttctccgtcgaaattaggtgctgatacaattagaaaatcacaaaataaatttaatgaaatacgagaaaaacagtcacaagataagaagaataaacgtattaagcaagcatctaacccagaatcaaatatgaaccctaatgataatcaatcacctaagcgtagacaacaacaaggggcatcacctattttttataaggatggtgggaatgctaaagaaaagcaaagacgtcagcaacaagaaacaatgtatggtcaagatgttcaaacgtctgcatcaaaagaaaataatgcgatttatagtgattcaaatgcacctcagaaatcaaaacaacaatcgcatcaagttcgtgactttaagtctaaaaaagatattcaacgttcaccgcaagtcgttacccatgtttctaatggttctggtcgttcaaattatcaaggtcgtgaaataaatcgacgagaacaaaagaaagtacagatgtcagcagataataatattgagaaacgtcaaattcaaggtgttaatcatcgtcaaagtaatcatcaatcaggtcattcaaatcaatctatcacacgtaatgaacaatctaaaaaaagattaaaagaccaaaaggatattaataagcatggcaaataa

SEQ ID NO: 411345 - DNA, 1044 bp, Staphylococcus aureus
atggcaaataaaaaacaaatagctaaaaaagtgataggttctacgcctatcgctatgaaattaaaattgattaaagtcatcataatttttgttgtgatggctttattgttgttacctgtgataatgatgattattttagcgccgaatttaaaagaagatgtggacgatgcaggctgtacagtggcaggtggtaatgttgaaaaatctggaatagaagtgtttgaacaaaatgccaaaggcggtgcattagaaggaaaaacaaaaaagattgttgaaattgccaaagaaaataaagttccagttaatttgtttatggcgattattgctagtgaatcggcatggggtaaaggtgaaaatgcgacacgtcaaaataaccccctttctgtgatgggaacaaagtcgattcatgattcaacttaccctactattgaaaaaggtttagaagatggggcaaaaaatttatatgagctttatattaaggagggattagatacaccaaaaaaaattggtccaaagtatgcacctgagggcgcttctaatgaccctaacaatatgaatgcacgttggatacctactgttgagaagattatgaaagaattaggcggttctaaagtcaaaacaacatgtgataatggtaaaggtaaggcaattgatttcaatggtaaaataccgaaatggagtaattctaatccaggtaaaggcaatctttatactgcgggacagtgtacttggtatgcttacggtattcgtcaaaagatgggtaaacctatttctacattttggtttcatgcgcagttttggaatgatagagctaaagcagagggctataaagtgaataataagccagctgttggtgcacttatgattgctgagcctggtgctgcaggagcaccgccggtgacgggacatgttgctgttgttattgatgttaaagataaaaatacgtttattgtaacagaaatgaatatcaaaggtgaatatcaagtatcacagcgtgaattaactgttcaggacggtttgagctttatacatgataaggagtga

SEQ ID NO: 411346 - DNA, 591 bp, Staphylococcus aureus
atgaagttaaaggttataacttttttgatagttatgttatttttagtcataggaattgtgattggtagtcaattgtataaaggtcagttaaaagctaaagataataagattgaatcattacagcaagaacaaagtgaattaaaaaatacaaatcagcgtttaagtgaattagttaaacgacagtctaaaacggtaatcagtgatgaagaaaaacaaatacgtgagaaagcagaattatttgttaaatctatgtttgaaatgaaacgtgatacatcatttaaatctaagtcaaaagatttaaaatcacttgtgacagatgattattattcaagtttatttgaagatagcaaagacaaatataatttatatgatgatatatctgttaatgatttacatgtttatttcgatgtatatgacgctaagaaagatagttatcgtgtgtttgtgcaatttgatgaacgtattgaaacagaaggacaagaaaaaattgaaaatcgaaaaacatcggttcaacttgatttgggtagaacgggtgatggttggaaagttgataatttatcacgctttaatttacaacggaatggacgttga

SEQ ID NO: 411347 - DNA, 354 bp, Staphylococcus aureus
atgaaaaaaacatttatattatttataattttgacttttgttttagctgcatgtggtaaaaagtatgataaagagattgaacaagttaccaagttggaacaaaaaagtgttgaagattcacaagctgataatcgtaaaaaagttaaccgtaattcaagtgattataaagtttatgataatggtaatgtaataactatgacgatagtaccttttgaagattctgatatgacgacaactagggtatatagactaaataagactaatcagaagtatgaggaagatttaagtgagaatgtaactgaatatcaacaaagtaacaagccagattatgaagaaaataatttggaaaaataa

SEQ ID NO: 411348 - DNA, 504 bp, Staphylococcus aureus
atgaagcaaagaaaaaagcgtgttgaattagattttaatacgagattggcaattgcgaagtatttaaatgatggtgtttctattgctgaaattgcacgtttattaagtcgtgattatcaagtaataagtagtgaaatcaaaaagcgttcagttgatggagagtacaatcctctattagctgaagagcacgcaaagatgaagcgtagttatacgcaagaagatattgttaaacgtcgtgtaattgatgataaaacgaaagcttatattgaagaaaaattagctttaaaatggtcgccacgtcaaatatcaagccaaatagaaaaagatacaggtcaatatataagctaccctactatttatcgatatattcgtaaaggtattgtgaaagtaaatgtagagcgagatatgcgccgttcaggtaagaagtacaataaatcaactgaaaagcgtggtaaattagatgttggaaatcgtgttataaggtatcggctcaaaaagtattaa

SEQ ID NO: 411349 - DNA, 432 bp, Staphylococcus aureus
gtgattgagcgtaaaactcgttatttatatgctcgttgcctgccaacacgacaagctaaagtagtatgtgcagagatagttaatatactcaaagatttagagcctaaaagcattactatggatagaggaaaagaatttgcgcagtttgaaatgattgaggaagaattaaagtgtagtatttattttagtgatttaggttgtccgtatcaacgtggttctattgaaaatgtgaatggtttattacgacagtattttccaaaaggtacagatttttctatggtaacaaaaaaggctttagatttagcagtagaacaaattaatacgcggccacgtatgatatttgactatttaagtgctagtcaagtgttagaaaatgaattgagtcaatatgatagcattaagtgttatgccagcacccctcgtgaccattaa

SEQ ID NO: 411350 - DNA, 1530 bp, Staphylococcus aureus
ttgacacatcgccaatataaagaagatactgcaaaaggaactatgagcgggcagtacgatgccaagcaaattattgaaacagaagaaaatcaagacaatacaccgcttgacattgattaccacacagctatagatggtgaaggtggttatgttgatggatacattgaaacaatagaagaaacggattcatcagctattgatatcgattaccatactgctgtggatagcgaagcgggtcacgttggaggatacactgagtcctctgaggaatcaaatccaattgactttgaagaatcgacacatgaaaattcaaaacatcatgctaatgttgttgaatatgaagaagatacaaacccaggtggtggccaagtaacaactgagtctaacttagttgaatttgacgaagagtctacaaaaggtattgtaactggcgcagtgagcgaccatacaacagttgaagatacgaaagaatatacaactgaaagtaatctgattgaactagtagatgaactacctgaagaacatggtcaagcacaaggaccaatcgaggaaatcactgaaaacaatcatcatatttctcattctggtttaggaactgaaaatggtcacggtaattatggcgtgattgaagaaatcgaagaaaatagccacgttgatattaagagtgaattaggttatgaaggtggccaaaatagcggtaaccagtcattcgaggaagacacagaagaagacaaaccgaaatatgaacaaggtggtaatatcgtagatatcgatttcgacagtgtacctcaaatccaaggtcaaaataatggtaaccagtcattcgaagaagatacagagaaagacaaacctaagtatgaacaaggtggtaacatcattgatatcgacttcgacagtgtgccacaaattcatggattcaataagcataatgaaattattgaagaagatacaaataaagataaacctaattatcaattcggtggacacaacagtgttgattttgaagaagatacacttccaaaagtaagcggtcaaaatgaaggtcaacaaacgattgaagaagatacaacgccgccgacaccagaagtaccgagtgagccaggcgaaccaacgccaccgacgccggaagtaccaagtgagccggaaacaccaacgccaccgacaccggaagtaccgagtgagccagaaacaccaacgccaccgacaccagaagtaccgagtgagccggaaacaccaacaccgccaacgccagaggtaccagctgaacctggtaaaccagtaccacctgccaaagaagaacctaaaaagccttctaaaccagtggaacaaggtaaggtagtaacacctgttattgaaatcaatgaaaaggttaaaccagtggcaccaactaaacaaaaacaatctaagaaatctgaactacctgaaacaggtggagaagaatcaacaaacaaaggtatgttgttcggcggattattcagcattctaggtttagcgttattacgcagaaataaaaagaatcacaaagcataa

SEQ ID NO: 411351 - DNA, 867 bp, Staphylococcus aureus; identical to SEQ ID NO: 407548

SEQ ID NO: 411352 - DNA, 363 bp, Staphylococcus aureus
ttgaagcgatttgtggcgacggtattattattactagtctttatatcaggatgtggtaatgataaatatgtgaaagaaatagatgaagcagttaaaattcaaaatcaaaaacaagaacaacttgccaaaaaaggcaacggtgatcgtgttgatcattttgaacgcaaagatgctaatatttatgtctatgataagggtaaaattatcattttagcttataaacctttgagtaatgatgatgaagtgcattattatgcatatgattttagtgatgaacgtgtatcatataagcaagattttgattcgagacgatattatcaacaacatgatgcggattatcatgaagaaaatatgacgaactag

SEQ ID NO: 411353 - DNA, 3039 bp, Staphylococcus aureus
gtgtggggcatcgttattttaggtggatatgagcaatttattaaaagtcatttacggaaaaaatatatagacggggtgagtaatatgcaagaacatttggtggttacacttgatggaaaagattatcttgtagaacctggtacgaatttacttgaatttattaaatcgcaagatacttttgtgccttcaatttgttataacgagtcgatgggaccaattcaaacatgtgatacatgtactgttgaaattgacggtaaaattgaacgttcatgtagtacggtgattgatcgtccaatgactgtaaatactgtgaacaatgatgtgaaagatgctcaaaaagaagcgcttgaccgcattttagaaaagcatatgttgtattgtacagtgtgtgattataataatggtgattgtgaaattcataacacaatggatgcgtggggacttcagcatcaaacgtatgaatataaagagaagccatacgaaaaagattatggcccattttatcgctatgatccaaatcaatgtatcttatgtggccgttgtgtagaagcatgtcaagatattgaagtaaatgaaacaattagaattgattgggatcgtgagcatccacgtgtcatttgggataatgatgtaccgattaatgaatcgtcatgtgtatcttgtggtcaatgcgcaactgtatgcccatgtaatgcgatgatggaagttaacatggaaggtaatgcgggttatatgactgatacggaacctggttcattagcggcaatgattgatttaactaaaaaagcagaacctggttatggtccactatttgcaatctcagattcagaagcagaaatgcgtaaagagcgtattaagaaaactaaaacagtgtgtacatattgtggtgtgggctgttcatttgaagtttggactaaagatagagaaattttaaaagtacaaccatcacatgattctccagcaaataaaattgcgacttgtgttaaaggtaagttttcatggggacatattaattcagatcaacgcttaactaaaccattagtaaggaaaaatggtgagttccatgaagtagagtgggatgaagcattaaacgtcattgctgataactttacatctattaaagaaaagcatggcccagatgcattatcattcatttcttcttctaaagcgacgaatgaagaatcgtatttaatgcaaaaattagcaagacaagttattggcacaaataacgttgataactgttcaagatattgccaagcacctgcaacaaaaggcttatttagaacggttggacacggcggtgactcaggtagtattgaagatttagaaaaagcagcaatgtctgtattgattggtacgaatacagccgaagcacatccggttattgcatcacgcatgaagcgtgctcaaaaattatttggacaaaaaatacatgtgtttgatattagaaaacatgaaatggctgaacgcgcagatcgtttttatcaaccgaaaccaggtacagatttggcttggttaagcgcagtgacgaaatatatcattgatcatgacttacacgataaagcctttatcgaagagtgggttgaagattttgatgaatattacaagtcattagaaacatttacaatggcattcgctgaagaggctactggtattccagaagcagagttgattaagttcgctgaagaatgtgccaaagctgagtccgttgtcatttgttgggcaatgggtatcacacaacaagacattggtagtgactcaagtacagcgatttcaaacttattattagtaacaggtaattatcgtcgtcctggtactggtgcgtatccattacgtggacataataatgttcaaggatgtagtgatatgggaagtatgcctgataagattactggttaccaaagtattgaagcggatgatattcgcgctaaattcgaaaaagaatatggcgttaaattgaatccaaaagctggtaaagataatcatgaaatggttgaaggtatccatgatgggcaaattcactcattgtacttatatggagaagatactggaattgtagattcaaatattaactttgtacaagctgcatttgaaaaattagatttcatggtagtccaagatgaatttttaacatttacagcaacatatgcagatgttgtattgccagcaagtccttcattagaaaaagatggtacgtttacgaatacagagcgacgtattcaacgtttataccaagcattgaaaccattaggtgattctaaacctgactggaaaatattccaagcaattgctaataaattaggcttcgattggaattacaagcatccaagcgaaattatggatgaaattgctagactaacaccattatatgctggcgtaagctacgaacgtttagaaggatttaatagtttacaatggcctgtgcatccagatggtacagatgaaccaatactttatttagaaggatttaatttcgataatggtaaagcaaaattattcccattatcatttgataattactttaagcaagatgaagtatatgatattcatgtaaacaatggtagattgttagagcacttccatgaaggtaatatgacttatcaaacaccaatgattaaatacaaagtgccacgtgcatttgttgaaatttctccagaacttgctgaagatagaggcattcatgaaggtgcagaagttaagttgatatctgaaacaggagaagcggtattacaagttcacgtgacagatcgtgttaaaggtaaagaaatctatattccattaaataatgatgcgatggaaaatggagatctaggcgcaattaacttattaactaatagtgatgttgatcaatacacggatacaccatcttataaacgtacaagctgtcgtttggaggtaattacgaaacgtggtaagtcaccgttgaaccctaataatttccgtgtcaataaaaaacgtcatccgcagtacagtgttcaagtacagaaaaaatgggaacgtccagattatgttttcccgggaaatcaggtggataaataa

SEQ ID NO: 411354 - DNA, 798 bp, Staphylococcus aureus
atgacagataaaacattacagcaaatagataagttaatatgttcatggttgaaacaaatagacaatgttattccacaattaattatgaagatgactacagaaaccaagcgtcatcgatttgatttagttacaaatgttgataaacagattcaacaacaatttcaacaatttttagcaacacattttccggaacaccaactattagcggaagaaaaaagtaatgaaatgattacgaatgaaattaatcatttatggattatggatcccattgatggaactgccaatttagtaaaacagcaagaagattattgtattatattggcgtatttttatgaaggtaaaccaatgttatcgtacgtatatgattatccgcataaaaagctttataaagcaatacgaggagaaggtgctttttgtaatggaattaagatgaaagaaccaccatcgttaaaattggaagacgctattatatcgtttaatgcacaagtgatgaatctggatacggtgcaagatttatttgacgcctcatttagttatcgtttagttggtgcttgcggattagattctatgcgagtggcaaaaggtcaatttggggcacatattaatacaaatcctaaaccttgggacattgctgcacagtttttatttgcagaactattgaatctaaaaatgacaactttagatggtaaggcaattgatcatttaaagggtgcaccttttattataagtaataaagcatgtcatgaaacggtacttaaaattttaaatgcaaatggtggttatcaaaaatacagatag

SEQ ID NO: 411355 - DNA, 738 bp, Staphylococcus aureus
gtggaaaatgaaaaaaagaaatacacgtttaaagatatagcatggagagatttgcttataattccaattataggtgtattatcatttgcactcacaattgcagcttacataggaccaattttgttcaattattatgaaatcgatagtaatctgatatttgtatcgactatcacacaagctttagcatatacgattgggattggcgcattttatttatttcatttaaaagtgatgccatcaaggcttcgagctggttttgcgtatatcaaaaaatattggcttagattgtcaataacgtatattattgctctcatcttaatttatacatatgaatatatgacacagtttctacctaaacatttgcaatatagtgaaacagccaatgaacttgagctaaataaaatgtttgaagtgcctgcatttttacctgtagcattcttattaattgtgattgtaggtccaatagttgaagaaatcgtatttagacatattttaattggagaattaggtaagaagtttaattttatagctatgagtattgtttcggtgttcttatttgcatttattcatgtgactgatgcaaagtcgccgtttgagtttggtccatatctcatactatccatcatattagttttcacttatttaaaatctggaagaaacctaggttcaacaattgcattacatatagcaaataattttgtttctttcgttatatcagtaataagtatttatgcgtag

SEQ ID NO: 411356 - DNA, 357 bp, Staphylococcus aureus
atgttaaaacaaatactgccacgtgctacaaaaatatcggtaatctttgctgtagcatttttcatcataaattatatcggtatggaaaaacctgacatcctatatttagttggaagaactattattgcaacacttgctttcatactcatttgtcttacagtatttactattattaattctccagagcgcaagattaaactcggtacgactttaccgattgcattaattattggtatcattttcggcgccatatttttaacggtacaaatcggtgtcatcactgggttaatcatcggtgtgattgctacgtttatttgggaattgattgaaaaaaataaaggaggtcgttcatcatga

SEQ ID NO: 411357 - DNA, 1662 bp, Staphylococcus aureus
atgagaaaaattcaagcaaaaaaaggtttgagtattgagtgtaaaggttgggaacaagaagcagtacttagaatgttatacaacaatttagacccagaagttgctgaaagaccagaagatttagttgtttatggtggtattggaaaagcagctcgtaattgggaagcttttgaagcaatagagaaaacgttacgagaattagaatcagatgagacaatgttagtacaatcaggaaagccagttgctgtatttaaaacacatgaagaagcgccacgtgtattaatttcaaattcagtattagtgcctgaatgggcaaactgggatcattttaatgaattagataaaaaaggtttaatcatgtatgggcagatgacagccggtagttggatttatattggttctcaaggtattgtgcaaggtacttatgagacatttgccgagctaggtaatcaacactttaatggagatttagcaggcactgttacactaacagcaggtttaggtggtatgggtggtgcgcaaccgttagcaattactatgaatcatggggtagcaatttgcgtggatgttgatgaaacacgtgttgataagcgaattgatacgaaatactgtgatgttaaaacagctgatttagatgaagcattaaaattagcagaagaggcgaaagaacgtggagaaggattgtcaatcgggttagttggaaatgctgtagacatccatcaagcgattctagaaaaagggtttgaaattgatattattactgaccaaacaagtgcacatgacccgctaaatggatatgtgccacaaggatactctgtagaagaagcgaaagtattacgtgaaaaagatccgaaaaaatatgttgaactctcacaagcttcaatggcaaagcatgttgaattaatgcttgaattccaaaaacgtggcgctgtagcatttgattatggtaacaatattcgtcaagtagccttcaataacggagtgaaaaatgcttttgacttcccaggctttgtaccagcttacattagaccattattctgtgaaggtaaagggccattccgctttgctgcgttgagtggtgatccaaaagatatcgagcgtgcggatgaagaaatgcgcaaacttttcccggaaaatgaaaagttattaagatggcttgatttagctgaagaaaaaatctcatatcaaggactaccatcacgtattgcttggttaggctatggagaaagagcgaaaatgggcttagctttaaatcgtcttgtacgcgatggtgaaatttcagcgccaattgtgattggacgagaccatttagatgctggttcagttgctagtcctaaccgtgaaacagaaagtatgaaagatggtagtgacgcggttggtgattgggctgtattgaatgcactaattaacacagctgcaggtggttcatggatttcattccatcacggtggcggtgttggcatgggatattcacttcatgcgggtatggtggttgtagcagatggatcagagcgtgctgaaagaagattggaacgcgtattgacgactgatccaggtatgggtgttgcccgacatgttgatgctggctatgacatcgctattcaaacagctaaagaaaaaggtattcatattccaatgattgataaagcaggtgataagtaa

SEQ ID NO: 411358 - DNA, 1260 bp, Staphylococcus aureus; identical to SEQ ID NO: 407580

SEQ ID NO: 411359 - DNA, 654 bp, Staphylococcus aureus
atgatatcaattcacgcaatttcgacaggaaaaatccaagatttgccttatagctcgaaaagaccgatgcgctctgctttagataaaactaagatttcacaaacaacatggttatcttcaactggtttcactggtgatgaacaggcttataaagatcatggtgggccacataaagcagtttgtgggtttagtaaacataactatgcactgtatcaagatgatttaccttcactacctactcatgcgatgtttggagagaatttaacatttgattatttagacgaatctgatgtttactttggtaatcaatatcgtttaggtgaagcgttaattgaggtttctgaaattagagaaccatgctggaaaattcaagcaaaatataatattcctgatttagtgaagcgcatgtctacatctggtaaaacaggtttctatttccgggtattaaaacaaggctatgtatctccaaatgatcagctttacttaatacaagaagcaccaatcgaacatcgtttatctgtacaacagcttaatgacctatattataatgatagacaaaatcaagatatgttacgatatgcactaaacaatccatttctgtcaccaacaagacgcgataaacttcaaaaaatgtataacagaacattgaaataa

SEQ ID NO: 411360 - DNA, 1020 bp, Staphylococcus aureus
atgatagttgaagttgagcaccaaagacaaggtgtagatttaatcaaaattgataatgatgaaactaaaattatttttacgaattatggagcaagagtagtgtcttggaaatatcatgataataatattgttcttggaaatgttgttgaagcggatgaattttatcatagtaatccttttaaatttggtgcttctataggaagatatagcggtagaattgataatgctaaatttaagttgaaaggtaaagaatatcagttagaaaaaaacaacggcgaacatcatttacatggtggatgtcatggtttggacaataagttatttgattatgaaattagaaatgaaattgctcaaattaaagtgatatttaagacggtgttgaaatcagctgatgatcatttcccgggtgatatcgatgtgacgattacacatatttatgatgcggatcaccaatggtcgattgaatacgaagcagttgcatcagaagacacattgtttagtcctacgaatcatgtgtacttcaatttgaatcgagataataatgtcgttgataatcatcgcatttcaagtaatcaattagatatgtatgtattagatgagcgaaatattgttacaggtgatattctagatttacatgaagtgtttgaagataacaagataaaattgagtgatatttttacatcacaacatgcgcaattaagccaacaaatgacacgttttggtggtctcgatcacccatttacagttggtgaacataaaatgtatgttgaaaatcatgaatttatgttagaggtcgatacagatatgcctcatgttgtattctttacttttaatcagcctgatgagtgggatagtccatttaatatttataaaccacattctggttttacattagaaacacaatttttaccaaatgatattaatttatatggcgaaaaagcaccgtcaattttaaaagctggtgaagtgttcaattcgaaaacaagtttccgtatcgaagaaaaagtagaaaatgattaa

SEQ ID NO: 411361 - DNA, 900 bp, Staphylococcus aureus
atgggacttgtaattgagcatgttacgaaacgttttggtaagatgacggcagtaaatgatatgtcattagagttagaatcaggcaaaatgttaggttttctaggaagaaatggtgcaggtaaaacaacgacatttcgtatgattttaggcttaagtgaaccaactgaaggacacattacgtataacggtaaaaaactagataaaacaatgtacaatcgtattggttatttaccggaagaacgcggtttacatgggaaattgacagttgaagaagaattgaaatatttggcaactttaaagggaatgtcaaaaacagaaatacaacagcaaatatggtattggcttgagcgttttgatattactgaaaaccgtaaaaaacgaattgatagtctatcaaaagggaatcaacaaaaaattcagctgttagcaagtatgttacataaaccagaattactaatattagatgagcctttcagtggtctagacccagttaatgttgagttattaaaagaagcagttaaagacttaaatgattggggcagtacaatcgtttatagttctcaccgtatggaacatgttgaagaattatgtgatgatgtttgtattttagataaaggtcaacttgttgtttctggtgatatcaatcatgtacgtgcatctaatggtaacaagaaagttgtcattgaatcagaaacaacactaccagatttaacacacattagaggcatcattcatagtgaaaacatgaagcaaggtcttcaattgacgattgagaatgaagacgtagccaaagatatttatcaagttgtggcacatcaaggttatgttaaacgattccaagttgtagaaccatcattacaagatatattcattgagaaggttggtggcaaggatgcataa

SEQ ID NO: 411362 - DNA, 1209 bp, Staphylococcus aureus
atgatagaacttaatgcaattacaacattatgtttagcctgtatactttacttacttggtaaagctatcgttaatcacgttaattttttaaaacgcatttgtataccagcaccagtgattggcggcttaatctttgctattttagttgcggctttggattcatttggcatggttaagattaaattagatgcttcattcattcaagatttcttcatgttagcattctttacgacaatcggtcttggtgcatcattgaaattatttaaattaggtggcaaagtcttgctattatactttatgttttgtgctatcatttcagttattcaaaacatagttggtgtatcactagcaaaagtattaaatattaaaccgttactaggattaacagctggttctatgtctatggaaggtggtcacggtaatgctgccgcttatggtaagacaattcaagatttaggtattgattcagcactgacagcggctcttgcagctgcaactttaggtcttgtatttggagggcttatcggcggaccagttgtaaaatttttgatcaaacgttataacttaaagcctcaacatagtgacgatacatttaaagattatagccaagtagcatataacgaacatttacatagtaaatttaatgccactgaagtattcttcattcaatttacaatcgttgtattctgtatggcagttggaagttatttcagtcatttgtttacagctcaaacagggattaatgttccaatttacgttggctcattatttgtagctgttattgtccgaaatatctctgaaagttttaattttaatattgtagatttaaaaattactaatcaaattggcgatgtcgcattaggtattttcttatctcttgcgctaatgagcattcaattaatcgaaatttataaacttgctatacctcttattattatcgttttagttcaagttgtcgttatgattttatttgctgttttaattttatttagaggtttaggaaaagattatgatgctgcagtaatggtaggtggttttatcgggcatgggcttggtgcaacgccaaatgccatggcaaatttagatgttatcactaaaaaatatggaaactcacctaaagcatatttagttgtacctattgttggtgcattcttaatcgatttaataggtgttatagtcattatgggattcattcaatggtttagttaa

SEQ ID NO: 411363 - DNA, 1932 bp, Staphylococcus aureus
atgactacgaccttcattataagttacattgttttagcgctcattattgttggtgtgatcaatttatttttaataagatctagaagaaaagcaaaacgccaacaaaaggaacaacattttgcaacacgtcaatcaaatcaatctaaatttaaagcaagtgatttagacaaaactactgatcagtcgtcacaacatacggctcgtgaggaggcacgtattgacaatcaagataatcagaatcaagttagtctaaacaaacagacagaggggtctgaacaagatcaagaattattcaatgataataaggatgatgtagcatttgctgctaaaaatcctgaatcagaagaatataaagtaaatgagaaaattaaaaaagaacataaaaactttatttttggtgagggtgtttcacgcggtaaaatattagcggcattattattcggtatgtttattgcgattttaaaccaaacattattaaatgttgctttgccaaaaattaatacggaatttaatatttctgcgtcaacagggcaatggttgatgacgggattcatgttagtaaatggtattttaataccaattacggcgtatctatttaataaatattcatatcgaaaattatttttagttgcgttagtactctttacaattggttcattaatatgtgcaatttcaatgaatttcccaatcatgatggttggacgtgtattacaagccattggtgcaggtgtactaatgccattaggttcaattgttattattacaatttatccacctgaaaaacgtggtgctgccatgggtacaatgggtatcgcaatgattttagcacctgcaatcggcccaacattatcaggttatattgtacaaaattaccattggaatgtgatgttttacggtatgttcattatcggaattattgcaatcttagttggttttatatggtttaagttatatcaatatacaacaaaccctaaagctgatatcccaggcatcatttttagtacgattggttttggtgctttgttatacggcttttcagaagcgggtaacaaaggctggggttctgttgagatagaaacaatgtttgcgattggtattatctttattattctatttgtaataagagaattaagaatgaaagcaccaatgttgaatttagaagtattgaaatttccaacatttacactaacaacagtaattaatatggttgtaatgatgagcttgtatggtggtatgattttattaccaatttacttacaaaatttacgtggtttctcagcattagattccgggttgttattattacctggttctctaattatgggtctactaggaccatttgctggtaagttgttagacacgattggtttaaaacctttagccatttttggtattgctgtcatgacttatgcaacatgggaattaactaaattgaatatggatacgccatatatgacaatcatgggcatctatgtactacgttcattcggtatggcatttattatgatgccaatggtaacagcagctattaatgcgttgccgggacgacttgcctcccatggtaatgccttcttaaatacgatgcgtcaactagctggttctataggaacagcaatcttggttactgtaatgacaacacaaactacacaacatttatcagcttttggggaagagttagataaaacgaatcctgttgtacaagatcatatgcgtgaattagcatcgcaatatggtggtcaagaaggcgcaatgaaagtgttattacaatttgtaaataaactagcaacagttgaaggaattaatgatgcatttatagttgcaacgatatttagcatcatcgctttaattttatgcttatttttacaaagcaacaaaaaagcaaaagctacggctcaaaagatagacgcagataatagtatcaatcatgaataa

SEQ ID NO: 411364 - DNA, 1374 bp, Staphylococcus aureus
atgtttaaaacactctatgctagaattgcgatttattccattacggttattttatttagtgcattaataagttttgtattaacaaatgtttactatcattataatttaaaagcatctaatgacgcgaaaatcatgaagacgcttaaagaagcaagacaatatgaacaatcagctaaaccaacgcacattcaacaatatttcaaacatttagggcaaatgaattaccaaataatgaccgttgatcaaaaaggtcataagacattttatggtgaaccttttagagaagatactttatcacaaaatgctattaacaacgtattaaataataaagattaccatggtattaaagataaaccattcgcattattcgtaactggatttttcgacaatgtaacagacaatactgttggtattaactttaagacaaacgacggttcaatagcagtattcatgcgtccagatattggagaaacatttagcgagtttagaacattcttagccgtcttgttaatgttgttattatttatctcgatttcattagttatcgcatcaacctattcaatcattcgtccagtaaaaaagttaaagctagcgaccgaacgcttaattgatggtgattttgaaacacctatcaaacaaacacgcaaagatgaaattggaacattacagtatcactttaataagatgagagagtcattgggacaagttgatcaaatgaggcagcattttgtacaaaatgtatctcatgaaatcaaaacaccattaacacatattcatcatttattaagcgagttacaacaaacttctgataaaacattacgacaacaatatataaatgatatttataccattacaacgcagctgagcggattaacaactgaattgttgctcttatccgaattagataatcatcaacatttattattcgatgataagattcaagtcgatcaactcattaaagatatcattcgacatgaacaatttgctgctgatgaaaagtcgttaatcattttagctgacctagaatcaatcgatttcctaggaaatcaacgtttgttacatcaagcattgagtaatttattaataaatgctattaagtatacagatgttggtggtgccattgacatcgctttgcaacatagtcacaacaacatcattttcacaataagtaatgatggttcaccaattagtccacaagctgaagcacgtttatttgaacgtttctataaagtgagcaaacatgataatagcaatggtttaggtcttgcaattacaaaatccatcattgaattgcatcatggtacaatccaattcacacaaagtaacgagtatgtaactacctttactattacactgccaaataattcacattaa

SEQ ID NO: 411365 - DNA, 564 bp, Staphylococcus aureus
atggatcaaacagcttttacggatagtcgtgtaacgaaaacgataaatcgcatacatgatggaatgataaatctattaaaaacgaaggcatataatgatataactgttaaagatatatgtgaaaagagtcaaataagtcggacaaccttttatacacattacaaaactaaagatgattttatatacagctatcttaatacattgttaaaagaagcaaaaaagaaatttcttaaaagtgaaactctgacacaagcaatatttttaaaaaagatgatttatttttggctaagcgaaggtcaactcattttaatgttattaggtgatgagagtgcttataaattacatcaagtcataaaaaaatcactacaacaacgtatcgaaattaatgttgtactagtattaaatacaaaaatgttaacgacgaaggaaaagtattttttacttatttttatgagtaatgcaatcattggtgtgttacaagattgggtcaaacgaggatataaagagagtcctaaagaagtagcagaaattatgaataaaatatttgaaaatgcatttcgttag

SEQ ID NO: 411366 - DNA, 729 bp, Staphylococcus aureus; identical to SEQ ID NO: 407573

SEQ ID NO: 411367 - DNA, 1083 bp, Staphylococcus aureus; identical to SEQ ID NO: 407572

SEQ ID NO: 411368 - DNA, 1674 bp, Staphylococcus aureus
atgattaaacagataaatgtttctaatatgcaaaagtttgaatctcaattaatgaaagctcagtctgaaggttatacacatgtcgttccatatgccaatgagataatgatttatcaatctatgttagatgcggttcaattataccctaagtctatcgtggttgattatactgtggatggacaatacaaaaatgattgtcactatttcggtcaatcatcgattaacattgccgattgggctcaaaacaataattattatcctaacctaatatatgcgattcaacagactcttgatttaatacattattactctgtagaaacgattttcgatttagctttattgacacttctgaaaggtgatttatcaatcgatggtcatgtcgtttttgattttaaagcccctttagcaacaagtgcttcattatgggaaactattaaaactattgaagattttgatatgatgtctcagttttatttgaataaaatggcttatattgatcatcatcctataccttttcgcaacctttttatcgaggattcagaacaacttaattcgccagacaattggttgtattctaccaagtttatgctacctaaatggttatataaaatagcaaagcaacgtgctgataacaaacaattacaaaacttcggcttgtatacgaagcaaccaaacgttttaaaagatcacatcgtttttatcggtgatcatcatcaatatataggtaattcaaaatatttatttacttacttcgttaaacataacccaatgactgcctgttattttgttactgacgatcgtcgcggaccacatttcatatcacctaagtctgaaaaagctgacgaattaattaacagcgcacgcgtagttttagttgaaaatgatatacctgaaacgttacaaccaaacggtactttaattcaattacatcaaggcacaccaataatgcaattatttttagatagtaaagaacctattaaaaatatagaaacacctttttatcgtgctaaaaggtataatcgctggttgcaattcgattatgttatacattctgctgatgatattagccacttttatcaaacggcttttcctagtcaccaagcaaatgtattggcttatggtaatcctaaacaccaatacttactacaaaagcgtaacgaaagtactactcaacaacagtataagaaatcgtttaaaataaatgatcaaaaaccagttttattatacgcacctattggattagtgagtgcgcaacaattaccactatcagatgctttattcaaagcctatcatgttgtggttcagggggttgacgaagcgatgttaccagaagaggcgcttgttgcaccaaagtatcttagtgctcaagacttaattctaatgtctgatgtcgttatcactgattactcaaatataatatttgatgcgatggctatagacaaaacagtagcattatatactccaaatcacagtcaatatattgagtctcaaggtgttaacgaagatatttggcgtcatctatcaaaaatttggtatacagaccgacaattattaattaataatttaatttcccaggcaataccagtgattaaatatccacaaatacaacataaagaacaaccattagaatctatttcacaacttatattgtctaagatgacatctaatcaatag

SEQ ID NO: 411369 - DNA, 177 bp, Staphylococcus aureus; identical to SEQ ID NO: 407567

SEQ ID NO: 411370 - DNA, 363 bp, Staphylococcus aureus; identical to SEQ ID NO: 411352

SEQ ID NO: 411371 - DNA, 1440 bp, Staphylococcus aureus
atgtcgaagaaacaaaaattaacgatgattattactatgctgatgggtggattttttggattattaaatgaaacactattagtgacggctttaccaagtattatgaaagattttgaaatttcatatacacaagttcaatggctgacaacagcttttttattgactaatgggattgttattcctttgtccgcgcttgttatacaacgttatacaacaagacaagtgtttttagtgggtatttctatctttttcttaggtacattactcggcggtttgagtccgcactttgcaacattattagttgctagaattattcaggcgttaggtgcaggtattatgatgccattgatgatgacaacgattttggatgttttccaaccgcatgaacgcggtaaatatatgggaatatttggtttggtaattggtttagcaccagctattggacctacactttcaggttaccttgttgaatattttaactggagatcgcttttccatgttgtcgctccaattgcagctgtgacatttttaattggatttaaaacgataaaaaatgttggaactacaattaaagtacctattgattttatttctgtcattttttctgtactaggtttcggcgggttattgtatggaacgagttcaatttctgaaaaaggttttgataatcctatcgtattagtatctatgattggtggtattgttttagtcgcattatttgtattacgtcaatatcggctatcaacaccattattaaattttgcagtatttaaaaataaacaatttacagttggtatcattattatgggtgtcacaatggtatcgatgattggttcggaaacgattttaccaatttttgtgcaaaatttattgcatcgttcagctttagattctgggttaactttattaccaggagcaattgttatggcatttatgtcgatgacttcgggtgctttatatgaaaagtttggtcctagaaagcttgctttagtaggtatggcgattgttgttattactacggcttattttgttgtaatggatgaacaaacatcaacaatcatgttggcaacggtttatgcgattcgaatggttggtatcgccttaggtttaattcctgttatgacgcatacaatgaatcaattaaaacctgaaatgaatgcacacggttcatctatgacaaacacagtacaacaaattgctggttctatcggaacagctgcattaattactattttatctcatgcaagtaaaaacttttctccaactatgtcagactataatggcatgaacaaaattgagatgatgaatcaaattaaaattgatacgatgttacatggttatcacgctggatttttatttgcattattgattacagtgattagtttcttttgttcatttatgttacaaggaaagaaaaaagaagttgattcacatcaataa

SEQ ID NO: 411372 - DNA, 1734 bp, Staphylococcus aureus
atgtttaggattacatttaagattttaaattgggtatcgccatataaaacaaggatgattttaggatttatcatgtcatttttaaatgcaatatttattgcactgcctatttttttggcttcacaaatatttaataatgtagtatctcataaatctatatatggaaaagatatttttaatgttgtaatcatcatgattatattagtacttggtcggtttattacagcatatttgaaaagtaaaaatcaggaaagtattgcttatgaaatgagtgcgaatgaacgtttaaatattggtaataaattaaaaaacgttcccttaggatattttaatacgcatcactcaaatgagttaacaactattgttactacagatttaacatttctagaaaactttgccatgaaaatggtggatattgtcattaatggatacatattaatttcagtacttatcttgtctttattggtcgtatcatggcaagtagcattattagcatgcattggtgtattattatcatttttaactattcaattattggaaaacaagagtaaaaaaaatgcgccaacgtatcattatgcacaaaatcaattaattgaaaaagtggtagaagttatccgtggcattcaagtgattaaatcattctcgaaagaaaatgcaagtcttagaagttttaatcgagctgttaatgagagtaaacgtgttaatacaaaaattgaaatgcagtacattccatttaatttactacatttacttagtttgaaagttacttcgatattaattgtgttagttgcgtgcttattatttatacataatagtattgatttacctacattcattatgatttcaattttttcatttgtaatttttgatagtgttgaaaatattaatagtgcagcacacgtactcgaaataattgatatgacattagaagacattgaaaagataaaaagtgcgccagagttagataagaagggaaaagatttaacgattgaaaatgatgatatcgcttttgaaaatgtgaatttttcatatgatgacaaacaggtgataaagaatgtaagttttgacattgctgcaaacacttcaacagctatcgtcgggccatctggaagtggaaaatctactttatgtcatttacttttacgcttttacgatgttaatgatggatttatacgtattggtggtattgatattaaagatttgaaattaagttcgctgatgtcacaaattagtgcagtatttcaaaaggtatatttatttaatgacacgattgaaaataatatattatttggtaatccagatgcgacggaagaagaagtcattcgtgcagcaaaacaggcatgttgtcatgatttcataatgaagttacctgatggatataaaacagtattacatgaaaaaggcaataatttatctggtggagaaagacagagaatttctatcgcgcgggcaattttgaaagatgcaccaattattattttagatgaagcaacagcaagtattgatcctgaaaacgaacagctgattcaaacggcaattaatgaattaagtaaaggcaaaacagtaattacaattgcacataaacttgaaactattaaaaatgcagatcagattatagtgctcaatgaaggtgaaataattcaaaaaggtagtcatgatgaattaattcgaaaaccaggaatgtatcaagactttataagaataaaaagtaaatcagcaggctggaaattataa

SEQ ID NO: 411373 - DNA, 942 bp, Staphylococcus aureus
atgaagaaaattaaatatatagttgtcgtgcttgtcttatcgcttaccgtattatctggatgtagtttgcccggactaggtagtaagagtacggaaaatgatgtcaaaattacagcattatcaacgagtgaatcacaaatcatttcacatatgctgcgattattaatagaacacgatacgaagggtaagataaagccaacattagtaaataatttagggtcaagtacgattcaacataatgccttaattaatggggatgctaatatatcaggtgttagatataatggcacagatttaacgggagttttaaaggaagcaccaatcaaagatcctaagaaagcaatgatagcaacgcaacaaggatttaaacagaaatttgatcaaacgtttttcaattcgtatggttttgcgaatacgtatgcctttatggtaacgaaagagactgctaaaaaatatcatttagagacggtttcagacttagcaaagcatagtaaagatttacgtttaggtatggatagttcatggatgaatcgtaaaggcgatggctatgaaggatttaaaaaagagtatggtttcgactttggtaccgtgcgaccaatgcaaataggtctcgtttatgacgcattaaactcagggaagttagacgttgcattaggttattctacagatggtcgaattgcggcgtatgatttgaaagtacttaaagatgataaacaatttttcccaccttatgctgcgagtgctgttgcaacaaatgaattattacgccaacacccagaacttacaacgacgattaataagttgactggaaagatttcaacttcagagatgcagcgcttgaattatgaagcggatggtaaaggtaaagaacctgctgtcgtcgcagaagaatttttgaaaaaacaccactattttgataaacagaaaggtggtcataagtaa

SEQ ID NO: 411374 - DNA, 1188 bp, Staphylococcus aureus
atgtcaatcatgcgtttatttactttcattttaagtattttcatagtaggaatggttgaaatgatggttgcaggaattatgaacttgatgagtcaggacttacatgtatcagaagctgtcgttggtcaattagtgacaatgtacgctttaacatttgcgatatgtggacctattctggttaaattaacgaaccgtttttcatcaagacctgtattattatggacattacttatatttatcattggtaatggcattattgctgtagcgccaaatttttcaatattagtagttggtagaattatctcatctgcagcagcagcactaattatcgtaaaagtattagctattacagcgatgttatcagcacctgaaaatcgtggcaaaatgattggacttgtctatacagggtttagtggtgccaatgtttttggtgtaccaattggaacggttatcggcgatttagtaggttggcgctatacatttctattcttaattattgtgagtgttattgttggcttcttgatgatgatctatttaccgaaggatcaggaaatacaacgaggccctgtgaatcatgaggcaccatctcatgaaaatcatgttacttcgaaaatattaagacctgctgaagtagcaaaatatttaattattacgtttttagtattgattgcaaactcagtgacattcgtctttataaatccacttattttatctaatggtcatgatatgtcattcgtttcattagcacttctagtaaatggaatcgctggcgttattggaacatcattaggtggtatattctccgataaaattacaagtaagcgttggttaatgatttctgtttctatttttatcgtcatgatgttacttatgaatttaatcttacctggttcaggtctattgttagcaggactgtttatatggaatatcatgcaatggagtactaatccagcagtacaaagcggtgtgattcaacacgttgaaggcgacacaagccaagtaatgagttggaacatgtctagtttaaacgctggtattggtgttggaggcattattggaggcttggtcatgacacatgtttctgttcaagctatcacgtatacgagtgccatcattggcgcattaggattaatcgttgttttcacattgaaaaataatcattatgctaaaacattcaaatcatcataa

SEQ ID NO: 411375 - DNA, 870 bp, Staphylococcus aureus
atgataattttaaaacgtttattacaagataagggtgcagtgattgctttaggcattattgtattatatgtctttttaggattagcagcaccacttgtgacattttatgatcctaaccatatcgatacagcaaacaaatttgctggcatgagttttcaacatctactaggtacggaccatttaggtagagatattttaactaggttaatttatgcgattagaccaagtttgttatatgtctttgttgcgctatttgtttctgtacttattggatctattttaggattcttatcaggatatttccaagggtttgttgacgccttaatcatgcgtgcgtgtgatgttatgttggcattcccaagttatgttgtaacgttagcattgattgcattgtttggtatgggtgccgaaaatattatcatggcatttattttgacgcgttgggcatggttctgtcgtgttatacgtacaagtgttatgcagtacactgcttctgaccatgtaagatttgctaaaacaatcggtatgaatgatatgaaaattattcacaaacatattatgccgttaacattagcagatattgctatcatctctagtagttcgatgtgttcaatgatcttgcaaatatctggcttttcatttttaggattaggtgtcaaagcgcctactgcagagtggggcatgatgcttaacgaagctagaaaagtgatgtttacacatcctgaaatgatgtttgcgccaggtattgccatagtgattatagtgatggcatttaacttcttatccgatgctttacaaattgccattgatccccgcatctcttctaaagataaacttcgttctgtgaaaaaaggagtggtgcaatcatga

SEQ ID NO: 411376 - DNA, 1599 bp, Staphylococcus aureus
atgagaaaactaactaaaatgagtgcaatgttacttgcatcagggctaattttaactggttgtggtggtaataaaggcttagaagaaaagaaagagaataagcaattaacgtatacgacggttaaagatatcggggatatgaacccgcatgtttacggtggatcgatgtctgctgaaagtatgatatacgagccgcttgtacgtaacacgaaagatgggattaagcctttactagctaaaaaatgggaagtgtctgaagatgggaagacatacacgttccatttgagagatgacgttaaattccatgatggtacgccatttgatgctgacgcagttaagaaaaatattgacgcagttcaagaaaacaaaaaattgcattcttggttaaagatttcaacattaattgacaatgttaaagttaaagataagtacacggttgaattgaatttgaaagaagcatatcaaccagcattggctgagttagcgatgcctcgtccatatgtatttgtgtctccaaaagactttaaaaacggcacaacaaaagatggcgttaaaaagttcgatggtactggtccatttaaattaggtgaacacaaaaaagatgagtctgcagactttaacaaaaatgatcaatactggggcgaaaagtctaaacttaacaaagtacaagcaaaagtaatgcctgctggtgaaacagcattcctatcaatgaaaaaaggtgaaacgaactttgccttcacagatgatagaggtacagatagcttagacaaagactctttaaaacaattgaaagatacaggtgactatcaagttaagcgtagtcaacctatgaatacgaaaatgttagttgtcaattctggtaaaaaagataacgctgtcagtgacaaaacagtcagacaagcgattggtcatatggtaaacagagataaaattgccaaagaaattttagatggtcaagaaaaaccagcaactcaattatttgcgaaaaatgtaacagacattaatttcgatatgccaacacgtaagtatgaccttaaaaaagcagaatcattattagatgaagctggttggaagaaaggtaaagacagcgatgttcgtcaaaaagatggtaaaaaccttgaaatggcaatgtactatgacaaaggttcttcaagtcaaaaagaacaagcagaatacttacaagcagaatttaagaaaatgggtattaagttaaacatcaatggcgaaacatcagataaaattgctgaacgtcgtacttctggtgattatgacttaatgttcaaccaaacttggggattattgtacgatccacaaagtacgattgcagcatttaaagcgaaaaatggttatgaaagtgcaacatcaggcattgagaacaaagataaaatatacaacagcattgatgacgcatttaaaatccaaaacggtaaagagcgttcagacgcttataaaaacattttgaaacaaattgatgatgaaggtatctttatccctatttcacacggtagtatgacagttgttgcgccgaaagatttagaaaaagtatcattcacacaatcacagtatgaattaccattcaatgaaatgcagtataaataa

SEQ ID NO: 411377 - DNA, 822 bp, Staphylococcus aureus
atgaatcggcaggttatagaattttctaagtataatccttcggggaatatgacgatacttgttcattcaaaacatgatgctagtgaatatgcatctatcgccaatcagttgatggccgcaacacatgtatgttgtgaacaggtaggctttatagaatcaacacaaaatgatgatggcaatgattttcacttggttatgagcggtaatgaattttgcggtaatgcaacgatgtcatatatacatcatttgcaggaaagtcatttgcttaaagaccaacagtttaaggtgaaggtatctggctgttcggatttagtgcaatgcgcaattcatgattgccaatactatgaagttcaaatgccacaagcccatcgtgttgtgccaacaacaattaatatgggtaatcattcatggaaagcaatagaaattatttatgaaacatatgtacattatgtgattccagttaatcaagtaacaacagaaattcaacatttggttgaaacatatgtgcgtgagcaacaatggaatcacaaatataaaacagtaggtatgatgctttttgatgaacaacgtcaatttttacagccattaatctatataccagaaatccaaagtttaatttgggaaaatagctgtggttctggtacagcatcaattggggtttttaataattatcaacgtaatgacgcatgcaaagattttacagtacatcagccagggggcagtattttagtgacatcaaagcgatgtcaccaattgggatatcaaacttcaattaaaggacaggttacaactgtagcaacaggaaaagcatatatagaataa

SEQ ID NO: 411378 - DNA, 768 bp, Staphylococcus aureus; identical to SEQ ID NO: 407563

SEQ ID NO: 411379 - DNA, 819 bp, Staphylococcus aureus; identical to SEQ ID NO: 408733

SEQ ID NO: 411380 - DNA, 1539 bp, Staphylococcus aureus
atgacatctaaagaaagacaaaaaggctctatcgtcaatagtttcttaaatagtgttgaaaaaattggaaataaattaccagatccaagtgtattattctttttaatgtgtgtaggtctagcaattttgacatggcttgtctcactatttaatgtatccgttaagcatccaggtacacatcaaactatccatgttaaaaatattttaagccatgatggttctgcgatgattatgaatgatgccataaaaaatttctcagaatttcctgcattaggtttagtacttgctgttatgattggcattggtgtcgcagagaaaacaggatacttcgacaagttaatgatttctgttgtgaatcgcgcaccacgtttcttaattttaccgactattattttaattggcattttaggaagtacagctggtgatgctgcgacaattatcttgccaccgcttgcagcaatgctttttattaaaattggctatcaccctattgctgggttaacgatggcatatgcttccgctgttggaggatttgcagcaaatatagttgttggtatgcaagatgctttagtctattcatttacagatccagcaacacgtatcgtttcagagtctattaaaacaaacgttgctatgaactggtactttatcgcagcgagtgtcgttgtattacttcctacgatattgctagttacaactaaactgattattcctaggttaggtcaatatgatgatcgtttaatgcatgatgatcatgaagaaacgtcttcacatattactgacaaagaagcacatgctttaaaatgggcaaatatcagtttcatagtcacaattattttattaattattacagccattcctgaacatagctttttaagaaatgctaaaacaggtagcttactagacgatgcgccattaattaacggtgtcggattaattattcttgttgtatttttagtacctggattagtttatgggattttaagcaaagaaattaaaaatacaaaagacttagggaaaatgtttggagaagctgtaggatcaatgggtacatttatcgttatcgttttctttgcagcacagctactcgcgtttttaaaatggagtaatttaggcattattgctgctgttaaaggcgctaaattgttagaacatcaaaatgggattgtactaattttaggaattattattctaagtgcattagtaaatttattaattggtagtgcatctgctaaatggggaattttagcacccattttcgttccaatgctcattattgtaggatttcatcccgcatttacacaagtcatttaccgtgtaggcgactcgattaccaatccaattacaccgatgatgccgtatttacctttattattaacttatgcacaaaaatacgataaacgcatgaagttaggtgctttactttctagtttaatgccgtattcaattgcgctaagtattgtgtggacagtatttgtcattatttggttcttattaggtatccctgttggaccaggtggaccgatattcgttaaatag

SEQ ID NO: 411381 - DNA, 423 bp, Staphylococcus aureus
atgccgtataattacaagaaacaaaatggagagttaatgtctgtaatgagccaaggtgaaaagtttattcatcaatcacccgttaatgatgaacttagtgcattgattaagttattaatttcaaaaattaacggttgtcattattgtgttgatatccataaaaaagaattaaaggaattgggtgtaacacaaatgaaaattgatgaagtattgagttttagacatttagatttatttactgatcaagaaaaagtgacgcttgaatttgcagaaatgttaaattcaatcaaagactttaagaagtttgaaattattgaccggctaaaatcattttatgatgaagaacaaattattgatcttgtctttgttgtaaaccaaattaacggttggaacagactaaatattattagtgatagactataa

SEQ ID NO: 411382 - DNA, 420 bp, Staphylococcus aureus; identical to SEQ ID NO: 407561

SEQ ID NO: 411383 - DNA, 420 bp, Staphylococcus aureus; identical to SEQ ID NO: 407560

SEQ ID NO: 411384 - DNA, 426 bp, Staphylococcus aureus; identical to SEQ ID NO: 407559

SEQ ID NO: 411385 - DNA, 423 bp, Staphylococcus aureus; identical to SEQ ID NO: 407558

SEQ ID NO: 411386 - DNA, 696 bp, Staphylococcus aureus; identical to SEQ ID NO: 408730

SEQ ID NO: 411387 - DNA, 282 bp, Staphylococcus aureus; identical to SEQ ID NO: 408729

SEQ ID NO: 411388 - DNA, 192 bp, Staphylococcus aureus; identical to SEQ ID NO: 408728

SEQ ID NO: 411389 - DNA, 762 bp, Staphylococcus aureus
atgatgattcactcaagaaagttgaggatttggctgtatttagtattattagctgtttttattagcgcgtgtaacgtgaaagaagataaacaaattaaagaaaatttcaacaaaacgttgagcttgtatccaactaaaaatcttgaagacttttacgataaggaaggttttcgcgatcaagaatttgataaaagagataaggggacttggattattaattctggaatgaacatccaattaaaaggaggagccttaaaatccagagcgatggtactttacatcaatcgtaacactagaacagctaagggatattttttaataagtgagataacagaagacaaaaaaggatacgtccataataaagaaaaaaaataccctgtcaagatggaacataatcgaattattccaacgaagcccataacggatgataagttaaaaaaagagattgaaaactttaagttctttgtacaatatggcaactttaaagattttaaagattataaagatggggatatttcatacaatcctaacgtaccaagttattccgcaaactatcaattgaataatgatgattataatgtccaacaattaagaaaacgatatgatatatcaaccaaaagggctccggaattaaaattgagaggatctggcgatttaaaaggctcatccttaggttctaaagaactagaatttaactttataagaaataaagaagaaaatgtgtatttttctgatagtattaatttcaaacctactgaatag

SEQ ID NO: 411390 - DNA, 393 bp, Staphylococcus aureus; identical to SEQ ID NO: 407551

SEQ ID NO: 411391 - DNA, 1638 bp, Staphylococcus aureus
atgaataaagaattatggatagaaagagctaatgatagtttagttaaacatttttatgagcagcaatctgacattgaacagcgagaaggttttgaaagtaaattaacgtttggtactgcgggtatacgcggaaaattcggtcttggtgaaggtcgacttaataagtttactattgaaaaattggcattaggtttagcgcgttatttaaatgcccaaacaaacaatcccacaatagtcattcattatgatattagacatctttcagctgaattcgcccaaattattgctaatgtattagcaaaccatcaaataacagtttatttacctgatacatataaaacgacaccggaattatcgttcgcggtgcgcaatcttaatactacttctggcattatgattacagcaagtcataatccgaaagactataacggcattaaagtatatggttctgatggcgcgcaactatcaacagatgcatcagaacttgtaagtcgctatattgaagacgttggcgatccattacagattgatataccaatttcaaaacaaaatacatcttatatcaagccatttccgaaatctgtaactgatgactatatgaaacacattcaaaatatgattggctatattcctaaatctgatttacaagttgtgttcactagtttgcatggtacaagtgttccgattgtacctaagttattaaaatctttgaatttcaatcaatttaatcttgtagaagcacaatgtaaacctgacccaaattttagttcagttcaaagtgctaatcctgaagaccatcgtgcttttgatcaagcagtcgagctagcgcataaaaatgatgctgatttattaatatgtactgatcctgatgcagatcgccttggaatcgctgtgcgtgatgtccatggtcaaattacatattttaatggtaaccaaattggcgcgctgttacttaattatcgtattcaacaaacgtctcaattacgtcatcgcttaatgattcaatccatcgtaagcagtgacttaacaaagtcattagcacgctataataatgttgaatacaaagaggtgctgacgggctttaaatttattgctcaggaaataagacaactggatgattatcaaaatatgattttcgcctttgaagagagttacggttttctatcagatccttttgtacgtgataaagatgccgtacaaattgtgccactcattataaaatacgcttctgagttaaaattatatggcaaaacattgaaagatgaattagaacagatttatcaaactgttggtagacatgaggatacattattctcgcatacgctagaaggattagaagggaaaaagaaaattaatgcaataatgaccaaattccgttcaaatccaccgcaagagattcaaggactgaaagtgaaagcaattgaagattatttaactagcgaggtttatcagttggataaagatacaacgtcacagattaattctcctaaatcaaatgttattcgcgtcttatttgacgaaggatttatcgctttacgtccttctggtactgaacctaaaattaaattatatgtgtcgttaaaatgtccgaattttgatgatgtagctcaaaaaattaatgcgatgatttttagctaa

SEQ ID NO: 411392 - DNA, 267 bp, Staphylococcus aureus
atgaaaggctctaaacaaatacttttgattatgggcattatatctcttattgttttatttatttttacattattcatcatggcgcaatatgcaaaacattatgaacaaaaatccgacagttccaacgcacatactttaaattcatcatcagccataattgagcaacatactatgtcgaatatagcgtctctagatttatacgctcctgttcgtaacattacttctagtcgtgatattcatcccatttatttcatgacaaaagattaa

SEQ ID NO: 411393 - DNA, 309 bp, Staphylococcus aureus; identical to SEQ ID NO: 407549

SEQ ID NO: 411394 - DNA, 867 bp, Staphylococcus aureus; identical to SEQ ID NO: 407548

SEQ ID NO: 411395 - DNA, 1530 bp, Staphylococcus aureus; identical to SEQ ID NO: 411350

SEQ ID NO: 411396 - DNA, 432 bp, Staphylococcus aureus; identical to SEQ ID NO: 411349

SEQ ID NO: 411397 - DNA, 504 bp, Staphylococcus aureus; identical to SEQ ID NO: 411348

SEQ ID NO: 411398 - DNA, 354 bp, Staphylococcus aureus; identical to SEQ ID NO: 411347

SEQ ID NO: 411399 - DNA, 591 bp, Staphylococcus aureus; identical to SEQ ID NO: 411346

SEQ ID NO: 411400 - DNA, 1044 bp, Staphylococcus aureus; identical to SEQ ID NO: 411345

SEQ ID NO: 411401 - DNA, 1878 bp, Staphylococcus aureus; identical to SEQ ID NO: 411344

SEQ ID NO: 411402 - DNA, 1395 bp, Staphylococcus aureus; identical to SEQ ID NO: 411343

SEQ ID NO: 411403 - DNA, 2496 bp, Staphylococcus aureus; identical to SEQ ID NO: 411342

SEQ ID NO: 411404 - DNA, 384 bp, Staphylococcus aureus; identical to SEQ ID NO: 411341

SEQ ID NO: 411405 - DNA, 264 bp, Staphylococcus aureus; identical to SEQ ID NO: 411340

SEQ ID NO: 411406 - DNA, 1098 bp, Staphylococcus aureus; identical to SEQ ID NO: 411339

SEQ ID NO: 411407 - DNA, 1008 bp, Staphylococcus aureus; identical to SEQ ID NO: 411338

SEQ ID NO: 411408 - DNA, 309 bp, Staphylococcus aureus; identical to SEQ ID NO: 411337

SEQ ID NO: 411409 - DNA, 321 bp, Staphylococcus aureus; identical to SEQ ID NO: 411336

SEQ ID NO: 411410 - DNA, 285 bp, Staphylococcus aureus; identical to SEQ ID NO: 411335

SEQ ID NO: 411411 - DNA, 678 bp, Staphylococcus aureus; identical to SEQ ID NO: 407547

SEQ ID NO: 411412 - DNA, 765 bp, Staphylococcus aureus
atgtctaactattcgactggagaactcgcaaaattatgcaatgtgacaacacgaacgattcaatattatgatcgcaaaggtattttgaaaccacaaggatttacagaaggaaagcgtcgtgtgtatacagaacaacagcgacaaacattagagttaatcttattgcttaaagatttaggttgtgcgttaagcgatatagatatgttgctaaaaggtgaaggtactttgaagacactcaatactttactaactatgaaacaacaagaaattaaccaacaagtcaaacagcaacaagcggtattaaacaaaattaaaaatgttcaatattacgtaaatgaagcgtcgacgtctccaatcacacacttaaaagacatagagcatgtcatgagtaaatcagctgaaatgaaaagtattcgtcgtaacatttggattagtgctggtattataggaataattcaatattctagcattatgagttcaatcttgatgaaaaacaaatggccgttcttaattgctttaccatttatgattgggtatggcattggtgttactttttattaccaacaaaaggttgcctatttatgtcctaactgccagcatatattctcaccatctttgtgggcagttatcaaagcgaaacatacagcgacaacacgtcgatttgaatgtccgaactgtcatgaaacgcattattgcattgaagtacctaaagcgcatatgagtacagaacaactagaagtaccccgcactaaaaataacaattaa

SEQ ID NO: 411413 - DNA, 417 bp, Staphylococcus aureus; identical to SEQ ID NO: 411334

SEQ ID NO: 411414 - DNA, 204 bp, Staphylococcus aureus; identical to SEQ ID NO: 407545

SEQ ID NO: 411415 - DNA, 1278 bp, Staphylococcus aureus
atgaaggaaaaacgaactaacgtaaggtggatgttcgcgcttgcgttcttctttattggggttattgcgtatatggatagagcaaacatttcatatatcgctaagcaaatgatggatgatttagggatgacaaaaccacaatttggtttattggcatcattcttctctctaggttatgcattaatgcaagtaccatcggggatgttggctgaaaaattcggtccacgtaagatgattacaattgcattagtttggtggagtgcatttacaatcttaacgggtatgattaagaaccacggtttaatttatttagtgagattcttatttggcgtgggtgaggcgccaatgtacccttctaatgctgtgtttaattcattttggttctctaaaaatgaaaaaggtagagcatcaagtgcattattagcaggatcatatttcggaccggtattagcaccaatagttacaattgctattgttaatgcatttaactggcaagcagtattttatatttttggtgcagtagggattttaatggctgtattatgggcgattattgccaaagacttacctgagcaacatagaatggttaatgaagcggagaaacgtttcattatggaaaatcgtgatatcgtagctactgaaaagtcatcaccaccatggaatgatttctttaaacgttttagcttctatgcaattgcaattcaatactttgttgtacaatttatcattacattattcttaatttggttaccgacgtatttaacagaagtattccacgttaactttaaagaaatgagcattagttcattaccttggttattaatgttcttcttaatcttatcagcaggtgcaatttctgaccgtgtattaggattaggtcgttcaaaattcgtagctagaggtgtcattgcaatcgcaggatttattgtatttgcagtttcaattatctttgctgtacgtacaggaaatttatatgtaagtattttctggttatcactaggtcttggtggtatcggtatttcaatgggtatgagttgggctgcagcaactgacttaggacgtaacttctctggtacagtatcagggtggatgaacttatggggtaatataggtgcattaatcagtccgctattagcaggtctattcgtagaacatttaggttggacaatgacattccaattgttaatcgttccagcagtaatcgctgtgattatgtggttctatgtgaaaccagatcaacctttaattgttagtgatgataaagcaatagaaaaataa

SEQ ID NO: 411416 - DNA, 612 bp, Staphylococcus aureus
atggaacaaattatcactgaatttattagtcgttttgggtatgcagccatttttatattaattttattagaaaatgttttacctatcgtaccatcggaaattattctgacatttgctggtcttatgtctgttaaatcacacttatcaattttaaccttatttattattgcaaccatcgcatcgtttatagggctgttaattttatattatatctgtcgtttgatttcagaagaacgtctatatcgttttattgatcgacacggtaagtggattaaattgaaaagtaaggatttaaagcgagcaaatgattggtttaaaaagtatggcgtatgggctgtatttatctgtcgtttcatacctgtattacgtgtattgattaccattccagccggtgtaaaccgcatgaatgttgtgacatttaccgttatttcattaataggtacaacaatttggaatttcggtttaattttactaggacgcacgttgagcgatagctttggtatgttgatgactggtcttcatacatattcacgtattatgtatgttgtcatcattatcgcagtcatttactttgctatacgttacattggcaaacgtaagagagtaaaataa

SEQ ID NO: 411417 - DNA, 696 bp, Staphylococcus aureus
atggatgttttaactattgaacatttaacaaagaagataggcaacaaaacgattctcgaagatgtatcatttaagctgaaacgcggacaaatagttggtcttgttggagcgaatggtgcaggtaaaacaactttaatgaaagttatattaggttactctagtttccaaagtgggaattttaatgttattaacagcaaggacagtaaaaacaatatcggtgcattgattgaaaatccaggaatatatccttttatgtctggatatgaaaacttgaagttattgaacgaatcaaaaaacactcaagatatcgataaaattgtctcacaacttcatatggatgaatacatccataaaaaagctaaaacgtattctcttggtatgaaacaaaaattaggaattgctatagcatttttaaatgaccctcaatttattatcttagatgaaccaatgaatggcttagatccaaaagctgtgcgagatgtacgtgaattgattgtccaaaaagcgcaagaaggtgtcactttcttaatttcgagccatattttaagtgagttagttaaaatcacaaactctatccttattattaacaaaggtaaaattgttacagaaacatcggaagaagaacttaaacaatttaaagataatgatttagaaaatgtattactagacatcatagaaaaggaggatcaagcataa

SEQ ID NO: 411418 - DNA, 771 bp, Staphylococcus aureus
atgggaactttaattaaacaagaatgtttcaaattatttaaaaagaaatcaacttttatcgcacctattgtctttattctactaatggttgctcaaggttatatcgctacaaaatacaatgaaatttttacgccacaggaatcttttacatctgcttataatggtttttcatggtttgcatttttattaattattcaagcaagtacaatcatttcaatggaatttcattacggtacgattaaaaatttactctatcgtgaatattcaagaacaactatgattgttagcaaaatcatcacattatttattatttctttaatttattttgttattacaattattgcttcaattgttattgggtctttattctttaatgatttaaatatatttgaaagtagcggtaatcaattatctttattgaatcaattattattagttagtttaggcacatttgttggcgtttggttagttttaagcttaacgttgctattatcatctgcaactaattcaacgggtgtagccattgctgtaggtattgttttttattttgcaagttctattttagcagttattcaaacggcacttttagaaaaaatagactggctaaagtggaatcctattaatatgatgaatattatgcttcaaacagttgaaaaaggctttagtaagtcgacgaaattagaacttcatgaattgtttattggtaatattgcttatatttctattttcttaatacttgtagtatttattttcaagaagaaaaatatttag

SEQ ID NO: 411419 - DNA, 1965 bp, Staphylococcus aureus
atgactcaaattactgaaagagaattaaaaaagaaatatttggatttattatctcaacatttcgatactccagaaaagcttgcgactgaaattattaatttagaatctattttagaattgcctaaaggtacggagcatttcgtcagcgatttacatggtgaatatgaagctttccaacacgtattacgcaacggttctgggaacgtgcgagcgaaaatcaatgatattttcaaagacaagttatcaacgaaagaacttaacgatttgactgcccttgtttactatccagaagataaattgcaacttattaaatgtgattttcaaaattatggacaattaaatgtttggtatattacgacgattgaacatctcattcagctaattaaatattgttcttcaaaatatacgcgttcaaaacttcgacgtgccttgccggagcaatacgttttcatcgtagaagagttattatataagaacaacgaatttaaaaataaaaaatcttactacgaaacacttgtaaaccaagtgattgagcttaagcaagcggatgatttaattatagggcttgcatattctgtacaacgcttagtcgtcgatcatttacacgttgtcggtgatatttatgatcgtggcccgcaaccagataaaatcatggacacgctgattaattatcattctctggatattcaatggggtaatcatgacgtgctttgggttggtgcttatgcagggtctaaagtatgtttagctaatttactacgtatttgtgcacgttatgacaatctagatatcgttgaagatgcttacggtattaatttaagacctttgctaacattggccgaaaaatactatgatgcagataatcctgcttttaaacctaaaaaaagacctgacaagcatgaacgtttaacacaacgcgaagaaagtcagattactaaaattcatcaagctattgcgatgattcaattcaaactggaaataccggttattaagcgtcgttcaaactttgaaatggacgaacgacttgtacttgaaaaagttaattatgatactaatgaaataacagtgtacggaaaaacatatccattaaaagatacatgcttccaaactgttaaccgtgataacccagcagaattactacctgaagaagaagaagtcatgaataaactattattgtcattccaacaatctgaaaaattacgtcgtcatatgtctttcttgatgcgtaaaggctcactttacttaccttgtaatggcaatttactcattcacggttgtattccagttgatgaaaatggtgagatggaatcattcgaaattgatggtcagacatacagtggccaagagttattagatgtgtttgaatatcatgtccgtaaatcatttgatgtaaaagaaaatactgatgacttatccactgatttagtttggtatttatggactgggaaatattcttcactatttggtaaacgtgcgatgactacgtttgaacgatactttattgcagataaagcttctcataaagaagaaaagaatccgtactatcatcttcgtgaagatgtgaatatggttcgtaaaatgctcagtgatttcggattaaatccagatgaaggacgcattattaatggtcacacaccagtgaaagaaattaatggagaagatcctatcaaagctgatggaaagatgcttgtcattgatggcggcttttcaaaagcttatcagtcaacaactggcattgcaggctatacattgttgtataattcattcggaatgcaactcgttgcacatcaacaatttaacgcaaaagaaaaaattctttccgaaggtatcgatgaactttctataaagcgcgtcgtagacaaagagttacaacgtaagaagattcgtgatacaaataaaggtaaagagcttcaagctcaaatagatattttgaaaatgttaatgcatgatcgttacttagactaa

SEQ ID NO: 411420 - DNA, 1080 bp, Staphylococcus aureus
atgcgtatcttaaaagagtccattattgtggcatttgcctttgtgggtgttgtcgttggtgccggctttgctactggtcaagaaattttccagtttttcacaagtcatggcgcatatagcatttcaggcattattgtgacaggactattgattactttaggtggaatgattgtcatgcatacaggtcatcatctaaagtctagaaatcattctgattcaattaactatttcttatacccctctattgcaagaggttttgatattattttgacgatgtttatgttgtctctagctattattatgactgcaggtggtgcttcaaccattcatcaaagtttcaacttaccgtattggctgagcgcactcatattagtcgcctttattttagcaacactgtttctaaaattcgatcgtttaattgctgtgcttggaggtgttaccccatttttaattgcgattgtcattatgattgcggtctactatttcacaacgagtcatcttgattttactgccgctaataatgatgctcagattcataagcagaaatcattatcacctggatggtggtttgatgcgattaactatgcaagcttgcaaattgctgctgccttcagcctcttatcagtgatgggtagtaaagttaagtatcgtgactcaacgttatacgggggcttgattggcggtttaatcattacatttttactcatgatgattaacctaggtttaatttctcaattcgataaaattaaacacgtcgatttacctacattaaaattagcgacacaaatgtctccgtcaatcggtattattatgtctgtcattatgatacttgtcatctacaatactgttgttggattaatgtatgcatttgcgtcacgtttcagcgttccatttagcagacgttacttcatcattattattacaatggctgtcatcacttatattagtacatttatcggtttcatttcattaattggaaaagtattccctattatgggattgttcggtttcatcttactcatacctgtactctataaaggtttaattaagcgtattaccggcaaatctcatatcgattaa

SEQ ID NO: 411421 - DNA, 594 bp, Staphylococcus aureus; identical to SEQ ID NO: 407543

SEQ ID NO: 411422 - DNA, 969 bp, Staphylococcus aureus
atgacaaataatcatgaattactaggtattcaccatgtcacagcaatgacagatgatgcagaacgtaattataaattttttacagaagtattaggcatgcgtttagttaaaaagacagtcaatcaagatgatatttatacgtatcatacattttttgcagatgacgtaggttcggcaggtacagacatgacgttctttgattttccaaatattactaaagggcaagcaggaacaaattccattacaagaccgtcttttagagtgcctaacgatgacgcattaacatattatgaacagcgctttgatgagtttggtgtcaaacacgaaggtattcaagaactatttggtaaaaaagtgttgccatttgaagaagtagatggccaagtgtatcaattaatttcagatgagttaaatgaaggtgtagcacctggtgtgccatggaagaatggaccggtgccagaagataaagcgatttatggattaggacccattgaaattaaagtaagttattttgacgactttaaaaatattttagagactgtttacggtatgacaactattgcgcatgaagataatgtcgcattacttgaagttggcgaaggaggcaatggtggccaggtaatcttaataaaagatgataaagggccagcagcacgtcaaggttatggtgaggtacatcatgtgtcatttcgtgtgaaagatcatgatgcaatagaagcgtgggcaacgaaatataaagaggtaggtattaacaactcaggcatcgttaatcgtttctattttgaagcattatatgcacgtgtggggcatattttaatagaaatttcaacagatggaccaggatttatggaagatgaaccttatgaaacattaggcgaagggttatccttaccaccatttttagaaaacaaaagagaatatatagaatcggaagttagaccttttaatacgaagcgtcaacatgattaa

SEQ ID NO: 411423 - DNA, 435 bp, Staphylococcus aureus
atggatcgaacgaaacaatcgctcaatgtctttgtcggaatgaatagggcgttagacacattagagcaaattacaaaagaagacgtaaagcgatatggcttaaatattactgaatttgcagtgctcgagttgctttataataaaggtccgcaaccaattcaacgtattagaaaccgcgtattaattgcaagtagcagcatttcatatgttgtaagtcaattagaggacaaaggttggattacacgtgaaaaggataaagatgataaacgtgtatatatggcttatttaactgaaaaagggcaaagtcaaatggcagatattttccctaagcatgctgagacattgacaaaagcgtttgatgtgttaacaaaggatgaattaacaatcttacagcaagcatttaagaaactaagtgcacaatctacagaagtgtaa

SEQ ID NO: 411424 - DNA, 285 bp, Staphylococcus aureus
atgagtaaccttgaaatcaaacaaggcgagaacaaattctatattggtgatgatgaaaatcatgctttagctgaaatcacataccgttttgtggataataatgaaattaacattaatcatacaggcgtatctgatgaactcggtggtcaaggtgttggcaaaaaactagttaaagcagttgttgaacacgctcgagaaaataatttgaaaattattgcctcatgttcatttgccaaacatatgttagaaaaagaagattcatatcaagatgtgtatcttggttaa

SEQ ID NO: 411425 - DNA, 807 bp, Staphylococcus aureus
atggcatttcacgataaaacagcaacacaagtgacaaacattgaactgaacgtaagagacttagacttaatgacaacattttacaaaaacattttaggactatcagttaaaagttctgacgataacacaaccgtattatcagttggtaatggtggccacacactaacgttacatttattagaagacggccgtcagacttccccacgtgaagcagggctttttcatatagcatttttattaccaactactgaggatctagctaacttcttatatttcgtggcacaaaaaaatatgggcatcggcgctggtgatcatttagtaagtgaagctttatatttcaacgaccccgaaggtaatggtattgaagtctatcgcgatagaccttcatcttcatgggaatggcaaaatggaaaagttaaaatggatactttagaagttgatagccaaaccttattaacacatcgtactgatgaaggttggcaaggaatgccagcaaaaggcatgattggacacttacatttaaaaacacatgatttggacgcagcatatcaatgttacattgaacaatcaggattccaacatgtgtctgattttccacgtgcgctatttatgtcaacgaatcattatcaccatcatattgctgctaatacttggcaatccaatcaagcaagacaaaacaatgcacaaagttatggattaacacatgttgatatttatcaacccgacgcctcaacacatacatttacggcaccagaagggtttgacatcacagttcattcaaatactgaccttgttccagaaaaataa

SEQ ID NO: 411426 - DNA, 672 bp, Staphylococcus aureus
atgagcaatatgaatcaaacaattatggatgcatttcattttagacatgcgacaaaacaatttgatccacaaaagaaagtttcgaaagaagattttgaaacaatattagagtcaggtagattgtctccaagttctcttgggttagaaccttggaagtttgtcgtgattcaagatcaagcgttacgtgatgaattaaaagcgcacagttggggagcagcgaaacaattagatacagcgagccattttgtgctaatttttgcgcgtaaaaatgtaacgtcaagatcaccgtatgtacaacatatgttaagagatattaaaaaatatgaggcacaaacgattccagctgttgaacaaaaattcgatgcattccaagcagatttccatatttctgataatgatcaagccttgtatgactggtcaagtaaacaaacgtatatcgcattaggcaatatgatgacgacagccgcattgttaggtattgattcatgtccgatggaaggttttagtctggatacagtgacagacattttagcaaataaaggtatcttagatactgagcaatttggtttatcagtgatggtcgcatttggctacagacaacaagatccaccgaaaaataaaacacgccaagcatatgaagatgttattgaatgggttgggccaaaagaataa

SEQ ID NO: 411427 - DNA, 993 bp, Staphylococcus aureus
atgacaaaaattatgttctttggtacgcgtgattatgagaaagagatggcattaaattggggaaaaaagaataatgtcgaagtaactacttctaaagagctattatcaagtgctactgtcgatcaattaaaagattacgatggcgtaactacaatgcaatttggtaagttagaaaatgacgtttatcctaaattagaatcttacggtattaaacaaattgcacaacgtactgctggatttgatatgtatgatttagatttagctaaaaaacacaatattgtgatatctaacgttccaagttattcacctgaaacaattgcagagtattctgtttctatcgccctacaattagtgcgtcgcttcccagatattgaacgccgtgtacaagcacatgattttacttggcaagcagaaatcatgtctaaaccagttaaaaatatgactgttgcaattatcggtacgggtcgtatcggtgctgctacagctaaaatatatgcaggatttggtgctacaattacagcttatgatgcttatcctaataaagatttagactttttaacatacaaagacagtgttaaagaagctattaaagatgctgatattatttctttacatgttccagcgaacaaagaaagctatcatttattcgataaagctatgtttgatcatgtgaaaaaaggtgcgatcttagttaacgcagcacgtggtgcagtcatcaatacacctgatttaatcgctgcagtgaacgatggtactttgttaggtgctgcgattgatacttatgaaaatgaagcagcatacttcacaaatgactggactaataaagacattgacgataaaacattattagagttaatcgaacatgaaagaattttagtaacaccacatattgctttcttctctgatgaagcagtacaaaaccttgttgaaggtggtttaaacgcagcattatctgtcattaacactggtacatgtgaaacacgtttaaattaa

SEQ ID NO: 411428 - DNA, 804 bp, Staphylococcus aureus
atggttaaggctattgcggtagatatggacgggacgtttttagattcgaaaaagacatacgataaaccaagatttgaagcgatttttactgaacttagaaatagagatattacatttatagctgcgagtggcaatcaatatgcgaagttgaagtctattttcggggatagagatatgtattttatatctgaaaatggtgcagttatttataaaggcaatgagttatataattataaaagctttaatcgtcaggtgtttcaacaagttgtcgattacttaaatatgaaccaaagtattgatcaactcgtcatctgtggtttgaaaaacgcgtatattttgaaacatacttctgaagcatttaaagaagatacgagattttattatcatcagttaaaagaaattgacagtctacaacaattacctgaggatgattatgtcaaaattgcattcaatattaatcgtgagacgcatccgaatgttgacgaagaagtagcgacgcaattcagcaatgatattaaacttgtctcaagtgggcacgatagtattgatattattatgccaaacatgactaaagggcaggcattaaaacgattgttagataaatgggaaatgtcttcttcagagctcatggccttcggagatgcgaataatgataaagatatgcttgcgttcgctaagcatagttatgtgatggaaaatagtcatgatgaagaattgttcaatattgcctcggctgtcgctccaagtaatgataagcagggtgttttaacgattatcgaacaagaagtgttgaaaagtaggtag

SEQ ID NO: 411429 - DNA, 636 bp, Staphylococcus aureus
atgaaactaaataactattctttaaaagttaaaaacaaacaactagttgacaattgtgatttaaatttctatcttggtcagatcaatcacattgttggtaaaaatggtgtaggaaaatctttgttagctaaagatttcttactaaataatagtggaaatatccctaagtccatttctcaaaatgtaaccttaatatcaagttcatcgaatattcctaatgatataactaaagactttttattatcattgttaaaaacaaaattcaaagacaacctacaaaccttcgacaaaatttataaaattctaaacatcgaagtaataccgtctaacatactattaaaaaacttgagtgatggtcaaaaacaaaagcttaaattattaagtttcttattggaagatcatgatttaatcatattagatgaaattacaaacgctttagacaagaaaacagttaatgaaatttatgaatttataaatgattttattcaaagccatcaaactaaaactattatcaatattacacataatttatccgatttaagtgctttgccgggtaaatactttatttttaaagaccttcaaatagaagagtaccaatcaaaagaagaagtcataaatgattacattaatttataa

SEQ ID NO: 411430 - DNA, 723 bp, Staphylococcus aureus
ttgaaattagaatttaaaaaaagtatttccaataaaatcatttacacgcttggtgtgctattcatattccttttcttacttgggtattttttaccaataggtatagacaaagttaaaaatttaagctatagccagtttttcttcagttcatatactgttgcaacgcaattagggttcttactattttcatttgttattgcatattttattgataaagagtattcgaataaaaatatcctgttttataaattgattggcgataatatctttaccttcttctataaaaaggtagcagtgttattttttgaatgtttagtgttcataattctaagtatcacaattatttcaattatatattcgaatttctcacattacttactattaataatcttattttcactcgttatcttacaatatatcttagttgttggaacgattagtatggtttcacctaacattttaatcagcttaggaatcagcattgtatattggattggttcagtcatcttagttgccattaataaaaatatatttggtatcgttgctccatttgaggcgagcaatacgatgtatcgtgccgtagaaaaaatattgaataacgagtcaacatttatgtgtcctactgaaattataaatacagtatcattcttcgttcttctatttatagttaatactattgtcttattactaagtagaaagagatggttgaaaatcggtatgtag

SEQ ID NO: 411431 - DNA, 621 bp, Staphylococcus aureus
atgaaaaaatggacaaatcgattaatgacaatcgctggtgtggtacttatcctagtggcagcatatttgtttgctaaaccacatatcgataattatcttcacgataaagataaagatgaaaagattgaacaatatgataaaaatgtaaaagaacaggcgagtaaggataaaaagcagcaagctaaacctcaaattccgaaagataaatcgaaagtggcaggatatattgaaattccagatgctgatattaaagaaccagtatatccaggaccagcaacacctgaacaattaaatagaggtgtaagctttgcagaagaaaatgaatcactagatgatcaaaatatttcaattgcaggacacactttcattgaccgtccgaactatcaatttacaaatcttaaagcagccaaaaaaggtagtatggtttactttaaagttggtaatgaaacacgtaagtataaaatgacaagtataagagatgttaaacctacagatgtagaagttctagatgaacaaaaaggtaaagataaacaattaacattaattacttgtgatgattacaatgaaaagacaggcgtttgggaaaaacgtaaaatctttgtagctacagaagtcaaataa

SEQ ID NO: 411432 - DNA, 492 bp, Staphylococcus aureus
atgattcgatgtgctaaaaaagaagatttaaacgctatattagcgatatacaacgatgccattattaatacaacagctgtttatacttatgaaccgcaaaccatagacgaacgtatcgcatggtttgaaacgaaacaacgtaatcatgagcctatctttgtatttgaggaaaacggaagtgtcttagggtttgcgacgttcggttcgtttagaccttggccagcatacctatatacaatcgagcattctatttatgtcgatgcttcagctagaggaaaaggtattgctagtcaattattacagcgtttaattgcagaggcaaaagctaaaggttatcgtgcgctagttgcaggcattgatgcttccaacaaagcgagtattcagttgcatcaaaagtttgcttttaagcatgccggcacactgaccaatgtaggttttaaatttaatcaatggttagatttagcattttacgaattagatttacaagactag

SEQ ID NO: 411433 - DNA, 171 bp, Staphylococcus aureus; identical to SEQ ID NO: 404874

SEQ ID NO: 411434 - DNA, 900 bp, Staphylococcus aureus
atgtttgattcaattagagagactatagattatgccgtagaaaataatatgtcatttgcggatatcatggttaaagaagaaatggaattaagcggtaaatcacgtgatgaagtgcgagcgcaaatgaaacaaaatttagatgtcatgcgagacgcagtaatcaaagggacgacaggtgatggcgttgaaagtgtaacgggctacactggtcatgacgctgctaaactacgtgattataatgaatcacatcatgctttgtctggatatgaaatgattgatgcagtcaaaggtgccattgcaacaaatgaagtcaatgctgcgatgggtattatttgtgcaacgccaacagctggttcctcgggtaccattcccggtgcactttttaaattagaaaaaacacatgacttaacagaagatcaaatgattgatttcttatttacatcagcgttgtttggacgtgtcgtagcgaacaatgcaagtgtagctggtgcgacaggtgggtgccaagcagaagttggttcagcctctgcaatggcggcagctgcagcagtagctattttcggtggatcgccagaagcctctgggcatgcaatggcactagcgataagtaatttattaggtttagtttgtgatccagtagcaggacttgttgaaataccttgtgttatgagaaatgcaattggttcaggtaacgctttaatttcagcagatttagcattagcaggtattgaaagtagaattcctgttgatgaagttattgaagcaatggataaggttggtcgtaaccttcctgcatcattacgtgaaactggattgggtggattagcaggtacaccaactggagaagcaattaaacgtaaaatctttggcacagctgaagatatggttaaaaataattaa

SEQ ID NO: 411435 - DNA, 681 bp, Staphylococcus aureus
atggcaaagagctatgattatcaaagtgctttcgatattatcggaccagttatgatgggaccttcaagttctcatacggctggtgcagtaaagattgggaattcagcacgcgcaatattgggaaatattcctaaaaatattgaaatacattattatgaatcatttgctcaaacacaccaaggacatggtacagatgtcgctattgtgggtggagcaatggactattcaacatttgataaccgaattaaatcttcattagaaattgcagctgatgatggtattaaaatagatattatcgaagaagaaggcgatagtattggtcaacatccaaactgtgcttatattaaatcatctcgtaatgatggtcgctacattgaaattatcggtatttcaatcggtggtggtacaattaaaattaaaggtattcatataaatggactagaagtagatttaaatcatggattaccaattttagttgttgacggaaatatgactaaagcacaagtaaatcatttcattaatgatatcaacgatatgaaattagactgtaaagatgaatttattaaaatagatgaagataaatgcttggttgtaataccattaaataaagcaatctcagaatcgacattaaatacaattaaagagaaatacagtgacgtaaacgtttcctatataaattag

SEQ ID NO: 411436 - DNA, 1044 bp, Staphylococcus aureus
atggatattctgttaggtgtaggcacattagtcttggttttagtgatcatgacgctatttttaaagtatgcaccgtacggtaaacaaggactacaagcattatccggtgcagcttgtgcgacatttctaccacaagcattcttaagttacgccattggtggcgtatttgatattaaatttctacaagatattggggatttagcaggaagtttaagcggtatcgcagtaggtattctaacgtgcttaaacttaggcgttgcaccagtatttgcggtcattgttggtttagtattacatgactttaaattattaccagcattcatcgcagcttatggcgtagcttttttaattaaatggattgaaaagaaagttccagaaggcttggacttaattgtggtgatcttatttgcaccagcaattgctttcggacttgcatcaatcattacacctggtgtgctagcaacattaaaacaaataggtagtgctgtcactgcggtaggtgataacaatccatatgcattagcggtcattttaggactagtgattcctgttacaggtatgacaccgctaagttcaatggtattaacaagtttattaggactgacaggtgttcctatggctattggagcactaacatgtacaggtagctcatttgttaaccttattttattccgaaaattaaacattggtggaccgtcaaaagcatttgcagtttgtattgagccattgacgcaaattgatttaatagcgcaatatccagtacaactatatggtacaaatgcactgattggggtcgtcaacgcatgtatcgtgacatttagcggactagtaataggtgtcaaaggtatggcaacaccaattgcaggtgccatcgtattgtttggctttaataatgcagtgacatcaattgtaacaatcgcaacagtgattattgtcagcattgtcttagcctatattattggaacactaattaataagtttaatttaatgaatatcaactttaaaatgccgagcaaaaagaatcatattaaggagagtgtttaa

SEQ ID NO: 411437 - DNA, 204 bp, Staphylococcus aureus
atgcaattgagtcattccgttaaagttgcaatttctatctatttagcacttatctttataacgttcacttcttatttagtcattattttatatacgagtatgactggacatgatgtatcacatttcgtgttagatagtcagcattctcatcatggatctcttacgcaaaaacatttgagtcttcctgaaatctcatttaaatag

SEQ ID NO: 411438 - DNA, 963 bp, Staphylococcus aureus
atgttgttggtgttaagttttaaaggggtgagatacttggcgaataatcattcagctttgcgtttaaaaggaattatacttgccattgtcggtgcttgtttatggggattaggtggtactgtttctgatttcttgttcaaatataagaatattaatgtcgattggtatgtcactgctcgacttgtagtcagtggtattttcttacttattatgtacaaaatgatgcaacccaaacgttcaatatttagcgtattccaagatcgacgtatgttaggcaaattacttatcttcagtatactgggcatgttagttgtacaatatgcttatatggcatctattaatacaggtaatgctgcgattgcaacattactacaatacattgcgccagtttatattattatttggtttgtcataagaggcgttgcaaaacttacattatttgatgtgcttgctattatcatgacattattaggaacatttttattattaacgaatggttcattttctaatttagtcgtcaatcctgcaagtttattctggggtattttagctggtgtagcactcgctttttacacaatttatccttcagacctacttaaccgcttcggttcgattctaattgtcgggtgggcaatgcttatttctggtgttgcgatgaatttacgccatccaatttggcacattgatatcactaaatgggacatatcaattatattatttttaatctttggtattatcggtggtaccgcactcgcattttatttctttatcgacagtttacaatacatatcagcgaaagaaacaacattattcggaactgttgaacctgtcgtagccgttatcgcaagcagtctatggttacatgtggcattcaaaccatttcaaatcgtaggcatcattcttattatgattttaattttattactatcacttaaaagacaacctgaaacattagatgaataa

SEQ ID NO: 411439 - DNA, 969 bp, Staphylococcus aureus
atgcgtaaaaaatggtctgcacttgcgtttggatttttagtagcggcatacgcacatattagaattaaagaaaaacgcagtgtgaaaagttatatgttagaacaaggtatacgattatctagagctaagcgtcgttttatgtataaagaagaagcgatgaaagcattagaaaaaatggcgccacagacagcaggtgaatatgagggcaccaattatcagtttaagatgccagtaacagtggataagcacttcggttcaaccgtttataccgttaacgataaacaagataagcatcaacgcgttgtattatacgcacatggaggcgcatggttccaagacccactcaaaattcatttcgaatttattgatgaacttgcagaaacactcaatgctaaagtcatcatgccagtatatccgaagattccgcatcaagattatcaagcgacgtatgtgctttttgaaaagttgtatcatgatttattgaatcaagtagcagattctaaacaaatcgttgtaatgggtgactctgcgggcggtcaaattgctttatcatttgctcaattgttaaaagaaaagcatatagctcaaccaggacatattgtcttgatttcaccagtattagatgcaacgatgcgccatccagaagttcctggctacttaaagaaagatccaatggtaggtgttgatggtagtgtttatttagctgagcaatgggcaggtgacacaccattagatgattacaaagtatcaccaattaacggtgacttagatggtttaggacgaattaccttaactgttggtacaaaagaagtgctgtatcctgatgcattgaacttatcacaattgttgagtgcaaaaggtatagaacatgactttatacctggatattaccaatttcatatttatccagtattcccaataccagagcgccgacgctttttataccaaattaaaaatattattaactaa

SEQ ID NO: 411440 - DNA, 345 bp, Staphylococcus aureus
atggttaagcaattaaatagtgtcgtagcattccgtgaatttattcatcaatatccgttagcagttgtacatgtcatgcgcgatcagtgtagcgtgtgtcatgccgttttaccacaaattgaagacttgatgcaatcattccccaatgtgccattagctgtgattaatcaaagtcaggtggaagctattgctggagaattaaatattttcactgtacctgtggatttaatttttatgaatggaaaagaaatgcatcgtcaagggcgttttatcgatatgcaacgttttgaacatcatcttaagcaaatgaatgatagtgtgaataacgatgtcgatgagcgttag

SEQ ID NO: 411441 - DNA, 411 bp, Staphylococcus aureus
atgacaacagaaggtctattagttgcagagaaagaaatcgaagtgaatggttacgacattgatgcgatgggtgtcgttagtaatatcgtttatattagatggttcgaagatttgagaacagcgtttattaatcagcacatgaattactcaacaatgatcaatcaaggcatttcacctatacttatgaaaacggaagcagaatataaagtacctgtcacaatacatgacaaaccagtaggtcgtatttacttagttaaagcaagcaagatgaaatgggtgtttcagtttgaaattgtgtccgcacatggcgtgcattgtattggtacacagacaggcggtttttacagattgagcgataagaagataacctctgtgccacaagtgtttcaagagattttagcaacaaaataa

SEQ ID NO: 411442 - DNA, 2124 bp, Staphylococcus aureus
ttgttcatgcctgcttttttgtacatggaagcggaaattgagataggggatgtttatatgtttaagaaattgtttggacaattgcaacgtatcggtaaagcattaatgttacctgttgcgattttaccagcagctggtattttattagcgtttggtaacgcaatgcacaacgaacaattagtagaaattgcaccatggttaaaaaacgatatcattgtaatgatttcgtcggtcatggaagcagcaggacaagttgtatttgataacttgccattattatttgcagttggtacagcacttggattagcaggaggagacggtgttgcagcattagcagcgctagtaggttacttaattatgaatgcaacaatggggaaagtgttgcacattacaattgatgacattttctcatatgccaaaggggcaaaagaattaagtcaagcagcgaaagaaccagcacatgccttagtattaggtattccaacgttacaaacgggtgtgtttggtggtattatcatgggtgctttagccgcatggtgttacaacaaattttataatattacactaccaccatttttaggattctttgcaggtaaacgatttgtaccgattgtgacatcggtcgtagcaattgcaacaggtgtggttttaagctttgcgtggccaccaattcaagacggattaaatagtttatcgaatttcttattaaataaaaatttaacattaacaacgtttatattcggtattattgaacgctcattaattccatttggtttacatcatattttctattcaccgttctggtttgaattcggaagttatacaaatcacgcaggtgaattagttcgtggtgaccaacgtatttggatggcacaattgaaagatggcgtaccatttactgctggtgcatttactactggtaaatatccattcatgatgtttggtttaccagcggcagcatttgctatttataaaaatgcacgaccagaacgtaaaaaagtcgtgggtggtttaatgttatcagcaggattaactgcatttttaactggtatcactgagccattagaattttcattcttatttgtagcaccagtactttatggaattcacgtattattagctggtacatcattcttagtaatgcatttattaggcgttaaaattggtatgacattctcaggtggtttcatagattatattttatatggtttattaaactgggatcgttcacacgcattattagttattccagtcggtattgtatacgctatcgtgtattacttcttattcgactttgcaattcgtaagtttaaattgaaaacaccaggtcgtgaagatgaagaaactgaaattcgtaactctagtgtcgcaaaattaccatttgatgtcttagatgcaatgggtggaaaagaaaacattaaacatttagatgcatgtattacacgtctgcgcgtagaagtggttgataaatcaaaagtagatgtagcaggtattaaagctttaggcgcatcaggtgtattagaagttggaaacaatatgcaagctatctttggtccaaaatcagatcaaattaaacatgatatggccaagattatgagtggtgaaattacgaaaccaagtgaaacgacagtgactgaagaaatgtcagatgaaccagttcacgtagaagcacttggaacaacagacatctatgcaccaggtgtcggtcaaatcattccattatcagaagtacctgatcaagtattcgctggtaaaatgatgggtgatggtgttggctttatccctgaaaaaggtgaaattgtagcaccgtttgatggtacagtgaaaacaatcttccctacgaaacatgcggtaggattagaatctgaaagtggtgtcgaagtacttattcatattggtatcgatacagtgaaactgaatggtgaaggattcgaaagtctgattaacgttgatgaaaaagtaacacaaggtcaaccattaatgaaagtgaatttagcatacttgaaagcgcacgcaccaagcatcgttacaccaatgattattacaaatcttgaaaataaagaacttgtcattgaagatgtccaagatgctgatccaggtaagctaattatgacagtcaaataa

SEQ ID NO: 411443 - DNA, 1740 bp, Staphylococcus aureus
atggcaaaaataaaagcaaatgaagcattagttaaagcattacaagcatgggatatagatcacttatatggtattccaggtgattcaatcgacgcagtggtcgatagtttacgtacagtgagagatcaatttaaattttatcatgtacgtcatgaagaagtagcaagcttagcggctgctggttacacaaaattaactggtaaaatcggtgtggcattaagtatcggtggccctggtttaattcatttattaaatggtatgtacgatgccaaaatggataatgtaccgcaattaatattatctggacaaacgaatagtacagcacttggaacgaaagcattccaagaaacaaatttacaaaaattatgtgaagatgtagccgtttataatcaccaaattgaaaaaggtgacaatgtgtttgaaatcgttaacgaagcaattcgtacggcatatgaacaaaaaggtgtagctgttgttatttgtcctaacgacttattaactgaaaaaattaaagatacaacgaataaaccagtagatacatcaagaccaacagtagtatcaccaaaatataaagacatcaaaaaagcggttaaattaattaataaaagtaaaaagcctgtcatgttaattggtgtaggtgcgaaacatgcgaaagatgagctacgtgaatttattgaaatggctaaaattcctgtcattcattcattaccagctaaaacaatcttgccggatgatcatccatatagtatcggtaacttaggtaaaatcggtaccaaaacatcttatcaaacaatgcaggaagcggatttattaattatggttggtacaaactatccatatgtggattacttacctaagaaaaatattaaagccattcaaattgacacaaatcctaaaaatatcggacatcgtttcaatattaatgtgggaattgttggagatagtaaaattgcgttgcatcagttaactgaaaatattaaacatgttgctgaaagaccattcttaaacaaaacgttagaacgtaaagcggtttgggataaatggatggaacaagataaaaataataatagtaaaccattacgtccagaacgattaatggcatcaatcaataaatttattaaagatgatgcagtgatttcagcagatgtaggtacagcaacagtttggtcaactcgatacttaaaccttggtgtaaataacaagttcatcatttcaagttggttaggtacaatgggttgcggtcttccaggtgcaatggcatcaaaaattgcatatccaaatagacaagccatcgcaattgctggtgacggtgcattccaaatggtgatgcaggactttgcaacagctgtacaatatgatttacctttaacagtgtttgttttaaataataagcaattagcgtttattaaatatgaacaacaagctgctggtgaattagaatatgcggttgatttctctgatatggatcatgccaaatttgctgaagcagcaggtggtaaaggttatacaattaaaagtgctagcgaagtagatgctattgtagaagaggcactagcacaagatgtaccaacaattgtagatgtttatgttgatcctaatgctgcgccattaccaggtaaaattgtaaatgaagaagcgcttggttatggtaaatgggcatttagatctattactgaagataaacatttagatttagatcaaattccacctatttcagttgcagcaaaacgtttcttataa

SEQ ID NO: 411444 - DNA, 690 bp, Staphylococcus aureus
atgaatgattacgtgcaagccttgttaatgattttattgactgtcgttttatattatttcgctaaaagattacaacaaaaatatccgaatccgtttttgaatccagcattaattgcatctttaggaattatttttgtcttacttatctttggaattagttataatgggtatatgaaaggtggcagttggatcaaccatattttaaacgcaacggtcgtatgtttagcgtacccactttataaaaatagagagaaaattaaagataatgtctctatcatttttgcaagtgtattaactggcgtcatgctaaatttcatgttagtgttcttaacacttaaagcatttggctattctaaagacgtcattgtaacattattgccccgatctataacagccgctgttggtatagaagtgtcacatgaacttggtggcacagatacgatgaccgtactttttattatcacaacgggtttaataggtagtattttaggttcgatgttattacgatttggaagatttgaatcttctatcgccaaaggtttaacgtatgggaatgcgtcacatgcatttggcacagctaaagcactggagatggatattgaatctggtgcatttagttcaattgggatgattttaactgcagttattagttcggtgttaatacctgttctaatcatactgttctattaa

SEQ ID NO: 411445 - DNA, 396 bp, Staphylococcus aureus
atgcacaaagtccaattaataatcaaactactactacaactaggaatcatcattgtgattacttatattggcacagaaattcaaaagatttttcatcttcccttagccggcagtattgttggtctatttttattttatttactattacaatttaagattgtaccgctcacttgggtagaagacggtgcaaactttttattaaagacgatggtctttttcttcataccatcagttgtaggtattatggatgttgcgtccgaaattacgctaaattatatactctttttcgcagtcattatcataggaacatgtatcgttgcattatcttcaggttatattgctgaaaaaatgtctgttaaacataagcaacgtaaaggtatagatgcttatgaatga

SEQ ID NO: 411446 - DNA, 864 bp, Staphylococcus aureus
atgaaatattttattgaagtcgtaaagcaaggaggcatgactaatgcttccaaatcattatatattgcacaacctacaattagtaaagcaattaaagatattgaaaatgaaatgggcacgcccttatttgatagaagtaaaagacatttaatacttaccgatgcaggtcaaattttttatgagaaaagtaaagaaattgttgcactgtatgattatttaccatctgaaatggaacgcttgaatggactggaaacagggcatataaacatgggcatgtcggcagtcatgaatatgaagattcttatcaatattcttggtgcattccatcaacaatatccaaatgttacatataatttaatagaaaatggcggaaaaacgattgagcagcaaattatcaatgatgaagtagatataggcgtgaccactttgccagtcgatcatcatattttcgattatactaccctagataaggaagatttgcgacttatcgtgagcagagagcatcgactcgcaaaatatgaaactgttaaactcgaagatttagcaggtgaagacttcattttatttaataaagacttttacttgaatgataaaattattgaaaatgctaaaaacgttggctttgttccgaatactgtagcgcaaatttcacaatggcatgttatagaagatttagttacgaatgaattaggtattagtattttaccaacatcaatttcagagcaactaaatggagacgtgaaactattacgtattgaagatgcgcatgtacattgggaattaggtgttgtttggaagaaggataaacaattaagtcatgccacaacgaaatggatagaatttttgaaagatcgtttaggctaa

SEQ ID NO: 411447 - DNA, 219 bp, Staphylococcus aureus; identical to SEQ ID NO: 404860

SEQ ID NO: 411448 - DNA, 1281 bp, Staphylococcus aureus
atgcaaagtttagataaaaatttccgacatttatctcgtcaacaaaagttacaacaattggtagataagcaatggttatcagaagagcaattcaacattttattgaatcatccattaattgatgaggaagtagcaaatagtttaattgaaaatgtcatcgcgcaaggtgcattacccgttggattattaccgaatatcattgtggacgataaggcatatgttgtacctatgatggtggaagagccttcagttgtcgctgcagctagttatggtgcaaagctagtgaatcagactggcggatttaaaacggtatcttctgaacgtattatgataggtcaaatcgtctttgatggcgttgacgatactgaaaaattatcagcagacattaaagctttagaaaagcaaattcataaaattgcggatgaggcatatccttctattaaagcgcgtggtggtggttaccaacgtatagctattgatacatttcctgagcaacagttactatctttaaaagtatttgttgatacgaaagatgctatgggcgctaatatgcttaatacgattttagaggccataactgcatttttaaaaaatgaatttccgcaaagcgacattttaatgagtattttatccaatcatgcaacagcgtccgttgttaaagttcaaggcgaaattgatgttaaagatttagcaaggggcgagagaactggggaagaggttgccaaacgaatggaacgtgcttctgtattggcacaagttgatattcatcgtgctgcaacacataataaaggtgttatgaatggcatacatgccgttgttttagcaacaggaaatgatacgcgtggtgcagaagcaagtgcgcatgcatacgcaagtaaagatggtcaatatcgtggtattgcaacatggagatacgatcaagaacgtcaacgtttaattggtacaatagaagtgcctatgacattggcaatcgttggcggtggtacaaaagtattaccaattgctaaagcttctttagaattgctaaatgtagatacagcacaagaattaggtcatgtagttgctgccgttggtttagcgcaaaactttgcagcatgtcgcgcgctcgtttccgaaggtatccagcaaggtcatatgagcttacaatataaatctttagctattgttgtaggtgcaaaaggtgatgaaattgcgcaagtagctgaagcattgaagcaagaaccccgtgcaaatacacaagcagctgaacgcattttacaagatttaagaagtcaacaataa

SEQ ID NO: 411449 - DNA, 1167 bp, Staphylococcus aureus
atgacaataggtatcgacaaaataaacttttacgttccaaagtactatgtagacatggctaaattagcagaagcacgccaagtagacccaaacaaatttttaattggaattggtcaaactgaaatggctgttagtcctgtaaatcaagacatcgtttcaatgggcgctaacgctgctaaggacattataacagacgaagataaaaagaaaattggtatggtaattgtggcaactgaatcagcagttgatgctgctaaagcagccgctgttcaaattcacaacttattaggtattcaaccttttgcacgttgctttgaaatgaaagaagcttgttatgctgcaacaccagcaattcaattagctaaagattatttagcaactagaccgaatgaaaaagtattagttattcctacagatacagcacgttatggattgaattcaggcggcgagccaacacaaggtgctggcgcagttgcgatggttattgcacataatccaagcattttggcattaaatgaagatgctgttgcttacactgaagacgtttatgatttctggcgtccaactggacataaatatccattagttgatggtgcattatctaaagatgcttatatccgctcattccaacaaagctggaatgaatacgcaaaacgtcaaggtaagtcgctagctgacttcgcatcactatgcttccatgttccatttacaaaaatgggtaaaaaggcattagagtcaatcattgataacgctgatgaaacaactcaagagcgtttacgttcaggatatgaagatgctgtagattataaccgttatgtcggtaatatttatactggatcattatatttaagcctaatatcattacttgaaaatcgtgatttacaagctggtgaaacaatcggtttattcagttatggctcaggttcagttggtgaattttatagtgcgacattagttgaaggctacaaagatcatttagatcaggctgcgcacaaaacattattaaataaccgtactgaagtatctgttgatgcatatgaaacattcttcaaacgttttgatgacgtagactttgacgaacaacaagatgctgttcatgaagatcgtcatattttctacttatcaaatattgaaaataacgttcgcgaatatcacagaccagagtaa

SEQ ID NO: 411450 - DNA, 522 bp, Staphylococcus aureus; identical to SEQ ID NO: 407539

SEQ ID NO: 411451 - DNA, 2109 bp, Staphylococcus aureus; identical to SEQ ID NO: 407538

SEQ ID NO: 411452 - DNA, 171 bp, Staphylococcus aureus
gtgtcagtcattattaatattttaatttttttagcgattttcggatatgccttgtatacgttagttaaatttttcaaacgttcgaaacaaggaaaatgtggtacatgtgacattgatcgtgattgttgtggaacagaacaacacacagcgaatcattttcctgggaaataa

SEQ ID NO: 411453 - DNA, 1995 bp, Staphylococcus aureus
atggaaaattattgtattttaggaaatcctaatgttggtaaaacatctttgtttaacgctttaactggttcgtatgaatatataggcaactggagtggcgtaacggtagagaaaaaagtagggaagctaaaagaaaatgtaggacaattaattgatttaccaggtacatatgatttatcgccgatttctaaagatgaaactgtagtgacagactatttattaaacgattctttttcaggaatcattaacattgttgatgcgagtcaactaaaaagaaatatgcaattaacagtacaattgttagaacttaatcaaccaatatacatcggattaaatatgattgatgtagctacaaagcgcgggataaaaatcgattatcataaattgatgaaaaagttaaaaacacctatttttccagttgtggcacgtacaggcaaaggaactaaacatttacttggcgaattaaagcatctaggggaagggtatcaaccgcattttaaaatcaattatggtgagaagattgaagagacaattaaaaatatgtgtcaaataataatgacagagacatctcatgataaatatcaagctagatttattgcgattcaattcttactaaataacatgcaaattgcaaatgaacttaattcagaggttgtaaataaattgtcgagtttacgggatcaagttgctgaacaagtagaggctgtatctgttcgtcgagagatggaacgtatacgcaatcattatattgagacgttattgcaagacgtggtaacgtatccagatgaagataagcaatatttcagctctagaatagacaagatattaacacataaatatatagggatgcctatttttctagcgattatgtggttgatctttcaaactacatttacatggattggcacacctttgtcggatcaactcgatgcatttataggtggtacatttacggatagtgtgaagacgattatgaattatcttggcgttataccatttttacaagatttaattacagatggcattattgctggtgtaggatcagtattagtctttgtaccacaaattgttgtgctctttttctttatatctttattagaagattcaggttatatggcacgtattgcggttttaatggatcgtattatggaatctttcggtttaagcgggaagtcttttataccgatgattatcggatttggttgtaacgtaccgagtattatggctgcgcgcagtattgaaaatgaaaaagagcgtttaacaacgatattaattgcaccattcatgtcatgctctgctagacttccagtgtatgcattgttcgtaggtatctttttcaaagagaatcaatctttagtagtattaagcttgtatgttttaggtattattatggcatttttagtcagtacagtacttactaagacagttttaaaaaatgataatgcaatctttattgtggaattgccaacataccgtgtcccttccattaaaacgttgtggcgtagtacttgggaaaaggctaaggggtttgttcgtaaagcaggtacttttatttttggcggctcagtagtcatttggctattaagttatgtaggaccacatggtatcaatgtgaatatcaatcaaagttttttacatatagttggtagcttctttggtatgttagtgcaaccgctcggatttggaacatggcaagcaggtgctacgttagtgccaggatttttagcaaaagaagttatcgtaagttcggtggcgattatctattcatcaggtgatgcaggccttgttaatgtgattcaaaaccaattcacaccgctatctgcgtatgcatttatgatatttatactattgtatattccttgtgtttctacagtggcagcaatccgtaaagagacttattcatggaaatggacggcacttgcagttgcctatcctctagtcattgcatatgtcttaacattcatcttttatcaagttggacatttatttgtttaa

SEQ ID NO: 411454 - DNA, 228 bp, Staphylococcus aureus; identical to SEQ ID NO: 404851

SEQ ID NO: 411455 - DNA, 2490 bp, Staphylococcus aureus
ttggcaaaatttttatataagatggtgacattcatcgcaaaacataaatggtccgcggtcattgcatggatagtgattgtagctgcaatattgataccacttgctacaaatgcaccgaaatttgacaatgatattaaaatgacaggattagagtcgttagatacgaataaaaagattgaaaaacattttaatcaagatagtgaaaaggcacaaatacgtgttgtctttaagacgactaaagatgatggaattctacaaccgagtattactaaagatattaagaaaacgttagatgatattaaaaaagatgacaagcacattgataaaatatcagatccttatgaaaataagcaaattagtaaagataaaacaacagcatttgcagatatcacatatgacgttagtcaaacatctttaaaagatgactctagagataatgttaaaagtcatttgaaagacttacgtgacaatcataatgtacagacagaattaacaggaacaggtatgacctctacagatataggtggtaattctgaattagttggtattattgttgcctttgttgtgttattaatcacatttggttcagttattgctgcaggtttaccaattataagtgcattaattggtttagcttctggtgtaggcattatcagtttgttaacttatgcatttgatataccaaatgtcacactgacattagccgtaatgattgggctcgctgttggtatcgattatgcattatttattttgtttagatatcgacaagtaatgaaaactgaaacagactatgttaaaggtatcggacttgcagtgggaacagcaggtagcgcagtcatcttcgctggtgtgacagttgtgattgctgtatgcggtttatcgctagttggtatagatttcttagcagtgatggggtttgcttcggcaattagtgttatatttgctgtattcagtgcactgactttattacctgcgttaattagcattttccataaacgcattaaagtgaacaaattgcagtctaattttaaaaaagatattgatacgccgtggtctaaatttattactggtaatgcacttgcagcagtattattaggtttaattatattagttgcagcggctattccagttagtcatatgcgtcttggcattccagatgacggtgttaaaccagcagattctacacagaaaaaagcttacgatattatctcggataaatttggcgaaggatttaatggccaaataccgatgttgataaatgtgaaagataaaaaggatgatccacaaggattacaacaagatttacagtctgtatataaagatattaaagataagaaaaatgtagatattgttacgccaccacaaatgagtaaagataatgattatgcattgatggttgtgatacctaaacatggacctaatgcagaaagtacaaatgacttagtacatgatttacgagattataataaagatgcgcaagataattatggatttaaaacggaaatttcaggacaaagtgtcattaatattgatatgtctaaaaagttaaatgaggcgatacctttatttgcaacagtaattgttgtattggcatttttcttattaatgattgtcttccgttcaattctaataccgttaaaagcagttttaggatttgtcttgtcattaatggcaacactaggttttacaacctttgtgatgcaagatggctttatgaaaggattattcggtatagaaacgacaggaccaatgctagccttcttgccggttattacaattggtatactattcggcttagcaatggattacgaagtcttccttatgtcgcgaattcatgaagaatatagtaaaacaggggataatgattattctatcaaagtaggattgaaagaaagtggtcctgttattgtagcagctgcattaatcatgtttagtgtcttctttgcgtttgtattccaagaagatgtcatgattaaatcaatgggtatggcattagcgtttggtgtactctttgatgccttcgtagtcagaatgatgttaattcctgcattaactaaattgtttggaaaaggttcgtggtatttaccagcatggttgaatcgtattattccacgagttgatattgaaggacatgcacttgaaaaatataaaacggttgaatcacaggaatctgaagctaaagatagtaaggaaacatacgacacaacctttaaagtatatccacaaggtgcaacaaatgtatcgaaacatcaagatgtacatggacaagatgatgcacgttcaatagtactagatgataaaacgatggcattgtaccaagaagtgaaacagcaatcagcaagttcattgttcttatatgatgctttaatggattatcaaaacaaacatcaactaaattcaaagcaacaagccacgaatatagaacagttgaataaaaatattgaaaagctcaatcaattgttagaaaaaaacttaagaaataaatcataa

SEQ ID NO: 411456 - DNA, 549 bp, Staphylococcus aureus
atgaaagagactgatttacgagttataaagacaaaaaaagcattgtcgagtagcttgctacaattgttagaacagcaattattccaaacgattactgtcaatcaaatttgcgacaacgcactcgtacaccgcacaacattttataaacatttttatgataaatatgatcttctagagtatttgttcaatcaattgactaaagactatttcgccagagacattggcgatcgccttaaccatccattccaaacgatgagtgatacgattaataataaagaggatttgagagaaatcgcagaattccaagaagaagacgctgaatttaataaagtattaaaaaatgtctgcattaaaattatgcataacgatatcaaaaataatagagaccgtatcgatattgacagcgacatcccagataatctcatattttatatttatgactcgttgattgaaggttttatacattggataaaagatgaaaaaattgactggcctggcgaagatattgataacattttccatagattaatcaatattaagattaaatag

SEQ ID NO: 411457 - DNA, 600 bp, Staphylococcus aureus
atgactgaaaaagaaaaaatgttagcagaaaaatggtacgatgcaaactttgatcaagacttaatcaatgaacgtgcacgagcgaaagatatttgctttgaattaaatcatacaaagccgagtgacacaaataaaagaaaggaattaatcgatcaattatttcaaacaacaacagacaatgtaagtatttcgattccttttgatacagattatggttggaacgttaaactaggaaaaaatgtctatgtaaacaccaattgttattttatggatggtggacagattacaattggcgataatgtttttataggacctaattgtggattctacacagcaacacatccacttaattttcatcatagaaatgaaggttttgaaaaagccggacccattcatattggcagtaatacttggtttggcggtcatgtagccgtgttaccaggggtgacgattggagaaggtagtgtgattggtgctggtagtgttgtcactaaagatattccgccacacagcttagcggttggaaacccttgtaaagtcgttcgtaaaattgataatgaggtaccatcagaagcattgaacgatgaaacactaaattag

SEQ ID NO: 411458 - DNA, 192 bp, Staphylococcus aureus
atgagaatattaattacaggcacagttgctatcttaatcattctaggtttagttaaaacgatacaagattacgaaatgacaaacgacacgagtcgtcagttgtcagacaacaaagatgatgataaagtcatccatcttaataattttaaaaatttacatgcgaaagaatttaacccatctgatttcttttaa

SEQ ID NO: 411459 - DNA, 2409 bp, Staphylococcus aureus
gtggctaatacgaaaaaaacaacgttagatatcactggtatgacttgtgccgcatgttcaaatcgtatcgaaaagaaactgaataaacttgatgacgttaatgcccaagtgaatttaactacagagaaagcaactgttgagtataaccctgatcaacatgatgtccaagaatttattaatacgattcaacatttaggttacggtgtcgctgtagaaactgtcgaattagacattacaggcatgacttgtgctgcatgctcaagccgtattgaaaaagtgttaaataaaatggacggcgttcaaaatgcaacggtcaatttaacaacagagcaagctaaagttgactattatcctgaagaaacagatgctgataaacttgtcactcgcattcaaaaattaggttatgacgcgtctattaaagataacaataaagatcaaacgtcacgcaaagctgaagcgctacaacataaattaattaagcttatcatatcagcagtattatctttaccgctattaatgttaatgtttgtgcatcttttcaatatgcatataccagcactatttacgaatccatggttccaatttattttagctacacctgtacaatttattattggatggcaattttatgtaggtgcttataaaaacttaagaaatggtggcgccaatatggatgtacttgttgctgttggtacaagtgcagcatatttttacagtatttatgaaatggttcgttggctaaatggctcaacaacgcaaccgcatttatactttgaaacaagcgccgtactaattaccttaatcttattcggtaagtatttagaagctagagcgaagtctcaaacaactaatgcgcttggcgaattattaagtttacaagctaaagaagcacgcattttaaatgacggtaatgaagtgatgattcctctaaatgaggtacatgttggagatacacttatcgttaaaccaggtgaaaagatacctgttgatggcaaaattattaaaggtatgactgccatcgacgaatctatgttaacaggtgaatctatccctgttgaaaagaatgttgatgatactgtaattggttcaacaatgaacaaaaacggtactattactatgacagcaacaaaagttggcggggacactgcgttggcaaatattattaaagttgtcgaagaagctcaaagttctaaagcgccgattcagcgattggcagatattatttctggttatttcgttcctatcgttgttggtatcgcactattaacatttatcgtgtggattactttagttacaccaggtacatttgaacctgcacttgttgcgagtatttccgttctcgtcattgcttgtccatgcgcattgggacttgctacaccaacatctattatggtaggtaccggtcgtgcagctgaaaatggtattttatttaaaggtggcgagtttgttgaacgcacacatcaaattgataccatcgttttagataagacgggtaccattacaaatggtcgtccagtcgtgacagattatcatggtgacgatcaaacgctacaactgcttgctactgctgaaaaagattctgaacacccattggcagaagccattgtcaattatgcaaaagaaaagcaattaacattaactgagacgacaacatttaaagcagtacctggtcatggaattgaagcaacgattgatcatcaccatatattggttggtaaccgtaaattaatggctgacaatgatattagcttgcctaagcatatttctgatgatttaacacattatgaacgagatggtaaaactgctatgctcattgctgttaattattcattaactggtatcatcgcagtggcagatactgtaaaagatcatgccaaagatgctataaaacaattgcatgatatgggtattgaagttgccatgttaactggcgataataaaaacactgctcaagccattgcaaaacaagtaggcatagatactgttattgcagatattttaccagaagaaaaagctgcacaaattgcgaaactacagcaacaaggtaagaaggttgcgatggttggtgacggtgtaaatgatgcacctgcattagttaaagctgatatcggtatcgccattggtacaggtacagaagttgcgattgaagcagctgatattactattcttggtggcgacttgatgcttattcctaaagccatttatgcaagtaaagcaaccattcgtaatattcgtcaaaatctattttgggcattcggctataatattgccggtatccctatagctgcattgggcttacttgcgccatgggttgctggtgctgcaatggcactaagttcagtaagtgttgtaacaaacgcacttagattgaaaaagatgcgattagaaccacgccgtaaagatgcctag

SEQ ID NO: 411460 - DNA, 207 bp, Staphylococcus aureus; identical to SEQ ID NO: 410909

SEQ ID NO: 411461 - DNA, 999 bp, Staphylococcus aureus
atgacaaaaattaaaatcatgagtgtacgtgatgaagatatgccttatatcaaggcgtgggcagagaaacatcatgttgaggtagatattactaaagaagcattaactgatgacaatgttgaaggtgtcgctggttatgatggcttatcgctatcacaacaaataccattatcagagcatgtttataaacgattaaatgaactaggtattaaacaaatcgcacaacgtagtgctggatttgatacatatgatttggagttagcaaacaagtataacttgattgtgtcaaatgtgccgtcatactctccgaattcaattgcggagtttgatgtgaatcaggctattaatgtggttcgtcattttaatcaaattcaaacgaaagtgcgagagcatgattttagatgggaacctactattttatcgaaatccattaaagatttaaaagtagctgttattggtacaggtcgaattggccgtgtagtagccgatatatttgccaatggttatcaaagtgatgtggtcgcatacgacccgtttcctaatgctaaaattgcaacgtatgtcgattacaaagatacgattgaggaagcggttgaaggtgctgatatcgtgacattacatgtacctgcaacgaaatataatcattatctatttaatgctgaattatttaaacactttaaaaagggcgcagtatttgtcaattgtgcaagaggttctttagtagatactaaggcgttattagacgcattagacaatggtgtgattaaaggtgcagcacttgatacgtatgaatttgaacgcaaacttttcccaagtgatcaaaggggcaaaacactgaacgatccattgttagaatcgttgattgacagggaagatgtcatattaacaccacatattgcgttttatactgaagctgcagttgaaaatctaattgtcgatgcattagatgcaacattagatgtattgcagactggagatactaggttacgagtaaattaa

SEQ ID NO: 411462 - DNA, 1155 bp, Staphylococcus aureus
atgatttctaacaaattagcaaatatccctgatagttatttcgggaaaacgatgggacgtaaaatcgaacatggaccattgccattaattaatatggcagttgggatccctgatgggcccacgccacaaggtattattgatcattttcaaaaagcactaactattcctgaaaatcaaaaatatggtgcttttcatggtaaagagatgttcaagcaagccattgtagatttttatcaaagacaatatgatgtgacgttagataaagaagatgaagtatgtattttatatggtacaaaaaatggattagtggcagtaccgacatgtgttatcaatccaggagattacgtgttactaccggatccaggttatacagattacttggcaggagtacttttagctgatggaaagccagtgccacttaatttagaaccgccacattatttgccagattggtccacagttgattcacaaataatagataaaacaaaactcatttatttaacgtatccaaataatccaactggatcgacagctacgaaagaagtttttgatgaagcgatagctaaatttaaagatacagacactaaaatcgtgcatgactttgcttatggtgctttcggtttcgacgctaaaaatcctagtatacttgcttcggaaaatgggaaagatgttgcgattgaaatttattccttgtctaaaggttataacatgtcaggttttagagtcggttttgcagttggtaataaagatatgattcaagctttgaaaaagtaccaaacgcacacaaatgctgggatgtttggtgcattacaagatgccgcaatatatgctttgaatcattatgatgattttttagaagaacaaagcaatgtatttaaagcacgtcgtgaccgattcgaagccatgcttgcaaaagttgatttgccatttgttcatgctaaaggtggcatatatgtatggttggaaacaccgtctggttatgacagcgagcaatttgagcaatttttagtgaaagagaaatcaatacttgttgcaccggggaaaccatttggagagaatggtaatcgttatgtgagaatctcattggcgttagatgaccagcaattagacgaagcagcaataagattaacagaattagcaaatttatataaataa

SEQ ID NO: 411463 - DNA, 1509 bp, Staphylococcus aureus
atgaagattgcagtaattggtgcaggtgtcacaggattagcagcggcagcccgtattgcttctcaaggtcatgaagtgacgatatttgaaaaaaatacaaatgtaggcgggcgtatgaatcaattaaagaaagacggctttacatttgatatgggtcccacaattgtcatgatgccagatgtttataaagatgtatttacaatgtgtggtaaaaattatgaagattatattgaattgagacaattacgttatatttacgacgtgtattttgaccgcgatgattgtataacggtgcctacagatttagctgaattacagcacatgctagaaagtatagaaccgggttcaacacatggttttatgtcctttttaacagatgtttataaaaaatatgaaattgcacgtcgctatttcttagaaagaacgtatcgcaaaccaagtgacttttataatatgacgtcacttgtgcaaggtgctaaattaaaaactctaaatcatgcagatcaattaattgagcagtacattgataatgaaaaaatacaaaaactgttagcctttcaaacgttatacataggaattgatccaaaacgaggcccgtcactatattcaattattcctatgattgaaatgatgtttggtgtgcattttattaaaggcggtatgtatggcatggctcaagggctagcacaattaaataaagacttaggcgttaatattgaacttaatgctgaaattgagcaaattattattgatcctaaattcaaaagggccgatgcgataaaagtgaatcgtgacataagaaaatttgataaaattttatgtacggctgatttccctagtgttgcggaatcattaatgccagattttgcacctattaaaaagtatccaccacataaaattgcagacttagattactcttgttcagcatttttaatgtatatcggtatagatattgatgtgacagatcaagtgagacttcataatgttattttttcagatgattttagaggcaatattgaagaaatatttgagggacgtttatcatatgatccttctatttatgtgtatgttccagcggtcgctgataaatcacttgcgccagaaggcaaaactggtatttatgtgttaatgccgactccggaacttaaaacaggtagcggaatcgattggtcagatgaagctttgacacaacaaataaaagatgttatttatcgtaaactagcaacaattgaagcatttgaagatataaaatcgcatattatatcggaaaccatctttacgccgaatgattttgagcaaacgtatcatgcgaaatttggttcggcattcggtttaatgccaactttatcgcaaagtaattattatcgtccacaaaatgtatcgcgagattataaagatttatattttgcaggtgcaagtacgcatccaggtgcaggcgttcctattgtcttaacgagtgcgaaaataactgtagacgaaataattaaagatattgagcaaggcgtgtaa

SEQ ID NO: 411464 - DNA, 864 bp, Staphylococcus aureus
atggcaatgatggatatgaattttaaatattgtcataaaatcatgaagaaacattcaaaaagcttttcttacgcttttgacttgttaccagaagatcaaagaaaagcggtttgggcaatttatgctgtgtgtcgtaaaattgatgacagtatagatgtttatggcgatattcaatttttaaatcaaataaaagaagatatacaatctattgaaaaatacccatatgaacatcatcactttcaaagtaatcgtagaatcatgatggcgcttcagcatgttgcacaacataaaaatatcgcctttcaatctttctataatctcattgatactgtatataaagatcaacattttacaatgtttgaaacggacgctgaattattcggatattgttatggtgttgctggtacagtaggtgaagtattgacgccgattttaagtgatcatgaaacacatcagacatacgatgtcgcaagaaggcttggtgaatcgttgcaattgattaatatattaagagatgtcggtgaagattttgaaaatgaacggatatattttagtaagcaacgattaaagcaatatgaagttgatattgctgaagtgtaccaaaatggtgttaataatcattatattgacttatgggaatattatgcagctatcgcagaaaaagattttcgagatgttatggatcaaatcaaagtatttagtattgaagcacaaccaatcatagaattagcagcacgtatatatattgaaatactggacgaagtgagacaggctaactatacattacatgaacgtatttttgtggataagaggaaaaaagcaaagttgtttcatgaaataaatagtaaatatcatataatatag

SEQ ID NO: 411465 - DNA, 1128 bp, Staphylococcus aureus
atgaaatggttatcacgaatattaacagtaatagtgactatgtctatggcgtgtggtgcattgatatttaatcgtaggcatcagctaaaggcgaaaacgctgaacttcaatcataaagcattaacaattattattccggctagaaacgaagaaaaaagaataggtcatttactacattcgataatacaacagcaagttccagtagatgtcattgttatgaatgacggatcgatagatgaaacagcacgtgtagcgcgttcatatggtgcgactgtagtagatgttgttgatgatactgaaggtaaatggtatgggaaatcacatgcttgttatcaaggtgtgacgcatgcatgcacgaatcgtattgcttttgtagatgctgatgtaactttcttaaggaaagatgctgttgaaacgttgattaatcagtatcaattacaaggtgaaaaaggattgttaagcgtacagccttatcatataacaaagcgtttctacgaagggttttcagcgatatttaatttaatgacagtcattggtatgaatgtattttctaccttagacgacggtcagactaaccaacatgcatttggaccggtgatattaacaaataaagaagattattatgcaactggaggtcataaaagtgcgaaccgtcatattattgaaggatttgctttaggaagtgcatatacttcacaatcattgcccgtaacagtttatgaaggatttccgtttgttgcatttcgcatgtatcaagaaggatttcagtcattacaagaaggatggacaaagcatttgtcaactggggcaggtggcacaaagcctaagatcatggcagcaatagtgttgtggttgttcggttctattgcgagtattgtagggctatgtcttagtttaaaatatcgccaaatgtctgtaggaaaaatgttaacagtttacttgagctatactacacaatttatttatctgcatcgaagggtcggccaattttctaatttattaatggtatgtcatccattgttatttatgttttttactaaaattttcatccaatcttggagacaaacgcattgttatggtgtagttgaatggaaaggtcgtcaatattctatatctaaagaacaataa

SEQ ID NO: 411466 - DNA, 1494 bp, Staphylococcus aureus
atgactaaacatatcatcgttattggtggtggcttaggtgggatttctgcagcaattcgaatggcacaaagtggctattcggtctcattatatgaacaaaataatcatataggaggcaaagtgaatcgtcatgaatcagatggctttggctttgatttaggtccatctattttaacgatgccttatatttttgaaaaattattcgaatatagcaagaagcaaatgtcagactacgttaaaatcaagagattgccacatcaatggcgtagcttttttccagatggaacgactatcgatttgtatgaaggtattaaagaaacaggtcagcataatgcgatattgtcgaacaaggatatagaggaactgcaaaattatttgaattacacaaaacaaatcgatcgtataactgaagaaggatattttaagcatggcttagatacactttctcaaattattaaatttcatgggccattaaatgcacttattaattatgattatgtacatactatgcaacaggccatagacaagcgtatctcgaatccatacttgcgacaaatgttaggctattttatcaaatatgttggttcttcatcatacgatgcgccagctgtattatctatgttattccatatgcaacaagagcaaggcctttggtatgtagaaggtggaatccatcatttagccaatgccttggaaaagttagcgcgtgaagaaggtgtcacaattcatacaggtacacgtgtggacaatattaaaacatatcaaagacgtgtgacgggtatcagattagatacaggtgagtttgtaaaggcagattatattatttcaaatatggaagtcatacctacttataaatatttacttcaccttgatactcaacgattaaacaaattagagcgggaatttgagccagcaagctcaggatatgtgatgcatttaggtgttgcttgccaatacccgcaattagcacatcataatttcttttttacggaaaatgcttatctcaattatcaacaagtttttcatgaaaaagtattgccagatgatccgaccatttatctagtaaatacgaataaaactgatcacacacaagcaccagtaggttatgaaaacatcaaagtcttaccacatattccatatattcaagatcagccttttacagctgaagattatgcgaagtttagggataaaattttggataaattagaagaaatgggacttactgatttaagaaaacacattatttatgaagatgtttggacaccggaggatattgaaaaaaattatcgttctaatcgtggtgcaatatatggtgttgtagcagataaaaagaaaaacaaagggtttaaatttcctaaagaaagtcagtattttgaaaacttgtactttgtaggtggatcagtaaatcctggtggtggcatgccaatggttacattaagtgggcaacaagtcgcagacaaaataaacgcgcgagaagcgaagaataggaagtga

SEQ ID NO: 411467 - DNA, 498 bp, Staphylococcus aureus
atgaaaatcataaaaaaatatatcaaaacagcatttttctgcagtatgtattggttaattgttcaactaaatatagcaaatttaggtacaagaattcctgacaagtattttcgtcagaagcatataatatttaaatcatttaactttgagaagcatggaaaattttggaacaaatggttttacgtaagaaaatggaaacataagattttagatggtcatcagcttaatcaaaatatatatgatcagcgtcatttaatgacaatcaatactgatgaaattgaaaaaatgattatagagacaaagagggcagagttaattcattggatatcgatacttccagtcatcatattcaataaaggccctcgtttagtaaagtatataaatattttctatgcaatgatagctaatgttccaatcattattgtgcaacgttataatcgaccgagattaacgcagttactacgcatattaaaacgaagaggtgaacgtcatgactaa

SEQ ID NO: 411468 - DNA, 738 bp, Staphylococcus aureus
atgaaaaaaatcgttacagctacaatcgctacagcaggacttgccactatcgcatttgcaggacatgatgcacaagccgcagaacaaaataacaatggatataattctaatgacgctcaatcatacagctatacgtatacaattgatgcacaaggtaattatcattacacttggacaggaaattggaatccaagtcaattaacgcaaaacaacacatactactacaacaactacaatacttatagttataacaatgcatcttacaataactatacaaacaatagccaaacagcaacaaataactattacactggtggatcaggtgcaagttatagcacaacaagcaataatgttcgtgtgactacaactgcagcgccatcttcaaatggtcgttcaatttctaatggttatgcatcaggaagtaacttatatacttcaggacaatgtacttattatgtatttgatcgtgttggtggaaaaattggttcaacatggggcaatgccaacaattgggctagtgcagctgctgcatcaggttatactgtgaacaatacccctaaagctggtgcaatcatgcaaacaacacaaggttactatggacatgtagcttatgttgagagcgtgaatagcaatggttcagtacgtgtttctgaaatgaactatggtcacggtgcaggtgtcgtaacatcacgaactatttcagcaaaccaagcaggttcatataatttcattcattaa

SEQ ID NO: 411469 - DNA, 1812 bp, Staphylococcus aureus
atggatacaaaagactttaaacgtttagaaaaaatgtattccccgcgatacttacccggattagatggattgagggcattcgcagttataggaatcattatttatcacttgaatgcacaatggttaagtgggggctttttaggagtagatacattcttcgttatttcaggttatttaataacaagtttgttgataagtgagtattatcggacgcaaaaaatcgatttactagagttttggaagcgacgattgaaacgactcattccggcagtgttatttttaatctgtgtcgtgcttacgttcacactgatatttaaaccggaattgattatacaaatgaaacgagatgctattgcagctatattctatgtttcaaactggtggtacatttcacagaatgtagattattttaaccaatttgctattgaaccactcaaacatttatggtctttagccattgaagaacaattttacttgcttttcccattggttatcacgttcttattacatagatttaaaccgagaaatattattcaaacgctatttattgtatcgttgatttctttaggacttatgatagtgattcatttcatcactggagataattcacgtgtgtattttgggacagatacacgactgcaaactttattgcttggttgtatattagcatttatttggccaccgtttgctttgaaaaaagatatttctaaaaagattgtcgtatcattagatattatagggatatctggttttgcggtgctaatgactttgttctttatagttggagaccaagatcaatggatttataatggaggattttacattatatcatttgcaactttattcattattgcgattgcggtacatccttctagtttatttgctaaatttttaagtatgaaacccttgctaattataggtaaacgatcatatagtttatatttatggcattatcctatcattgtttttgtgaacagttattacgtacaaggacaaatacccgtatacgtctatgtgatagaaattttgttaacagcgttaatggctgaaatttcgtatcgctttattgaaacacctatacgtaaaaaagggtttaaagcttttgcatttttacctaaaaagaaggggcaatttgctagaactgtgttagttatcctattattggttccgtctatcgttgtgctcagtggacagtttgatgcacttggcaaacaacatgaagccgagaagaaagagaagaagacggaatttaaaacaacgaagaaaaaagtcgttaaaaaagataagcaagaggataagcagacagcaaatagtaaagaggatattaaaaagtcatcaccactattaattggtgactcggttatggtggatattggtaatgtctttactaagaaaataccaaatgcacaaattgatggtaaagttggacggcaactcgttgatgctacaccaattgtgaaatcgcaatataaagactatgctaaaaaaggtcaaaaagttgtagtagagcttggtacaaatggcgcatttacgaaagatcaattaaatgaactattggatagtttcggaaaagcagacatttatttagtttctattagagtacctagagattatgaaggtagaataaataaattaatttatgaggcagctgaaaagcgctctaatgtacatctagtcgattggtataaagcttctgaaggtcatccggagtactttgcatatgacggtattcacttagaatatgcaggtagtaaagcactgactgatttgattgtaaaaacgatggaaacacatgctacaaataagagataa

SEQ ID NO: 411470 - DNA, 489 bp, Staphylococcus aureus
atggctataaacataattgaatataatagatcttataaggaagagttaatcgaatttattttatcgattcaaaaaaatgaatttaatataaatattgataggaatgatcaacctgatttggaaaacatcgaacataattatttgaatagcggaggtcaattttggcttgcaataaacaatcatcaaaatattgttggtactataggtttgattagactagataataatatgtctgcacttaaaaaaatgtttgttgatgaaggttataggaatttaaaaataggtaaaaaacttttagataaagttataatgacatgtaaagaacaaaatatcgatggtatttatttaggaacaattgataaatttattagtgcacagtatttttattctaataatggcttccgagaaattaagcgaggagatttaccaagtagttttcctaaattagatgtagataataggttttattatagaaatttaaaagattaa

SEQ ID NO: 411471 - DNA, 702 bp, Staphylococcus aureus
atgaaaaagacaattatggcatcatcattagcagtggcattaggtgtaacaggttacgcagcaggtacaggacatcaagcacacgctgctgaagtaaacgttgatcaagcacacttagttgacttagcgcataatcaccaagatcaattaaatgcagctccaatcaaagatggtgcatatgacatccactttgtaaaagatggtttccaatataactttacttcaaatggtactacatggtcatggagctatgaagcagctaatggtcaaactgctggtttctcaaacgttgcaggtgcagactacactacttcatacaaccaaggttcaaatgtacaatcagtaagctacaatgcacaatcaagtaactcaaacgttgaagctgtttcagctccaacttaccataactacagcacttcaactacttcaagttcagtgagattaagcaatggtaatactgcaggtgctactggttcatcagcagctcaaatcatggctcaacgtactggtgtttcagctgctacatgggctgcaatcatcgctcgtgaatcaaatggtcaagtaaatgcttacaacccatcaggtgcttcaggtttattccaaactatgccaggttggggtccaacaaacactgttgaccaacaaatcaacgcagctgttaaagcatacaaagcacaaggtttaagcgcttggggattctaa

SEQ ID NO: 411472 - DNA, 1056 bp, Staphylococcus aureus
atgacatcaattaaaacaattacaccaaaagattttatatttagagttttatcgggtgtcgctataggtattgttgcgggtttagttcccaatgctatacttggagaaatttttaagtattttatggattatcatccaatttttaaaacattactgggtgttgtagtagcaattcaatttacagtaccagctttgattggtgcattaattgccatgaaatttgacctatcgccattagcaattgcagtagtatctagtgctgcatatgtaggaagcggggcagcacaatttaaaaatggtgcttgggttattgctggtataggtgacctgataaatacaatgatcacagcagctatagccgtattatttattttgttaattcaacatcgtgtcggtagtatggcgttgattgtttttccgacagtagttggaggtatttcaggagctataggtgttctaatattgccatatactagaatgattacaacaggcattggaaatatggtaaatggattcacagaattacaaccaattataatgagtattttaatttcaatggtatttagtcttattattatttcaccgttatctacggtagcaattgcttttgcaataggtattactggactagctgctggatctgcatcaatcggaatttcagcaactgaagccgttcttattattggaactagtaaagtaaatagattaggtgtaccactatctgtattcttcggtggggtcaaaatgatgataccgaatattgtcaaatacccaattttaatgttgccaatattaacgactgcaattgtttcagggttggtatcagcaatagttggtatttatggaacgaaagaatctgctggttttggttttataggtatggttgggccaatcaatgcgtttaaattcatgcatgttgattcagcatggttaagtgtattgcttattgtagttgcattctttgtagtaccattccttacagcgtgggttgcggatatcgtttatagaaaagtatttcgtctttatacaaatgatattttcaaatttatgggttaa

SEQ ID NO: 411473 - DNA, 588 bp, Staphylococcus aureus; identical to SEQ ID NO: 408737

SEQ ID NO: 411474 - DNA, 321 bp, Staphylococcus aureus
gtgagcgagacagatgaacctcaggggtttgaacacacgcataacatattaaatattaatcagaatagtcagagtctaatgacattcattataagtaaattgaagtcgaagttgaagcatcacataataattgctcgtggtaataagcgaatcgactatcgactgtcgtataacttttacactacgtattatgataatgtagaaatcaagaaaatcgactgtgaatatacctatgcgatggccattgcaattttaataagacacacgatgtcattcgacaatgctcatttctttgctcagctacgtcatcctgtcttataa

SEQ ID NO: 411475 - DNA, 231 bp, Staphylococcus aureus
atgaaaattttagatagaattaatgaacttgcaaataaagaaaaagtacaaccacttactgtagctgaaaaacaagaacaacatgctttgagacaggactatttgagcatgattagaggtcaagtgttaacaacattctctacaatgaaagtcgttgatccaatcggtcaggatgtcacaccagataaagtttatgatcttcgccaacaatacggttatattcaaaattaa

SEQ ID NO: 411476 - DNA, 378 bp, Staphylococcus aureus
atgattcaatcaatgtggtttaatttgcatgtgcaagatttagaaaagagcgcacagttttataaagcgttaggatttaaaataaatagaaacccacaaatgttagataaaatggtaggcattcaaataggtcaaacaaccgtaattttaatagaaaacaagcattttcaaaatgtgagtcagcaaagccttaacactgaaccaaatgaagtgatgatttctctaggtgtgaacacaaatgaagaagttgaccagttggtgaataaagtgaaagaagcgggtggcacagtcgttcaagaaccaacagtaagccaagggttttatggtgcaatgttcaaagatcttgatggacaccattttaattttttagtctgctaa

SEQ ID NO: 411477 - DNA, 822 bp, Staphylococcus aureus
atgaaagatattttagtaataggcgcaacagggaagcaaggtaatgcagttgtaaaacagttgttagaggatggatggtatgtaagtgcattaacaagaaataagaataatcgtaaactttcagacataggacatccgcatttatcaatcgttgaaggtgatctgagtgatagtgttagtttgcaatcagcgatgaaagggaagtatggcttatacagtattcagccaatcgttaaagatgatgttagcgaagaattaagacaaggtatgaagataattgaaatagctgagcaagaaaatattcaacatattgtgtatagtactgcgggaggggttaatcgaaatcgaactggcccacactttgaagtactagcaaaaatagaaaatagattaatagaatctaatataaatgcaacaattatcaaaccatcattctttatggataattttttacgtattgctaaagtcgaagatgaacgtattacattaccagaatttattaatccgaatataaaattcacaatgatttcttctattgatatagctaaaattgcatcgtatatttttgcacatccacaaagctttacgcatcaatcaatagagattggttccgatgaagttacattaagtgaagcagcaacaatttttagtgaagtgacaggtaaatcaactgttatagaaggagaatttgttagtggtgttgcagaaaagcaatggttggaagaaaaaggttatgaagtagactttgaattaatggctgaaataaatccaacaagattatcattaagtgattggcttaaagtccaagactataataagtaa

SEQ ID NO: 411478 - DNA, 300 bp, Staphylococcus aureus
atgtctttaaataaagagcaaagacgtattacagctgaagaattgcaagcacatttcgaagcatcaactttatcggttcaaatgattgcagaaaaactgaatgttactacagaagatgtggaaaaagcattagctatgaaagcgccactaggcatttttagtcatcaattacaacgatttattcatttagtatgggatgtcagaaatgtaataaatgacaatattaaggaaaatggacaaacaccagaaccatatacgtatttaaaaggtgaaaaagaggactattggtttttaagataa

SEQ ID NO: 411479 - DNA, 705 bp, Staphylococcus aureus
atgactaaaattgtgttaattacaggtggtaataaaggattaggctatgcaagtgcggaggcacttaaagcattgggctacaaagtgtatataggttctcgtaatgacgtaagaggacaacaagcatctcaaaaattaggtgttcattatgtacagttagatgttacaagtgactactctgtcaaaaatgcttataacatgattgctgaaaaagaaggtcgtcttgatatcctcattaacaatgcaggtatatctggtcaattttcagcaccttccaaattgacacctcgtgacgttgaagaagtatatcaaacgaatgtatttggtatcgttcgaatgatgaacacattcgtccctctcttagaaaaatctgaacaacctgttgtcgtcaacgtatcaagtggtttaggttcatttggaatggttacaaaccccgaaacagctgaatataaagtgaattcattagcttattgttcgtctaaatcggcagtaacaatgctaacattacaatacgctaaaggattaccaaacatgcaaatcaatgctgctgatccaggtgctacaaacactgatttagttggtgattttagtaataattcaaaacatgtttctgaagggatcaagccaatcattcaattagcaaccattgatgcagatggcccgacaggtacatttattaatgggaatggtgaaatgccttggtaa

SEQ ID NO: 411480 - DNA, 1011 bp, Staphylococcus aureus
atgaaaagtattacgtttgaagaacattatgtcattgaagatattcaaaaagaaacgatgaatgcgatatcggcagatcctaaaggtgtgccgatgaaagtaatgttagaaggccttgaaaaaaagacaggttttacaaatgcagatgaattatcacatcatgatgaacgtatccaatttatgaataatcaagacgttcaaattcaagtcttatcttatggaaatgggtctccttcaaatttagttggtcagaaagccattgaattatgtcaaaaagccaacgatcaattggcaaactatattgcacaatatcccaatcgttttgtaggctttgcaactttacctatcaatgagcctgaagccgcagcgcgagaattcgaacgttgcatcaatgatttaggattcaaaggtgcgctcattatgggacgtgcacaagatggttttcttgatcaagacaaatatgacattattttcaaaaaagctgaaaatttagacgtaccgatttatctacatcccgcgccagttaacagtgacatttatcaatcatactataaaggaaattatcctgaagtaactgcggcaacatttgcttgttttggttatggttggcacattgatgtcggtattcatgcaatacatctagtattatctggcatttttgatcgttatccaaagttaaatatgattattggacattggggtgagtttatccccttcttcttagaacgtatggatgaagctttattcgctgaacatttgaaccaccctgtaagctattactttaaaaataatttttatatcacaccgagtggcatgttaacgaagccacagtttgatttagtcaagaaagaagtaggcattgatagaattctttatgctgctgattatccatatattgagcctgaaaaattaggtgtatttttagatgaactgggtttaacagatgaagaaaaggagaaaataagttatacaaatggtgttaaattattaggtttatcatctaacaattaa

SEQ ID NO: 411481 - DNA, 831 bp, Staphylococcus aureus
atggaaactttagaattacaaggcgctaaattacgctaccaccaagtcggacaaggacccgtgctcatctttattcctggtgcaaacggtaccggagacatttttctacctcttgcagaacagttaaaagaccattttactgttgtagccgttgatcgtcgtgattatggagaaagcgagttaactgaaccactccctgattccgcttctaaccctgacagtgattatcgtgtcaaacgcgacgcacaggacattgccgaacttgcaaagtcattaagtgatgaacctgtctatatattaggttcaagttcaggttcaatcgttgcgatgcatgtgttaaaagattaccctgaagtcgttaaaaagattgcatttcatgaaccaccaattaatacatttttaccagacagtacttattggaaagataaaaatgatgacattgtgcatcaaattttaacagaaggcttagcaaaaggcatgaaaacatttggtgaaacattaaatatcgcaccaattgatgcaaaaatgatgtctcaacctgctgatactgaagaaggacgtatagaacagtacaaacgtacgatgttctggtcagaatttgaaattagacaatatacgcattcagatattactttggatgatttcataaaatacagcgataaaatcaccctactaaatgggacagattctagaggctccttcccacaagatgttaacttttatataaataaagaaactggcatacctattgtagatattccaggcggtcacttaggttatattcaaaaacctgaaggctttgctgacgtattattaaatatgtggggttaa

SEQ ID NO: 411482 - DNA, 1347 bp, Staphylococcus aureus
atgcacatgttagaagtgaaatatgatatgagaaccgggcattatacgcccatacctaatgaacctcattatttggttattagtcatgcggataaacttaccgcaacagaaaaagcgaaattaagattattaatcataaaacagaaattagatatttcattggcagaaagtgtagtttcttcgcctatagcgagcgaacatgtgatagaacaattgacactatttcaacatgaacgacgacatttaagacctaaaataagtgcgacatttttagcctggttgttgatatttttaatgtttgcattgccaatcggtatcgcttatcaattttcagattggtttcaaaatcagtatgtatcagcatggatagaatatttaactcaaacaacattgctcaatcacgatatattacagcatatattatttggtgattatggtgtgctatcacttggaacatattcgctcgtatgggcattgccggttgtaatattgattagtttatcaactgctgtaattgatcaaacaggactcaaatcatggatgatatgggcaattgaaccttcaatgttacggataggattacaaggcaatgatatcgtgccactattagaaggatttggatgtaatgcagcagccatttcacaagcagcacaccaatgtcatacctgcacgaagacacagtgcatgagcttaataagttttggtagttcttgcagttatcaaataggcgcgacattatctatttttagtgtagctggaaagtcatggctgtttatgccgtacttaatattagtactattaggtggcatcttgcataataggatatggttgaaaaagaatgatcaacaacttagcgttccgctaccttatgataggcaattacatatgccaaatatacgtcaaatgttgctacaaatgtggcaaaatatacaaatgtttatcgttcaagcgctacctatttttatcacaatctgtcttattgttagtattttatcactaacgccaattttgaatgttttatcacaaatatttacacctatattatcgttattaggcatctcgtcagaattgtcaccagggattttattttcaatgattcgaaaagacggcatgctcttgtttaatttgcatcagggcgccttattacaaggaatgacagcaatacagttactactacttgtgttttttagttcaacttttacagcgtgctcggtcacaatgacgatgcttttgaaacatttaggtggtcagtcagcactaaaattaattggaaagcaaatggtgacatcattgtctttagttattggtgtaggcatcattgttaaaatggtaatgttgattatttaa

SEQ ID NO: 411483 - DNA, 1107 bp, Staphylococcus aureus
atgcaacatcataaagtggctattatcggtgccggtgctgcaggtataggtatggccattaccttaaaagatttcggtataaaagatgtcattattttagaaaaaggaacagtaggacattcatttaaacattggccgaaatcgacccgtacgattacgccatcatttacgtctaatggatttggcatgcctgatatgaatgcaatttccatggatacttcaccagcatttacatttaatgaagaacatatttccggagaaacatatgctgaatatttacaagtggttgccaaccattacgagctgaatatctttgaaaacacagttgtcacaaatatatctgtagatgatgcatattatacgattgcaacgacaacagagacatatcacgcggattatatctttgtcgcaacaggtgattataatttccctaaaaagccatttaaatatggtattcattatagtgaaattgaagactttgataactttaataaggggcaatatgtggttatcggaggtaatgaaagtggctttgatgctgcatatcaacttgcaaaaaatggctctgatatcgcactttatactagcacaaccggtttaaatgatccggatgctgatcctagtgttagattgtcaccttatacacgtcagcgactaggtaatgtcattaagcaaggagctcgcattgaaatgaatgtgcattatacagttaaagatattgattttaacgatggacagtatcatatcagttttgatagcggacaaagtgtgcatacgcctcatgaaccaatactagcaactggctttgatgcaacaaaaaatccaatcgttcaacaattatttgcgacaacaaatcaagatattaaattaacaacacatgatgaatcgacacgttatccgaatatttttatgattggtgcaacagttgaaaatgataatgccaaattatgctatatctataaattcagagcgcgatttgcagtacttgcacatcttttaacacagcgggaaggcttaccagctaaacaagaggtcattgaaaattaccaaaaaaatcaaatgtatttagatgattattcatgttgtgaagtgtcatgcacatgttag

SEQ ID NO: 411484 - DNA, 297 bp, Staphylococcus aureus
atggaaacaataggaagcattatttatttaaaagaaggttcgcaaaagttaatgattattaaaagaggaccaattgtagaaattgaaaatcaaaagtatatgtttgactattctgcatgtaaatatccgattggtgctgtggaagatgaaatttattattttaacgaagaaaatatagattcagttatttttaaaggttattctgatcaagatgaggttagatttcaagagttgtctgataatatgaaacaaaatttggatagtgaaatacaacgtggagaagttacacaacaataa

SEQ ID NO: 411485 - DNA, 372 bp, Staphylococcus aureus
atgatgtctaataaacttgatgaaatcaataaaataatcacagcgaaacataagcaaatggatgacttatatgatgaaaagcaagaggttaaagcattgatagatgaaagtgatgcgcttaatcattcgatagaacaattatatcaacatttaagtgagcgttattatagtagcaatatggctagtcgcatggaacagttacgcgatgaatttcattttgcgaaacgacgttcaacggaagcgttatacgagcagcaacagcaaattcaacatggcattcgtaaagcggaagaagagatgattgacttggaaatgcgaaggaatatcgaaatcgagatggtgacaaaggaggaaaataaatggaaacaatag

SEQ ID NO: 411486 - DNA, 279 bp, Staphylococcus aureus
atgatgagtacagttcaaagtgatatttttaagaccaatagtgcatcatcatctattaaaagcgctgttgaaacatgtaataatgtttcgaaaccggataaagatgaaagtacaacagtaagtggaaataataatgctcatagtgtgatagatgatttgattagtaagaatcaatctgttgctgaagcaatacgaactgcgagcgatagtatacaaaaagttggcgaagaatttaatcaaacagacgtaatgattggtaatgaaattggcaaaaattaa

SEQ ID NO: 411487 - DNA, 867 bp, Staphylococcus aureus
atgaatgaacaatggttagagcaattacctttaaaagatattaaaaagatttcaccagtgagtggtggtgatgtaaacgaagcatatcgagtcgaaacggatacggatacatttttcttacttgtccaacgtggacgtaaagaatcattttatgctgcagaaattgcaggtttaaatgaatttgaacgtgcaggtatcacggcacctagagtaattgcaagtggcgaggttaacggtgatgcgtatttagtgatgacgtatttagaagaaggggcttcagggagtcaacgccaattagggcaactcgtagctcaattacacagtcagcaacaagaagaaggcaaatttggcttctcattaccttatgaaggtggcgatatttcttttgataatcattggcaagacgattggtgtaccatttttgtcgacaagcgcatggaccatttgaaagatgagttgctaaatagagggctatgggatgccaacgatatcaaagtatatgacaaagtgcgacgtcaaattgtggcggaattagaaaagcatcaaagtaaaccgtctttattacatggtgacctatggggtggtaattatatgttcttacaagatggtcgtccagcgttatttgatccagcgccattatatggtgacagagaatttgatatcggtattacaacggtatttggtggttttacgagcgaattttatgatgcgtataataaacattatccactcgcaaaaggtgcatcctatagacttgaattttatcgtttatatttattgatggtgcatttattgaaatttggggagatgtaccgtgatagtgttgcgcaatctatggataagattttacaagatacaacaggttag

SEQ ID NO: 411488 - DNA, 1065 bp, Staphylococcus aureus
atgtacaaattaattaaacctttcttattcaaaatcgaacccgaaaaagcacacggactaactatcgatgcattaaaaacgttacaaaaatttccggttttattcccagtcgtcgataaactatttacttataagaatccaacgttatcacaaacgatacaaggtaatacgtacgacaatccaattggcttagcagctggtttcgacaaatcttgcgaagtgccaaaagcattggaacaccttggattcggtgctttagaattaggtggtatcacacctaaacctcaaccgggtaaccctcaaccacgcatgtttagattattagaagatgatgccttgataaatcgaatgggcttcaataatattggtatgaacaaagcactcagtcatttgcgtaaaaatgcttatcaagtacctgttggtatcaatgttggtgtgaataaaatgacaccttatgaagcgcgttatcaagattatataaaggttgttgatacgtttaaacacgacgtttcatttttcacagtcaatatcagttctccaaatactgaaaatcttcaaaacttccatgataaagatgaattttcaatgttatgccaagctttaacaacatttaaaaaacagcacgatgtaacagtgccaatttacttaaaactaacgtctgatatggatttcgatggcttaaaagcactattaccagcgattactgagacatttgacggtatcatcttagcaaacacaacgcgacaacgagatggtttaacttctgctaataaagtcgaagaaggcggtttgagtggtcgtccattatttgaacgtaatttaaaattgattaagtatgcttatcagcaaacaaatggtgaatttttaattataggtacaggcggcgtattcagtactgaagatgcaatcaaaatgatgcgtcacggtgcgtcacttattcaaatttattcatcacttgttattgaaggcccaggtttaactaagaaaatgaacaaaggcatcgcacgttacttaaaagatcatcattttgacaatgtcagtgatattataggactagatgcctaa

SEQ ID NO: 411489 - DNA, 276 bp, Staphylococcus aureus
atgactaaagaaacagataataaaaaaacagtagcgacttctgacaacaaagacacaaagcaacaaaatcaaactgaagaagatgaacgtcaaggtttaaatggttatcgtaaaacagatcttgatttagaaatcgagcaagagctacgtgaaatgatgaaaacaggtgaaaatgaaacgaaaaacgactacaaaaagtttaaagttttttctcttatttcaacacttgtcattgttattttagcaattataagatttgttcataaaatgatgtaa

SEQ ID NO: 411490 - DNA, 723 bp, Staphylococcus aureus
atgattaatgctgaaccaattatcagtaaaatgaaaaatcaaaaaattaattatgacaaggtgttgaagaaattaatcgggcagtgggaaagagaagcaatcagacctaaaatcttattgcatagttgttgtgcaccttgtagtacatatacattagagtttttaacacaatatgcagacattgcaatttatttcgcgaattccaatattcatccgaaaaatgaatatttacgacgtgctaaagtgcaagaacaatttgtggaagattttaatcgcaagactggtgcgaatgtgaagtatattgaagcaccttatgaaccgcataagtttatgaaaatggtgaaagataaagaattagctgatgaaaaagaaggcggcttacgttgtactgcttgttttgaaatgcgtttggatattgtagctaaagcagctgtagagcatgggtatgactattttggaagcgcactaacgttatcccctaaaaagaacgcacaattaatcaatgaacttggtatggatgtccaaaaaatatacgatgtgaattatttgccaagtgattttaagaaaagtaaaggttatgagcgttccatagaaatgtgtaatgactataatatctttaggcagtgttattgtggatgtgtctttgcagcgatgcaacaaggtattgattttaaaacagttaataaagaagcgaaagcatttttagaacaatatccagattaa

SEQ ID NO: 411491 - DNA, 450 bp, Staphylococcus aureus
atgacagcattattcccttatatcgcttttgaaaattcaaaagaagcccttgcatattacgaagaagtatttggtgcaactgacgttaaacgtttagaagttggcgaagaacaagcgtcacattttggtatgactaaggaagaagcgcaagaagcaactatgcatgctgaatttgaagtgcttggcgtaaaagtgctatgttctgattcttttggtcgcgctgacaaaattaataatggcatatcattattaattgattatgatgttaacaataaggaagatgctgataaagttgaagcattctatgagcaaattaaagatcattcttcaattgaaatagaattaccgtttgctgaccaattctggggtggcaaaatgggcatctttaccgataaatacggtgttcgttggatgttacatggtcaagactatactgcaatccaacaataa

SEQ ID NO: 411492 - DNA, 210 bp, Staphylococcus aureus; identical to SEQ ID NO: 407536

SEQ ID NO: 411493 - DNA, 372 bp, Staphylococcus aureus
atgactatagatcgacgtattagaaaatcacaagttgcaatgagaaatgcatttattgaacttttacatcaacaccaattagaagagattactgtgcaacaaattgcagatttagctgatgttaaccgtagtacattttatacgcattattatgataaatatgatttgcttgaaaaattagaggaccagcagttggaggaaataagaggcttcattcatgatgagaagttaaatggagcagttaagttatccacggataatatacatcaaattatgaccgttttaatagaaatgatagaaaaagacatcgcattttatcaattgatgtttcgtatgggtaaagattcaaatatccacgaaaaaactttatga

SEQ ID NO: 411494 - DNA, 1683 bp, Staphylococcus aureus; identical to SEQ ID NO: 407535

SEQ ID NO: 411495 - DNA, 384 bp, Staphylococcus aureus
gtgataagaacaatgatgaatgctaaaattcatagagcaagagtgactgagtcaaatttaaattatgtaggtagcattacgattgattcagatatattggaagcggtagacatcttgccaaatgaaaaagtagccatcgtgaataataataatggtgcacgttttgaaacatacgtaatagctggtgaaagaggtagtggtaaaatttgtttaaatggtgcagcatcaagacttgttgaagtaggcgatgtagtcataatcatgacttatgcacagttgaatgaagaagaaattaaacaccatgcacctaaagtagcagtaatgaatgaagacaatgtcattattgaaatgattcatgaaaaagaaaatacgatagtgttataa

SEQ ID NO: 411496 - DNA, 852 bp, Staphylococcus aureus
atgactaagctgattactacggtaaaagagatgcaacacattgttaaagcagccaaacgctcaggcacaacgattggttttatcccaacaatgggtgccttacatgatggacatttaacgatggtacgcgaatcagttagtacaaatgatattacagttgtgagtgtatttgttaatccattacaatttggtccaaacgaagatttcgatgcttatccgagacaaattgataaagatttagaattagtatcagaagtaggggcggacattgtttttcatcctgcagtagaagatatgtatccaggtgaattaggtattgatgtcaaagtaggtccattagctgatgtgttagaaggagcgaagcgtccagggcattttgatggggtggtaacagtagttaataagctatttaatattgttatgccggattatgcttattttggtaaaaaagatgcccagcaattggctattgtcgagcaaatggtaaaagacttcaatcatgccgttgaaattattggtattgatatcgttcgagaagcagatggtttggcgaaaagttcaagaaatgtttatttgacggagcaagaacgacaagaagcggtacatttaagtaaaagtttgctattagcacaagcgttgtatcaagacggtgaacgtcaaagtaaagtaattatagacagggttactcaatatcttgaatcacatataagtggacgcattgaagaagttgctgtttatagttatcctcaattagtagaacaacgtgaaataactggacgcatatttatctcgttagctgtcaaattttcaaaagcgcgtttaatagataatataataattggagctgaataa

SEQ ID NO: 411497 - DNA, 819 bp, Staphylococcus aureus
ttgaaaacagtaagtcaattaatagatatgaaacaaaagcaaactaaaatttctatggtaacagcttatgattttccaagtgctaaacaagtggaagcagcgggtattgatatgattcttgttggggattcacttggtatgactgtattaggttatgaaagtaccgtacaagtgacgttagcagatatgattcatcacggtcgtgcagtaagaagaggcgcaccaaatacatttgtagttgttgatatgccgattggtgcagtaggcatctctatgacacaagacttaaatcatgctctaaagctttatcaggagacgaatgcaaatgcaattaaagcagaaggagcgcatattacaccatttattgaaaaagcaacggcaataggtattcctgttgttgcacatttaggattaacacctcaaagtgttggcgttatgggatataaattacaaggtgcaacgaaagaagcagctgagcaacttattttagatgcgaaaaatgtagaacaagctggtgcagttgcgttagtacttgaagcaattccaaatgatttagcagaagaaattagcaagcacttaacaattccagtcattggtattggtgcaggaaaaggtacagatggtcaagtattggtttatcacgatatgttaaattatggtgttgaacataaagcgaaatttgtgaagcaatttgctgattttagtgttggtgtggatggtttaaaacaatacgatcaagaagttaaatctggtgcatttccatcagaagcatatacgtataaaaagaaaattatgaatgaggttaataacaatgactaa

SEQ ID NO: 411498 - DNA, 861 bp, Staphylococcus aureus
atgttatcagttgcgattatcggcccaggcgctgtcggtacaactattgcctatgaattacaacaatcattgcctcatacaacgcttatcgggagacacgccaaaacaataacatattatactgtaccacatgcacctgcacaagatattgttgtgaaaggttatgaagatgtcacaaacacatttgatgttattattattgcggtcaaaacacatcaacttgatgccgttattcctcatttaactcaccttgcacatgaggacacgctcatcattttagcccaaaatggttatggtcaactcgaacatatttcatttaaaaacgtatgccaagcagttgtctatataagtggtcaaaagaaaggcgatgttgttacgcacttcagagattatcaattacgtatacaagataatacattaactcgacaatttagagatttggtccaagaaagtcaaatcgacattgtattagaagcaaatattcaacaagctatttggtataaattgttagttaacttgggcattaattctataacagcactcgggagacagacagttgcaatcatgcataatcctgaaatacgtacactgtgtaggcagctattactagatggttgtcgtgttgcacaggcagaggggttaaacttttcagaacaaactgtcgatactattatgactatatatcaaggttatcccgacgaaatgggaacgagcatgtattacgacattgtgcatcagcaacctcttgaagtcgaagcgattcaaggctttatttatcgacgtgcacgtgaacacaatcttgacaccccatatcttgatactatttatagctttttacgcgcttatcaacaaaatatgtaa

SEQ ID NO: 411499 - DNA, 705 bp, Staphylococcus aureus
atgacgaatgtcttgtatcaacacggcacattaggaacgttaatggctggcttactagaaggaacagctacaattaatgaattattagaacatgggaatttagggattgcaacgttaacagggtctgatggcgaagtaatatttttagacgggaaggcatatcatgctaacgagcataaacaatttatagaattaaaaggcgatgagaaagtaccgtatgcatcgattactaattttaaagcgagtaagacattttcattgcaacaattatcacaagatgatgtattcgcacaaattaaaaatgaaatgttaagtgagaatttattttcggctgttaaaatttatggcacatttaaatatatgcatgtacgtatgatgcctgctcagcaaccaccatacacacgtttgattgattcagcacgcagacaacctgaagaaaaaagacaagatattcgtggtgccattgttggatttttcacaccagaattatttcatggcgtagggtctgctggttttcatatacattttgcggatgatgaaagagcttatggtggacatgttcttgactttgaagtggatgacgttgtcgttgagatacaaaactttgaaacattccaacaacatttcccggtaaataacgagacatttgttaaagcgaaaatagactataaagatgtggcagaagaaattagagaagctgaatag

SEQ ID NO: 411500 - DNA, 960 bp, Staphylococcus aureus
atgaaaacatttggtaaaaaggttgtattaatcggagatggatctgtaggatcaagctatgcctttgcaatggttacgcaaggtgttgctgatgaatttgtaattattgacattgcaaaagacaaagtaaaagcagatgttcaagatttaaaccatggtacagtccacagtccttcaccagttgatgtgaaagcaggtgaatacgaagactgtaaagatgcagatttagttgttattacagctggtgcacctcaaaagccaggtgaaacacgtttacaattagttgaaaaaaatactaagattatgaagagcattgttaagagtgttatggatagcggctttgatggatatttcttaatcgcggcaaaccctgtagacattttaacaagatttgtaaaagaatatactggattaccagcagaacgtgttatcggttcaggtactgtattggacagtgcacgtttacaatatttaattagccaagaacttggtgttgcaccttcaagtgttgacgctagtattattggtgagcatggtgatactgaacttgcagtttggtcacaagcaaatgtagcaggtatttcagtatatgacacattaaaagaacaaactggtagcgaagctaaagcggaagaaatttatgtaaatacacgtgacgctgcttatgaaattatccaagctaaagggtcaacatactatggtattgcattagcattgatgcgcatttcaaaagccattttaaataatgaaaataatgtcttaaatgtttctatacaattagatggtcaatatggcggtcacaaaggcgtttacttaggtgtaccgacattggttaaccaacatggtgcagttaaaatttatgaaatgccattaagtgcagaagaacaagcattgttcgataaatctgttaaaacattagaagatacatttgattcaattaaatatttattagaagactaa

SEQ ID NO: 411501 - DNA, 1449 bp, Staphylococcus aureus
atgggaagttttttcaataaaatagcacgaaaagaggatccggctatctatcaaaataaagatggtcatttaaagcgtacacttcgggtgcgtgatttcttagctttaggtgtaggaacaattgtatcgacatctatctttacgctacctggcattgttgctgcagaacatgcaggaccggccgttgcgttatcattcttactcgctgctattgttgccggtttagttgcatttacttatgcagaaatggctgccgctatgccatttgcaggttcagcctattcttgggtcaatgtattatttggtgaattttttggatgggttgccggttgggctttattagctgaatattttatcgccgtagcctttgttgcatcaggattctcagcgaatttacgcggacttgtaaaaccaattggcatcgaattacctgcagcattatcaaatccatttggtacgaatggcggttttatcgatattattgctgctatcgttattttattaactgcattattactatcacgtggtatgtcagaagcagcacgtatggaaaatattttagttattttaaaagtattagctattattttatttgtaatcgtaggtttaacagcaataaatgttagtaactatgtgccatttattccagaacacaaagtaactgctacaggtgactttggtggatggcaaggcatatatgctggtgtttcaatgattttcttagcgtatattggtttcgattctatcgcagcaaactcagcagaagcacttgaccctcaaaagacaatgcctagaggtattcttggttctttaagtgttgctatcatattatttgttgctgtagcacttgtgttagttggtatgttccattactcacaatacgcaaacaatgctgaacctgttggttgggctttacgtcaaagtggtcatggtgttgtagcagctattgttcaagctatctctgttatcggtatgtttacagcattaattggtatgatgttagcaggctcacgtttactttattcatttggacgtgacggtttattaccttcatggttaagccacttaaacgacaaacatttacctaatcgcgcactagttatacttactattattggtgttttaattggttctatgttcccattcgcatttttagcacaattaatttcagcaggtacactagttgcatttatgttcgtttcattagcaatgtatcgtttgagaaatcgtgaaggtaaagatctaccaattcctgcgtttaaattacctttatatcctgtgttaccagcagttacatttgttttagtattgctagtattctggggattaggattcgaagcgaaattatacactttaatttggtttattgttggtatcattctatatttaagttatggacttagacattctaagaaaaatgacgtagctgaataccacccaccaaaataa

SEQ ID NO: 411502 - DNA, 1338 bp, Staphylococcus aureus; identical to SEQ ID NO: 407534

SEQ ID NO: 411503 - DNA, 417 bp, Staphylococcus aureus
atgcgtttaaaagtattgttccatttcattgctgctattttcatatcattcatgttgctatggatgaccatgttgtttgacataattagcgatcaatcacatttaaacgctttattattgaatttagattttctaattccttctggcaatacaccatatactctagaaataatatgtcacttactaattggtagcgtcatttattttgtatttgtgtttctgtttcatacttctaaaaggctttactatctatgttatatccctttagttttcttatttatagcattgtatccctttttagtatttattgcgcaacgtccaatttttcaatttagtgtgacagaattaatcggttggattattacacatattttctttatgtcattaatggcgttagtcatacctagaataaaataa

SEQ ID NO: 411504 - DNA, 891 bp, Staphylococcus aureus
atgaataaagagcaattagaaaaaatgaaaaatggaaaaggctttattgccgcattagaccaaagtggtggtagtacaccaaaagcacttaaagaatatggtgtaaacgaagatcaatatagcaatgaagacgaaatgttccaacttgttcacgatatgcgtacacgtgtggtaacttcaccttcattctcaccagataaaattttgggtgctattcttttcgaacaaacaatggatcgcgaagtagaaggcaaatacactgcagattacttagctgataaaggtgttgttccgttcttaaaagtagacaaaggtcttgctgaagagcaaaatggtgttcaattaatgaaaccaatcgacaacttagacagcttattagatcgtgcaaacgagcgtcacatttttggtacaaaaatgcgttctaatattttagaattaaatgaacaaggtatcaaagacgttgttgaacaacaatttgaagtcgctaaacaaattattgctaaagggttagtgccaattatcgaaccagaagttaatattaacgcaaaagataaagctgaaattgaaaaagtattaaaagctgagcttaaaaaaggtttagacagcttaaatgctgatcaattagttatgttaaaattaacaattcctactgaagctaacttatacaaagacttagctgaacatccaaatgttgttcgtatcgttgtattatcaggtggttacagcagagaaaaagcgaacgaattacttaaagataacgctgaacttatcgcaagcttctcacgtgcattagctagtgatttaagagctggacaatctaaagaagaattcgataaagcattaggtgacgctgtagaatcaatctacgacgcatctgtaaacaaaaactaa

SEQ ID NO: 411505 - DNA, 1497 bp, Staphylococcus aureus
atggctaagtctaacagtaaagacatcgttttaattggagccggtgtacttagcacaacatttggttcaatgttaaaagaaattgagccagactggaatatccacgtttacgaacgcttggatcgtcctgcaatcgaaagttcaaacgaaagaaataatgctggtacgggtcatgcagcattatgtgagttgaactacacagttttacaacctgatggttctatcgacatcgaaaaagcgaaagtgattaacgaagagtttgagatttcaaaacaattctggggtcacttagtgaaaagcggtagcatcgagaacccaagagaatttatcaatccattaccacacatcagttatgttagaggtaaaaacaatgttaaattcttaaaagatcgttacgaagcgatgaaagctttccctatgttcgataatatcgaatatactgaagacatcgaagtaatgaaaaaatggattccattgatgatgaaaggccgtgaagataaccctggtatcatggcggcaagtaaaattgacgaaggtacagatgtaaacttcggtgaattaacacgtaaaatggctaaaagcattgaagcacatccaaatgctacagtgcaatttaaccatgaagttgttgattttgaacaattatcaaatggtcaatgggaagttactgttaaaaatcgcctaactggtgagaaattcaaacaagtaactgactatgtattcatcggtgctggcggtggagcaattccattattacaaaaaacaggtatccctgaaagtaaacatttaggtggattccctatcagtggtcaattcttagcttgtacaaacccacaagttattgaacaacacgatgccaaagtttatggtaaagagccacctggtacaccaccaatgactgtacctcatttagatacgcgttacattgatggtcaaagaacattattatttggaccatttgctaatgttggacctaaattcttgaaaaatggttctaacttagatttattcaaatcagttaaaacatacaacattacaactttattagcagcagctgttaaaaacttacctttaattaaatactcatttgaccaagtgattatgacaaaagaaggttgtatgaaccacttacgtactttctatccagaagcacgtaatgaagattggcaattatacactgctggtaaacgtgtacaagttatcaaagatacacctgaacacggtaaaggattcatccaattcggtacagaagtggttaactcacaagaccacactgtaatcgcattattaggtgaatcaccaggggcttcaacttcagtttcagttgcgttagaagtattagaacgtaacttccctgaatacaaaactgaatgggcacctaaaatcaagaaaatgattccatcatacggtgaatcattaattgaagacgaaaaattaatgagaaaaatccgtaaacaaacttcaaaagacttagaattaggttactacgaaaactaa

SEQ ID NO: 411506 - DNA, 249 bp, Staphylococcus aureus; identical to SEQ ID NO: 407533

SEQ ID NO: 411507 - DNA, 1617 bp, Staphylococcus aureus; identical to SEQ ID NO: 407532

SEQ ID NO: 411508 - DNA, 444 bp, Staphylococcus aureus
atgaacatttatgatgaatatagaagttatgtaatagaagaactggatgattgtctcacaatacaaaaaaataatgacactgcatattacgatgttctagaagcgataaatgatttatcaaatgattcattatgtgtgttaaatcatttatatattaacgaaggacaagaagaaacattcgagcaaaaatttttgcaacgtaataagcatttaaaaaacgttgatgggtttaaagcattaaggtttttaagacctagaacagctggtagacactatatcattattacgctgtgggaaaataggcaagcattttatcattggcaaaattcagctgagtacaagcatacacacaagcaacgtggcacttcgaaaggtgcagatgtaaaaataattaatcgtgaattatcatacaatattcgtattgaattagctgatatggtctag

SEQ ID NO: 411509 - DNA, 213 bp, Staphylococcus aureus
atgagcttttacgaatatatacaaacatttaaagatgataaaacaccattaggcgaattagcgatttggattaaagaagatgattcattcccaaaacaagagaagctaacagaaaacattttgtcttattttcatcaaatgtccaatatagatcatgagtttttagaaattgttaaaagatcactttctctgtatgatcaattaaaatcgtaa

SEQ ID NO: 411510 - DNA, 1710 bp, Staphylococcus aureus
atgagcaagaaaaacaaatcatatgattatgtcatcattggcggaggtagtgcaggttctgtactgggtaatcgtctaagtgaagataaagataaagaagtattagtattagaagcgggtcgcagtgattatttttgggatttatttatccaaatgccggctgcgttaatgttcccttcaggcaacaaattttacgattggatttattcaacagatgaagaaccacatatgggcggtcgtaaggtagcacatgcccgaggtaaagttttaggtggatcaagttcgattaatggcatgatttatcaacgtggtaatccaatggactatgaaggctgggcagaaccagaaggtatggaaacttgggattttgcgcactgtttaccgtattttaaaaaattagaaaaaacatacggtgcagcgccttatgataaatttagaggccatgatggaccaattaagttaaaacgagggccagcaacgaatcctttattccagtcattctttgatgcaggtgttgaagcaggctatcataaaacacctgatgtgaatggatttagacaagaaggttttggaccgttcgatagtcaagtgcatcgtggtcgccgaatgtcagcttcaagagcatatttacatccagcgatgaagcgtaaaaacttaaccgtagaaacacgtgcttttgtgactgaaattcattatgaaggtagaagagcaactggtgttacgtataagaaaaatggcaaactacataccatcgatgctaatgaagtcattttgtctggtggggcattcaatacgccacaattactacaattatcaggtatcggtgattcagaattcctaaaatcaaaaggcattgagccacgtgttcatttacctggtgtgggtgaaaactttgaagatcacttagaggtatacattcaacataaatgtaaggaacctgtatcattacagccaagcttagatatcaagcgcatgccatttattggtttacaatggattttcacacgtacaggtgcagcagcatctaaccattttgaaggtggcggatttgtacgttcaaataacgaagttgattatcctaacttaatgttccatttcttaccaatagctgtaagatatgatggtcaaaaggcagcggtcgcacatggctatcaagttcacgtaggaccaatgtattcaaactctcgtggtagcttgaaaatcaaatctaaagatccattcgaaaaaccaagtatccgctttaattatttatcaacagaagaagataaaaaagaatgggtagaagcaattcgtgtagcaagaaatatcttatctcaaaaagcaatggatccatacaatggtggagaaatttcaccaggaccagaagtgcaaacagacgaagaaattcttgattgggttcgtagagatggtgaaacagcattacacccatcttgtagtgctaaaatgggtcctgcttcagatccaatggcagtagttgacccgttaacaatgaaagtccacggtatggaaaatttacgtgtagttgatgcatcagctatgccacgtacaactaacggtaatatccatgcaccagtgttgatgttagccgaaaaagctgcagatattatacgtggcagaaaacctttagaacctcaatatgtggattattataagcatggtgttcatgatgaaaatgaaggtgcaatcgaagtaaaaccatacgctaaataa

SEQ ID NO: 411511 - DNA, 1491 bp, Staphylococcus aureus
atggaacttttaaaacatttatctcagcgtcaatatattgatggtgagtgggttgaaagcgcgaataaaaatacaagagatattatcaatccttacaatcaagaagtgatatttacggtttctgaagggacaaaagaggatgcagaacgtgcaatcttagctgcaagacgtgcgtttgagtctggtgaatggtcgcaagaaactgctgaaacaagaggtaaaaaagtacgtgccatcgcggacaaaatcaaagaacatcgcgaagcgttagcacgattagaaacattagatactggaaaaacgttagaagaatcatatgcagatattgatgatattcataatgtgtttatgtattttgctggattagcagataaagacggtggtgaaatgattgattcaccaattccagatacagaaagcaaaattgttaaagaaccagtaggtgtagttacacaaattacaccttggaattatccgttattacaagcatcatggaaaattgcgccagcgcttgctacgggttgttcactagttatgaaaccaagtgaaattacaccattaacaacaatacgtgtttttgaattaatggaagaagttggtttccctaaaggaacaattaatcttattctaggtgcaggttctgaagttggtgacgtaatgtcaggtcataaagaggtcgaccttgtatcatttacaggtggcattgagactggtaagcatattatgaaaaatgctgctaataatgttacaaatattgccttggaacttggcggtaaaaatccaaacattatctttgatgatgctgattttgaattggcggtagaccaagcgttaaatggtggatatttccatgcaggtcaagtttgttcagcaggatcaagaatattagtacaaaacagtattaaagacaaatttgagcaagcacttattgatcgcgtgaaaaaaatcaaactaggtaatggttttgatgctgatactgaaatgggaccagtgatttcaacagaacatcgtaataagatcgaatcttatatggatgtagctaaagcagaaggcgcaacaattgctgttggtggtaaacgtccagatagagacgatttaaaagatggtctattcttcgagccaacagtcattacaaattgtgatacgtcaatgcgtattgtacaagaagaggttttcggacctgtcgttactgtagaaggctttgaaactgaacaagaagcgattcaattagcgaatgattctatatatggtttagcaggtgctatattttctaaagatattggaaaagcacaacgcgttgctaacaagttgaaacttggtacggtgtggattaatgatttccatccatattttgcacaagcgccatggggtggatacaaacaatcaggtatcggtagagaattaggcaaagaaggcttagaagagtaccttgtttcaaaacacattttaacaaatacaaatccacaattagtgaattggtttagcaaataa

SEQ ID NO: 411512 - DNA, 564 bp, Staphylococcus aureus
atgactcgttctcagaacaaacagcaacaattagaacaagcaaaagatattgtaattaattcaattggacagacaatggatttgtatggcactaatagaagtgtaggaaacttatatggcactatggtgtttgaaggcagtatgacgcttgatgaaatgcgtcatcaattgcaaatgagcaaaccaagtatgagtgctggcgttaagaaattgcaggaatttgatattgttaaacaacaatttacgagaggaagccgcaaacaacattttatcgccgagaaagactttttcatcttttttcgaaactttttcactaaaaaatttcagcgtgaaattgacatcaatgtcgaagcagtaaaagatgctcaagctattatcaatccattacttgaaagcagtgatttaactgaagctgaaacacaagaggcgcaaaaaattaaagctcagcttgatcatacacatgtttattacgaatggttagaacagttaaccgaagcgattgaaagcggtgaaattttcaaatatttcccaattccagaacaaccttctgatactgaaaactaa

SEQ ID NO: 411513 - DNA, 1623 bp, Staphylococcus aureus
ttgaaaaaagagaaagttatggactggacgacctttatagggacagtagctgtacttctttttgcagttatacctatgatggcttttccaaaagcaagtgaagatatcatcactggtattaatagtgccatttctgattcaattggttcgatatatttatttatggggctggcgattttttgctttgtaatgtatatcgcatttggtaaatatggtaatgtcacacttggtaaagcaagtgataaaccagaatttaatacatttacatgggcggcaatgctgttttgtgcaggcataggctctgatattttatactggggcgttattgaatgggctttttactatcaagttccaccaaatggcgcgaaaagtatgagtgatgaagcactccaatatgcgacgcagtatggtatgttccactggggaccaattgcttgggctatttatgttttaccagcattaccaattggttatttagtatttgttaaaaaacaaccggtgtataaaattagtcaagcttgtcgtccgattttaaaaggtcaaacagataaatttgtaggtaaagttgtagatatcttatttatctttggattgctaggtggtgcggcaacatcactagcgttaggtgtaccattaatttctgcaggcatagaaagattaactggtttagatggtaaaaatatgattttacgttcggccattttattaacaatcacggttatatttgccattagttcatatacaggattgaaaaaaggtattcaaaagttaagtgatatcaacgtttggctatcatttgtacttttagcttttatatttattattggaccgactgtttttattatggaaacgacagtgacaggattcggaaatatgttgagagattttttccatatggcgacatggttagaaccattcggtggtattaaaggtcgaaaagaaacgaatttcccacaagactggacaatattctactggtcatggtggttagtatatgcgccatttatcggtttatttatcgctagaatttcaaaaggtcgacgccttaaagaagtcgtgctaggaacaattatttatggaacgcttggatgcgtattattctttggtatttttggtaactatgctgtgtatttacaaatttctggacagtttaatgtaacacaatatttaaatacacatggtacagaggcaaccattattgaagtggtgcatcatttaccattcccatcattgatgattgtactattcttagtatctgctttcttattcttagcaacaacatttgattcgggttcatatattttagcggcagcatctcagaaaaaagtggtaggcgaaccattacgtgccaatcgtttattctgggcatttgcattgtgcttattgccattttcattgatgttagttggtggcgaacgtgcattagaagtattgaaaactgcttcaatactggcaagtgtgccattaattgttatttttattttcatgatgatatcatttttaatcattttaggacgcgatagaattaaacttgaaacgcgggctgaaaaattaaaagaagttgaacgtcgttcattgcgaatcgttcaagtatcagaagaagaacaagatgataatttataa

SEQ ID NO: 411514 - DNA, 537 bp, Staphylococcus aureus
atgacacttttagacattaaacaaggacaaggttatattgctaaaatagaatcaaatagctttgttgacggtgaaggagtaagatgcagtgtttatgtatcaggatgtccatttaattgtgttggatgttacaacaaagcctcacaaaagttcagatatggcgagaaatacactgatgaaatattagcagaaatattagatgattgcgatcatgattatatatctgggctaagtctattaggtggcgaaccattttgtaatttggatattacattaaatcttgtcaaagcatttcgagcacgttttggaaatacaaagacaatttgggtatggactggatttttatatgaatatttagcaaatgattgtacagaacgtcgagagttattatcatacattgacgttttagtagatgggctatttatacaacacttattcaaacctgatttaccatataaaggttctttaaatcaacgcattatagatgtacaacaatcactctcgcatgcgcgtatgattgaatatattgttagttga

SEQ ID NO: 411515 - DNA, 1851 bp, Staphylococcus aureus
atgaatcaaatcgaagaagcattaacgggtttgatttctaaagatcctgctattgttaatgaaaatgccaacaaagatagtgatacattttcaacaatgagagatttaacagcaggtatcgtttctaaatcttacgcattaaatcatttattaccaaagcacgttgcagatgcacatcaaagaggggacatacattttcacgacttagattatcatccattccaaccgttaacaaactgttgtttaatagatgctaaaaatatgctacataatggatttgaaataggcaacgcgaatgtaacttcaccaaaatcaatacaaactgcatcagcgcagcttgtacaaattatagccaatgtttctagcagtcaatatggtggctgtacggttgaccgcgttgacgaattacttagtacatatgcacgacataatgaagaacaacataggaatatcgcaaagcaatttgtcaaagaatctgaaattgatcgttatgttgatcaacaagtcactaaagacatcaatgatgcgattgaaagtttagaatatgaaattaataccttatatacatctaatggacagacaccttttgtaacattaggattcggcttaggtacagatcatttaagtcgcaaaattcaacaagctatcttaaatactcgtatcaaaggcttaggaaaagaccgcacgacagcgattttcccaaaacttgtattttcaattaaaaaaggaaccaactttagtccgcaagatccgaactatgatattaaacaactagcattaaagtgttcaacgaaacgtatgtatccagatattttaaattatgacaaactcgtagaaatattaggtgatttcaaagcgccaatgggttgtcgttcatttttaccaagttggaaagatgcggaaggtcattttgaaaataatggtcgttgtaatcttggtgttgttacacttaatttacctagaatggcattagaatctgccggtaatatgacgaaattctgggaaatcttttatgaacgtatcgatgtcttacacgatgcattactttatcgtataaatcgtttaaaagatgctgtaccgaataacgcaccaattttatataaaagtggcgcttttaactataaattaaaagaaacagatgatgttgctgagttatttaaaaataaacgtgcaacgatttcaatgggctatatagggttgtatgaaacagctactgttttctatggtccagactgggaaacatctcaagaagcaaaagcatttacacttgaaattcttaaagaaatgaaacgttatcaaacgaaatggacagaattatatgacatttggttcagtatttacagtacgccgagtgaatcgctaacggatcgtttttgtcgtttagaccaagagagatttggagatattaaagacattacagataaaggatattaccaaaactctttccattatgatgtacgtaaagatgttacaccttttgaaaagttagattttgaaaaagattatccttattatgcgagtggtggtttcattcactattgtgagtatccgaaattgcaacacaatttgaaagcactagaagcggtatgggactactcttatgacaaagttggttacttaggtacaaatattccgattgatcattgttatgaatgtgattacgatggagattttgaagcaactgaaaaagggtttaaatgcccgaactgtggcaatgataatcctaaaacagttgatgtcgttaaacgaacatgtggttacttaggcaatccagttcaacgtccagtaattaaaggccgtcataaagaaatttgcgcacgagtaaaacatatgaaagcgcctaaagaatga

SEQ ID NO: 411516 - DNA, 1371 bp, Staphylococcus aureus; identical to SEQ ID NO: 407531

SEQ ID NO: 411517 - DNA, 609 bp, Staphylococcus aureus
atgaatatgccattaatgatagatttaacaaataaaaatgtcgtcatagttggtggaggcgtcgttgcaagtcgtcgggcacaaacattaagccaatacgttgaacatatgacggtcatcagtccgacaatcactgaaaaacttcaaaatatggtagataaaggtgtcgtcatatggaaggaaaaagagtttgaaccaagcgatattgtagacgcgtatctagttattgcagcaaccaatgagccatgtgttaatgaagcggtaaaacaagccttacctgagcatacgttgtttaataatgttggagatgcatcaaatggcaatgttgtctttccaagtgcactacaccgcgacaagctaactatcagtgtatcaactaatggtgcgagtcctaagttgacaaaatcgattatggcagaacttgaggcattatatccaccatcatacagttcgtatatcgactttttatatacttgccgacagaaaataaagttactagatataacatataacgaaaagcagcagttactgtcacaaattgtgtcacaagaatatttaaatcatgacaaacaagctcaatttttagcgtggttggatgtaagacaataa

SEQ ID NO: 411518 - DNA, 1881 bp, Staphylococcus aureus
ttgaaattaaatacatctaatagtccatttacagaaaaacaagtcacagagattaacaatctgctgcaaacattaacagagagccaacaacagtggcttagtggttttttattagctaatagtagcgatatgacaaatgatagtaatcaacaacaattagagacagaagtgaggcaacaatcacaaatatcagaagaacaagcaacttcaacaacgtatatgttacaaaataaagagccacatatcgaagctaatcagcggcatgtcacagtgctatatggttctgaatcaggtaatgccatgcgtttagctgaaattttttcagaacgattaagtgatatcggacatcaagttgttttgatgtcaatggatgaatatgatacgacaaacatcgcacagttagaagatttatttattattacgtctactcatggtgaaggagaaccgcctgataatgcatgggatttctttgaatttttagaagacgataacgcacctaatttaaatcatgtgagatattcagtactagctttaggtgatcaaacatatgaatttttctgtcaagccggtaaagatgtagatgctttactagaaaatctaggcgctgagcgtatatgtaagcgtgtagattgtgatattgattatgaagaagacgcagaaaagtggatggcagacatcattaatatgattgataccacatcagaaggtattcaaagtgaatcggtgataagtgaatcaattaagtctgccaaagaaaagaaatattctaaatcaaatccataccaagcagaagtattagcgaatatcaatttaaatggtaccgattcaaataaagaaacacgacatatagaatttttacttgatgattttagtgaatcatatgaaccaggagattgtatagtagcattaccgcaaaacgaccctgaattggttgaaaaactaatatccatgttaggttgggatccgcaatctccggtgccaattaatgatcatggtgatacagttcctattgttgaagcactaacatcacattttgaatttactaaattaacattgccattattgaaaaatgcagatatctattttgacaatgaagaattatctgaacgtattcaagatgagtcatgggcgcgtgaatatgttataaatcgggactttatagatttaataacagattttccaactatagaattacaacctgagaatatgtatcaaatccttagaaaattaccaccaagagagtattcgatttctagtagttttatggcaacgccagatgaagtgcatattaccgttggtacggttcgttatcaagcacatggacgtgagagaaaaggtgtatgctcggttcattttgctgagcgtattaaaccaggtgatatagtaccaatttatttgaagaaaaatccgaacttcaaatttccgatgaagcaagatataccggttattatgattggaccaggtactggaattgctccttttagagcatatttacaagaacgtgaagaacttggtatgactggaaaaacatggttgttctttggtgatcaacaccgtagttctgactttttatatgaagaagaaatagaagaatggcttgaaaatggaaacttaacacgcgtagatttagcattttcaagagaccaagaacacaaagaatatgtacagcatcgtataatggaagaaagtgaacgcttcaatgaatggattgagcaaggcgcagcaatctatatttgtggcgatgaaaaatgtatggcgaaggatgtccatcaagccattaaagatgtactggtaaaagaacgtcatatttctcaagaagaagcagagttattattgcgacaaatgaaacaacaacaacgctatcaacgtgatgtttattag

SEQ ID NO: 411519 - DNA, 498 bp, Staphylococcus aureus
atgaataatagaaatgtgtatgatatcgaagtaagtgactataaaggcttaacttataaattagaagcatttagaggtaaagtgattttagttgttaatactgcaacagaatgtatatatagcgaacaattgaaaaaactagagactttgtttcaaaaatataaggatcgtggatttgtagtgttgagttttccgaataataattttgacaatcgacaaccaggttctaatgaagaaatcttgaaaattagtcgtgagaaatttggtgttacatttccagtgttagctaaaatatctgtgaacgggaacgatgaacatccgttatttacgcatttaaagaatgaacaaccaggaatctttgggtccccaataaaatggaatttcacaaaatttataatcgatcgacaaggcaatgtcgtaaatcgattcttgccaatggaagatccattggatatatcggcaaatatagaaatattattgcaagaatcttcatcttaa

SEQ ID NO: 411520 - DNA, 252 bp, Staphylococcus aureus
atgaggggttataacgaaagatattgtagctggactaatacagctatacaatgtgattattttaataaagtaagacaggtgaaaaaagacggtaaatcggataggttgagcaacaacataaactcgaacattatttatcgtgtgtttgaaaagtgtatcacgctatataatgtgtgttcgcggtgtaaacgcgcacttattttatcagaacattctaaaaagaacatattcaatataaaaaaggctgtgtag

SEQ ID NO: 411521 - DNA, 756 bp, Staphylococcus aureus
atgttgctagaagttaaacatgtaaaaaaggtttacggtaaaggtttgaatgctacgacagcacttaatcaaatgaatttatcagttggagctggtgaatttgttgcaattatgggtgagtctgggtcagggaagtctacactactaaatttaattgcttcttttgatggattaactgaaggtgacattattgtggatggcgcacatttaaataatatgaaaaataaaagtaaagcattgtatcgtcaacaaatggtaggttttgtttttcaagattttaatcttttaccaacaatgacgaataaagaaaatataatgatgccattaattttagctggtgctaaacgaaaagatatagaacaaagggtacatcagttgacagtacaattacatttagagggattcttaaacaaatatccttctgaaatctcagggggtcagaagcaacgcattgccattgcacgtgcattagttactaaaccgacgattttactagccgatgaacctacaggtgcacttgattctaaaacatcaaaagcattgatgaagttatttcaagagattcatcaattggaacagacgattttaatggtaactcattcaaatatcgatgcgtcttatgcagagcgagtcatttttattaaagatgggcgtctatatcatgaaatatatcgtggtgaagaaagtcgattagtttttcaacaacgaataacagatagcttagcacttgtgaatggaggaagcgtcaatatatga

SEQ ID NO: 411522 - DNA, 888 bp, Staphylococcus aureus
atgacctttcttaaaagtattactcaggaaatagcaatagtcatagttatttttgctttatttggcttaatgttttacctgtatcatttgccattagaagcatatttactagcacttggcgttattttattattattactcatattcataggtattaaatatttaagttttgtaaaaactataagccaacaacaacaaattgaaaacttagaaaatgcgttgtatcagcttaaaaatgaacaaattgaatataaagatgatgtagagagctactttttaacatgggtacatcaaatgaaaacacccattactgcagcacaactgttacttgaaagagatgagccgaatgttgtgaatcgtgttcgtcaagaggtaattcaaattgataactatacaagtttagcacttagttatttaaagttattaaatgaaacttctgatatttctgtcactaaaatttcgataaacaatattattcgcccaattattatgaaatattcaatacagtttattgatcaaaaaacaaaaatccattatgaaccttgtcatcacgaagtattaactgacgttagatggacctctttaatgatagaacaattaataaataatgcacttaagtatgcgagaggtaaagatatatggattgaatttgatgagcaatccaatcaattatacgtaaaagataatggaatcggtattagtgagggagacttacctaaaatattcgacaaaggttattcggggtataatggacaacgtcaaagtaattcaactgggattggcttatttattgtaaagcaaatttcaaatcacactaatcatcctgtttcagtcgtatctaaacaaaatgagggtacaacatttacgattcaatttccagatgaataa

SEQ ID NO: 411523 - DNA, 201 bp, Staphylococcus aureus
atgatactagtaatgttatctccattattaatcatattctttatagtgttgtctattttagaagaacgtaaacgtacgaagaaaaagcaactcgagaaagaaaaagcaaatatactaaatcaaaatacaaatgacacggaaagttcaattcaagagccgtcattgcagcaggctaaagaacaaaaagatgacaaaggataa

SEQ ID NO: 411524 - DNA, 456 bp, Staphylococcus aureus
atgtcgaccaataaaaacgattatgagcatatgttgttttattttgcatataaaacgtttattactaccgctgatgaaattatagagaagtatggtatgagccgtcagcatcatcgttttttgttttttatcaataaattacctggtattactattaaatcattactagaaatattagaaatttctaaacaaggatcacatgcaacacttcaaaaattaaaacagcaaggtctcattattgaaaaagttttagagactgatcgacgtgtcaaaaaattatattcgacggataaaggcgatcaactcattgctgaattgaacaaggcgcaagatgaattattgcaaaatatatatcaacaagtcggttcggattggtatgatgtgatggaagcattggctaaagggcgacctggttttgattttattaagcatttgaaagatgaaaaagaaagctag

SEQ ID NO: 411525 - DNA, 780 bp, Staphylococcus aureus
atggctgaaaaaactattcaagacgtcgatattttaaggcaactaggtgtgaaagatatcagcaaacaaaatgctaataagttttataaattcgctatttacggaagattcgggactggtaaaactacatttttaaccaaagataataatgctttagtactagatataaacgaagatgggacaacggtaactgaggatggtgcagttgtacaaatcaaaaactatgagcattttaggacagtaattcaattgttaccaaaagttatagaacagcttagggaaaatggcaaacaaatcgatgttgtagtaatagagactattcagaagttgagagatattacgattgagaatgtcatgaaaggtaagattaaaaaaccgacatttaatgattggggcgagtgtgcttcgcgaattgtaagtatttatcgatatatttctaaattacaagaacagtaccaatttcatcttgctataagcgggcatgagggcatcaataaggataaagatgatgagggtagcactatcaatccaacaatcacgatagaggcacaagatcaaattagaaaagcaattattagccaatctgacgtgttagcaagaatgacaattgaagagaatgaacaagacggcgaaaaatcctatcaatatgtacttaacgcagaaccatcagatttatttgagactaagataagacatgctagcaatataacaatttcaagtaaaaaattcgttaatcctagtattaatgatgtagttcaagcaatcagaaatggaaactag

SEQ ID NO: 411526 - DNA, 300 bp, Staphylococcus aureus
ttggaacaagaaaatgttaaaacaattacgattgatagaggtaaagaatttgcgaagtttgaattaattgaacgtgagttgaattgttcagtttattttagcgatccgggttgtccgtatcaacgtggttctatagaacaggtgaatggattattacgtcaatattttcctaaagatacagattttgtaaatgtttctgatatagatgtagaaatagctgttctccaaattaatcagcgcccaagaatgaagcaaaattataaaacaagtgagcatatgagaatgttagaatataattag

SEQ ID NO: 411527 - DNA, 531 bp, Staphylococcus aureus
atggttaaaaagaatacacaacgaaaaagaagaattccagtagatttagacacgcgtttagcaattgcgaaatatattgatgaaggattaactatattacaaattgcgaatatattaggtagacatcataatgtgatttattatgagttgaatcatcgttctcaaaaggatggaacatatgaccctgtaaaagcacataagatggctaaagaaattaagaaaatgccagaaaaaaagaagcaagagatgcgtgcattaaatcctgctataaagaaatatattgaacagaaattgtctttaaagtggtcacctagacaaatttcttcagaaatggaaaatgatattggttattatgttagcttttctactatatatagatatattaatactggacaagttagagtaaataaagtaaaagatatgcgccgaggtggaaaaaagtatacaaaaacgactgaagagcgtggcaaaattaaaataggtcagcaccgtacaataagtagtcggtccaatagaagtagtaaaacgtga

SEQ ID NO: 411528 - DNA, 363 bp, Staphylococcus aureus
atgacaaagcgatttttattaatgactttgattttagttatatctacatctttaattgcatgtggtaaaaagtatgataaagaaattgaggaagttactagtttagaagcaaaagatagaaatgactcatctgaccctgaatttaataaatatgaaagaaagaaaagtaatatttatgtttatgaagatggtaaagttattacgttaacttacgcaccttttaaaggtagttcagaattaagtacgcgtatgtatataaaaaatgaaacaacaggtaattataaagaagatattaatggtaaaccaaagaaatttatgaaagaaaataaaccagattataaagaagagaatttaaaagaatag

SEQ ID NO: 411529 - DNA, 594 bp, Staphylococcus aureus
atgaaattaaagattattggttttgtgattgtgaccattttaacagtgagtgcttattttataggtatgcaaacaacaaaacaacaagttcaaaaagaaaaaaatcatgtgagtgaattaaaacaaacattacaacaagaaaaagatacgaatgaagcattaaatcaacgtgtaaaacgtcaatctaagacagtaattgcggaggaagaaaaacaaatacgtgagacagcacaagcatttacaacagagctatttacgttaaaaaaaggttcatcatttaaacaaaaagctaaaccacttaagccattagtaacagaaaaatattatgatatattgtttagtgataacagagagaagtttagtattttcgacgatgtaacagtgagtgatattcatgtatatttcgatcagtatgaccctaagcatgataattataaagtatttgtgcagtttaatgagcgtattgatactgagggtcaaaaagaagttgaaaatcgtaaaacatctgtacaacttgatatggtgcgtacaaatgacaaatggttgattaatgatgtacagcgttttaatttacaaaaaaatgggcgtggataa

SEQ ID NO: 411530 - DNA, 1038 bp, Staphylococcus aureus
atggtaagtaaaaagactgttgtaaaagaagtgatgaaacaaacgccgattggcattaaatttagattattaaaaattggtctgatattgttttgtgttttgtttttcttgtttcctgtgatattgatgtttgtatttagtccagaagaagacaaacaaacagatggtgacatgtcgtgtgtgggtggtgatgttaaagataaaggtattgcggtatttgaacaaaatgcgaaaggtggcgcattagaaggtaaagggaaagtgattgtaaaaattgcgaaaaagcataaaataccagaaaatttatttatggcgattattgcgagtgaatctggttggggtaaaggagaaaatgcgacgcgtcaaaagaatccattgtctgtgatgggtacaaagtcgattcatgattctacgtatccaacaattgaagctggacttgaggcaggcgcaaagaatttatatgatgtttatattaaagaaggattaacgacaccagagaaaattgggccaaaatatgcgcctgtaggtgcttcaaatgacccgaataatatgaataagcaatggataccaacagtaaaatcaatgatgaaaaaattaagtgatggtgatggcgctgtatgtaagtctactggtggtaaagatattaagtttagtggtaaattgccaaaatggagtaattcagatgcaggtaaaggtaatttatatacagcgggtcaatgtacatggtatgcctatggtattcgtcaaaaaatgggaaaaccgatatcgacgtattggttccatgcgcaattttggaatgatagagctaaagaggaaggttataaagtgaatagtaaacccgctgtaggtgcgttaatgattgccgagcctggtgctggtggtgcaccgccagtaacaggacatgtagctgttgtgattgatgtgaaagatgataaaacatttactgtgacagaaatgaatattaaaggaccttatatcgtatcgcaaagagaaatgaaagtagaatctggtattagttttattcatgataaggagtag

SEQ ID NO: 411531 - DNA, 1914 bp, Staphylococcus aureus
atgaagcgtaaaagtttatatcttttatgctttttaattttgcccttgtttttaataacaggggcaacggctgatgccgtcgctaatccagtaggaaaaccaacacatgcggttgacgcgaagattgaaaagtataaagtcgatgataaagctgatggggatatagatttagaacgctatcgtatatggtttcaaaaagacgaagattggaatcctttcggtaaagacgaagtcgcagaaacaattaataatgtgaccaacttcttttttgaaattgataagttgattgtaagtattactgattatgcggtagaaaatttatatcagcttgatgtattaaatgattttgcggataaagtgggtcaatttgttggagatatttaccagaagttattaagtaatattgtcatgactttgtttattgtgatttgtttaaatgcgtttattgttttttcagttaaaggtaatatgcatgaagcattaaaacgtggttttttaattttttgtttgatcggttttggtgtgggtgtccttgcgaatgcgagctttgtgattaaaggtacaaataatgttggtaaaggcttaaataatgtgattatgaatagtacgagttccattaatggagatgttgattatgtaaatgaaaattcaggcattaacaagatacgtaatcaatattttgatatggcattgtataagccctatctcattatgaattatggtactgtgaatgaagataaaattaagaaaaaaggtaaaaacagaatagataatatattagatataaaagtaaaagatgaaaagacagaaaaagaagtaaaagataaaatagataaagaggtcaaaagttataataatacagctatgaaacaaacacatgtatttgggcaattaggtattgcgatatttacgttaattattacgattgctttatcgattatatttctttcgattagttttgcgaaagtcatcttttcagcttttgcgctcattttattcttatttttagcgtttagttggcttattagttttattcctggttttgaaatatcggtgtttaaagcgttagctcgtacattaggttatattattttgagtgcgtgtatgacatttttatttgtggtgattggattttcaattgatattgcgaatgcatttgtgaaaccagaaacccaacaagcctattttttgaatgtgatatttttaatgattattttatttgttttgtataaaaagcgtagtgaaatcattgattttgtgacacgtggcaatttaagtttatcgcctcaaaaattaggtgctgatgtaatgcgcaaaggacaagatgaatttaataaacgtcgtcaaaaacgagcagaagataaaaagaataaacgtgatggtcaacgtgataatccagaaccaccgatgataaatgataatcccaataaaccaaaccgaaatcaacaatcagatatgcctatttcaatgaataattcgaaagaaattaaacgacgtaatcaacaagaagagatgcatggtgcgcctaatgtaggtttagttagttattcgaaaccatcttattcaaaaccgtcaggttatacgaaatcaaaacgagtcgcacaagatgatagtatgcatcgtgatgtaaaacataaaaaagaaatcaaacgtaatccacagacagaaacatttaatcctacttatttatctcaaccgccaaaagaattatcaaggcgtactcaatcgtttaataaagacgttcaatcttcttatgataaagatattgaaaaacgccgtatacaaactggagaagataaaccatatcaaccacgttcacatacaaatgagcagacatttaaacgaaattcacaaacaaaacatgttcatgatcgattgaaaaaccaaaaggatattaataagcatggtaagtaa

SEQ ID NO: 411532 - DNA, 168 bp, Staphylococcus aureus
atgaataaagaacaagtagaacaattgttaagtgaattagcgaaagaaattggtatgaaaaatgttattttaatagcattagatttagcgattaaggaagacaaaacgttacgttctgatgaagtagaacaattaattaaagtacagcgtcaaattgaaaaattttaa

SEQ ID NO: 411533 - DNA, 1356 bp, Staphylococcus aureus
atggcaatgaatgagattgctttatttaaaggtgtgcgtattcaaccgtattttaaacatattgattttatttttgcgggtgtgttcgcatttatctttttagcctatcgaatattaatgttatggcaaggttatattagtcaacaaaaagctttaaatgtggttgaagtctatcagtactttaaaccacattttttatatcttgcgattggtacattggttatttttattatcgcaaagttatcttcacaattgattttaagatttcgtgaaaaagatttggctgaaatgattgaaacacaaggatttcataatcgcacagtgattaagaaaacaacagagtatttagatattgattataagaaaacagaatatgattattatccaacattgttttataaacgtagacgtaaaacatttgtgatacatgtaaaaaaagatggttcacgttttcaagacgattatttagaattagaatcaattattgaaccgatgtttaattgtgagcttgttgagaagcgtcatattgggcgttatcttagatatgagtttatgcctcttaaatataaaaaacgtatcgttatggaaggtacagaagcaccagaaacaacttattatgatacgaagatttatattacacatcaaatcctttgggattttgtgaaagcccctcatgctttaattactggtgtgacaggtggcggtaaaacgtacttcttattttacatgattagagaattatttaagcgtgatgcagaagtacgattattagacccgaaagtgtctgatttatcatttatgaaaaatgtgataggtactgaaaaagtggcagatacgaaaggacaaatttttaaacaattaagaggagctaatgaagaaatggagcgtcgctttagaatgatgagtgaaagcgaacagtatcaattaggcagtaattttagaaactttgatttaccaccctattttgtgatttttgatgaagtgacagcgtttacttctactttagataaaaaagaacttcaagaaatgaatgattatttaattaatattattatgaaaggtcgccaagctggtgtgtttatgtttttaacagcacaacgacctgatgcagatgtgattaaaggtaatgtgcgtgatcaattaggtttacgtgtatcaatgggtaatttgtcagctgatggttatcgaatgacctttggtcaaacagataaagcatttcaaccaattcacgaatcagatattggtcgtggttatatttcaatacttggacaatataatgaaccgattttatttgatgcgccactcatggaacaatatgattttgtggcagatgttgaacaaatattaaataaataa

SEQ ID NO: 411534 - DNA, 717 bp, Staphylococcus aureus
atgaaagttcattatgaaactggaaatatttatgatttaaaattaagtgactttgattcgaagaatgtttttaaaaaaattggtgtttataaatatgattatgttaaaaaaatgaatgaaaattggcttaaagttattgggtatttaaaccaaaatttttcatttgaagttgtagatttttctgatcaattttattcgattgaaagatttgatgataattttgaaaaattaatttatgattttggttttaatgttcctaaaatgaagcaatatatcgctaataataatgttcctatttttaaaatgtttcctgtagcttttggtaccgactataatgatttaattaattatacgccagttaaggaacctgagttttatacacaaagtccaatcattattgtagaagattttgtgacagcaagaagtggttattttcatgctgatttggaattaccatttagtttagttgtagatggtaataacagagtttcatatgcattgaagcaagggaatgtcggtttgaattgtcattatttatctttagatgttctttgtgaaaatgatttgtttttatctgaattagacaaagcagtgtattgtcatatggctgatatgattgcacttcaaagattgtttggggatgataaattgaaacatagaagtcgtaaatattataaaaagtcatatttagttaagtatttcaaacaatatatttaa

SEQ ID NO: 411535 - DNA, 2496 bp, Staphylococcus aureus
atggagttaaaagccccttatgcagggataaaaaataatttgttattaacgaaaagcggtgaagtttgggcgtattatcgtattcgttctgaatctatttcaacagccaattacgataaaaaagaagcttcaaaaaaacgtatgaaatattttcttgaatcgattaaaggttatcaagattttcattttgaaatgtatgagcatgatttagatttacgtaataaatttaaagaaattagtcaagactttgatgattcagcgtttgatgtggctaattattatgcccaagaaacgatagatgttctagaacaagaattacaaatggttacacgtaactcgtttgtcatgggtgtgaaacttcgagaattaagtgatgatgcgatttcgattaaagaaatgcttaagagtacattatcagataccgcagaacgaatgatatcgaattttggttttaatgtttcattagatgaaaaagtattaagtcgttatgaagtgtttgaacgtgagcttgcggatagttttttgagtattgagggtgaacgtttaactgaaaatgaacttgcttatattgtgagaaaaccttttatttcaaatgcgacgcatgatgtacaagaagagtcatcaagacgagcagtgacagatgtatgtaatgtggtcattgaccctacaaatatgcgtgtattgaaagtgacaaatgaaaatgaagcattttatacaacaacaattgttgttgatgattttccacttgatatggaatttacgcatatatatgaaaaagcacaaaatatgcccttccctgtggaatgtcatgtgaaagcaaaaatcattgaaaatgataaagtgaaaaagaaatttgatcgtgcaaaaatcaatcataaagcacaggcaagagaaaaacaatctactggtgataatgcatctgaagatattcaagataatttattcgtattagaacaaatggaaaaagaagtgacaggttcaggtgtatttatggaatggtcttgttcatttgtgattaagagtgatgatttaaaagattgtaagcgtaaagcgaaacgtttaattaaacgtttgaaagaaacaaacatttatgcggtgaatccactagctgaccaattacaattatattatcaaattttacatggcaatccattgtttattaacaaatattgggtacaacgtacgacagcaacagggattgcagaaaatttatttggtgtatctcaaagtttaggtacaaaaaccggtttttatattggtcgtattgataagtttatacgttctgtttcacgtgaggaagctgtcgcaagttcaagagatattattttattcagtttattactagctgccaaagggatatcaggggcagtcagtgatagcccacatgtattaattacaggtcaaacaggtaaaggtaaatcattcttagctaagctactttggatatatacatcattctttaaaggtcaaatgatttattgggacccgaaaagtgaatttgcggactggtttaataaaattacagaaagtgaagatatgcaacgtaaatatcccctattcgtcaatcatttaaaaacatttaagtatgtaacactggattataaaaaacctagtaattatggttgtttagacccgattgttttccttgatggtattgaagctaatgaaatgttgaaatctgtgtttgatgaaattaaatcgtttgaaaatgaacatcgtgttgaaacagcgatttatagagctataactgaaaccgttgaggaacgtgaaaaaggtcaacaagttgggtcattagatgtaattaaaaagcttcaaaatgatgaagatgaacatgtaagtcaagctggtgatttactttttgaaaaaacacaaaataatatattaaagcttgtgtttagtgatggtagtaatccagctttgaatattcaagaaaaagcaacgatattacaagttcaaggtttagatatgccgaaagctggtgatgacccatctggctattcaacaggtgagaaaaatggcattactttaatgcttttaatcggtaaattcttacagaaatttggttcacgtagacaaatacaaacaactttatttattgatgagggttgggcatttagtgcttcgcgacaaggtaaaaaagtagctaaaggtattaaacgtatgggtcgatcagaaaataattcgcttgtctttattacccaatctgttaaagataaagccgacgaagacggcggtaactttggttgtcattttgcgtttgatgaaaaagatgaacgtgaggacatcttaaaatctcttggtttagaatattcaaaagaaagtcctgagaatatggaaatgttgaaagacttgaaaaaaggtcaatgtattttcagtgatttctatggacgtgtgggtaaaatggttgtgcattgtcctttcgaagaaatgacggaagcatttagaacacaagaagattcagcaagttcaaaagcagaggaaaaatttgcgatttga

SEQ ID NO: 411536 - DNA, 390 bp, Staphylococcus aureus
atggataaaaaagcatataaccttaaacgaacatttgaacagccgattgtgatgtatgaatttactggaagttatcggtggtcaaaaggtattcgtttagactgggtcggtacgttgtttgtgattgaattgattttaatattattatatcttaaggctggatttaatacattaacaggtttaataccaggtttgacgattatttattttacagtactcccctattatatgacgaagcaattagtaaaattaaaacaagatggtaagaaactgatattctttctttgggattttatgatgtatgtgtttaacattcaaatgcgcaatgtacattatgcatttgatgaagaagtgaaatatcatgacaagaaaataataaaattgaaatag

SEQ ID NO: 411537 - DNA, 261 bp, Staphylococcus aureus
atggaacatttatttaatttaatgctggtattaggtgatgcacctactattaatccacttggtcaatgggttaataaagaagttggtactgcaattggtattattgtattggtgattggttgtgttaagtgggcaacgggtaagtatgggcatatgcttgtgttatttgttgtgggtggtttaatgttcctgatttctaaagggcctgaaacagtgtttaattcagtgtcaggaatttggaaattgatttttgggagctga

SEQ ID NO: 411538 - DNA, 1107 bp, Staphylococcus aureus
atgattcctatcaaagcttttctaaataatatacgcaaagcttttttgaatatcatcaacaagttgatactatcaagattttcaaaaaaaggcaagcgttttgatgttccagaagaagaacgtaaatcattaccgaagtatcgcaatcatagaaaaaagattgtgattattttttatacgattttagtgttgttaactattttattgattgcctctttcattagagcttctaaagcgaacaacgaaagtaaagaagcagtcaataaaacgcaagaaattcaaaagaaatatgaagataacgctgaaacagttcagtataatcctaatttaaagttatatgctgataagtatattgatgcatatatgactattcctaaagatggtaaggcaaaagaagagcgacaaaaagcgttagctaacttttatccttctgattacaagacacctacagaaaacactgaaaatgttgagcgtaagctgaatgaaaaggaattttttaatattaaacgtaaagataaacaaacaatcattcagtatattgtaagttacgatttaaaaattacagagaaaaaggaggttaaagttaaaaagaaaaaagataaaaaggataaagacaaaaaggatgaatatgaaacaaagacagaagaaaaagaacgaacagaaactaagaaagcattattaaacattccagttaaaagtgaaaataataagtacgtggtgattgaataccctcatttttctacgattccaagtaatcaactgaaaaaagcaacacttgttaaagatagtttggagaatgaaaagcgtgaagataatccaaaactaaaagcatttgttgaagagttttttgataaatattgtaaaagtaaatcggatgatatggcttatttaatggataaccccgaagggttagaagatacacgtgaagtgtctaaaatcagtgatttacgtatttatcctaagggtgacgattatgttgttaaagcagaggttttaatgaaagataaagggtcaccacttgaaaacttagaacattacaccttagatattacgaaaaaagacggtaaatattatgttaaaaaattaacaacaacaattggaggttaa

SEQ ID NO: 411539 - DNA, 1101 bp, Staphylococcus aureus
atggaaaatcaagcttctaccccccttactaataggggggtagcgaagccagaaaaatgtggcttggaggcagttgttgactgggttcaagtgacatttcaggtgccctcaattttcaccattatggaggatgttttgaaactgcctcgggcagtgtttaaacatcgtaatagtggcttgtacttttacaatcgtggttatacgtttggcaatattcaaattttttattccgataaagatgaaggcatgggttttcatttacagttatctggttctggttgccgagaatttgaacattatttaatcaactgcaatgaaacgtggcaagacttttttaagcgctgttcggttaaaaaggcgcgtttttcaagaattgatattgcgatcgatgatacaaaaacgtatttaaaaataccacgattaattaaaaaagcagaacgcggtgaatgtatttcaaaatttagaacagcgagttcaattgctggttttaaattgtctgatggacagtctaagggctcaaccttttatatcggctctaaaaaaagtgatatgtactgtcgcttttatgaaaagaattatgaaatggcgtataaattaaaaacacctgttgaagattttggattatggaatcgttatgaaatacaaatgcgacgaagtaatgcggaaaattgcgcaaatattttaacagaaacatcaagcatatcagatattgttaaaggtgttttaaataatagtatgcgttttgtaactgaaccgaaagatgtgtcagatagtcgaaaatcaaggtggccagtttatcaagaatggtcacgctttattaaaggtgcggataaaattagtttaagtatgaagccgagtttaaagtcaattgaggataatattgattggttatgtaaacaagtagctacaacgctagacacggttttaacagctgaagcaatggcacaatctgaaggtttacttgaagatacagactttctaaataaaatattggcgcattcatcatttaatgatgaacacaccgatagaattaatcattatttagaaaatctaaaaaggaaaaagaaaggagatgattcctatcaaagcttttctaaataa

SEQ ID NO: 411540 - DNA, 303 bp, Staphylococcus aureus
atggaattttatacagctgacaatctagggccttatgcacgtactttaaaattatctgaaggcatgttgtcatatattgcatctagaattaatacaggtgaagcattatcattaatgcttatcgcaaaggaaatacaagaaaaatttaatggcgactatgttaaaagtcgtttaccatcaggcagaccgaggatatacactgacgtctgcttattgtgttttagtttgaaagaagcaggacacgggcgattactacaaattgatttgaaggattgtatctatattggtgatgtagatatttaa

SEQ ID NO: 411541 - DNA, 336 bp, Staphylococcus aureus
atggcatggagtccgaaatttgatttaaaagaaacgtttggagatttatatttcatgggtgttgatgagaaatataaatatgaagatggagaaaaaactgatcaaaaattatatgcatataaattagcgtcaactggacaaggtgaacaagtaacagtaaaagtacctaaagaagtaaaacttgatattatgtcagtttgtgaacttgtaggtgtagaagcaaaacaatatgtacaatcttcaggtgatttccattcaattcaaccaagtattaaagcggaagatattagacaaattggtacgatttcagttaagaaaggcgcgcaacaaagttag

SEQ ID NO: 411542 - DNA, 303 bp, Staphylococcus aureus
atgatagaaccagtcattgatattgacgcaaccatggggaaagagtttcgttatttgtcccatgttgaaaaaatatcgcggtttgatgaagcttattatctgtatacgattatatgtgttgatattggcgaacaagttaaagttagactgtcaaatgaaaaacactttgatgctttagaacgtgttaattttgataatctaataatcaaacctaaagtatatcaagatatgaatacaggttattgtaatttatatacaagcttttcagctgatgatatttatagtttagaaacaaaagcataa

SEQ ID NO: 411543 - DNA, 285 bp, Staphylococcus aureus
atgacgaattttgcgctgtctttttgtaacttgaataaactagattatcaaagttttgttattttaagatatcacggtgtttcaaaacgtcatatttgcaagatgtataaaattgcatatttttgtatattagatgtgtgcaataaagcgaaaagtaatgactatcaatttacttataaggattatgtatatttaaaaaagtatggtgtgtctaacgcatttatatgcaagatgtatcatattgataaattagacctagaattctttgaggtgatgaaccgatag

SEQ ID NO: 411544 - DNA, 504 bp, Staphylococcus aureus
atgattattttgcaattctttgtgaatagtgctgatgcaacaaaagttaacttatcgcaaacgtttgaaccaataagttggacccatttactaggaacagatgactatggtcgtgatttatttacaagggtcattgttggtgcacgatcaacattattcatcacaatcttaactttaattgctattgttattattggggtaacacttggattacttgcagggtataaaaaaggatggatagagcgcattatattacgcattgttgatatcggtctaagtataccggaatttattatcatgatagcattagcaagtttttttcagccaagtatttggaatttagttattgcaattacaattataaaatggatgaattatacaagattaacaagaagtattgttaatagcgaaattaccaaaccttacattaaaatggcaaaattatttcatgtaccaactagggtaatattgttacgccacttaacacctaagataatgccgtaa

SEQ ID NO: 411545 - DNA, 954 bp, Staphylococcus aureus
atgaaattaattagtgataacgatataatgttagagtataaaatgtctgatgctatatctgatattgaagcattattaaaaaatatggatgaaattaaacaagaatccagaattgttatttctacaaaagaaaatggtggtagtatgatttatatgccatgtgtggacttgaatagcaaaattggtattacaaaaattgcttcaattacaccagaaaataatataaatgatttgccaaccactcaagcaataatgattcttacagatttaaaaacgggagagcatatagcaactattgaagctaattatctaactaaattaagaactggggcattgagtggtatagctacaaagtatctaagtagagaaaattcaaatactattggcttaataggaactggtggtatggcatatgaacaattaataggtaatttagaagtaagaaaaatatcaaaagtttatttatacaacaaatcaaaagataaagcgaaagtatttaaagagaaaattatagaagaattaccgcacgtatctgttgaaataacagaaaatacaaaagaattagtagaaaactcagatataattaattgtcaaactagatcgacagaatcagtctttaatgccgaaaatgtcaaagttggtacacatataaatggtattggttcttttacgcctgaaatgagagaaattgattataatattttattaaacgcaaataaagtgatttttgatgattttgctggtgttaaagcagaagctggtgaatttattgaagctaataataaaggtgtttttaagtttgaagatgtcaacggggatttaaaagatttagtaacaagtgaaagtataagaaggagttctgaaaaagaaattacggtatttaaatctgtaggtactgcatattttgaccttgcggttgcaattggtatatataacaaaattataaataattaa

SEQ ID NO: 411546 - DNA, 1866 bp, Staphylococcus aureus
atgggattaccagacccgaacaaaagaaaacctacagctagtgaagttgtggagtgggcaaaatcaatgaaaggtaagcgtgtagatgtagatggttattatggcgcgcaatgttgggacttgccgaactatatttttaatcgattttggaattttagaacgtggggaaatgcggtagacatgtcacgttataaataccctaaaggttttagattccatcgttatacttcaagctttattccgaaacctggcgacatagcagtttggcatcctggtaacggtataggttcggccggacacaccgcaattgttgtaggtccatccgacaaaagttatttttatagtattgatcaaaattgggtaggtgcaaatggttggactggttcacccggcgcactagtaaagcacgggtatacgagcgttacaggatttgttaggcctccatacactaaagaaagcaacccagtaaaacctcccgatacaaacggtgctactaattctgatacaacaagtacaggggaagagaaaaaacctcaatttaaagaaattaaaactataagatacacagcttatagcagtattttagatagggaaaatcactttatcgaccatattgttgtttggggtgacgagcgttcagaaataaaaggattataccttaaagaatcaacgcatatgcgttcggttgatgagctctatatacaacgaaacaagtttattagtgattatgagctaccacatttatatgtcgatagagaagcaacgtggcaagtgaggccatctaactttgacgacccacgccaccccggatggatagttgttgaaatatgtggaggtcaaacagatagtaagcgtcaatttttaattaatcagatatttgcggtaattcaaggtgtatggttactgtcttggagtaataaaagattgtctgagacaacactaaaaatagatcctaatattcaacgtacgatgaaggatttaattaattacgacttaatcaaacaaggtataccggataaagctaagtacgatgaagtaaaaaagaaaatactagaaaattatactaacagggataaactgacaagggaaacaatcactacgataaccacaagaacaaaaatcaaaataggtaacggtacctcagttgatgatgtcaataaaataaatggcaattctaatgaagttaaagtgactaatgaagtgagtggtttcacattccaaaaagccctcgacaaacagatggcacaaggaagtcctaaagtctcacatgttggtggttggagtcctgctaatcgtacacaaacaagtaacgcaatgaacccgactagtatatggaatgattctacacaacgttaccaaatgcttaatttaggtaagtatcaaggtgtttcagtttctaagcttgatcagatattaaaaggcaaaggaacattaaacaatcaaggcaaagcttttgcggaagcgtgtaagaaacacaatattaacgagatatacttaattgcacatgcattcttagaaagtggttatggtacatcttactttgcgagtggtaacggtggtgcttacaactacttcggtattgcggcattcgacaataaccctaataacgcgatgaatttcgcaagaaacaaaggttggacaacgccagctaaagcaattataggtggtgctggatttgtaagagagggttacatttcaaaaggacagaatacgttataccgtatgagatggaatcctaagaatccaggcacacatcaatatgcgacggctatagaatggtgccaacatcaagcgagtacaatcgcgaagctatataagcaaatcggtttaaaagggctgtattatactagagacaaatataaatag

SEQ ID NO: 411547 - DNA, 408 bp, Staphylococcus aureus
ttggatgaaattcaaagaataaaaagtgagctttctgatttaaagactaaagttgacgatgtggaaaaaggaatgacaacaaggattgatgatgtagaaatattggcacaagaaaccgctgatcacgtactcaatctaagacaggaacatacaaaacatcacaatgaattaaggacgtctcacaaagaactaaaagtgaaacaagacaaagttgttgatgaaaacttagaacaaactaaaatattaaaccgaattgaagaaaggtatcaagtacaagtagatacagcgcaaaagaatgaagagaagacattggcacaaaacaagtggcttgtgggtgctatatgggcactagtaactattgtaatgatagctgtaatcactgcttcaattacggcattaattccataa

SEQ ID NO: 411548 - DNA, 177 bp, Staphylococcus aureus
atgcttaaactaatttcaccgacatttgatgatattaaaacatggtatgaactaggcgcttataacaaggaagatatcgcgtggtatgtagatatggaagtaattgacaaagaagaatacgctttgatcactggtgagaagtacatggataactcaattcaaaaaccagaggtttaa

SEQ ID NO: 411549 - DNA, 384 bp, Staphylococcus aureus
atgatgcaattattgattaatgaacgtggtgaaatcatctcttatgccatcacaggtggttttgatggtggtgtcactgttgaacgattaccagatgattttgaagtaatgtataaaccaagactttatgtgtatgccaacggcgaggttgtaagaaataaagaatatccgactgaggagtctgacaacaaccaatcaccagtgccaaatgtattgactgtagacaataaagtcatgcatatcttagcaaatatgcagaaacaagtgacgcaattatcgaaagtgtcactacaaacaagtaagcaaaatgctatgatggcgcaacaaattgttaaattaaacaaagaactagaagagaaaaaaggagatgttgaaaatgcttaa

SEQ ID NO: 411550 - DNA, 1875 bp, Staphylococcus aureus
atggtagttgataatttttcgaaagacgataatttaatcgagttacaaacgacatcaaaatataatccaatcatcgatacaaacatcagtttctacacatcagatcgtggaactggtgttttaaattttgcggtgactaagaacaacaaaccgttgtcgattagtaacaatcacgctaaggcagatattgtactaaaaacagataactatgatgatgaacacggtgcttatatttctgataagttaacgattactgaccctattaatggacgtatgcattttgttatcccaaatgagtttatgaagtatacaggtaaggtatatgcgcaagtttactttactcaaaacggtagcaacaacgttgttgtagagcgccgatttagctttaatatcgaagacgatttaattagtaactttgatggtgaaacaaaactggtttatatcaagtctattcatgatttaacagcaagtgctaaagaagaagtggacgcgttgaaaaagcggttaggcggtataaactcgttagtaactgaaatcgatagtcgtgctaatcaaggcattaaacaactagaaattaaacaaaacgaagctgttcaaatgatagtcgcaacacaaaacagtgctgaacaagcgattactgaagcattcaacagaattattgaaaaagagcaatcgattttaaaacaaatcaacaaggttgaaaaacaaattaatgatgcagaccttgttaaaagtagtacaacaaaagattggcaaaagtctaagcttaccgatgatgagggtaaagctattgaaatgggtgatacaacgattgaaacagtattgttaaaagcaacaagtacaaagttgtatcacatttcaaaagcaactgatgcccccgcacaaatgcgcgttggcactgaagatatacaaatgttaggacaagccggtctattatctgtatacattgttgatgatcaaacagcgcgtgcgatatggtacccagatgactcaaataacgagcataccacgtacaaaataaaaggcacttggtatccgtttcggccgaagaacaacgaggaaataacaaaagattttgttgaatctacagctgtgggagcgttgaataaagccaaatcttacgttgatgataagttggaaaaagtcggtcgtcagaaagttggtttaactaaagaaaacggagaattagaggtcgttagcggactagatttaaacaacccagaagcaaggttgcagcactctcaatttgtatacctaatatcggcgataaatacacccgatagttcgagtgataacggtatcttacactactacaaacaaagttatgaccgtgcccaaatggtttattcctcttacaactcaaacaaacagtatttgcgaaacaaaaacgctgatacttggagcggttggtcagaagttgcgatgatagataataccaatcctttcgatactgttagaggggtacaagcaaaagtaagcgcggcagagagcaacgcaaggaattatacagacagtaaatttaatggtagacaaactgttctatttagaggtagtgcaaacggtgtaggctcaacaataagattgaacgagagtctagatcagttttcactgttaattttctacggtttttttcctggcggtgattttgtcgagttcggagacccagaaggaaacggcggtatttccctcaaccccgtaaacttaccagatagagacggtaacggtggcggtatctatgaagttggtttgactaaaacaagtcgaacgctgttaaccatatctaacgatgttttcttcgatttaggtaaagggacaggctcaggagcaaatgcaaataaagggacaattaaaaaaattataggagtgcgtaaatga

SEQ ID NO: 411551 - DNA, 1899 bp, Staphylococcus aureus
atgacttacggattaattacaagtttacactctcttttaggtgatgatttgattaatcaacacgaatacaactaccgtcttattgataatggtatgggtaaattagagaagatgtttacgtatcatcaaaaagaagaaatatatgcgcatagagcacaccaaattaaatacttaaatgacagtgttgctacgtatttaggttatttaaacggtcgttttagtaacatgatactaggacataatggtgatggtatcaatgaagttaccgatgccagagtcgacaataccggtcatagacataaaacgctacaagaccgattgtatcaagactatgcgaaactaaacgaagtcactcaaaagattgaaagtgatgtaaataaacattacaaagaatatagagaaacggaatatcgttttgaaccaaaagaacaagaaccggagtttatcactgacttatctccctatacgaacgcggtcatgcagtcattttggatagatcctaaaacaaaggttatctatatgacgcaagcaagaccaggtaatcattacatgttaactaggttaaaacctaacggacaatttattgaccgattatttgttaaaaacggtggtcacggcacacataatgcgtatcgatacatcaatggtcaattatggatatattcagccatgttagacgacaaaggaaacaataaatttgcacgttttaaatataagtctggcgaaatcacttatggtagcggtacagaggatgtcatgccgaatgtatttaacacacactacacctctgctatatataatccaatcgagaatttaatgatttttagacgagaatacaaagcgtctgaacgacaagagaagaatgcgttaaattttgttgaagtacgaagtgctgatgatattgataaaggtattgataaagtattgtatcaaatggatataccaatggaatatacttcagagacacagcctatgcagggtattacttatgacgccggtgtcttgtattggtacacaggtgattcaattccggcaaatccaaattacttacaagcttttgatattaaaactaaaaaactgttgtttaagcgtcgtatggatattggcggtatcgataaagattttgtgggtaacttccaagaagcagaaggtatgtcaatgtactacgatgaagagacaggcagaaaagcgttgttgcttggtgtgactattggaccaggtaataacagacatcattcaatttattctatcggtcaaagaggcgtaaaccaattcttgaaaaacttaacaccgcaagtgtcaatgactgattcaggtggacgtgtgaagccgttaccgttacagaatcccgcgtatttaagtgatgttactgaaataggtaattactatctatattctcaagatacactaaacgctttagatttcccattaccaaaagtatttcgtgacgctggttggttctttgatgtcttaccaggtaactataacggggcagttagacaagtattgactagaaatagtacaggtagaaacatgcttaaatttgagcgtgtgatagatatatttgataaaagtaaaaacggtagatggaactttaaccctcagagtgccggttactgggaacatataccagaaggtattacaaagttgtcagacttaaaaatcgttgggttagacttttatatttctacagaagagtcaaagcggttctcagacttccctaaagattataaaggtattgcaggctggattttagaagttaagtcaaacacacctgagaatacaacgcaagtgttaaggcgtaacaacttcccttctgcacatcaatttttggtgagaaactttggatctggcggtgacggtaagtggtctatattcgaaggaaaggttgttgaataa

SEQ ID NO: 411552 - DNA, 936 bp, Staphylococcus aureus
ttgatatctcatgatgtagaaataataaaaggtaattcgaaataccgggtgagtaacaacccgttcacacataagtatctaaaggtagtgggatataacgttgcaggtgctggctataaacgtgatttttctgaaaccgaaggcactgacgggagatttcataactacgctaaggaagagtacaaaacgatagaacttattttgaggtatgaggttcctaaaattgcttatgcttcacacttaaaatcagacgtccaagcattatttgctggacgtttttatttgcgtgagttagcaacacctgataatacgataaagttcgaaaatatgtttgaccccttagatcagcaattcgatttagattatgttgatggacgccaactgtatgtaggtttggttagcgaagtttcttttgatactacacgaacaagtggtgaattcaccttaactttagaaacgacagagttaccttattttgaaagtataggttacagcacagacctagaaagtaatcaaaatatggaaaagtggtcagtgccagatagaataccgtttagcgaaagtgacaaacgacgtaaaatgacatttcacaatacgacaattggcgatgtttattatcatggtgacgttgctataacacagttcaatcagtttagtgttgttgaaatagaattagcagaagacgttaaagctaacgataagtacggttttacattttatatggatcgcggaaatattgccgtgttaaaaggagttgcgttaaaggcgggcgatattattcgctttgacggtaaacacgcatacagaggtaatttaaatatcgatacttttaatactacactggaacaacccgtattataccccggttggaacaggtttaagtcaaatgtgctaatgaaacgcattacattcaggcacaaattctattatagataa

SEQ ID NO: 411553 - DNA, 3105 bp, Staphylococcus aureus
atgcataaaaatttcatggcacgcataaatgctatcatcaaagactttcaaagcaatgtacgaaaggcacaacgtttagccaagacagcggttcctaatgaaattgaaacaaaagttaatgcgaatattagatcgtaccaacgtgaattaacgcgtgctaaatctatggcgcaacgatggcgtgagcacactgtcaatattgatgccgacgctagcagagctaaaagagtaatcacttttatcaaatcagagttagtgaacatcaaaaataagaaagtgaaaattgacggagattctagcgcgttaaagcgtactatagccaaatcaaaagcgttgttagcaagttggcgtaaacatactatcaagttaaattttgatacaaaaggtatgtccaaaatgcaaatagcaatgactgctggtaaaagagcgctagaagaatatcaatcaaagatggatagtatcgcatctaacattcgtacatttggtactatctttgcacaacaagttaaaggcttgatgattgctagtatacaagcgttgataccagtgattgctggtttagtccctgcaatcatggcagtacttaacgcagtcggagtgttaggtggcggcgttttaggtttagctggtgcgttttctgtagcaggtgttggagcagttggtttcggcgcaatggcaattagcgcacttaaaatggtggaagatggtacgctagcagttacaaaagaggtgcaagatttcagaaaagccagtgatcaattaaaagacacatggcaaggtattgttaaagaaaatcaatctaaaatattcaatgctatgtcagcgggtttaagaggtgttacaagcgcattaactcaaatgaaacccttcttgtctgaagcgtcaatgttagttgaagcgaatgtacgtaagtttgaagaatgggttaaaacatctaatacagctaaaaaagcgtttgaatcattaaatggaataggcggtgcggtatttggcgacttgttaaatgctgcaggacgatttggtgatgggttagtcaatgtattcactcaaatgatgccgttgtttaaatttgtgtcacaaggtctacaaaacatgtctatagccttccaagattgggcgaacagtgtcgcaggacaaaatgctatcaaatcatttattgaatatactaaaacaaatttacctaagataggtaagatatttggaaatgtttttaagggtattggtaatttgatgattgcgtttggtcaaaacagttcaaacatttttgattggttggttaaattgacggataaatttaaaaagtggtcagaggaagtcggtaaatcgcaaggctttaaagactttattaaatatgttcaagataacggaccgacgattatgcaattaatcgggaacatagtaaaagctttggtggcgtttggtactgcaatggcaccaatagctagtaaattattggaattcattacaactttagcaggtttcatagctaagctttttgaagcacatccaggtgtagctaaatttataggtgttctcgcaattcttggtggtgcgttttgggctatgatggcacctattattgcggtaggcgcggtgttaagtaatgtgtttggcataacattactagatatcggtagaaagatacaaaatttcgctaaaaacagccggttgttgagtagtgcttttaatgtattaagaggcgcttttaagtttttattgaatcctatgaatcttattagagcagttctaccacttttacaaggtggttttgcattgttagcaggtgctattacatcgatttcctggcctattttagcagttgtgggtgtaattgctggttttgttgcagggcttatttatttgtggaaaacaaatgaaggattccgaaaaactgtaaccactgcatgggaaagtgtaaaagaagctgtgtctggagctatagaaaagattgtaggttggttaaccgatttgtggaataaggttcaagaaactatacaaccgattataccgatactagaaacattaggtgatatctttatgtccgttctaggagacttagttaaaaatgctattgtcggtgtgatgaacgcagttcaaggactgtggacattgataactattgcttttaaaacaataggtacaatcatatctgtagccgttcaaattattgtagggatattcaccgctttaattcaatttcttactggcgacctctcaggcgcgtgggaaacaatcaaaacaactgtttcaaatgtactcgatactatttgggaacatatacaatctgtttggaattctattattggatttttgacagatgttatggatagaacgttatcattgttcggcacaagttggtctcagatatggagtaccataaccggctttgtttcgagaatatggagtagtatttcaagttggttcagcagagtagtaacaacgatagcttctaagatggcacaagcattgggatatattatttcaaaagctagtcagtgggtatcttcaatagcaaatgtaatggataggtttgttcaaaatgttattagtggttttgtacgtgtagttagtcaagtagcgaatggtatgagtagagcagtaggtaaggtcagaagttttgttggcaagttcttaaatgctggtatggatttaatgcgtggtttggtgaatggtattaaacgaggcttgcaatgggtagtaaacgcagccaaaagtgtggcgcaggcggctgtaaatgctgctaaaagagtgttgcgtatcaaatcgccatctagagtgttcagaggattagggcagtatgtttcgcaaggtttagctataggcattacaaaagacggcgaccgtgctataaacgctgttacaactttgtctaaagaattgacaaatgcatttagaccggagctatacagtgatctaacttctgatatgcaagggagtttaaatggttctgttgacggtcatatgtctaaggatattcaacacagcatgaaagaaaacaaccgacctattgttaacatcaccgttcgaaatgaaggcgacattgagtttataaaatcatatatagatgacttagatgccaaagatggaagcattagcttaatgtaa

SEQ ID NO: 411554 - DNA, 300 bp, Staphylococcus aureus
atgagtatgatgccgattgaatggaatgattgggttattggtgctaagcaagcattaattgaccaacgtgaaattctcttgcacggtgcgcaatacaatgcggtggctcaagccggtaaatcacttaagcgtttcgctaaacagatagaaaaggaacattatatcgttagtggtcgggaagatgaatatcatcgaatgaagcaacgtcaattagctaaaaataaacgtattagagagctgcataaacgaggcactcgaagatttattaatagcttaaatactagtcagagagggggataa

SEQ ID NO: 411555 - DNA, 492 bp, Staphylococcus aureus
atgactgaaacaaaatttaaccctattacagcattaacaattgatggtaaagaagtccaagcgaaagcaacgtttatgtttgatattaaagcggaaaaatttgctagtgaagcagacaaagaaggaacgaaagaaaagatttcaggatttagaaatctatacaacaacttacttgagcgtaaaacaatatctgttgttgatttttgggaatgtgcaacggcatatatgataaatgatacgccgaaaagaaaagatattgaaaacgccattatggctgtcattgaagaagaaaatgacacgttaggattattacaaggtgcgttagacgttctaaataatagtggttttttcaagcaagagtcacgtgcatactggatgcaaatgaacaaagcgccatcgttggtgaaagaggaagagaaagaaaacacgaagaatggtatcgagatgatgaaagagaattacaaggaaatcatgggctcactaccttactag

SEQ ID NO: 411556 - DNA, 549 bp, Staphylococcus aureus
atgcaaagtaaatatattgttgctattcagattgctgacaaagatttagctaaaaagctaactattgaagaagctacattacttgctagcttatctgagggtggtcacacaatcagtaacgaccttgcagagatgattcaaggtggcaaaaaagattatagccgtaactctgttgaagaagagattaaattaactgtagatgctgttcctggagacaaaggacaattagcgttaaaagagtctgttaagcattttaaacagttgcgcatctggatttgggaaaccaaaaaacgtgaaggtaaacatcacggaacgtttgcttatgtagttattgaagagcatgaatggtcgtttgatgacgaagataacacgattgagattacagcgaaggttaaatttaacagcgctgacggtagtgtcgataatttaccacctgaatggcttaatcctagtgcagcagggactactgttgaatgggaaaatatgggcgagtatgaaggtagctttgaagatcgtactaaaaagggctctggcagtttagaaatgtaa

SEQ ID NO: 411557 - DNA, 816 bp, Staphylococcus aureus
atgacacaaactaaaaaagaaaatttaattaatccagaggtcttggcaaatgtagtaagtggacaaatggaaaatgcaatccgctttactccttatgccgttactgatgacacattggtgggacaaccaggtgacacaatcacacgacctaaatatgcgtacattggcgctgcggaagacttacaagaaggcgttgcaatggatacaacgcaaatgagcatgactactactaaagttactgttaaagaaactggtaaggctgttgaggtaactcaaactgctgttatcacaaatattaacggtactttacaagaagctgctcgacaattagcaatgtcattagctgataaagttgaaattgactatattacagaattaaataaatcaaaacaaactgccacagttcctgctgatgctacaggtattttagatgcgattgaagtattcaattctgagaacgaagaaaattatgtgttacatgttaaccctaaagattataacaagttggttaaatcgttatttaaagttggcggaaatgtacaagatcgtgcaatttcaaaaggagatttagctgaaatcgtaggcgtatcagacattgttaagtctaagcgtatttcagaaaacacagctttcttacaacgtcgtggtgcaatggaaattgttaataaaaagaaaccagaagcatacacagactttgacattcttaaacgtacacacgttttatctactaattatcactacggcgttaacttaaaagatgaaacaggtgtggttaagataactttcaaagcgccacaagcatctttagaaatgtaa

SEQ ID NO: 411558 - DNA, 594 bp, Staphylococcus aureus
atgaaaagagaatttttgcgtggtttaggtttggaagaggaaacagttcaaaaaatcgttgatgagcaccatgacacgttgagagagtttaaagataaggctgaaaaggcggaatctttacagcaacaacttgataaagcgaataaagaactgaataatcgtgacaaacaaatcacagaccttcaaaaagctaaagatggggataacaaagaacttaaggataagttagaaaaatacgaacaagaaaatgcccaatatcaagctgatatgaaggaattaaaacttaataacgcagttaagttagcagttgctaaagaagcgaacgatgctaacgacattctagcattcatcaataaaggtgaactggaattgcgagatgacggcactgtgaaaggtttagacaaagagattaaaacactcaaagagtctaaaccttatttatttgcgccgtctaagcctacaggtaatagcccacaacaaggggataaccctacaggcaaaccaacaaaagaagatttcaaaaagatgacttacacagaacaagtcgagttattgaatagcgaccctgacttgtaccgtgaactatcaaattaa

SEQ ID NO: 411559 - DNA, 1407 bp, Staphylococcus aureus
atgccgtgggacaagccatatggcgaagaaataattgaacagatgaaacctaaggtcgaaacacaagaagagatgataattaggttgattaacaaccataaacagaaattaaaagatattaacgttggtcaaaagtattatgacaaagataacgacattaattatcaagcatataagcaagatttgcacggtaatatcgattacatcaagcctgactggcgtattactacaaactttcatcaaaacttagtagaccagaaagtaagttacgtcgccagcaaaccagtaacatatgcacatgatgatgacaaagtattagatgttattcatcaaattcttgatactcgttgggataataagttgattgatattttaactgcagctagtaataaaggtattgattggttgcaggtgtacattaatgaagatggagaactgaaattattcagagtgccagcagaacaagctataccgatttggactgataaagaacgagaacagttaaatgcttttattcgtatctttacatttaacgatgaaacaaaagttgaatactggactgctgaaacagttacttattatgtatacgaaaacggtagtttgatccctgatttctattatggaaatgaccacatacaaacccacttttcaactggtagttgggaacgagtacctttcattgcttttaaaaacaatcctgaagaagtatctgatatatggatgtacaagtcatttattgatgcgattgataaacgtttgtcagatgtgcaaaatatgttcgatgaatcagttgaattaatttatatattaagaggttatgagggtgaagacttaagtgagtttatggaaggacttaaatactataaagctatcaatgtaagcagtgatggtggtgtagaaactatacaagtagaagtgccggttgctagcactaaagaatatctagatatgatgagagcttatatcgttgaatttggacaaggtgtagactttcagactgataaatttggttctgctactagtggcattgcacttaaattcttatacacaaaccttaatttgaaagcaaacaaacttaagaataaagctaacgttgcattacaagagttaatacagtttattttagatttcaacaaaattaagttagatgctaaagagatagaaattacattcaactttaatgtaatggtaaatgatttagagcaatcacaaattggtgcgcaatcccaatacttatctaaagaaacgttagtacgtcatcatccttgggttgatgatccaaaagctgaattagagcgtctagacgaggaacaattagagttaaacaagcaactgcctaatttagatgacggaggtgctgacgttggccaacaacagcgacaatccgaaaataaccaatcaaaatga

SEQ ID NO: 411560 - DNA, 177 bp, Staphylococcus aureus
atgatgattaaacaaatattaagactaatattcttactagcaatgtatgagctaggtaagtatgtaacggagcaagtatatattatgatgacggctaatgatgatgtagaggtgccgagtgacttcgcaaagttgagcgatcagtctgatttgatgagggcggaggtgtcagagtag

SEQ ID NO: 411561 - DNA, 243 bp, Staphylococcus aureus
gtgagtataacaatattacttttgatagttttgggttatatgattttcgatattttaatcgagggatatttaaaagctaataacgctaatcgtgcagatatgtataagtggggggcgattataattcttgctataacacttggttttgcagatgcgtacaacaaaatggctactttagttctgttattagcaataagtttcgtagaaaaacttaagcgagttcaaaggagttataagaaatga

SEQ ID NO: 411562 - DNA, 237 bp, Staphylococcus aureus
atgacacaatacttagtcacaacattcaaagattcaacaggacgtaaacatacacacataactcgagctaagagcaaccaaaggtatacagttgttgaggcagagagtaaagaagaagcgaaagagaagtacgagacacagaatgctccagttgtctactacactaataattctaaagtaaccctattcgaaagacctagtgaagaagtattacgttctttgttcgaagagaaataa

SEQ ID NO: 411563 - DNA, 303 bp, Staphylococcus aureus
ttgattgctgcactgaagatagctaaagacagaaataaagttaattggggttacgctaaaagtattttaaattcttggttacaaatgaatttaagcaactacgatcaaattaaagcttatgaagctcaatataaagccacgaaaaaaatgcagaataagcaaaaacaaaattataagtctaaagaaaaaacgccaagttggttaaccaatcaaaatcaaaatacagctgtccaagttgatgaagaatttgaaaaagacagggctgaatttttaaaaaaattaaatgctcattggggtgattag

SEQ ID NO: 411564 - DNA, 579 bp, Staphylococcus aureus
atggagaaaaatgaaagtaatattactgacgtaactcagaacgaagagcaactagacaacagtgatgaacaatcacaacagaatgagaaaacattttctcaagaagaagtatcacaattgattaaagagcgtatagctagagaacgcaaaaaatcagatgaacgtattaaagatgcagttcaagaagctgagaagttagctaaaatgaatcgtgatcagaaaaatcaatatgaattagaaaaattgattaaggaaaatgaagaattaaaggcagaaaaggctttgtcacaaatgaaaagtgagacacgttcaatgcttaaagaagctggtttagaaaaatttgatgatcaaatagtcaatttattagttgattcggatgctggagaaacgaagaaaaatgtagaggcttttactggattgttaaatgaaatggttcaagcaaatgttgaaagtgtacttagacaaaaatcgccaataaatacgcaacaaactggtatgaccaaaaatcaaattatggctatcaaagatgatattgagcgtcaaaaagctattgctaataatttaaatctattcacttaa

SEQ ID NO: 411565 - DNA, 195 bp, Staphylococcus aureus
atgttaatagaaacagtgaaaaaattaatgaattcaaatttatcagcgtatgaaattggtaaaaaaacgggtgtagacccagcaagtataagaagaatcagaagaggcgaaagaactgctaaaaaattaagttttgatactgcggaaaaactctataattatcaaaaacaattagaaataatgaatgaagattaa

SEQ ID NO: 411566 - DNA, 249 bp, Staphylococcus aureus
atgaataaccgtaaacaaatagaacaatcagtgatcagtactagtgcgtataacggtaatgacacagaggggttactaaaagagattgaagacgtgtataagaaagcgcaagcgtttgatgaaatacttgaaggtttacctaatgctatgcaagatgcactcaaagaagatatttatcttgatgaagcagtagggattatgacgagtcaagttgtctataaatatgaggaggagcaggaaaatgactaa

SEQ ID NO: 411567 - DNA, 432 bp, Staphylococcus aureus
atgatacaaccaacaagagaagaattaattaatttcatgaaaaaacatggagctgaaaatgttgactctatcactgatgagcaaagtgcaataagacactttagagctcaatcaaaagtttttaaagacgaacgtgatgagtacaagaagcaacgagatgagcttatcgaggatatagctaagttaagaaaacgtaacgaagagctggagaacatgtggcgcacagtcaaaaatgaattgcttggaagatacgaacattactgttttaaaattagagaactacaccctgagagcaaagcgaacaggataggagctctctatataggaggtaaaagcactgcagatattatactgtcgcgaatggaagaactagacggaacaaatgagttctacgaatttttagggcaaatggaggaagacacaaatgaataa

SEQ ID NO: 411568 - DNA, 315 bp, Staphylococcus aureus
atgataccaggtgtgaatgcgccgtatattcatccttgtgtagaagtaaaagaagcaaaaataaatatttatttgttactaagttatactactgtatcaaatcaaatacttaatgaattattaacggacaaagtaggaaccggtgaaattttattattaaaagataagtttaaccaaaaagaaataacagattttgaaattatagttggaaaatcatttgtagaaggtaattatatagatacaacttttgaaaaagtatattattttagaacaggaacacttgtggttcaatatgttaacaaggaggttgaataa

SEQ ID NO: 411569 - DNA, 219 bp, Staphylococcus aureus
gtgaacaaattgtataaaacaaccctcctcatcacaatggcagttgtgacgtggaaggtttggaagattgagaagcacactagaaaacctgtgattagtagcagagcgttgagtgactatctaaacaacaaatctttaaccataccgaaagatgctgaaaattctactgaatctgctcgtcgccttttgaagttcgccgaacaaactattagcaaataa

SEQ ID NO: 411570 - DNA, 261 bp, Staphylococcus aureus
atgtattacaaaattggtgagataaaaaacaaaattataagctttaacgggtttgaatttaaagtgtctgtgatgaagagacatgacggtatcagtatacaaatcaaggatatgaataatgttccacttaaatcgtttcatgtcatagatttaagcgaactatatattgcgacggatgcaatgcgtgacgttataaacgaatggattgaagagaacacagatgaacaggacagactaattaacttagtcatgaaatggtag

SEQ ID NO: 411571 - DNA, 672 bp, Staphylococcus aureus
atgcaatacattacaagataccagaaagacaatgacggtacttattccgtcgttgctactggtgttgaacttgaacaaagtcacattgacttactagaaaacggatatccactaaaagcagaagtagaggttccggataataaaaaactatctatagaacaacgcaaaaaaatattcgcaatgtgtagagatatagaacttcactggggagaaccggtggaatcaactagaaaattattacaaacagaattggaaattatgaaaggttatgaagaaatcagtctgcgcgactgttctatgaaagttgcaagggagttaatagaactgattatagcgtttatgtttcatcatcaaatacctatgagtgtagaaacgagtaagttgttaagcgaagataaagcgttattatattgggctacaatcaaccgcaactgtgtaatatgcggaaagcctcacgcagacctggcacattatgaagcagtcggcagaggaatgaacagaaacaaaatgaatcactacaacaaacatgtattagcgttatgtcgcgaacatcataaccagcaacatgcgattggcgttaagtcgtttgatgataaatatcacttgcatgactcatggctaaaagttgatgagaggctcaataaaatgctgaaaggagagaaagagaaatga

SEQ ID NO: 411572 - DNA, 150 bp, Staphylococcus aureus
atgaagattaaaactttcgctacttttactcatcgtcaattagataaacaagttaataggtttttaaagaatgatattcatgtattagaaattcaaacacacagtaattggttatatatttcagctattgttttttatgaggataaataa

SEQ ID NO: 411573 - DNA, 366 bp, Staphylococcus aureus
ttggtgtcgatgatatttttttcattgaatgcctatcctaaagacgaagttatggaatatatatctgaatgggataacattggttcatttgtcattttaatcattatgtacgccatgttgtttccaatatttacaattccttttcttggagattgtaaaaataagcgatactttttagaaaagaacaataacgaagttatagaaagagaaatcattgaccgtgtctatatcaacagaaaagataaattaacatttaaaacacaagataaaaaatcatggatagcaatggaagatatacaaaaaatctttttaaaattccaagacagaagcaaaaaagggagtctccatttttatttttatatgtag

SEQ ID NO: 411574 - DNA, 1239 bp, Staphylococcus aureus
gtgaagagacttttagaagatgtttattctaaagagaatgctcgagggattcttaataaaataaaaccagaagattataatttaagttctaatgaattaataaataaaataattaaagctggaatagattactctgaagaaaataatagtaagtacaaagtctttgcttctgttcctaaagctaatattactttgaaaagtgagtataatattggtaattctttagtggttagaagtgataaagttataaaaccagaagattatgttaattatccagaagggtatcatgttcaaagttatgtttccaaaggaaaagaatatcctagtttagatgatatagttaaaaaaagagttacaggtagttataaaattacgtatcgattattagacagtaaagatgaacctgtttatggagaagatggtcaagcgattgtaagatcattaaatgtttatttctataatccagaaccagccttagatataattaaagaaatcgaagaagatatagatgaaaataactatcaaaatggcgaggagataaaagaaggtttagaaaaaataaaaaatgaactagaaagaccaactaaaataccagatgtacctgctttgattgatgaaataaataataagaaaaaccagcttgaaaatttagatacgacggcaccagacgcaccaaaagttaaggatacagagtcaggcagcaagaaaatcactggtgaaggatcagaaccaggcaatgacattaccgtaacgttccctagcggaaaaacaagtcaaggtaaagttggtcaagatggccaatgggaagtcgacgtaccagcaggtgaagagttaaaacctggagacaaagttacagcaaaagaaacagatccatcaggcaatgaatcatcaagtggtacaggtaacgtcatagatacgacggcaccagacgcaccaaaagttaaggatacagagtcaggcagcaagaaaatcactggtgaaggatcagaaccaggcaatgacattaccgtaacgttccctagcggaaaaacaagtcaaggtaaagttggtcaagatggccaatgggaagtcgacgtaccagcaggtgaagagttaaaacctggagacaaagttacagcaaaagaaacagatccatcaggcaatgaatcatcattaccaaatactggtaagacaaaaggtgattttgctaatgtcatattatttattctaggattggtacttttattcaaaagaaaataa

SEQ ID NO: 411575 - DNA, 447 bp, Staphylococcus aureus; identical to SEQ ID NO: 408745

SEQ ID NO: 411576 - DNA, 174 bp, Staphylococcus aureus
gtgagagaacgcactaaaattatatatcgtggttggaacaaggagatatttattttacagggtaaaaatatgaatgttattggtttgcgccaaatatttgatgaactcaaaagattgtacgaaggttataaaatcgttgttattccaatagaagttgattttgaaatcaaataa

SEQ ID NO: 411577 - DNA, 534 bp, Staphylococcus aureus
atgactaacacattacaagtaaaactattatcagaaaatgctagaatgcccgaacgaaatcataagacggatgcaggttatgacatattctcagctgaaagtgtcgtactagagccacaagaaaaagcagtgattaaaacagatgtagctgtgagtataccagagggctatgtcggactattaactagtcgtagtggtgtaagtagtaaaacgtatttagtgattgaaacaggcaagatagacgcgggatatcatggcaatttagggattaatatcaagaatgatattgaaacgttagagatttgggatgatggtaactttagtcgaaatgttgctgggatagacggaaagtatgccccaccacatccatcagataaaattttatttatgaatggtagttatgtcataaacaaaggcgacaaactagctcaattggttatcgtgcctatatggacacctgaactaaagcaagtggaggaattcgagagtgtttcagaacgtggagcaaaaggcttcggaagtagcggagtgtaa

SEQ ID NO: 411578 - DNA, 897 bp, Staphylococcus aureus
atggtgcgctggagtaaagagtattcagaaaagaacaatttaaatcagaacgtactttataagagtatagccaatggccaagaattaacgcctgaatgggttgattatttgttaaaagaagcagacgttacatcaattggatatggtgttggtagaaataacacaatgttttcagtggctttatactattattcaaaaaatgtagatttaaaagaagcagcaagtaatatctatgcttttaatcagcgcttagccaagcctttatcatataaagaggttgaaagagtaattaaaagcgcttatagcggtcgttatggtggtgcaatgcgtgaacatgtagaaaatcttttagaagcttttagtgatgatagaattgcatatagcaatagtggtgtaagtataaatggtttttggaaacataaaaaagagcgtaaagatcgtgttagaagccattttgacgaacgtaaggatgatttagaaagatatttaaatgaacatacaaacaagcagaaagtatttgttaaaggttcaatgagtgctattgctaaaaagttaggaatggctagatcttctttatatgcaatttttgaaaagcatattaataaaggaactattataaaatacacaattaaaaacggtagatattcagaaactttcattgctttaaaaagcgtatatattgaaagtttatttgaaatggttaaaagtcttaaaaacaaaaaagaaagctatataacggctataagacaacttgtaagcaatgaaagagatacacatagtttattgatacaaaatagtgaattgatgaatgaaatagaaaacacatttatttatataaatcagcatacacaatgtgaagatggtaatgaaattctatatgaacgctttatcagttaa

SEQ ID NO: 411579 - DNA, 708 bp, Staphylococcus aureus
atgtcagaaaaaaagaagtggtataaatctacttggtttacagtcttaactttaatttttttcttccctgtaggactattcctaatgtggaagtatatgaaatggaaacgttgggttaaaattttgattactgttttaatcgccataatagctattgttaatataactaaccctcccgaatcaaacaaacaaccccagaaagaatcaacaacaattgaagaaagtaagcctacatcgaaagagtcaacaacaaatgaagaaagtaagcctgcatcgaaagagtcaacaacaaatgaagaaagtaagcctgcatcgaaagaaaaatctgatataaatggaaacgattctgaagaatcctcttccgaggaaaaatctacagaaaaaagaacgactaataaaccaactagagagcaaaaagcagcattaaataaagctaaaacttattctgaagtgatgcacatgtctaaagcaggtatttatgaacaattaacttcggattatggagaaaaattccctgctgatgcagctcaatacgctgtagataatctaaaagtaaattataaaaagaacgctttagaaaaagccaaagattacgcagagcaacaacatatgtctactgacgctatatacgaccaactcacatcttcatatggtgaaaagttcacacctgaagaagctcaatacgcagtcgataatttagacaaataa

SEQ ID NO: 411580 - DNA, 183 bp, Staphylococcus aureus
atgactggtttaaaagtttttttgataatctgtatatctgcttttgttggaaattttatattaatgatttttgagagtatgcctatcaatatttgggttgctaggtttatcggaggtgtagcagctgctatttcaggtatgttgcttacttattattttcaaaaaaataggattgaggaatag

SEQ ID NO: 411581 - DNA, 372 bp, Staphylococcus aureus; identical to SEQ ID NO: 409099

SEQ ID NO: 411582 - DNA, 249 bp, Staphylococcus aureus
atgcctaaaaccgatagcgcatgtaaagaatacttaaaccaatttttcggatctaagagatatctgtatcaggataacgaacgagtggcacatatccatgtagtgaacggcacttattactttcatgggcatatcgtgccaggttggcaaagtgttaaaaagacatttgatactgctgaagagctcgaaatatatataaagcaacatggtttggaatacgaagaacagaaggaactaactttattttag

SEQ ID NO: 411583 - DNA, 360 bp, Staphylococcus aureus
atgagtatcgtaaagattaacggtaaaccatataaatttaccgaacatgaaaatgaattgataaaaaagaatggtttaactccaggaatggttgcaaaaagagtacgaggtggctgggcgttgttagaagccttacatgcaccttatggtatgcgcttagctgagtataaagaaattgtgttatccaaaatcatggagcgagagagcaaagagcgtgaaatggctaggcaacgacgtaaagaggctgaactacgtaagaagaagccacatttgtttaatgtgcctcaaaaacattcacgtgatccgtactggtttgatactacttataaccaaatgtttaagaaatggcaggaagcataa

SEQ ID NO: 411584 - DNA, 186 bp, Staphylococcus aureus
atgcaacaacaagcatatataaacgcaacaattgatataagaatacctacagaagttgaatatcagcattacgatgatgtggataaagaaaaagatacgctggcaaagcgcttagatgacaatccggacgaattactaaagtatgacaacataacaataagacatgcatatatagaggtggaataa

SEQ ID NO: 411585 - DNA, 189 bp, Staphylococcus aureus
atgcaacaacaacaagcatatataaatgcaacgattgatataagaatacctacagaagttgaatatcatcatttcgatgatgtggatgatgaaaaagatatgctagcaaagcgcttagatgacaatccggatgaattactaaagtatgacaacataacaataagacatgcatatatagaggtggaataa

SEQ ID NO: 411586 - DNA, 360 bp, Staphylococcus aureus
atgagtatcgtaaagattaacggtaagccatataaatttaccgaacatgaaaatgaattgataaaaaagaacgggttaactcccggaatggttgcaaaaagagtacgtggtggctgggcgttgttagaagccttaaacacaccttatggcatgcgcttagctgagtataaagaaatcgtgttatccagaattatgcaacgagaggctagagaacgtgaagtagctaggcaacgacgtaaagaggcagagctaagaagaaagaagccgcatttatttgatgtaccacaaaaacattcacgtgatccgtactggttcgatgtcacttataaccaaatgtttaagaaatggagtgaagcataa

SEQ ID NO: 411587 - DNA, 255 bp, Staphylococcus aureus
atgagcataatcagtaacagaaaagtagatatgaacgaaatgcaagacaacgttaagcaaccagcgcactacacatacggcgacattgaaattatagattttatcgaacaagttacggcgcaatatccaccacaactagcattcgcaataggtaatgcaatcaaatacttgtctagagcaccgttaaaaaacggacacgaggatttagcaaaggcgaagttttacgtcaatagagtgtttgatttgtgggagtga

SEQ ID NO: 411588 - DNA, 243 bp, Staphylococcus aureus
atgacagataacgcacgcaaagaatacctaaatcaattctttggatctaagagatatctgtatcaggataacgagcgagtggcacatattcatgtagtaaatgacacttattacttacacggacatatcgtgccaggttggcaaggtgtgaagaaggcatttgatacagccggagagcttgaaatatatataaagcaacatgatttggaatatgaggaacagaagcaactaactttattttga

SEQ ID NO: 411589 - DNA, 375 bp, Staphylococcus aureus
atgaaagttgcaagggagttaatagagctgattatagcgtttatgtttcatcatcaaatacctatgagcatagaaacaagcaagttgttaagtgaagataaagcactattgtattgggatacaatcaaccgcaactgtgtaatttgtggaaagcctcacgcagacctagcgcattatgaagcagtcggtagaggcatgaacagaaataagatgaatcactatgacaaacatgtattagcgttatgtcgcgaacatcataacgagcaacatgcgattggcgttaagtcgtttaatgataaataccacttgcatgactcgtggataaaagttgatgagaggctcaataaaatgctgaaaggagagaaaaaggaatga

SEQ ID NO: 411590 - DNA, 183 bp, Staphylococcus aureus; identical to SEQ ID NO: 409220

SEQ ID NO: 411591 - DNA, 651 bp, Staphylococcus aureus; identical to SEQ ID NO: 409598

SEQ ID NO: 411592 - DNA, 153 bp, Staphylococcus aureus; identical to SEQ ID NO: 409182

SEQ ID NO: 411593 - DNA, 201 bp, Staphylococcus aureus
atgccaaagaaaacggtaacgattgatgtagatgaaaacttattggtagtagctagtaatgaaatatcagaactattatatgaatatgacagtgagttaatgtcagctgatgaagatggcgataatagagatatcgaagaaaaaagagacgcattaaaacaagctatacaaattatcgataaattaacatggggtgtttag

SEQ ID NO: 411594 - DNA, 780 bp, Staphylococcus aureus
atgactgaaaaaactaatcaagatgtcgatattttaacgcaactaggtgtaaaagacatcagcaaacaaaatgcaaacaagttttataaatttgcgatatacggcaagttcggtactggtaaaactacgtttttaacaaaagataacaatgccttagtactagatataaatgaggacggaacaacggtaacagaagatggggcagttgtgcagattaagaattataagcattttagtgcagtgattaaaatgctgcctaaaattattgaacaactaagagaaaacggaaaacaaattgatgttgtagtgattgaaacaatccaaaagttacgtgatatcactatggacgacatcatggacggtaaatcaaagaaaccgacatttaatgattggggcgagtgtgctacacgcattgtaagtatttatcgttatatttctaaattacaagaacattatcaatttcatcttgctataagcggacacgagggcattaacaaagacaaagatgatgagggaagtactatcaatccaacaatcacgatagaggcacaagaccaaataaaaaaagcagtcatcagtcaatctgacgtgttagcaagaatgacaatagaagaacatgagcaagacggcgaaaaaacttatcaatatgtacttaacgctgaaccatcaaatttattcgagacaaagataagacactcaagcaacatcaaaattaacaacaaacgtttcattaatccaagtattaacgatgttgtacaagcaattagaaatggtaattaa

SEQ ID NO: 411595 - DNA, 186 bp, Staphylococcus aureus; identical to SEQ ID NO: 411584

SEQ ID NO: 411596 - DNA, 258 bp, Staphylococcus aureus; identical to SEQ ID NO: 407339

SEQ ID NO: 411597 - DNA, 360 bp, Staphylococcus aureus; identical to SEQ ID NO: 411583

SEQ ID NO: 411598 - DNA, 249 bp, Staphylococcus aureus; identical to SEQ ID NO: 411582

SEQ ID NO: 411599 - DNA, 300 bp, Staphylococcus aureus; identical to SEQ ID NO: 406384

SEQ ID NO: 411600 - DNA, 177 bp, Staphylococcus aureus; identical to SEQ ID NO: 408900

SEQ ID NO: 411601 - DNA, 213 bp, Staphylococcus aureus
atgatggaaacactctcttccctaggtgtgaaaccagacattatcgatttaattcacaaagggacagagttagaagactttgcagcatttaatttatcaattgatgatacagttacagtctgtttacaaagatctgaagaactattaaaacaatacaaaagtgtagaattcaatgacaaaatattaatcaattggcgcgttatacaaaagtaa

SEQ ID NO: 411602 - DNA, 141 bp, Staphylococcus aureus
atgaagaatttaaaaagtttttttattaaaaatactttggtactaacatctactgcattattattttctagttttgaacctgtagttcatgctgtggtatgtcaacaattttttagacagttttcatgtgtagatttttaa

SEQ ID NO: 411603 - DNA, 165 bp, Staphylococcus aureus
atgctaaaaaatggtattgagaatactaatacggatataggtatgattattattccgagtaagaacgttacaattataaagttcaataagtactctttgtttacttttttcataatgaatttaattccttttatgtatataatatttaataataaaaaattttaa

SEQ ID NO: 411604 - DNA, 150 bp, Staphylococcus aureus; identical to SEQ ID NO: 411572

SEQ ID NO: 411605 - DNA, 312 bp, Staphylococcus aureus
atgaatggcactaactatgatcgtatcgaaatacaaccgaaatttgaattacaacctaaattcgggaaacaaagaccgattacgtatatagccgatttctctttgtggaagaaagggaaactggttgaagttatagacgttaaaggtaaggcgactgaagttgccaacatcaaagcgaagatattcagatatcagtatagagatgtgaatttaacgtggatatgtaaagcgcctaaatacacaggtcaagaatggatggtatatgaggacttagtgaaagtcagacgtaaaagaaaaagagaaatgaagtga

SEQ ID NO: 411606 - DNA, 150 bp, Staphylococcus aureus; identical to SEQ ID NO: 411572

SEQ ID NO: 411607 - DNA, 222 bp, Staphylococcus aureus; identical to SEQ ID NO: 407328

SEQ ID NO: 411608 - DNA, 183 bp, Staphylococcus aureus; identical to SEQ ID NO: 410745

SEQ ID NO: 411609 - DNA, 759 bp, Staphylococcus aureus; identical to SEQ ID NO: 410468

SEQ ID NO: 411610 - DNA, 486 bp, Staphylococcus aureus
atgcatgcgcaaagcgcaggcgaaccgaagcgcagtgacctcaggttgttaggggcttttatgcatgcgcaaagcgcaggcgaaccggagcgcagtgacctcaggttgttaggggcttttatgcatgcgcaaagcgcaggcgaaccggagcgcagtgacctcaggttgttaggggcttttatgcatgcgcaaagcgcaggcgaaccggagcgcagtgacctcaggttgttaggggcttttatgcatgcgcaaagcgcaggcgaaccggagcgcagtgacctcaggttgttaggggcttttatgcatgcgcaaagcgcaggcgaaccggagcgcagtgacctcaggttgttaggggcttttatgcatgcgcaaagcgcaggcgaaccggagcgcagtgacctcaggttgttaggggcttttatgcatgcgcaaagcgcaggcgaacggcaagtggagctattcaatatgaaagtatttcaaatataa

SEQ ID NO: 411611 - DNA, 228 bp, Staphylococcus aureus
gtgccagtgaaagcggcagctggcggatatggcgcacatatggacattatgaaagagtaccaattaatcattttagcgccacaagttgcgtctaactatgaagatattaagcaagatacagatagattaggtattaaattagcgaagactcaaggtgccgaatatatcaaattgacacgagacggccaagcagcccttgatttcgttcaacaacaatttgaaaattaa

SEQ ID NO: 411612 - DNA, 201 bp, Staphylococcus aureus
atgaactatttcagatataaacaatttaacaaggatgttatcactgtagccgttggctactatctaagatatgcattgagttatcgtgatatatctgaaatattaagggaacgtggtgtaaacgttcatcattcaacggtctaccgttgggttcaagaatatgcccccaattttatatcaaatttggaagaaaaagcataa

SEQ ID NO: 411613 - DNA, 336 bp, Staphylococcus aureus
atggatctacaaaaaataaaattattatcatgtgcatttgttggtttaacttttttaaatatgtcaacagcgcacgcttcagaacaatatccttctcgtacagcaggatttgaatcaacacgtggacatagtccgtatgatacaaactaccaatatgaaaaaggtaatttagtatcttcgaacaaatatccttctcgtacagcaggatttgaatcaacacgtggacatagtccgtatgatacaaactaccaatatgaaaaaggaactttagcgtatagtctaaatgaactttataatattttaaaatctcgagtactaattaatagtgataaataa

SEQ ID NO: 411614 - DNA, 633 bp, Staphylococcus aureus
ttgctttacgaatctaatattattaacaaaaatcccagatatagaattattaaatataaaaacgactatctgatgattgatttagtaagcacatggttagttttgttctttccgtttattaattggttaatcccaaaaaaatatgtccaaatcagcagagaagattttgataatttaaatattgtcaaaccagttaaaaataaagctttatggccagctataggtagcatacttttatttggcactatgtttagagataaaatatatatacctgattctcatttagaaaaaaattgcgttattatcatatgttcggttttattattaagtattctagtgttttatatatatttaaatcagaaagtaaagttatctatctataataatcggagtagcaatggaaaaattatgattttcccttcattcaagaatctttgttttgtactattttcttattttttctgtggtggattatcaatcatgttcttagatgttttgattagtttatctatccaaaatattatagtatttattgcttgggttattatgacaatgctatttttctttttaaatatgtcttcaataatagacaaaaagattcatgttatatatttaaggccatataaacattaa

SEQ ID NO: 411615 - DNA, 1956 bp, Staphylococcus aureus
atgcatcatgtaaataaatatttcaatcaaacaatggtgatagaagctttgaaaatgagtttttataagctgaatcctaaacaattaataaaaaatccgataatgtttgtcgttgaggttggaatgattttaacgttgatattaatatgttttcctgacatatttggaactagctatctatcgcgaggttatttgattacaatttttatcatattattaataactatattgtttgctaatttttcagaagcctttgctgaaggtcgtggaaaagcgcaagctgatagtttaagacaagcacaatcaaatttaactgctcgattgatagaagaaaatggtgcgtatcggatagtgaacgccacagagttaaaagccggacaaaatattcgggtagaaaatggagaaacaatccctgctgatggcgttgtaataaatggattagcaaccgttgatgaatctgcaattactggtgagtctgcacctgtgataaaagaatcaggtggcgattttgatggagtcattggcggtacacttgtaacatctgattggttagaaatacgtgttgagagtgaagcgggtacatcttttttagataaaatgattgccttagttgaaggggcggaaagaaataaaacaccaaatgaaattgcactttttacattattaacaacgttaacaattatatttttagtcgttattgtaacgttatatccaatagcatcttacctgcatttaattttacctattgcgatgctcattgcgttaacagtatgtttaataccaacgacaatcggtggtttgttatcggcgattggtattgcaggcatggatcgtgttactcaattcaatgtattagcgaaaagtgggcgtgctgtagaagtatgtggagatgtcgatgtaatgattttagacaagacaggcacaatcacttatggcaatcgaatcgctagtgaatttttaccagtgaatcaacaaatgctggaaaaattgatagtcgctgcttatatgtcatcaatctacgatgatacgccagaaggaaaaagtattgtacgattagcgaagcagatgtatataaatgagctgcctaaagacattgatggcacatataagccttttacagctgaaactagaatgagcggaatcattacaaatgaaatatcggtattcaaaggtgcacctaatagtatgataaatcttgtcaaacaacaacaaggcaatattcctcttaacattgagtctctctgtatggatgtatcgagtaaaggtggcacaccattaatagtcattgaaaacaatgtcatgcttggcgtgatttatttaaaagatgtgattaaagatggtcttgtagaacgatttactgaattgagaaaaatggggattgaaacagttatgtgtacaggtgataatgctttaacagcagctacaattgcaaaagaagccggggttgatagatttgttgcagagtgtaaacccgaagataaaattaaagtcatcaaagatgaacaagcgaaaggccatattgttgcgatgacaggagatggtacaaatgatgcacctgcgctagcacaagcgaatataggattagctatgaactcagggacaattagtgctaaagaggcagctaatctaattgatttagattcgaatcctacaaagttaatagaggttgtaaaaataggcaaacaattattaatgacgagaggtgcattaacgacatttagtttggctaatgacgtagcaaaatactttgcaattttacctgcactaatgatgtcaacaattccagaaatgacttcactaaatattatgcatttatcgtcacctaaatctgcaattatatcagctttgatattcaatgcattaatcattgttgccttaattccaattgccatgaaaggtgtaaaagtaaagggttacagcattgatagaatctttataaaggcagtgtgtcaatag

SEQ ID NO: 411616 - DNA, 597 bp, Staphylococcus aureus
atgcattatccagaacctatatcaaaacttattgatagctttatgaaattgccaggcattggtccaaagacagcccaacgtctggcttttcataccttagatatgaaagaagacgatgttgttcagtttgccaaagcattagtagatgttaagagagaattaacatattgtagcgtatgtggtcacattactgaaaatgatccatgttatatttgtgaagataagcaaagagatcgttcagttatttgtgttgtggaagatgacaaagatgtcatagctatggaaaaaatgagagaatacaaaggtttatatcacgttttacatgggtctatttcgcctatggatggcattggaccagaagatattaatattccttcattgattgaacgcttaaaaagcgatgaagttagcgaattaatcttagctatgaacccgaacttagagggggaatctacagccatgtatatttctagattagttaagcctataggtatcaaagtgacgagattagcacaagggttatcggtaggtggcgatttagagtatgctgacgaagtaactttatctaaagcaatcgcaggtagaacagaaatgtaa

SEQ ID NO: 411617 - DNA, 318 bp, Staphylococcus aureus; identical to SEQ ID NO: 410185

SEQ ID NO: 411618 - DNA, 1698 bp, Staphylococcus aureus
ttgaattatcaagccttatatcgtatgtacagaccccaaagtttcgaggatgtcgtcggacaagaacatgtcacgaagacattgcgcaatgcgatttcgaaagaaaaacagtcgcatgcttatatttttagtggtccgagaggtacggggaaaacgagtattgccaaagtgtttgctaaagcaatcaactgtctaaatagcactgatggagaaccttgtaatgaatgtcatatttgtaaaggcattacgcaggggactaattcagatgtgatagaaattgatgctgctagtaataatggcgttgatgaaataagaaatattagagacaaagttaaatatgcaccaagtgaatcgaaatataaagtttatattatagatgaggtgcacatgctaacaacaggtgcttttaatgcccttttaaagacgttagaagaacctccagcacacgctatttttatattggcaacgacagaaccacataaaatccctccaacaatcatttctagggcacaacgttttgattttaaagcaattagcctagatcaaattgttgaacgtttaaaatttgtagcagatgcacaacaaattgaatgtgaagatgaagccttggcatttatcgctaaagcgtctgaagggggtatgcgtgatgcattaagtattatggatcaggctattgcatttggtgatggtacgttaacattgcaagatgcgttgaatgtcacaggtagcgtacatgatgaagcgttggatcacttgtttgatgatattgtacaaggtgacgtacaagcatcttttaaaaaataccatcagtttataacagagggtaaagaagtgaatcgcctaataaatgatatgatttattttgtcagagatacgattatgaataaaacatctgagaaagatactgagtatcgagcactgatgaacttagaattagatatgttatatcaaatgattgatcttattaatgatacattagtgtcgattcgttttagtgtgaatcaaaacgttcattttgaagtgttgttagtaaaattagctgagcagattaagggtcaaccacaagtgattgcgaatgtagctgaaccagcacaaattgcttcatcgccaaacacagatgtattgttgcaacgtatggaacagttagagcaagaactaaaaacactaaaagcacaaggagtgagtgtcgctcctgctcaaaaatcttcgaaaaagcctgcgagaggcatacaaaaatctaaaaatgcattttcaatgcaacaaattgcaaaagtgctagataaagcgaataaggcagatatcaaattgttgaaagatcattggcaagaagtgattgatcatgccaaaaacaatgataaaaaatcactcgttagtttattgcaaaattcggaacctgtggcggcaagtgaagatcacgtacttgtgaaatttgaggaagagatccattgtgaaatcgtcaataaagacgacgagaaacgtagtagcatagaaagtgttgtatgtaatatcgttaataaaaacgttaaagttgttggtgtaccatcagatcaatggcaaaaagttcgaacggagtatttacaaaatcgtaaaaacgaaggtgatgatatgccaaagcaacaagcgcaacaaacagatattgctcaaaaagcaaaagatcttttcggtgaagaaactgtacatgtgatagatgaagagtga

SEQ ID NO: 411619 - DNA, 525 bp, Staphylococcus aureus; identical to SEQ ID NO: 406840

SEQ ID NO: 411620 - DNA, 729 bp, Staphylococcus aureus
atggcgaaacaaaaaaagtttatgaagatttatgaggcgttgaaagaagatatattaaacgggcagattcaatatggtgaacaaattccgtctgaacatgatttggtgcaattgtaccagtcatctcgagagaccgtgcgtaaggcattagatttgttggcattagacggcatgattcaaaagattcatggtaaagggtcacttgtcatttatcaggaggttacagagtttccattttctgaacttgtgagttttaaagaaatgcaagaagaaatgggcgtcgcatatttaactgaagttgttctgaatgaggttgttgaagcgcatgaagttccagaagttcaacatgctttaaacatcaattctagtgaatccctcattcatattgttagaactcgtcggcttaaccaacatgtgaagattgttgatgaagattattttctaaagtcgattgtttcagatataggtaatgatgttgcgagtgattctatttatgattatttggaaaaggtattaaatcttaatattagttattcaagtaagtctattacttttgaaccgtttgatgaacaagcatatcaattgtttggtgatgtatcggtggcttattcagcaacagttcgaagtattgtgtatttagaaaatacaatgccgtttcaatataatatttcaaaacatcttgcaaatgaatttaaatttaacgacttctcaagacgtcgtataaagtaa

SEQ ID NO: 411621 - DNA, 1641 bp, Staphylococcus aureus
gtgtcgaaagaaatagattggagaaaatccgttgtatatcaaatttatcctaagtcgtttaatgatacgacggggaatggtataggagatatcaacggaattatagaaaaattggattatatcaagttattgggtgttgattatatttggttaacaccagtgtatgaatcacctatgaatgataatggctatgatatcagcaattatttagaaatcaatgaagactttggaacgatggatgattttgaaaagttaatcaaagttgctcatcaaaaagacttgaaagtgatgttagatattgtcattaatcatacgtcgacggagcatgaatggtttaaagaagcccgtaaatctaaagataacccttatagagattattactttttcagatcatctgaagacgggccgccaacaaattggcattctaaattcggtggtaatgcatggaagtatgattctgagacagatgaatattatttacatttatttgatgtcagtcaagctgatttaaattgggataatccggaagtacgtcaatcgttatatcgcatagtcaatcattggatagacttcggcgttgatggttttcgatttgatgtcattaacttaatttctaaaggtgaatttaaggactctgacaaaataggtaaagaattttatacggatggtcctagagtgcatgagtttctgcatgaattaaatcgtcaaacgtttggtaacactgacatgatgactgtaggagaaatgtcttcgacgacgattgaaaattgtattaagtatacacagccagaacgtcaagaattgaatagtgtttttaattttcatcatctaaaggttgattatgttgatggtgaaaagtggacaaatgcgaagcttgatttccataagttaaaggaaattctgatgcaatggcaacgaggtatttatgacggtggcggatggaacgcgattttttggtgtaatcatgatcagccacgggtagtgtctagatttggtgatgatacgtcggaagagatgaggatacaaagtgctaaaatgttagctatcgcactgcatatgttgcaagggacgccatatatttaccaaggtgaagaaattggtatgacggacccacgttttacatcaatagcacaatatcgtgatgttgaatcgattaatgcctaccatcagttgttaagtgaagggcatgctgaagcggatgtattagcgattttaggacagaagtcacgagacaattcgagaacgcctatgcaatggagtgatgatgttaatgctggatttacagctggtaagccttggattgatatttcggaaaattatcatcaggtcaacgttagacaagcacttcagaataaagagtctattttctatacgtatcaaaaattaatacaattaagacatacgcatgatattattacgtatggagacattgtgccacgttttatggatcatgatcatttatttgtttatgaacgtcattataagaatcaacaatggctagtaattgcgaatttctcagcatcggcggttgatttgccagaaggattgactagcgaaggtcgtgttgtgattcaaacaggcacagtggaaaataatacgataagcgggtttggtgcaattgtaatcgaaacaaacgcgtaa

SEQ ID NO: 411622 - DNA, 1428 bp, Staphylococcus aureus
atggctgtaaaaagagaagatgtaaaagccatcgtaaccgctattgggggaaaagaaaatcttgaagctgcaacgcattgtgtaacacgattacgtttagtgctgaaggatgaaagtaaagttgataaagacgcattaagtaataacgcgttggtcaaggggcagtttaaagcagaccatcaatatcaaattgtcattggtccaggaacagtcgatgaagtgtataagcagtttattgatgaaacaggtgctcaagaagcttcgaaagatgaagcgaaacaagcagctgcacaaaaagggaatccagtacaacgtttgatcaaattgttaggggatatttttataccaatattacctgcgattgtgacagctggtttgttaatggggatcaataatttacttacaatgaaaggtttatttggtccaaaagcacttattgagatgtatccgcaaattgctgatatttcaaacatcattaatgtgattgcgagtacggcatttattttcttaccagcattaattggttggagtagtatgcgtgtatttggtggtagtccgattctaggcatagtcttaggtttgattttaatgcatccgcaattagtatctcagtatgatttggcaaaagggaatattccgacgtggaacttatttggcttagagattaagcagttgaattaccaaggtcaagtgttgcctgttttaattgcagcttatgttctagctaaaattgaaaaaggattaaataaagtcgttcacgattcgataaaaatgttggtcgttggccccgtagcgcttttagttactggatttttagcatttattatcattggaccagttgcgttattgattggtacaggtattacatctggtgttacatttatattccaacatgcaggatggcttggcggagcaatatatggattgttatatgcaccacttgtaattacaggactacaccatatgtttttagcagtagatttccaattgatgggtagcagcttaggtggtacgtacttatggccaatcgttgcgatttccaatatttgtcagggctctgcagcatttggagcatggtttgtctataaacgtcgtaaaatggttaaagaagaaggcttggcattaacatcttgtatttctggtatgttaggtgttactgaaccagctatgtttggtgtgaacttacctctgaaatatccatttatcgctgcgatatcaacatcttgtgtattgggggcaatcgttggtatgaataacgtacttggaaaagttggtgttggtggcgtgccagcattcatttcaattcaaaaagaattttggccagtatatcttattgtgacagctattgctattgttgtaccatgtatactaacaattgtgatgtctcattttagtaaacaaaaagcgaaagaaattgttgaagattaa

SEQ ID NO: 411623 - DNA, 1464 bp, Staphylococcus aureus
atgggtgaatttaaaggatttatgaagtatgacaaacagtacttaggtgaattatcactggtagaccgtttgaagcatcataaagcatatcaacaacgatttactaaagaagatgcctctatccaaggtgcacgatgtatggattgtggaacgccgttttgtcaaaccggacaacagtatggtagggaaacaataggttgtccaattggaaactacattcctgaatggaacgacttagtgtatcatcaagattttaaaactgcttatgaacgcttaagcgaaacaaataactttcctgactttacaggacgtgtgtgtcctgcaccatgtgaaagtgcttgtgtaatgaagattaatagagaatcgatagcgattaaagggattgagcgcacgattattgatgaagcttttgaaaatggttgggttgagccgaaaattccaagtcatcgtagaaatgaaaaagttgcaatcattggtagtggtcctgcaggattgactgccgctgaagaactgaatttattagggtaccaagtgacaatttatgagcgtgctagagaatcaggcggtttattaatgtatggtattccaaatatgaagcttgataaatatgtcgttcgtcgtcgtattaaattaatggaagaagcgggcataactttcattaacggcgttgaagtaggtgttgatattgataaagaaactttagaatctgagtatgacgctattatattatgtactggggcacaaaaaggtagggatttacctttggaaggtcgcatgggtgaaggtatacattttgctatggactatctgactgaacaaacacaacttttaaatggtgaaattgatgatatcactattacagcaaaggataaaaatgtcatcattattggtgctggtgatacaggagcagactgtgtagcaacggcattaagagaaaactgtaaatcgattgttcaattcaataagtatacgaaattacctgaagctattacatttgaagaaaatgcttcttggccattagcgatgccagtatttaaaatggattatgcacaccaagagtacgaagctaagtttggtaaggaaccacgtgcatatggtgttcaaacaatgcgttacgatgttgacgataaaggacacatacgtggtttgtatactcaaattttagagcaaggcgaaaatggtatggtcatgaaagaaggacctgaaagattttggcctgctgaccttgtattattatcaatcggcttcgaaggtacagaaccaactgtaccgaatgcttttaacattaaaacggatagaaatcgaatcgtggcggatgatacaaactatcaaactaataatgaaaaagtatttgctgctggagatgctagacgtggtcaaagtttagttgtatgggcgattaaagaaggtagaggcgtagcgaaagcagtagatcagtatttagcgagtaaagtttgtgtataa

SEQ ID NO: 411624 - DNA, 4500 bp, Staphylococcus aureus
atgcacaatgagaaattaattaaaggcttatatgactatcgtgaggaacatgatgcgtgtggtattggtttttatgcgaatatggataataaaaggtctcacgacatcattgataaatcgcttgaaatgttgcgacgcttagatcataggggcggggtcggcgcagatggcatcactggtgatggcgcaggtattatgactgaaataccttttgcatttttcaaacaacatgtaacggactttgatatcccaggtgaaggtgaatatgccgtggggttatttttttccaaagaacgcattttaggttctgaacatgaagtagtttttaaaaaatattttgaaggcgaagggttatcaattcttggttatcgtaatgtaccagttaataaagatgccattgctaaacatgtagcagatacgatgccagtcattcaacaagtgtttattgatattagggacattgaagatgttgaaaagcgtttgtttttagcgagaaaacaattagagttctattcgactcagtgcgatttagaattgtattttacgagcttatcacgcaaaacaattgtatataaaggttggttacgatcagaccaaattaaaaaactatatacagatttatcggatgatttatatcaatcaaagctagggttagtgcattcgagatttagtacgaatacattcccgagttggaaaagggcacatcctaaccgtatgttaatgcataatggtgagattaacacgattaaaggtaatgtaaactggatgcgagcacgccaaaataaattaatcgaaacattatttggcgaggatcaacataaagtgtttcaaattgtcgatgaggatggtagtgactctgctattgtagataatgcgctagagttcttatcgttagccatggagccagaaaaggcagcgatgctactcatacctgaaccttggttatataatgaagcgaatgatgcaaatgtacgtgcgttttatgaattttatagttatttaatggaaccgtgggatggtcctacaatgatttcgttctgtaacggtgacaaacttggcgcgcttacagatagaaatggattacgtccaggtcgttatacgattactaaagataactttattgtcttttcatctgaagtgggtgttgtggacgtacctgaaagtaatgttgcttttaaaggtcaattgaatcctggaaagttattgcttgttgattttaaacagaataaagtcattgaaaataatgatttaaaaggtgcgattgctggagaattaccatataaagcgtggattgataaccataaagttgactttgattttgaaaatatacaatatcaagattcgcaatggaaagatgagacgttatttaaattacaacgtcagtttgcatacacgaaagaagagattcataagtatattcaggaacttgtagaaggtaagaaggatcctatcggtgcaatgggatatgatgcgccaattgcagtgttgaacgagcgaccagaatcactatttaattactttaaacagctgtttgcacaagttacgaatccaccaattgatgcgtatcgtgaaaaaatcgtaacgagtgaactttcttatttaggtggcgaaggtaacttactagcacctgacgaaacggttttagatcgtattcaattgaaaaggccggtattgaatgaatcacacttagcagcgattaatcaggaacattttaaattaacttatttatcaacggtatatgaaggggatttggaagatgcgttagaagcattaggacgagaagcagtggatgctgtaaagcaaggcgctcaaattctagtgttagatgatagtggattagttgatagcaatggctttgcaatgccgatgttactcgcaataagtcatgtgcatcaattacttattaaagcagatttacgtatgtctacaagtttagtcgctaaatctggtgagacacgagaagtgcatcatgttgcttgtttactcgcatatggcgcgaatgcaattgtgccatacctagcgcaacgtacagttgaacaactgacattgacagaagggttacaaggcaccgttgtcgataatgttaagacatatacggatgtattgtcagaaggtgtcattaaagtaatggctaagatgggaatttcgacagtgcaaagttatcaaggtgcacaaatatttgaagcgattggcttgtctcatgatgtgattgatcgttattttactggaacacagtctaagttatcgggtatttcgattgatcaaattgatgctgaaaataaagcacgtcaacaaagtgatgataattatcttgcatcaggtagtacatttcaatggagacaacaaggtcaacatcatgcttttaatccggaatctattttcttattgcagcacgcatgtaaagaaaatgactatgcgcaatttaaagcatactctgaagcggtgaacaaaaatagaacagatcacattagacatttacttgaatttaaagcatgtacaccgattgacatcgaccaagttgaaccggtaagtgacattgtcaaacgctttaatacaggggcgatgagttatggatcgatttcagcggaagcacatgaaacgttagcacaagccatgaaccaattaggtggaaagagtaatagtggtgaaggtggcgaagatgcaaaacgttatgaagtacaagttgatggaagcaacaaagtaagtgcgattaaacaagttgcttctgggcgttttggtgtaactagtgattatttacaacatgccaaagaaattcaaattaaagttgcgcaaggtgcaaagcctggtgaaggtggtcaattacctggtactaaggtatatccgtggattgcgaagacaagagggtcaacgccaggtatcggtctgatttcaccaccgccacatcatgatatttattcaatagaagatttagcgcaactgatacatgatttgaaaaatgcgaataaagatgcagatatcgcggtaaaattagtttcgaaaacaggtgttggtaccattgcatctggggtggcaaaagcatttgcagataaaattgtcatcagtggttacgatggtggtacaggggcttcacctaaaacgagtattcagcatgccggtgttccttgggagattggtttagcagaaacacatcaaacattaaaactaaatgacttaagaagtcgtgttaagttagaaacagacggtaagttattaactggtaaagatgtagcgtacgcatgtgcgcttggagcggaagaatttggatttgcaactgcaccattagtggtgttgggctgtattatgatgcgtgtatgccataaagatacatgtccagtaggagttgcaactcaaaacaaagatttacgtgctttatatagaggtaaagcacatcatgttgttaattttatgcattttattgcacaagaattaagagaaattttagcatctttaggtttgaaacgtgtagaagacttagttggaagaactgatttattacaacgatcatcaacattaaaagcgaatagcaaagcggctagtattgatgttgaaaaactgttatgtcctttcgatgggccaaacacaaaagaaattcaacaaaatcataatcttgagcatggatttgatttaacaaatttatatgaagtaacgaagccatatattgctgaaggacgtcgctatacaggtagctttacagtaaataatgaacaacgtgatgtaggagttattacaggtagtgagatttcgaaacaatatggagaagcaggacttcctgaaaatacaattaatgtttatacgaatggtcatgctggtcaaagtcttgcagcatacgcaccgaaaggcttaatgattcatcatactggagatgcgaatgactatgttggtaaaggattatctggtggtacggtcattgtcaaagcaccttttgaagaacgacaaaatgaaattattgctggtaacgtctcattctatggtgcgacaggtggtaaggcatttattaacggtagtgcaggagaaagattctgtattagaaatagtggtgtagatgttgtcgttgaaggtatcggtgaccatggattagagtacatgactggtggacatgtcattaatttaggggatgtaggtaagaacttcggtcaaggtatgagtggtggtattgcttacgttatcccgtctgatgtagaagcttttgttgaaaataatcaactagatacgctttcgtttacaaagattaaacaccaagaagaaaaagcattcattaagcaaatgctggaagaacatgtgtcacacacgaatagtacgagagcgattcatgtgttaaaacattttgatcgcattgaagatgtcgtcgttaaagttattccaaaagattatcaattaatgatgcaaaaaattcatttgcacaaatcattacatgacaatgaagatgaagcgatgttagctgcattttacgatgacagtaaaacaatcgacgctaaacataaaccagccgttgtgtattaa

SEQ ID NO: 411625 - DNA, 885 bp, Staphylococcus aureus
atggaaattaaacaattaagatattttatcgaggtcgctaaaagagaacatatctctgaaacagcacttgaactaaacattgctcaatcagcgataagccgtcaaattacattattagaacaagaacttaatgtgtctttatttaaaaagcaaggacgcaatattacgctcacatctgaagggaaattattatttaatgaagctctgcgtattattgaacatttagatagcacgattgaacaatttcaaagccatggattaactaaaaataaaagtatctacattggctatgatgagagtgacgtatcccacatgttactaccacttatccaaacgtttcatttacaaaatgatacacatgtcataccgagcttattagaacatgacacaattataaatagcgtattaaatgggaatatagacattggtttcacggaacttacaccagaaatacgtaaacacaaacaattacatatgctacctttattcgaagagcactatcatttatatgcgccttcagacgatccaattacgatggcgacacacccaccattaattcagtttgagcatagtcatatttattgcttggcaccatttgccgaaactgtaaaaaaacaattgcgcaagattactaaatcagatgtatacacaatcagtagccaaccacttgcgcagtatctccttcgtcaaaaagaaggttatatcatttcatcacaaaatatacatttaccagaatctaaatcatggatagatataaaattagatcatactgaattaaaaagaacgatatgtgctattacaaaggagccttatacaaagagtgatattggtatcttattaacacttattcagcaattaatgactaaaacgtctacattccattaa

SEQ ID NO: 411626 - DNA, 1113 bp, Staphylococcus aureus
ttgaaatatagaaatttatttacaaagccatttaatataattttaggtttgttctgcatcgcattcattggtgctattttatttacattcaataatgagaacttttacaacaaaccaattggtcaaattatagatgtcaaacatgtttcttcgacacctacaaaagatgcacaaaataatcgtgatattaaatataaaaatcaattaaaagtcaaaatattaaatggtcaatttgctggagaaacgacgacgattaatcatcagtacgtcaaatcgcaagcagattctgaggcatttcgcacacacgaaaaagtattattacatatttctaacaagccgagtgatgcttatattatagaaaagaagcgtgataccttaacggttatcatcactggtttgttcttattaactgtattattggttggtcgcaaagtcggactgcaatcgattttatcgttaatcttgaattctattgccatattaatcgcaatttacattcatattcaacatagcaatattaatttattcttactcatgaccattgccatgatctgttcaacaatactcactttattgctcgttacaggctggcatatgcgtacactcattaccatagccagtacaattatcggaacttttttgagtataggtttaacagaattaatcatatatatgacagatggtaaaggcattaaatatgaaacgatgaactttttatcattaccaccgaaagatatcttcctagcctcagtgttaataggttcacttggcgctattatggatgttgcaattacaattgctagtggtatgcatgaaattttacagcgtacgccgcacatttcaatgaggagatgggcgcttgctgggcgaaacataggccaagatattatgggaacaatgactaacatcttattattctcatatttatccggtgcactacctatgtttttaatctttttaaaaaatgccaatacagtgacttatactatttcgatgaattggtcgttagaaattgcgcgcgcactaacaggtggtataggtatcgtacttacaattcctatcacaatattgtttatggaaatatttgaaacattaaggagggcgaaacaatga

SEQ ID NO: 411627 - DNA, 783 bp, Staphylococcus aureus
atgaatgctgtatttatattggcggtattgctcctctttctgatgataattttcggaggtaaaaagggattcatctcttatttaaccctatttttaaatttcgctattttaattattagtattgtgttgattatttttggcgtaccgatttatgtcgtcacattctttttctgcattattattggcgcttgtaatttattcgtactcaatagttacaatgttaaaacacaagctgcatttatcagcactatcgttacaacaatattgttgattacactcatttatttatcggtctacttcggtcatctacaaggcttttcaaccgaacaacaagatgaaacatatgtgtattcaatgaatattggcattgatatggttcaatttatggtgttcactattattcttgctgttattgcagctgtgatagatttaacgattaccattagttcacccatttatgaattgcatcaagtgaatccaacacttacgcaatacgaattattccaatctggcatgcgtgttggtagagaaattttagcgacatctgcgaacacgatttaccttgccttttttggtggccaacttgctttatttatttggtttttcaaacttaaatattcatttggtcatattataaactcgaaaatatttgcccaagaatttatttctattattttaggcggtattgccgttgcaatcagtattccgattacggcttggattacggcatttttaataaaaagaccatctcgacagcgcaaaaatgatgagtctatcaattaa

SEQ ID NO: 411628 - DNA, 486 bp, Staphylococcus aureus
atgacaaataatgacaccatcatgttacgacattatgtcccacaagattattcgatgttagaagcttttcaattaagtgaaagtgatttgaagtttgttaaaacgccagaggaaaatattacagctgcaatgtctgataatgaaaggtatcccatcgttgtaatggatggcaagcaatgtgtggccttttttacattacatcgtggaaaaggggtcgcaccatttagcgataaccaagatgcagtatttttcaggtcatttagtgttgatcaacgttatcgtaatagaggaataggtaaagtggtaatggaaaaattggcgtcatttatcacttcaacatttcaggatattaatgagattgtgttaacggttaatactgacaatccacatgccatggcactttatcgccaacaaggatatcaatatatgggagatagtatgttcatcggaagacctgttcatattatggcgttaactataaaataa

SEQ ID NO: 411629 - DNA, 396 bp, Staphylococcus aureus
atgattaaatgtgtctgtttagttgaagaaacagctgataaaatattacttgttcaagtaaggaatcgcgaaaagtattatttcccaggtggtaaaatagaagaaggggaatcacgagtacaagcgctgttaagagaagtaaaagaagaattaaatttaacattaacaatggatgaaattgaatatatcgggacaattgtaggtcctgcatatccacaacaggatatgttaactgagttaaatggatttcgcgcattaaccaaaatcaattgggaaaacgtaactatcaataatgaaattacggatatacgctggattgataaagataatgatgcgttgattgcgcctgctgtcaaagtttggattgaaacgtatggtggtaaacatgacaaataa

SEQ ID NO: 411630 - DNA, 270 bp, Staphylococcus aureus
atggcaaaacgttccaaatcacaacgtttatcaagtttactaaatgtcgcaggtttcatagtcgacggctacaatggctataaatatcatgctaaaaataaaaaattagtatatctttcattaggtttaagcactgtaggaaccgtgttagacttttacatttcaattaagtcaccacgtaagttcaaaaaagcagtggcagttgttactttaataacaaacggtgctagattatttacaagcattcgcaaagtaaagcatgaatactaa

SEQ ID NO: 411631 - DNA, 1005 bp, Staphylococcus aureus
gtgcaaaaaaaagtaattgcagctattattgggacaagcgcgattagcgctgttgcggcaactcaagcaaatgcggctacaactcacacagtaaaaccgggtgaatcagtgtgggcaatttcaaataagtatgggatttcgattgctaaattaaagtcattaaacaatttaacatctaatctaattttcccaaaccaagtactaaaagtatctggctcaagtaattctacgagtaatagtagccgtccatcaacgaactcaggtggcggatcatactacacagtacaagcaggcgactcattatcattaatcgcatcaaaatatggtacaacttaccaaaacattatgcgacttaatggtttaaataatttctttatttatccaggtcaaaaattaaaagtatcaggtactgctagctcaagtaacgctgcgagcaatagtagccgtccatcaacgaactcaggtggcggatcatactatacagtacaagcaggtgactcattgtcattaatcgcatcaaaatatggtacaacttatcaaaaaattatgagcttaaatggcttaaataatttctttatatatccgggtcaaaaattaaaagtaactggtaatgcatctacgaactcaggatctgcaacaacgacaaatagaggttacaatacaccagtattcagtcaccaaaacttatatacatggggtcaatgtacatatcatgtatttaatcgtcgtgctgaaattggtaaaggtattagtacttattggtggaatgctaataactgggataacgcagcggcagcagatggttacactatcgacaatagacctactgtaggttctatcgctcaaacagatgtaggttattatggtcatgttatgtttgtagaacgtgtaaataacgatggtagtattttagtttcagaaatgaactattcagctgcaccaggtattttaacttacagaacggtaccagcttaccaagtaaataattatagatatattcactaa

SEQ ID NO: 411632 - DNA, 843 bp, Staphylococcus aureus
atgaaaagattgattgggttagttatcgtagcacttgtattattagcagcgtgtggtagtaacaatgataaaaaagtaacaattggtgtcgcatcaaatgatactaaggtttgggagaaggttaaagaattagctaaaaaagatgatattgatctggagattaagcacttctccgattacaatttaccgaataaagcattaaacgatggtgatattgatatgaatgcattccaacattttgcatttttagatcagtataagaaggcacataaaggaacaaagatttcagcattgagtacaacagttttagcaccgttgggcatttactcagataaaattaaagatgtcaaaaaggttaaagatggtgctaaagttgtcattccaaatgatgtatcaaaccaagcacgtgcacttaaactattagaagcagctggtttaataaaactgaaaaaagatttcggtttggcaggcacggtgaaagatataacgtcaaatccaaaacatttaaaaattactgcagtagatgcacaacaaactgcgcgtgctttatctgatgtcgatattgcagttattaataatggtgtagcaactaaagcgggtaaagatcctaaaaatgatccgatatttttagaaaaatcaaattcagatgctgtaaagccatatattaatattgttgcagttaatgacaaagacttggataacaaaacatatgctaaaatcgtagaattgtatcattcaaaagaagctcaaaaagcgttgcaggaagatgtcaaagatggagagaaacctgttaatttatctaaagatgagattaaggcaatagaaacgtcattagcaaaataa

SEQ ID NO: 411633 - DNA, 660 bp, Staphylococcus aureus
atgtttggttctgatttagacagtgcacagttattacaagcattatacgaaacgctatatatggtatctattgctttatttttaggagcagtgattggtattccattaggtgtcttattggtaattactcgaaaacaaggcatatggcccaatatagtgatacatcaagttttaaatcctttaatcaatattttaagatcactaccatttattattttgttaattgcgattgtgccattcacaaaattagtagtaggtacttcaattggtacgactgctgccatcgtgcctttaactgtatatgtggcaccttacattgcaagacttgttgaaaactcattattggaagtagacgaggggattattgaagcggcgaaagcgatgggcgcttcaccactacaaatcattagatattttttaattcctgaagcgttaggttcattagtattagcaattaccactgcgattattggacttattggaagtacggcgatggcaggagctgttggcggtggtggtataggagacttagctttagtgtatggttatcaaagatttgatacgacggtcattattattaccgttattgtattagtcattattgtccaagtgattcaaacgctagggaatgtcctagctagactcatacgtagacattaa

SEQ ID NO: 411634 - DNA, 1026 bp, Staphylococcus aureus
atgattgagtttcgacaagttagtaaatcatttcataagaaaaagcaaacaatagatgctttgaaggacgtatcatttacggtcaatcgcaatgatatttttggtgtgattggatatagtggtgcaggaaaaagtacgttggtaagactcgtgaatcatcttgaagctgcctcgaatggacaagtgattgtagatggacatgatattacgaattatagcgataaaatgatgagggatattaagaaagatatcggtatgatatttcagcatttcaatttattaaattcagctacggtatttaaaaatgtagcaatgccactcattttaagtaagaaaagcaaaacagaaattaagcaacgagtaacggaaatgcttgaatttgtaggattgagtgataaaaaagaccaatttcctgatgaattatctggtgggcagaagcaaagggtggctattgcaagagcgcttgttactaatccgaaaatactcctatgcgatgaagcaacaagcgcattggatccagcaacgactgcttcgatattgacgttattaaagaatgtcaatcaaacctttggcattacaattatgatgattacacatgaaatgcgcgttattaaagacatttgtaatcgtgttgctgtaatggaaaaggggcaagtggttgaaacagggactgttaaagaggtatttagtcaccctaaaacgacgattgctcaaaattttgtgtctacagttattcaaactgagccgagcccatcattgattcgtcgattgaatgacgaacaagttggcgattttaaagattataaaatcttcgtcgaggaaactcaggtgacacaaccgattataaatgacttgattcaaatttgtggtagagaggttaaaattttattttcatctatgtcagaaatacaaggtaacaccgtatgttatatgtggcttcgatttaatatggatcaacaatttgatgacacggcaataaatcaatatttcaaagagaaaaatattcaatttgaggaggtgcattaa

SEQ ID NO: 411635 - DNA, 1143 bp, Staphylococcus aureus
atgaacaagaaaactaaattaattcatggtgggcacacaacagacgattatacaggtgccgttacaacaccaatttatcaaacaagtacatatttacaagatgatattggtgatttacgtcaaggatatgaatattctcgtactgcgaatccaacaagaagttctgtagaaagcgttattgcggcattagaaaatggcaaacatggctttgcgtttagttcaggtgttgcagctatcagtgcagttgttatgctgttggacaaaggtgatcatattattttaaattcagatgtatacggcggtacttatcgcgcattgacaaaagtatttacacgatttggcattgaagtggattttgtagatacaacgcatacagattcaattgtacaagcgatacgcccaacaacaaagatgttgtttattgaaacaccttctaatccattattacgtgttactgacattaaaaagtctgctgaaattgcgaaagaacacggtttgatttcagtcgttgataacacatttatgacaccttattatcagaatccattagatttaggcatcgatattgtcttacattctgcaacgaaatatttaggtggacatagtgatgtcgttgctggtttagttgcaacatcggatgacaagcttgcagaacgtttagcatttatttcaaattcaacaggtggtattttaggacctcaagatagctatttacttgtgaggggtattaaaacattaggtttacgtatggaacaaattaatcgcagtgttattgaaattattaaaatgttacaagcacatccagctgtgcaacaagtgttccacccaagtattgaaagtcatttaaatcatgatgtccatatggctcaagcggatggccatacaggtgtgattgcatttgaagtgaaagatacagaaagtgccaaacaattgattaaagcaacatcgtattacacattagctgaaagtttaggtgcagtggaaagtttaatttcagtacctgcattgatgacacatgcatccattccagcagatattcgagctaaagaaggtattacagacggacttgtaagaatttctgtaggtattgaagatactgaagatttagtcgatgatttaaaacaagcactagatacgctataa

SEQ ID NO: 411636 - DNA, 915 bp, Staphylococcus aureus
atgattacttatgatttaattggcaatacaccattagtactgttagaacattatagtgatgataaagttaaaatttatgccaagcttgaacaatggaatcctggaggcagtgttaaagacagactcgggaaatatttagtagagaaggcaattcaagaagggcgtgtgcgtgcaggtcaaactattgttgaagcgactgctggtaatacaggcatagggttagctattgcagcgaatagacatcatttgaaatgtaagatctttgcgccgtatggtttttcagaagaaaagattaatattatgatagcgcttggtgcagatgtttcaaggacgagtcagtctgaaggtatgcatggggcacaattagctgcacgttcctatgctgaaaaatatggtgccgtttatatgaatcaatttgaatccgaacataatccggatacatattttcatacattgggacccgaattgacttcagcattacagcaaattgattattttgtggctggtattggctctggcggtacatttacaggtaccgcacgttatttaaagcaacatcacgtgcaatgttttgccgttgagccagaagggtccgtgttaaatggagggccagctcatgcacatgacactgaaggtatcggttctgagaaatggccgatatttttagagagacgtcttgtagatgggatatttacgattaaagatcaagatgcctttcgaaatgtcaaaagtttggctataaatgaagggttgttagtaggcagttcttcaggtgcagcattacaaggtgcattgaatttaaaagcgcaactaactgaaggtacgattgttgtcgtatttccagatggtagtgatcgctatatgtctaaacaaatatttgaatatgaggagaataataatgaacaagaaaactaa

SEQ ID NO: 411637 - DNA, 1338 bp, Staphylococcus aureus
atgaaaagacaacaatcacaatggaagtcatcaactggatttattttagctagtgcgggttctgcaatcggtcttggtgccatgtggaaattcccatatatggcagggatttatggcggcggtgcctttctagctatgttcttaatattcaccatttttgttgggttaccattactcattatggaattcactgttgggaaaatgggacggacatatacaacacaaatatatagtaaattaactggtaaaaaatggctcaatatcattggctggaacggtaatttggcagtgtttattttatttggcttctatagtgttatcggtggttggattgtcatttacatcggacaagtattatggcaattagttatatttcaacgcatcaatcatctccaagaaatgaattttgaagcggtaatatcaaatccttggttaaccgttctagggcaaggtatatttatattcgctacgatgattattgtcatgttaggtgttgaaaaaggattagaaaaggcatcgaaagttatgatgccattgctgtttgtctttttaatcatcattgtgattaagtctttaacattagatggtgccttagaaggtgtgaaatttattttacaaccaagagtatcagagattactgctgacggtatcttgtttgcgctaggccaatcattctttacgttatcattaggaactacaggtatgattacttatgcgagttatgcctctaaagacatgacgattaagtcatcagctatttctatcgttgttatgaatatctttgtatctgtattggcaggtctagctatatttccggcgttacatagttttggctatgaaccacaagaagggcctggattattatttaaagtactaccaatggtctttagtcaaatgcatctaggcacattattctatttgggattcttagtgctgttcttatttgcggctttaacgtcatctatttctttattagaattaaatgtttctaacttcacgaagaatgacaatacaaaacgtaaaaaagtcgcagtgatcggtagtattttagtatttatcattagtattccagcaaccttatcttttggtatcttaaaagatgtaagattcggtgcgggaacgatttttgataatatggatttcatcgtttcgaatgtattgatgccattaggcgcattaggtactacgcttgtcgtaggacaattattagataaaaaattattacaacaatattttggtaaagatcgatttagattattcagtggttggtattacttaattaagtatgcgatgcctgtcgttattattttagtctttatcgtgcaattatttagttaa

SEQ ID NO: 411638 - DNA, 735 bp, Staphylococcus aureus
atgagaattaaaacaccgagtccatcttatttaaaaggcacaaatggacatgcgatattattattacattcatttacaggtacaaatcgggatgtgaagcatcttgcagctgagttaaatgaccaaggatttagttgttatgcaccgaattatccaggtcatggtttattgttgaaagatttcatgacatataatgtagatgattggtgggaagaagttgagaaagcttaccaatttttagtcaatgaaggttatgaatctatcagtgcaacgggtgtgtctttaggtggattaatgacattaaaattggcgcaacactatcctttgaaacgtatcgctgtcatgtcagcaccaaaggaaaagagtgacgatggcttaatagaacatttagtttattatagtcaacgcatgtcgaatattttaaatttagatcagcaagcatcgagtgcgcaattagcagcaattgatgattatgaaggtgaaattacgaagtttcaacattttattgatgatatcatgacaaatttaaatgttattaaaatgccagctaatatattatttggtggtaaagatgcgccatcctatgaaacaagtgcacactttatttatgaacatttaggatcagtagacaaagaattaaatggtctgaaggattcgcatcatttaatgacgcatggagaaggcagagatattttagaagaaaatgttattcgctttttcaatgctttaagataa

SEQ ID NO: 411639 - DNA, 675 bp, Staphylococcus aureus
atgatagataaaaaattaacatcaccgaaaatgaccgtgcctttatttttaatcgcgctgattgtatttataggtatgttttacggtgtagtgacaaatcaagaatggcttaaaaatatagatatgggatcattaacatggtttacagattatttcggtgagccacaacgtcagtatgttaacaatttgtttaattactatatgacgtttagtgcggaaattggagatgtcaaaggtgtcgtgttgatttccattatcgtcacaatcatactgtttattaaacagaggcatttagcggtttggtttgtgacatatttggtttcaggtgtcatcatgaacaaattaattaaagatactgtattacgtccaagaccatataatcatttagccgttgatacaggcttttcatttccgagtggacattccaacgccagcacattattatatttcgccttaatgatcattattatttcagttgctgctaagacaataacaaaagtgttgagtgcgttggttatgggaatattatggcttagcatattattttgtcgcctttattttcatgcacattacttttcagatgtcattggcggcacgtcactagcaatcatttgggtagcgttattcttaatggtatacccatactttattaatcatcgacgacaacgcgtttag

SEQ ID NO: 411640 - DNA, 363 bp, Staphylococcus aureus
atgaaaagaacgaaaggtgaaatcgaagctgaaatcagtaaagccattacgcaatgggaaaaagatttccttggcagaggttccttgtcggttaaatcagacattttaagagatatggtgattattagtttacaaggtatcttaacgccagcagaatatcgtgtgtgtagtacgaatgaaggattactaaatattaaacgaacacgttctgaattagttgaatccggtgagcaagatttgaatgatatcattcttaaaattacaggtatcaaagtgatgagcttccacagtgatttaagtacagttacaggtgaacgtattatcgtattcaaacttgaggataatttggaaaagcatatttaa

SEQ ID NO: 411641 - DNA, 2706 bp, Staphylococcus aureus
atgacaacgcagttaaatatcaattcagtcattgaaaatgcgaaacgtgttattacaccattatcaccgatttcgatttttgcagcacgaaatccatgggaaggattagaagcggatacgtttgaagatgtcgcaaaatggttacgtgatgttcgagatgtggatattttcccaaataaagcattaatagaaagtgctgtggcacgtggtgaattagatgaaagtgtctttaatcaacttgttactgatatgttacttgaacatcactacaatatcccgcaacactacatcaatctttatattgataacattaaaacattaaaagacgtacctgcatcatatatgaatcattcaaatgttgatgttgttgctgatctactattagaaaaatcaaaacgtgatatggctgattcatatcatcactatgatgtacgtccgatgagtgatgcaataatagatgaacaaggtgagccacttagcgaacaagtgaatcgtcaaatgattaaatggacgaaactttatatcgatcaatttctatcgagttggacaatgccgaagcgagagcaaagtttttaccatgcatggttgcatttagcgcaacatgaccatagttttactaaagcacagcgccaagtgattaaaggcttacccaatgatcctgaaatgacgatagagtcagtattaactcatttttcaatagatcaggaagactaccaagcttatgttgaaggacatcttttggcgttaccgggttgggcaggtatgttgtattaccgttcacaacagcatcactttgaacaacatttgttaacggattatttggcaattcgattagttgtcgaacaattgctagttggtgatgagtttaagtcagtcgctaaagattgtgaaagtagatcggaaaattggtttaagcaaactgttgcatcatggtgttactacagtgatatgcctagcgatgtattactacaacatgacgtcaatgaaattcaaacgtttattcattttgcagcaactatgaataaaaatgtatttaaaaatttatggctaattgcctgggaaatgacatacgaatctcagttaaaacaaaaaattaaagcaggtcatgaaagtgtggcgggcgcattagatgcaaatcaagtaaatgtttcggaaaatgacaacgctaatcagttacattcagtatcgttaaatgatacacaagcagttgatgaaaataatagcgagctaaatcaggtgggcacatcaacgaaagtgcaaattgcattttgtatagatgttcgttcagaaccatttcgtagacatatcgaagcagcaggtccctttgaaacgattggtattgcaggtttctttggattacctattcaaaaagatgccgtagacgaacaattcaaacatgattcattacctgtcatggtaccgccggcatatcgcattaaagaatttgcagaccgctacgatatgaatgtttatcgacaacagcaacagacaatgtcatcgatgttttacacatttaaattgatgaaaaataatgtcatgcctagtctgttattgcctgaattaagtgggccatttttaagcttgagtaccattgtcaattcgattatgcctagaaaaagtcgcgcgtctttacaaaagataaaacaaaaatggttgaaaaagcctgaaacaaagttgacgattgatcgtgagtttgaccgaacatcagacttacctgttggatttactgagcaagagcaaattgatttcgcgttacaagcgttgaaattgatggatttaaccgaagcatttgcgccgttcgttgtgttagcaggtcatgctagtcattctcacaataatccacatcatgcatcacttgaatgtggggcttgtggtggcgcatcaagcggttttaatgctaagttattagcgatgatatgtaatcgtccaaatgtcagacaaggattaaaacaatcaggtgtgtatattccagagacaactgtttttgcggcagcagaacatcatacgtctactgatacgttggcatgggtatatgtgccagacacattatcagctttagctctagatgcatatgaatcattgaatgacgcgatgccgatgatttctgaacacgcgaatcgcgaacgtttggacaaactgccaacgattggtcgtgtgaatcatccagtggaagaagcacagcggtttgcgagtgattggagtgaggtacgtccagaatggggcttggctaaaaatgcatcatttataattggacgacgccaattaacaaaaggcattgatttagaagggcggacatttttacacaattatgattggcgtaaagataaagatggcacattattaaataccatcatttctggtccggcacttgtggcacaatggattaatttacaatattatgcgtcgacagttgcgccgcatttttacggaagtgggaataaagcgacacaaaccgtcacgtcaggtgttggtgtcatgcaaggtaatgcgagtgatctgatgtatggcttatcatggcaatctgttatggctgctgatcgaacgatgtatcattcgccaattcgtttgcttgtcgttattcaggcacccgactatgttgtagctagactactcgcgaataatgagcatttcgctaggaaggtgtctaatcattggctgcgtttaatgagcgttaatgaggaagggcgttttaaaagttggatttaa

SEQ ID NO: 411642 - DNA, 1485 bp, Staphylococcus aureus
gtgttaagttttcaattgctattttcactgtttgttattgcgcttatcattgcattgataagtggtttgttgtttttagcaccagttatgccaatgagatatattaaattacatttatacatactagtcatgccagtattatttgcagtcattggctttttcggtattcatggtcaacatgtcttaggcccatttaaaatagatcgtttatcttggttattagctggctttgtaatggcgcttggctttattattcaaaagttttcaatgcgatatttactaggtgatcatcattatagacattactttccattgttcactgcgattacgtcgtttgcatctttagcatggatgtctgaagacttaagactgatggcactctgctggggtatgacattattatgtttaacattgctgatgaacgttaatcgtttttggaaagtgccacgtgagtctgcgaaattatcaagtatgacatttttatgtggttggcttgcattcgttggagcaattgtaactatttatattgcgactggcgagtggcgggtaccacaacatatagcgcatccgacatggtcattgttgacgaatgtactacttgtattagctgtcatgataccggcagcacaatttccatttcatcgatggttgattgaatctgtaacagcaccaacgccagtatcggcaattatgcatgcaggaattgtgaatgcaggtggtgttattctaactcgttttgcgccgatatttgataatggatttgcattatcattattacttatcctttctagtatttctgtattgttaggatcgggtattagcttggttcaagttgactataaacgccaattagtgggctctacgatgagtcaaatgggctttatgttagttcaatgcgcacttggtgtatattcagcagcgattatacatttaatattgcacggtatttttaaagcaacattatttttacaatcaggttctatcgtgaagcgattcaatattccaaaacaagcatctgctaaagacgcttatggctggattgtcatggggcgtgtattagctattatcgtggcatttctgttttggatgagtagtgacagaagtgcatatgaagtgttaagtgcactcattctagcatggtcattacttgtatcttggaatcaaatggtagcctttagtaaagggcgtatggcacgtctggttggcatgattttgatttcaattgtgacatttatctacatcatcacacataattatttttacgatgtattacaaaatataacaacacatgcgacaacgccgcctacaattagtgtcatcattagtgttgtcatattaatatttggtagtttattgagtatctgggtagcgcgtcatcgatactctaagacttttgcggtattgtacgtgtggttagttaatctaggtgaagcacgctcgaaagcgatagaaagtcatccgaattatttgaagaagtatttatag

SEQ ID NO: 411643 - DNA, 1203 bp, Staphylococcus aureus
atggctaagattccagttacggtattaagtggttatttaggctcggggaaaacaacgttgttaaatcatattttacaaaatcgagaaggtcgacgtattgcggtaattgtaaatgatatgagtgaagtcaatatcgataaagatcttgtcgcagatggtgggggactatcgcgcacagacgaaaaattagtcgaactttctaatggttgtatctgttgtacacttagagacgatttattaaaagaagttgagcgtttagtgaaaaaaggtggcatcgatcaaattgttattgagtcaacagggatttcagagccagtacctgttgcacaaactttctcatatattgatgatgaacttggcattgatcttacagcgatttgccgtttagatacaatggttacagttgtggatgctaaccgcttcgtacatgacatcaactcagaagatttattgatggatcgtgatcaaagcgttgatgaaacagatgaacgttcgattgctgatttattaattgaccaagttgaattttgtgatgtattgattattaataaaattgatttaatcagtgaagaagaacttgcgaagttagaaaaagtgttaagtgcattgcaaccgactgctaaaatcattaagacaacaaattctgaagtagatttaaaagaagtcttgaatacgcagcgttttgattttgaaaaagcgagcgagtcagcaggatggatcaaagaacttgagtctggtgggcatgcatcgcatacacctgaaacagaagaatatggtatatcatcgtttgtatataaacgtcgtctacctttccatgctaaaaggttcaatgattggttagaaagcatgccaaataatgtcgttcgatcaaaaggtatcgtatggctagcacaatacaatcacgtagcatgtttattatctcaagcagggtcatcttgcaatattcatccagttacatattgggtggctagtatgtctgaagcgcaacaaacacaaatattagcagaacgtcaagatgtcgcagctgaatgggatccagaatatggcgatcgtcatacacaatttgtcattattggtacagaattagatgaagaaaaattaacaaaagaactcgacgcatgcttagtcaatgcgcaagaaattgatgcagattggcaacaatttgaagatccatatcaatggcaaattagaccggcacgataa

SEQ ID NO: 411644 - DNA, 195 bp, Staphylococcus aureus; identical to SEQ ID NO: 410129

SEQ ID NO: 411645 - DNA, 309 bp, Staphylococcus aureus
atgagtccaatgataggaccagttataggaccggatatagtaccggatatagtaccggatataaagtcaatgataaagaatgctcaaaaagaaaatattcgcacagttattgcacctgaacataagcataaatacaaagatattgaaaacggattaaaaggtgaagaaaaagtattaattgaacaaatggcacagcattgcgaggcttttaaagctaattttaaaggcgcagctcaaggagattgggttaaaagtgctatgtctgagattgacagcattaaggatgacctgaaaaaaattaatagctaa

SEQ ID NO: 411646 - DNA, 324 bp, Staphylococcus aureus; identical to SEQ ID NO: 410127

SEQ ID NO: 411647 - DNA, 1323 bp, Staphylococcus aureus; identical to SEQ ID NO: 410126

SEQ ID NO: 411648 - DNA, 783 bp, Staphylococcus aureus
atgaagtctataaaaaggattggattgtgcataagtctgttgattttaatcatttttgtaacatcttgtggtggtaataagatcatgggagattcaaaagaagaacaaatcaaaaagagctttgcgaaaacgttagatatgtatccaattaagaatctcgaggatttatacgacaaagaaggatatcgagatggagaatttaaaaaagatgataaagggacttggctaattagatctgaaatgaaaatccaattaaaaggagaaaacctggaatctaggggagtagttttagaaattaacagaaatactagaacggctaaagggaattatattgttagagaagttgttgaagatagcgatggaatgacacacaatcatacaaaaatgtatcctgtaaaaatggaaaagaataaaatcattccattaaaaccaatcgatgacgaaaaagtaaaaaaagaaattgaagaatttaaattctttgtgcaatacgggaatttcaaagaattggaaaactataaagatggtgaagtgtcatataacccagaagtaccaatatactctgctcaatatcaattgaaaaacagtgattacaatgttgaacaattaaggaagcgatataatatcccgacgaaaaaagcgcctaaattattattgaaagggtcaggtaatctaaaaggctcatcagttggatataaaaatattgaatttacctttgttgaaaataagggagaaaatatttacttcacagatagtgtctactttaatccaagcgaggataaataa

SEQ ID NO: 411649 - DNA, 792 bp, Staphylococcus aureus
atggaatatctaaaaaggcttgcattgttcataagtgttattattttgaccatttttataatgggttgtgatagtcaaagcgatactgcagaaaatccaaaggaaggttcaaaagaagcacaaattaaaaagagttttgcaaaaacgttagacatgtatcctactgaaaatctagaagacttttatgacaaagagggatatcgagatggagaatttaaaaaagatgataaaggtacttggctaattagatctgaaatagttaaacagccaaagggcaaagtgatgaaaacaagaggtatgcaattatatattaatagaaataccaaaacagccaaaggtttctttgttttgaaagaaataggtgaaaataataatcgtgtaaataaagataaggaggaaaaatacgaagtgaaaatggtaggaaataaaattattcctactgaacaaattaatgacgagaaaataaaaaaagaaattgaaaacttcaagttttttgtgcaatatggaaagtttaaaaatttcgaaaaatacaaaaatggtgagttttcatataatcctgaagcaccaatctattcggctaaatatcaattacacaacgatgattacaatgtaaggcaactacgtaaaagatatgacatttcaacaaaagaaacaccgaagttacttttgaaaggtggaggagatttaaaaaattcctcagttggtcaaaacgatattgaatttacttttgttgaaagaaaaggtgagaatatttattttaacgatagtgttgaattcataccaagtaagtaa

SEQ ID NO: 411650 - DNA, 777 bp, Staphylococcus aureus
atgagtaatacggcacttggattgacggcattgcttttagtcattccgattatcatttcatataaagaaggtttacatattattaaagatttaattgttgcgacactacgcgcagtggtgcaattaatcattttgggatttttgctgcattatatttttaaaataaacgataaatggctgcttattttatgtgtattggtcattattattaatgcatcatggaatacaattagtcgagcatcaccagtgatgcatcatgtgttttggatatcatttctagctatcttcattggaacggcattaccgcttgcaggtactattgcgacaggggccattcaatttacagccaatgaagttatacctattggcggcatgcttgctaataatggcttgattgcaattaatttagcttaccagaatttagatcgtgcattcgtacaagatggtactaatattgaatctaaactatcacttgcagctacacctaaattggcttctaaaggtgcaatacgtgaaagtattcgtttagctatagtgccaacaattgattcggttaaaacatatgggcttgtgtcgattcctggtatgatgacaggcttaattattggtggcgtaccacctttacaagcgattaaatttcaattgttagtcgtgtttattcatacaactgcgaccattatgtctgctttgattgcgacatatttaagctatggtcaatttttcaatgcaagacatcaattagtagcacgaaatactgatgttaagagtgaatcatga

SEQ ID NO: 411651 - DNA, 1077 bp, Staphylococcus aureus
atgaatcagtcagtcaaattacttaaacatttaacagatgtaaacggcattgctggttatgaaatgcaagttaaagaagcaatgcgtaactatatagagcctgtcagtgatcaaattattgaagataacttgggtggcatttttggaaagaaaaatgctgagaatggtcaatactcaattatgatttctggtcatatggatgaagttggttttatggtaacaaagattgataaacatggttttatttcatttacgccagttggtggatggtggaatcaagtcatgttatctcaaaaagtaacgattacaacagattcgggcaaagaaattagaggtatcatcggttctaaaccgccacatgtcttaacgcctgaagaacgtaaaaagccaatggaaatcaaaaatatgtttatagatattggtgttagtagcaaggaagaagctgaagaagctggcgttgaagtaggcaatatggttacgccatatagtgaatttgaagtgcttgcaaatgataaatatttaactgcgaaagcatttgataatcgctatggctgtgcattagctgttgaggtattaaaacgtttaaaagatgaaaatattggaattaacttatacagtggtgccacagtgcaagaagaagttggtttgcgtggtgcgaaagtggcagcgaatacaattaaaccagatttggcgatagctgtcgatgtaggtattgcttatgataccccaggtatgtcaggtcaaacgagcgatagtaaactaggcggtggtccagttgtcattatgatggatgctacaagtattgctcaccaaggtttgcgtaagcatattaaagatgtagctaaggaacataacatcgaagtacaatgggatacgacaccaggtggaggtacagatgcgggaagtattcatgtcgcaaatgaaggtattccaacgatgacaatcggtgttacgctgcgatacatgcattctaatgtttcagtgctcaatgtagatgattatgaaaattctatccgtcttgttactgaaattgtccgttcattgaatgatgaaagttataaaaatatcatgtggtaa

SEQ ID NO: 411652 - DNA, 816 bp, Staphylococcus aureus; identical to SEQ ID NO: 410862

SEQ ID NO: 411653 - DNA, 819 bp, Staphylococcus aureus; identical to SEQ ID NO: 404932

SEQ ID NO: 411654 - DNA, 720 bp, Staphylococcus aureus
ttggcggtagacatagctgaagcggtatcggagactgtcgataaaattaaaagtaatggtgacaatgcgaaggcgtataatgtggatattgcaagcgaacaacaagtggtagactttgtgtctgacataaaggaacagtttggaagaatcgatgtgttgtttaataatgccggtgtggataatgcggctgatagaattcatgagtatccaatagatgtgtatgacaagattatgaatgtagatatgcgtgggacatttttaatgacgaaaatgatgttacctttaatgatgaatcaaggtggctctattgttaatacgtcttcattttccggacaagcagcagacttgtatcgctctggatataatgctgcgaaaggtgcagtgattaattttacaaaatcaatcgcaattgagtatggccgcgagggcattcgagccaatgcaattgcaccaggtacaattgaaaccccgttagtagataaactgacaggtacgagtgaggatgatgcaggtaaaacatttagagaaaatcaaaaatggatgactccgctgggacgtttaggtaaaccagaagaagttgctaaattagtagtcttcttagcatctgacgacagttcattcataactggagagacgattcgaattgatggtggtgtgatggcttacacatggcctggcgagatgttaagtgatgattcgtggaagcagacattggaataa

SEQ ID NO: 411655 - DNA, 309 bp, Staphylococcus aureus
atgaccgtcaacatcgtatttagtatcgtattctgcataagtatggttatattaggcatttatgtcgcaataactaaagatttcacactaatttcttatataaatcaaacgaccattgcagataaacacaagaaccaaattgcatatatatttacgctatgtatcagtttgagtgcagtatttttaatgtcttcaattctatgctttgaatatgattttattgcattgtcattcttatttttaacgatagcattattacttatcgcattattctacgtttgcttttataaaatcacaaaatatccataa

SEQ ID NO: 411656 - DNA, 441 bp, Staphylococcus aureus; identical to SEQ ID NO: 409818

SEQ ID NO: 411657 - DNA, 561 bp, Staphylococcus aureus
atgaatacgataagaaatagtatttgtttaacgataataactatggtattatgtggatttttattcccgttagctatcacgttaattggtcaaatatttttttatcaacaagcaaatggcagtttaattacgtatgacaatcgtatagttggatcaaaattgattggacagcactggacagagacacgatattttcacgggagaccgagtgcagttgattataatatgaatcctgaaaaattatataaaaacggcgtatcatcaggtggaagtaatgaatcgaatggaaacaccgaattaatagcacgcatgaaacatcatgttaaatttgggaattcaaatgtaacaatagatgctgcaacaagttctgggtcgggcttagatccgcatattacggttgaaaatgcattgaagcaagcacctcgtattgctgatgctcgtcatatatctacttcaagagtggccgacttgattcaacatcgtaagcagcgtggtgtgttaacaaatgattatgtgaatgtgcttgaactaaatattgctcttgataagatgaaagattga

SEQ ID NO: 411658 - DNA, 1377 bp, Staphylococcus aureus
atgaacgtaattttagaacagttgaaaacacatactcaaaataaacctaatgacatagcattacatatcgatgatgaaacaattacatatagtcaactaaatgcccgcatcactagcgcagttgaatctttgcagaaatattcacttaaccctgtcgttgctattaatatgaaatcaccggtgcaaagtattatttgttatttagctttgcatcgtttacataaagtgcctatgatgatggaaggtaaatggcaaagtactatacatcgtcaattgattgaaaaatatggtattaaagatgtaattggagatacaggtctcatgcagaatatagactcaccgatgtttattgattcaacgcaattacagcactaccccaatttattacatattggttttacttcagggacaactggactgccaaaagcatattatcgtgatgaagattcatggttggcttcttttgaagttaatgaaatgttgatgttaaaaaatgaaaatgcaatagcagcccctggaccactatcgcactcgttaacattatatgcgttattgtttgctttaagttccggtcgtacttttataggacagaccacttttcatcctgaaaagttacttaatcaatgtcataaaatatcatcatacaaagttgctatgtttcttgttccaacgatgattaaatcattattgttagtttacaacaatgaacatacaatccaatcattttttagcagtgaagataagctgcattcttctatttttaaaaagataaaaaatcaagcaaatgacataaatttgattgaattttttggtacatcggaaaccagttttatcagctataacttgaatcagcaagcaccagttgaatcagtaggtgtgctatttccaaatgtggaattgaaaacaacgaatcacgatcacaatggtataggaactatttgtataaaaagtaatatgatgtttagtggctatgtaagtgaacaatgtataaataatgatgaatggtttgttactaatgataatggctatgtaaaagagcagtatttatatttaacgggacgtcaacaggatatgttaattattggtggtcaaaatatatatccagcacatgttgaacgccttttaacgcaatcttcgagcattgatgaagcaattatcatcggtattccaaatgagcgttttggtcaaataggcgtattgctttattctggtgatgtgacacttacacataaaaatgtaaaacaatttttaaaaaagaaagtgaaacgctatgaaattccatcgatgattcatcatgtagaaaagatgtattacactgcaagtggtaaaattgctagagaaaaaatgatgtcgatgtatttgagaggtgaattataa

SEQ ID NO: 411659 - DNA, 705 bp, Staphylococcus aureus
atgaaaatgacagcaattgcgaaagcaagtttagcattaggtattttagcaacaggaacaataacatcaacgcatcaaactgtaaatgcgagtgaacatgaagcaaaatatgaaaatgtgacaaaagatatctttgacttaagagattactatagtggtgcaagtaaggaacttaaaaatgttactggttatcgttatagcaaaggtggcaagcattaccttatctttgataaaaatagaaaattcacaagagtacagatatttggtaaagatattgaaagatttaaagcacgcaaaaatccgggattagacatatttgttgttaaagaagcggaaaaccgtaatggcacagtgttttcatatggtggtgtcactaagaaaaatcaagacgcttattatgattatataaacgcaccaagatttcaaatcaagagagatgaaggtgacggtattgctacgtacggtagagtacattacatttataaagaagagatttcacttaaagaactcgactttaaattgagacagtatttaattcaaaattttgatctgtataaaaagtttcctaaagatagtaagataaaagtgataatgaaagatggcggctattatacgtttgaacttaataaaaaattacaaacaaatcgcatgagtgatgtcattgacggtagaaatattgaaaaaatagaagccaacattagataa

SEQ ID NO: 411660 - DNA, 3153 bp, Staphylococcus aureus
atgagtcaattgctaaatgatacgttatcggcttggttgttaattgaatctttaagtccaggagaagtaaattttacagcggaagatatactctcagctgaacattttaaaaatggtgcaaagcaagcacaacttcaaagttttgatgaatattttgaaatatggaattctgaacgctttattatatcagaagaaaaatcagagactggggaacttatatttaaattttatagacattgcttccgctataatgaaattaatttgaaaattcaggatatttttgatgattattctgatattcataatccaaatgggacacactgttatggttacacatttaacacagataaacacggcaaagtgatagttgattctatacatattccgatgattatgagtgcattaaaagaaattgaaaagaacaaaaatgccaatatagaagaaaaatttaatgattctgttgaaaaatttgttcaaaaagtaaaagaaattttagcagatgaaccaattaatgaatttaaattgaagaagatggacaaagcttatgatgagtacttttctgtattaaattcaaagaaagatggattatttggacattatgtagcaatagaatatgtgaaagatagtgatttaccacagccggaatttaacagtttcttcataagtgatattgaggaagcaagaaaatctcccaaccaaactttaattgattacattgaaggtgtagaagaaagtcagcgcatagaagtagatgaaaataaagaaatgtttgacaaatttttacatccttcacgtttgcctgatggacgatggccatcacagactgagtttagattgtctttaatgcaacaacttgctgtaaaccaaattacgagtggtaatgaaagaataagttcagttaatgggccaccagggacaggtaagactactttattaaaagatatatttgctcatctagtagttgaaagaggtaaagagttagctaaactaaataatcctaaagatgcatttgtcaaaacaaaaattcatgaaacggatgataaatacgtatacttactaaaggaatctattgccaaatataagatggtagtcgcatctagtaataatggagctgttgaaaatatatctaaagatttaccgaaaattgaagaaattataagaaatcccgaaaaatgtaaattccctaaatatgaacagaattatgcaaatttagcacatgaattaaaagattttgctgaaatagctgaaggtttgattggtgaaagtgcctggggcttattttctggagtatttggaaaaagcagtaacattaataaagtattggagcacatgctaaaaaaagatgggaatgatattggctttgctagattacttcaaaatgaaaataatcgtatgagttatcacgagttaatgactgaatggcaagcacatcaacgtgcatttttagaagagttgaggcatgttgaaatgttaaaagaagaatctattagagcatatgatgtttataaaaattgtgagtctttctctaagattgaacatgaactaaatagcgaaaaaatgaatgttaaggaaaagttgaatcatttagaaattcaaatatcttgtgacaataaagaaattgaagatttgggtgatcgaattaattataatacaaagcaaatagaaactttaaatgagttaattaaatccatcaaagaaagcaacaaaggttttattaacaaactgaaagcgatgtttaattcagaagaagatgaaagctataaagatcataataaagagaagcaacaattattaacacaacagttagagttagagaaatgtaaaaaaaacaaacatgaagaccttgttagcaaactaaaagaaaaagagaaattaattaaacaattaactaaagtacagttgcaattagacgagttaaattcacagttacaagagttagaagcatatcgtattgagtcaaaaattacaattccagaaaaagatttttggagtgacaacaattatgatgagcgccaagttactaatctgtggacgagtgacgaacttcaatacagacgtgccatgctctttttaagagcaatgatattgcataaattattattgattgctaataatacaactatttattatgcgattaatgattttaaagatagaaggaaattaattgatgcaaatccagataaagtacacaacgcatggaatgtgatgcatttaatatttccagtagttagtacgacgtttgcaagctttaaatctatgtatgggggcataccaaaagatttcatagactacttatttattgatgaagcaggacaagcaatacctcaagcagctgtgggagcattatatcgttcaaaaaaagttgtagctgtaggtgatccgattcaaattgaaccggttgtgactttagaaagtcatttaattgataacattcgtaaaaattatcatgttccggaatatctagtttctaaagaagcttctgtgcagtctgtcgctgacaacgctaatcaatatggtttttggaaatctgatgctactgatagtaatcaaaaaacatggataggcatacctttatgggtgcacagacgatgtttaaaacctatgttcacgatagctaaccaaatcgcttataataataaaatggtgttgccaagtaatattacaaaagtaggtaaaacaggttggtatgacgttaaaggaaacgcaattcaaaaacaatttgtgaaagagcatggcgaaaaagtagtgggattactagctgatgattggattgaagcaattaaggaaggtaaaaatgaaccgagctcatttgtaatatcgcctttttcagcagtacagcaacagattaaacgtatgttaaagcaacaactaccgactagaattgatattgaacgtacaaaaattaatcaatgggtcgataaatccattggtactgttcatacttttcaaggtaaagaggctcagaaggtgtattttgtaataggtactgataatacccaagatggtgctgtgaactggtcatgcgaaaaaccaaacttgttaaacgttgcagtgacaagagctaagaaagagttttatgtaattggtgacatgcaaagaatacagtcgaaaccattttatgagacgatttttaaagaaagagatgtaaaatga

SEQ ID NO: 411661 - DNA, 135 bp, Staphylococcus aureus
atgatgtcacaacaagatttacctacattattttatagcgggaagtccaatagtgctgttccaattatatctgaaagtgaattacaaacaattacagctgaaccatggcttgaaatttccaaaaaaggattgtag

SEQ ID NO: 411662 - DNA, 459 bp, Staphylococcus aureus
gtgacgcctatcattcaaaatattagcgtagcaaatggtattgctttaagtacagatgaaaaagtactatgggtaacagaaactacagccaatcgattacatcgcattgcacttgaagatgatggtgtgacgatacaaccatttggagctactataccgtactattttacaggtcatgaaggaccagactcatgttgtattgatagtgacgataatttatacgtagcaatgtatggtcaaggtcgagtgttagtttttaataaaaggggttatccaataggacaaatattgataccaggccgagatgaagggcatatgttacgttctactcatccgcaatttatacctggaacaaatcaactcatcatttgttccaatgatatagaaatgggcggaggatctatgctttatacagttaatggctttgcaaaaggtcatcaaagttttcagtttcaataa

SEQ ID NO: 411663 - DNA, 1713 bp, Staphylococcus aureus
atgactgaaccaattatctcgttcaaagactttagttttcaatatcatagtcaagcaacacctacattacagaatataaatgttgatatttatccaggagaaaaagtgctagtagttggtgcttcaggtagtggtaaatcgacttttgcaaattgcataaacggattaattccatttaaaactaaaggtaacataaccggggaactatatataaataatcaagatgcaaccgttagttgtttacatgatagatctaatgttgttggtacagttttacaagatacagatggacagttcataggcttaacagcagctgaagatatggcctttttattagaaaataattgtgttgaacaagatgatatgaagaaaaatgtaagttattgggctgaaaaagttggcatgatagaacatttaaatcaccgaccgcaagatttatctggaggtcaaaaacaacgcgtttcattaggtggtatattaatccatcgtacgcctattttaatattggatgagccactggccaatttagatcctgcgacaggacatgaaacgctgagattgttaaacaatattcatgaagaaacaaagtcaacgatgattattgtcgaacatcgattagaagaatcattagatgatacgtttgatagagttcttctttttaaagatggaaaaatcatcgctaatacaacgcctagtgatttgctaaaatcatctaagcttaaagaagcaggcatacgtgaaccattatactgtacagcgcttaaatatgcagaagtagatgtcgaatccattgataacttagcgaatttacgtgacgtttgtatgagtgaacatgttaaatttaaagtgaaaaaatggatagatgaaacatctgcaaataatgataataagtacaaatctgaaccgctattagaattaaatgaggtatgtgttcaatatagtgactatagtaatagtgtacttaataatgttcaattaaatgtttatagaagagaaatgcttagtatagttggtcacaatggtgccgacaaatcaacacttgctaaagcaatttgtggatttttagatataacaggtaatatccaattttgtaataggggatttaatcaattgtcaattagcgaacgatctgaattcgtaggttatgtgatgcaaaatccaaatcatatgatttctgaaaaaatgatttacgatgaagtagcattagggttaagagcacgaggtatgaaagaatcagatataaagatacgagtagagaatgtgctcaaaatatgcggactttatgcatttcggaattggccaattgtagctttaagctatggtcaaaaaaagagggtcactatagcatctgttttagtcttaaatccggaaataatcatattggatgaaccgactgctggtcaagatttctatcattataatgagataatgtcatttttaattgagctaaacagacaggggaagacgattattatgattacgcatgatatgcatttattgtctgagtatagttcaagaacaattgtattatcaaaaggacaagtcgttgctgataccacgccagtattggtattaaatgataaaaaaatctgtgagattgcatcattgagacaaacatcgctatttgaaatggccgaatatatagggattagcgagccacagaaattagtacaattatttattaaccatgataggaaggtgagacgccaatga

SEQ ID NO: 411664 - DNA, 1428 bp, Staphylococcus aureus; identical to SEQ ID NO: 411622

SEQ ID NO: 411665 - DNA, 729 bp, Staphylococcus aureus; identical to SEQ ID NO: 411620

SEQ ID NO: 411666 - DNA, 525 bp, Staphylococcus aureus; identical to SEQ ID NO: 406840

SEQ ID NO: 411667 - DNA, 1698 bp, Staphylococcus aureus
ttgaattatcaagccttatatcgtatgtacagaccccaaagtttcgaggatgtcgtcggacaagaacatgtcacgaagacattgcgcaatgcgatttcgaaagaaaaacagtcgcatgcttatatttttagtggtccgagaggtacggggaaaacgagtattgccaaagtgtttgctaaagcaatcaactgtctaaatagcactgatggagaaccttgtaatgaatgtcatatttgtaaaggcattacgcaggggactaattcagatgtgatagaaattgatgctgctagtaataatggcgttgatgaaataagaaatattagagacaaagttaaatatgcaccaagtgaatcgaaatataaagtttatattatagatgaggtgcacatgctaacaacaggtgcttttaatgcccttttaaagacgttagaagaacctccagcacacgctatttttatattggcaacgacagaaccacataaaatccctccaacaatcatttctagggcacaacgttttgattttaaagcaattagcctagatcaaattgttgaacgtttaaaatttgtagcagatgcacaacaaattgaatgtgaagatgaagccttggcatttatcgctaaagcgtctgaagggggtatgcgtgatgcattaagtattatggatcaggctattgcatttggtgatggtacgttaacattgcaagatgcgttgaatgtcacaggtagcgtacatgatgaagcgttggatcacttgtttgatgatattgtacaaggtgacgtacaagcatcttttaaaaaataccatcagtttataacagagggtaaagaagtgaatcgcctaataaatgatatgatttattttgtcagagatacgattatgaataaaacatctgagaaagatactgagtatcgagcactgatgaacttagaattagatatgttatatcaaatgattgatcttattaatgatacattagtgtcgattcgttttagtgtgaatcaaaacgttcattttgaagtgttgttagtaaaattagctgagcagattaagggtcaaccacaagtgattgcgaatgtagctgaaccagcacaaattgcttcatcgccaaacacagatgtattgttgcaacgtatggaacagttagagcaagaactaaaaacactaaaagcacaaggagtgagtgtcgctcctgctcaaaaatcttcgaaaaagcctgcgagaggcatacaaaaatctaaaaatgcattttcaatgcaacaaattgcaaaagtgctagataaagcgaataaggcagatatcaaattgttgaaagatcattggcaagaagtgattgatcatgccaaaaacaatgataaaaaatcactcgttagtttattgcaaaattcggaacctgtggcggcaagtgaagatcacgtacttgtgaaatttgaggaagagatccattgtgaaatcgtcaataaagacgacgagaaacgtagtagcatagaaagtgttgtatgtaatatcgttaataaaaacgttaaagttgttggtgtaccatcagatcaatggcaaagagttcgaacggagtatttacaaaatcgtaaaaacgaaggtgatgatatgccaaagcaacaagcgcaacaaacagatattgctcaaaaagcaaaagatcttttcggtgaagaaactgtacatgtgatagatgaagagtga

SEQ ID NO: 411668 - DNA, 318 bp, Staphylococcus aureus; identical to SEQ ID NO: 410185

SEQ ID NO: 411669 - DNA, 597 bp, Staphylococcus aureus; identical to SEQ ID NO: 411616

SEQ ID NO: 411670 - DNA, 906 bp, Staphylococcus aureus
atgtttaaaagaactaaactaatcttaatagcaacgattctactatcaggatgttcaactaccaataacgaatccaacaatgaaacaaaatctgtgccagaagaaatggaagcttcaaaatatgtaggtcaaggcttccaaccacctgcagaaaaagatgcggttgaatttgcgaaaaagcataaagataaaattgctaaacgtggcgaacaattttttatggataactttggactaaaagttaaagctacaaatgttgtaggtagtggcgacggtgtagaagtattcgtgcattgtgatgaccacgacatcgtatttaatgcaagtattccatttgacaaatcaattattgacagtgatagctcattaagaagtgaggataaaggcgatgatatgagtactttagttggtacagtgttgagtggctttgaatatcgagcgcaaaaagaaaagtatgataatttatataaatttttcaaagaaaatgaaaagaaataccaatatacaggatttactaaagaggcaattaacaaaacacaaaatagtggatatgaaaatgaatatttttatatagttgctaatataccgacgctccaagaatataggaaatattacgaacccctaataaagaaaaataatctgaattttaaaaaaggtatgaaacaagcaaggaaaggagtaggctataaagctgcaatagaagtacatacaacattgttttcgagaagtagtaacttttcaaaggacaaaaaattagatgatgttttagatttgtctgaaagtacgaaaaagttacaccttaattttgaaaatacgaaaatatttttacaactagcaaaatctactattagcactaatcgaattaattacagtgataatgagtctataaggattgaggtcgaatga

SEQ ID NO: 411671 - DNA, 435 bp, Staphylococcus aureus
atgaaaaaagtaatcggactgctactagtaagtacattagctttaacagcttgtggtgaaaaagaaaaaccaaaaaaagaagaaaataaaaagtcacaaacacaaaaacacaaagatagcaaaccaaaaacgcaacaagaaaaaatgaaaaaagttgaagataaaaatccacctaataatagcatacaaaataattcaaacaatcaaaaccaatcacaaaacaatcaacttaataataattcagatccatctaataatactcctgcaaatataaataaaaacgattcacaaaatactaatttaaatgatgagtatgtcgtttcgcctggctggactaaagatgaacaggctaaagcttttgaagagtacaaaaaaggaaaagaagaggaagcaagagctggtgctagcgcagtaccaggagccaatattaactaa

SEQ ID NO: 411672 - DNA, 537 bp, Staphylococcus aureus
atgactaacatattaacagccgatcagttacaagagttattacaaatacaaaaggagttcgacgatagaataccaactagaaatttaaatgacacagtagctagtatgattattgaatttgtagagtggattaacacacttgagttttttaaaaattggaagaaacaaccaggtaagccactagatacacaattagatgagattgctgattacttagctttcagtttgcaattaactctgactatagttgatgaagaagatttggaagaaactactgaggttatggttgatttgattgaaaatgaagttactttgcctaaactacattcagtttattttgttcatgtactgcatacgctaacagaacaatttgtaaaaggtattgataatagcattgtacaagttttaataatgccgtttttgtacgccaatacttactattcaatcgaccaactcattgaagcatacaaaaagaaaatgaaaaggaaccacgaaagacaagatggaacagcagacgcaggaaaaggatacgtgtaa

SEQ ID NO: 411673 - DNA, 153 bp, Staphylococcus aureus
gtgaatcacactattgttgattcagcagattttcaattacaagcaaatgatttaatatccatccaaggttttggtagagcacacattactgacttaggtggtaaaactaaaaaagataaaacgcacattacctatagaacattattcaaatag

SEQ ID NO: 411674 - DNA, 258 bp, Staphylococcus aureus
atgttagttatgattacgcgtgaagcgataaataatgttattaaacatgcaaatgcttcaaaagttcatggtaaattaaaaactgtaaacaatcataaattactgcttatgattgaagatgatggcaaaggtatcgatagtgattgtgaggtgaaaagtatttcacagcgtgtacaacatttaaatggaactttagcagtcgactcaacaaatggaactaaaataatcattgaaatctcaacaggaggaatagcatga

SEQ ID NO: 411675 - DNA, 603 bp, Staphylococcus aureus; identical to SEQ ID NO: 406990

SEQ ID NO: 411676 - DNA, 1206 bp, Staphylococcus aureus
atgtggattgaaaaatttaaaaacaaaaataacgaaactaaatacagatattacgagaagtacaaagatccatacacagataaatggaagcgtgtaagtgttgtgttgaacaagaatacaaaacaatcacaaaaagaagcaatgtttcgtttagaagaaaaaataaaagaaaaactgaacaacaagtcgtcaagcgaattaaaaactttgacttttcacgcgctattagatgaatggcttgaatatcatataaaaacatcaggttcaaagttgactactcttaataatataaaaataagaattagaaacattaaacgatacagctctgagaacttgcttttaaacaaactagatacaaaatatatgcagatatttattaataaattatcagatatctattctcaaaatcaagtaacccgtcaactcggagatatgaaaggagctattaaatatgcagttaaattttacaattatccaaatgaatatttgttaactaatgtcaaaattcctaaaagaagaaaaacaatagaggatatcgaaaaagatgaatctaaaatgtacaactatttagaaatgaaccaagtcctacagatacgtgatcatatactaaatgataataagttacacaagcgaaatcgcattttaattgccagcatcttagaagtacaggctttaactggtatgcgcataggagaactacaagcactgcaggaaaaagatatagatttattaaacaaaactattaatataacaggtacaattcaccgcattaaatacgaggaaggattcggatacaaagacactacaaagactataagttcaaaaagaagtatcagcatcaattctagaaccgtagaaatttttaaaaagataatactggaaaacaaaatgttgaaaagatggaattcgagctatgttgacagagggttcatattcacaacaaaaaaagggaatcctttatgtaataatcaaatcgccggtgtgcttaagaaaactacaaaagctttaaatatgaataagaaagttaccacgcacacatttagacatacacacataactttattagtagaaatgaatgtttctttaaaagcaattatgaaaagggtaggacatgtagatgaaaaaacaaccattcgcatatatactcatgtaactgaaaaaatggatagagaactaactcaaaaactcgaaaacattccaagttag

SEQ ID NO: 411677 - DNA, 732 bp, Staphylococcus aureus
atgatactaagttacttgaaaatcgaatttaaagttataatgcgtaaaaaaacaacattaatattatctattttatttcctgttatattctatatattatttacttcgatattggaattgccggaagatgttaaacctaaattttataaagagtatatgtatagtatgacggtttatagtttgttaagttttagtttactaacttttccattagatattattaatgaaaaacaaaatgaatggcgccaaagattaatggtaacaccatttacttttactagttattatatttcaaaagtagtgaaaactatgctgcaatttgcaatagcgatattagttatttttatggttggacatttttataaaggtgttgcaatgagtgcagttcaatggttagagtcaggaatatttttatggttaggtgcgtctctattaataacttttggcatattattttctttgttaaatgatattcaaaaaacaagtgctttagctaatatcgtaacaattggtttagcagtattaggtggattgtggtttccgataaacacatttccaaattggcttcaacatgttgctcatgttttaccgagctatcatttgcgtaaactaggtgtagatattgcttcaaatcatcatatcaatttaatatcatttgctataatactcttgtatgctttagggagtatattagcagtatattgtattagtcattttaaaagggcggaataa

SEQ ID NO: 411678 - DNA, 684 bp, Staphylococcus aureus
atgttccaaaaaacgatgtttccagatcaattaaaagttattgagattatcaacttatatcaatcattttacgaaaatccattaccattggaagaaataatagaactgacgaaatttgattctagtcaactgaaccaatttgtaaataaactttctggtggtcaacaacgattactcgattttgtattatctttaatcggacaaccacaattgatcttattagatgaaccaacatcgactatggatatagaaattagagaatatttttggtcaattattgaaaatttaaaagaagataatcgaacgatactctatacatcgcactatattgaagaagtcgaacgtatgtcagacaaaattattctcattgaaaatggagaaataatacttaatgattcaacgtcacatattagaaccaatcagcaatctcagattacgttatccgatgaatatataagaaagttaaaactagataaagatgatttagttattcaaaaaaatcataatggcactatcaaaattattacttcaaatgtaaatgatacgattttatatcttcaacaacttcatattaatttggatgatattgaaatacaaaaagtctcaattgttgattcatacttcaacaataaaaagcaaaggggatctaattatgatactaagttacttgaaaatcgaatttaa

SEQ ID NO: 411679 - DNA, 222 bp, Staphylococcus aureus
atgctaatcccgacatggaaaagctttatatttacgtcgtttgcttttgtctttataggattaatatcaatatttacaatcattgtcaccttttattatgaaaatcaaaacatcatagtatttctaactgaagttgctatgattctaatattctcttttttaaatgttttatcaatttctgactcgaaagtccatgtcataataaaagaaaatggcaaatga

SEQ ID NO: 411680 - DNA, 639 bp, Staphylococcus aureus; identical to SEQ ID NO: 407862

SEQ ID NO: 411681 - DNA, 348 bp, Staphylococcus aureus
gtgctttgtgaatctagacaaatttataaaaatcctaaatatcgagttattagatataataatgaatatttcatggtcgatttagtaagtacttggattacttattttttccctatgattaattggtttttgcccaaaaaatacgcaaaaattagcgaaaatgaatttgaaaggttaaatatagtcgagcctgttaaaaataatgttttttggccggttgcaggaagttcagttctatttggaattatattgagaaagtacggtaacttctttaatgttcagtttgaaaaacaactagcaatcactgtattttttatcatgttaatagggatgggcttgggacattaa

SEQ ID NO: 411682 - DNA, 183 bp, Staphylococcus aureus; identical to SEQ ID NO: 410158

SEQ ID NO: 411683 - DNA, 534 bp, Staphylococcus aureus
  misc_feature (484)..(494): n is a, c, g, or t
atgtatccctctccttccttacaacttttagttgttaggggattttatgcatgtgctcggcacatgtatccctctccttccttacaacttttagttgttaggggattttatgcatgtgctcggcacatgtatccctctccttccttacaacttttagttgttaggggattttatgcatgtgctcggcacatgtatccctctccttccttacaacttttagttgttaggggattttatgcatgtgctcggcacatgtatccctctccttccttacaacttttagttgttaggggattttatgcatgtgctcggcacatgtatccctctccttccttacaacttttagttgttaggggattttatgcatgtgctcggtgcatgtatccctcttttaccttacaacttttagttgttaggggcttttttgcatgtgctcggtgcatgtatccctcttttaccttacaacttttagttgttaggggcnnnnnnnnnnngcatgtatccctcttttaccttacaacttttagttgttag

SEQ ID NO: 411684 - DNA, 735 bp, Staphylococcus aureus; identical to SEQ ID NO: 405882

SEQ ID NO: 411685 - DNA, 984 bp, Staphylococcus aureus
atgaaaaaatggcaatttgttggtactacagctttaggtgcaacactattattaggtgcttgtggtggcggtaatggtggcagtggtaatagtgatttaaaaggggaagctaaaggtgatggctcatcaacagtagcaccaattgtggagaaattaaatgaaaaatgggctcaagatcactcggatgctaaaatctcagcaggacaagctggtacaggtgctggtttccaaaaattcattgcaggagatatcgacttcgctgatgcttctagaccaattaaagatgaagagaagcaaaaattacaagataagaatatcaaatacaaagaatttaaaattgcgcaagatggtgtaacggttgctgtaaataaagaaaatgattttgtagatgaattagacaaacagcaattaaaagcaatttattctggaaaagctaaaacatggaaagatgttaatagtaaatggccagataaaaaaataaatgctgtatcaccaaactcaagtcatggtacttatgacttctttgaaaatgaagtaatgaataaagaagatattaaagcagaaaaaaatgctgatacaaatgctatcgtttcttctgtaacgaaaaacaaagagggaatcggatactttggatataacttctacgtacaaaataaagataaattaaaagaagttaaaatcaaagatgaaaatggtaaagcaacagagcctacgaaaaaaacaattcaagataactcttatgcattaagtagaccattattcatttatgtaaatgaaaaagcattgaaagataataaagtaatgtcagaatttatcaaattcgtcttagaagataaaggtaaagcagctgaagaagctggatatgtagcagcaccagagaaaacatacaaatcacaattagatgatttaaaagcatttattgataaaaatcaaaaatcagacgacaagaaatctgatgataaaaagtctgaagacaaaaaataa

SEQ ID NO: 411686 - DNA, 918 bp, Staphylococcus aureus
atggaaacgacagataataatagacaatcactcgtcgatcaacaacttgtccaaaaacatttatcatccagaacggttaaaaataaagtgttcaaactcatatttttagcatgtacattattaggacttgtcgtacttattgcgttgttaactcaaacattgattaaaggggtaagtcatttaaatttacagtttttcactaatttttcttcttcaacaccatctatggctggcgttaaaggcgcgttaatcggttcactttggttaatgttaagtatcattccattattaatcatcctaggaataggtacagctatatacttagaagaatatgcgaaaaacaacaaatttactcagtttgttaaaatcagtatttccaatttagctggtgtaccatcagttgtatttgggatattaggttacactttgttcgttggtggtgcggggattgaagccttgaaaatgggtaacagtatattggcagcagcgctaacaatgaccttactgatattaccaattattattgtttcaagtcaggaagcaattagagctgtacctaactcagtacgcgaagcttcttatggtttaggtgctaataaatggcaaacgataagacgtgttgtcttaccagcagcgttacctggtattttaactggattcattttgtctctttcaagagcactgggagaaacagcgccacttgtgctaatcggtataccgactatattattggcaacacctagaagtatattggatcaattttcagcattaccaatccaaatatttacttgggcgaaaatgcctcaagaagaattccagaatgttgcatcggcaggcattatcgttttactagttatcttaatcttaatgaatggcgttgcgattattttacgtaacaaatttagtaaaaaattctaa

SEQ ID NO: 411687 - DNA, 852 bp, Staphylococcus aureus; identical to SEQ ID NO: 406885

SEQ ID NO: 411688 - DNA, 642 bp, Staphylococcus aureus
atggcaataattagacagcgatatcaggagcaacttgatgatttaataaaggaattacgtcggttaggtgcaaatgtctatgtgagtattgaaaatggtataaaatcattaagtattgacgatagaggctttgcacgacaaacagttaaaaacgataaacatatcaatcaattaaattatgatattaatgagcgagttatcatgttaattacaaagcaacagcccattgcgagtgatttgcgtatgatgatttcttcattaaaaatcgcctccgatttagaaagaataggagataatgcatcgagtattgccaatattcgattgcgtacaaagattacagatgattatgtgttaacccgtttaaagacaatgggtaaattagctatgttaatgttaaaggacttagatcaagcatttaaaaagaaagataccgtattaataagagaaataattgagcgtgatgaagatatcgatgacttatatagtcatattattaacgcaacgtatcttattgataacgatccatttgtcgctgcacaagctcatttagcagcaagacatttagaacgtattggtgatcatattattaacatcgctgaaagtgtttatttttatttaacaggtacacattacgaacaataa

SEQ ID NO: 411689 - DNA, 510 bp, Staphylococcus aureus
atgacaaatccaaatcaacgattagaaccatttgatgagacatttcaacaatcgaatattcatcgtggtaagcgatatggtaagaaaaaacgttcattggtaagcatgattattcaaatcattgttgttatattaaccgcaatcgctggatacagcatgtggaaacaacccatttttaatattgtcttcaccaaagaatctgtagattttgatggcattaaaaattttaacgagacaattggaaaaatgcatcaattaaatattaatttgggtaatatcaatgatttacaacaaggaatcgatcgcttaattttagtctttaacggtttctttattttatgtatcgttagcctagtcataacaatactgacaattgtatttaatcgcacagttctaaaagtagtaaatattttagtgttaacaattatgttagtcattacattgtatttcagttatattattaaagcactcgcacaagaaattgcagatgctttaaaaaatattatttaa

SEQ ID NO: 411690 - DNA, 411 bp, Staphylococcus aureus
ttgtatggtacagggcgtgcacagttaaacgttgcttcagaggcacagcgtatattgttaacgttacataatcatgtcattgtacttcatgatgaacatgaacttaaaatgattttgaacaagagtgaacctaatgatttattctttattatttcattatcaggtgaaacacatgaattattagaagtaacaaacttgcttcaacttagacaaaaatactttatttctgttactacaatgaaagataatacccttgctcaaaaagcaaattacaacgtctatgtatccagtaacacattctacttaactgatggtacagactattctagcttcatcagttatcatatattctttgaaacacttgtaagaaaatataatgagtatttactacataatgatatttcaaattag

SEQ ID NO: 411691 - DNA, 846 bp, Staphylococcus aureus; identical to SEQ ID NO: 409385

SEQ ID NO: 411692 - DNA, 393 bp, Staphylococcus aureus
gtgcaacatttagagcaattaagagctatttatgatgaacataatttagcaatgatatttattggtatgccgggtatagagaaaaaactatctcgttatcctcaactatattcgcgtataggttttgcgcatgaatttgataatctaagtaaagatgagacgcatcatatattagaatataagtggcaagacttaggatttgatttaaaactcgaagactttactgattatgaggcaataacgacgattattaaaattacaaaagggaattttaggctgattcatcgtttatttgcgcagatagacagaattatggatataaatggtttagataaaataagtacagaagttgtagaaacagctagagatagtttagttataggtattcgataa

SEQ ID NO: 411693 - DNA, 594 bp, Staphylococcus aureus
ttgaaaataggttatgcaagagtttcaactggattacaaaatttaaatttacaggaggatcgattaaatacatatggttgtgaaaagatatttaatgaccatatgagtggttcaaaaagtaaaagacctggtttagataaagcaattgaatttgcgaggtcaggagatacgattgttgtttggagattagatagattgggacgtaatatggaggatttaatcacattagttaatgagcttaacgaacgaggtgtaagtttccatagtttagaagaaaatataacaatggataaatcaagttcaactggacaattattatttcatttattcgcagcatttgcagaatttgaacgtaatttaattttagagcgttcttcagctggccgaattgcagcacgtgctagaggccgatatggaggcagaccagaaaaattaaatcaaaaagatttaaacttacttaagaccctttatgataatggcacgccaattaagacaattgcagaacagtggcatgtttcacgtacaacaatttatcgttacctcaataaattggaggacaaggaagatgaaaaacaaggagaagtatctaactaa

SEQ ID NO: 411694 - DNA, 831 bp, Staphylococcus aureus; identical to SEQ ID NO: 409382

SEQ ID NO: 411695 - DNA, 480 bp, Staphylococcus aureus
atgattgatttcttattcacttcagcattgtttgggcgtgtcgtagcaaacaatgcaagtgtagctggtgcaacaggtggctgccaagctgaagttggttcagcatctgcaatggcggcagctgcagcagtagctatattcggaggatcaccagaagcatccgggcacgctatggcattagcgataagtaatttattaggtttagtttgtgacccagtagccggacttgttgaaattccttgtgttatgagaaatgcaattggttcgggtaacgctttaatttcagcagatttagcattagcaggtattgaaagtagaatccctgttgatgaagttattgaagcaatggataaggttggtcgtaaccttcctgcatcattacgtgaaactggattgggtggactagcaggcacaccaactggcgaagcaattaaacgtaaaatctttggcacagctgaagatatggttaaaaataattaa

SEQ ID NO: 411696 - DNA, 171 bp, Staphylococcus aureus; identical to SEQ ID NO: 404874

SEQ ID NO: 411697 - DNA, 147 bp, Staphylococcus aureus
atgaagaaaaatgatttgttagtaatgagtgtagtatatattttaacttcagtcataatgttctacattaatggattaagtaaacaatttttttacatatgtagttggtttcccaattatttattttggttatatatgtctagttaa

SEQ ID NO: 411698 - DNA, 786 bp, Staphylococcus aureus
ttggatatattaaagaaagataaaaaaggagtagatatttgttttgaagatgcaacaaggacttctagagaaaaattgaaagaatacatggaaattatttcaaaatatcaagttagaacagttacatttgcggacactgtaggatgttcgacaccattagaatacggagatatttttaattactttgtaaaaaaatattctaacataattttttctgctcattgtcataacgatctagggttggctactgcaaatacattagctgcaattttaaatggtgcaaagcaaatagaaactacatttttgggaattggtgagagagcgggtaatgctcctattgaggaaataattactattttgacaaaaaaacaaatagaaagtacggaattcactttacccgacgtatataaaactagtattaatatttctaaaattctcgattttcaaatatcagaaaacaaacctataattggtgaaaatatatttaaacatgaatcaggaattcatcaagatggtactaaaaaaaatataaatatgtatcaatatttagttcctagtgatttaggattgaaaaattcacaagttgttcagtttccaataagtaatatttctagtaagaaaatcttgcacaataaatttaaatcaatagttaacactgaagaaattgatgaaaatatttctttctataaacttgtgaacaagttttcacctgaagtagcacctgaagatacagtggatttacttcagataataaaaaggaggagtaaagatggaaattttaaatga

SEQ ID NO: 411699 - DNA, 1230 bp, Staphylococcus aureus
atgaatgcgataaagcgtttcggtagtgcaatgattgtaccggtattaatgttcgctttctttgggatagtgcttggctttgcgacattatttaaaaatcctacaatcatggggagtttagcagatcaacatacgttttggtttaaattttggtcagtgatagaatctggtggctgggttatttttacgcatatggaagttgtatttgttgtaggtttaccactttctttagctaaaaaagcaccaggtcatgcagcgcttgcagcattgatgggttacttaatgtttaatacatttataaatgccattttaacgcaatggccacatacatttggcgctaatttagaaaaaggcgttgaaaatgtacctggtttaaaatcaattgcaggtattgccacattggatacgaatattctaggtggtattattatttcagctattattacgtggattcacaatagatactacagtaaacgattaccagaaatggttggtgtattccaaggtttaacatttgtggttacaatttcattttttgtgatgttaccattagcagcaattacttgtgttatttggccaactgttcagcacggtattggttcaatgcaacactttatcatcgcttcaggctatatcggtgtttggctgtaccacttcttagaacgtgtattaataccaacaggattacatcactttatttatgcaccaattgaagttggaccagtagtagtcaatcatggcttgaaagctgaatggttacaacatttaaatgagtttgctaagagtactaagccattaaaagagcaattcccttatggctttatgcttcaaggaaatgggaaagtatttggatgtttaggtattgctttagcaatgtatgctacgacacctaaagaaaatcgtaaaaaagtagcagcattacttattcctgcaacattaacagcagtcgttgtaggtattactgagccattagaatttacattcttattcatcgcaccatacttatttgttttacacgcagttttagcagcatcaatggatactttaatgtacgcatttggtgttgtaggtaacatgggtggtggcttgttagactttatttcaacaaactggttgccattaggtaaagaacattggggtacttatgttgcacaagttattatcggtctgatatttgtagcgatttacttcttcttattcagattcttaattttgaaatttgatatttga

SEQ ID NO: 411700 - DNA, 393 bp, Staphylococcus aureus
ttgatatttgatattccattacctggacgtaagaaaacagaagaggaagttaaattattttctaagcaagattacaaaaataaaaaaggtgatagcgtagattctaaacgtgcttcaacaggtaatgaatacgaagacaaagctgcgtattacctcgacggtttaggcggcaaagaaaatatcaaagatgttactaactgtacaacaagattacgcttaactgtttatgatgaaagtaaagttgcggatacggaatatttcacgcatcaacaaatggcacacggattagtaaagagtggtaagagtatccaagttgtagtaggtatgacagtaccacaagttcgtgaagcatttgaacaaatggttgaggatcaatcgtccgaagataaataa

SEQ ID NO: 411701 - DNA, 213 bp, Staphylococcus aureus; identical to SEQ ID NO: 408127

SEQ ID NO: 411702 - DNA, 663 bp, Staphylococcus aureus; identical to SEQ ID NO: 408855

SEQ ID NO: 411703 - DNA, 294 bp, Staphylococcus aureus
gtgaaagccctagaaaaaggtattgaattagaagatggtatgacgcaaccggctgaagtgaaagttaagaaacaagataaagataaaaacacaacattggttgaaattacaattacagaaggtcgtaatcgccaagtcagaagaatgttcgaacattttggtcatcaagtgacgaaactgtctcgtattgaatatgggcctttaaatgttgtcggtttgaatgctggtgaaggacgtgtattgacgcctcatgaagtaaaagtgatgcgtcatttagcagaacatgggaaataa

SEQ ID NO: 411704 - DNA, 789 bp, Staphylococcus aureus; identical to SEQ ID NO: 408560

SEQ ID NO: 411705 - DNA, 795 bp, Staphylococcus aureus; identical to SEQ ID NO: 408181

SEQ ID NO: 411706 - DNA, 591 bp, Staphylococcus aureus
atgaagagtaaaaaaagaatggaaagattgtacgatgatttatttagtactaattttttaattaattatggttattttgatattactcctaaaaataatcaagatttaacagaattaaacagctacggtaaatcagatgcattttatttgaaaatatttaatatgagtaaattagctgaatatattacttataatccattttacattaaaaaattttttaatgatagaaacatacgtagtactgaaccaataatatttactattccgaaaaataatacatcaagaagagaatataagattcctaatatttatagctatttaaatttgatgtttttcatgcaagaaaataaaaaagaatttaaagaagtttttctaaccaataaattttcaacatctaaatttttttcacttccagattttgattttaaatttactgacaatttaaaaaagactttactttacggtggtaatcatatattaaacgttgatttatctaatttttatcattctctttatacacatagcataccttgggtaataatgggaaagaagaatgctaaaaaagaaagaaaggtttttcaaatcaattag

SEQ ID NO: 411707 - DNA, 402 bp, Staphylococcus aureus
atggcgaaaataaattttgatgctgcgacgaaaggaaatccaggcataagtacatgtgccattgtaatcaaagaagataagcagcattatacatatacacatgagttaggcgaaatggataaccacactgcagaatgggctgcatgtatttatgcactagaacatgcacgtgaattaaatgttcaaaacgcactattatatacagactcaaagctaattgcagatagcattgaagctggttatgtgaaaaacgcaaatttcaaaccttattttgatcaaatagaaatatttgaaaaagattttgatttattatttgttaaatggataccgagagaacaaaacaaagaagcgaatcaacacgctcaacaggcattgtataaattaattaaaaagaataaataa

SEQ ID NO: 411708 - DNA, 1488 bp, Staphylococcus aureus
atgagagaaaattttaaattacgtaaaatgaaagtcggtttagtatcagttgcaattactatgttatatatcatgacaaacggacaagctgaagcatctgaaactaatcagaaggtaagtacaaatcaagaatcaaaagctgtttcgcagactgaacaaaattccaaagaaacaaaagcggcagagtcttctaaaaactttgtaaatttagatcctatcaaaccaggagctcaaaaagtaacaggcactacattaccgaatcatattattttacttaatatagatggtaaaagtgctgattcagttgaaggaggatatggtgattttataactgcaaatgacaaaggagagtttgagtatcctttaaataatcgtaaaattgtccataaccaagaaattgaggtatcatcatcaagccctgatttaggtgacgatgaagaggatgaagaagtagaagaatcttcaactgaaaaagctggtgctgaggaagaaagtacagatgctaaagctacatatacaacaccacgatatgaaaaagcgtatgaaataccgaaagaacaactaaaagaaaaagatggacaccaccaagttttcatcgaaccaattactgaaggttcaggtattattaaaggtcatacgtctgtaaaaggtaaagttgctctatctattaataataaatttattaattttgaagaaagagctaaaggtggaattagtaaagaagatactaaagctagttccgatggtgtttggatgcctattaatgaaaaaggatattttgattttgatttcaaaaaaaatccttttgataacttagagttaaagaaaaatgatgaaatctcattaacatttgcacctgatgatgaagatgaagcattgaagtcattaattttcaaaactaaagtaacgagcttagaagatatcgataaagcagaaacaaaatatgaccatactaaagtggaaaaagtaaaagtattgaaagatgttaaagaagatatacatgtagatgaaatttacggaagcttatatcatacagaaaaaggtaaaggtattcttgataaacaaggaactaaagagattacagggaagactaaattcgcgaatgcagtagtgaaagtatattctgacttaggtgatgcgcaattgttccctgatattcaagtagatgaaaatggtaaatttagctttgatgctgaaaaagctggtttcagattgcaaaatggagaaacattgaattttgcagtagttaaacctattactggtgacttattacatcaaggatttgtctctaaatatattgatgtatatgaatctccggaagaaaagaaagaacgtgaatttgaagaaaaacttgaaaacacgcctgcatatcataaattacatggtgataaaattgtaggatatgatgttcaaggtaatccatcaacttggttctatccattaggtgaaaagaaagttgaacgtacaacacctaaattagaaaaataa

SEQ ID NO: 411709 - DNA, 237 bp, Staphylococcus aureus; identical to SEQ ID NO: 408128

SEQ ID NO: 411710 - DNA, 285 bp, Staphylococcus aureus
ttgatttcaataacaggtgttactaccttaccttgttccactggtttagaaggttttttaggttcttctttagcaggtggtactggtttaccaggttcagatggtacctctggtgttggtggtactggtgtttccggctcacttggtacttccggttttggtggcgttggttcgcctggctcactcggtacttctggtgttggtggtgttggtgtttccggctcacttggtacctctggtgttggcggtgttggcggcgttgtatcttcttcaatcgtttgttga

SEQ ID NO: 411711 - DNA, 243 bp, Staphylococcus aureus
ttgatttcaataacaggtgttactactttaccttgttccactggtttagaaggctttttaggttcttcttttgcgggtggtactggtttaccaggttcagctggtacctctggtgttggtggcgttggtgtttccggctcactcggtacttctggtgtcggtggcattggtgtttccggctcactcggtacttctggtgtcggtggcgttggcggcgttgtatcttcttcaatcgtttgttga

SEQ ID NO: 411712 - DNA, 255 bp, Staphylococcus aureus
atgatagctacaacaagagaaatagcaaaagctacaggaacaagtctacaaacagtaataacaacacttaaaatcttagaagaaggaaatattataaaaagaaaaactggagtattaatgttaaaccctgaactactaatgagaggcgacgaccaaaaacaaaaatacctcttactcgaatttgggaactttgagcaagaggcaaatgaaaaacaagaaaatgcattatctgattattattctttcaaggactag

SEQ ID NO: 411713 - DNA, 1515 bp, Staphylococcus aureus
atggcaacaattggatttgaagaaaagttatggcaagcggcggataagttacgtggaagtatggatgcagcagaatataaaaatgtagcattaggtattatatttttaaaatatgtttctgattcttttgaggaaaagtatgaagaattattaaatgatgaatatgccgatgaagaagataaagatgaatacttagcagaaaatattttctgggttcctaaagaatcaagatggcaatacataaatgataattctaagaaaccagaaattggtcaaattatcgataaagcaatgatagcaattgaaagagaaaatgagtctttaaaaggcgtattacctaaagattacgcaagacctgcattagataaagaaaaattaggcgatattattgacctatttacattcaaagttggagattctgaaagtaagaagcaagatattttaggtcgtgtttatgaatactttatcgcaaaatttgcaagcgctgagggtaagaatgctggggaattctatacaccagcttcaatagttaaattgcttgttgaaatgattgaaccatatcaaggtagaatttatgacccttgttgtgggtcgggcggaatgtttgtacagagtgaacattttatcgaacgtcatcaaggtcgtatagatgatattgctgtttatggtcaagaatctaatccgactacttggaaattagcgaaaatgaatttggctattcgaggtatagataataatttaggtgatcatcatgcagacacatttcataatgatttacataaagatttgaaagctgattttatattggctaatccaccattcaatgcaagtgattggggacgagaaaaattacaagatgattaccgctggaaatttggtattccacctaaaggcaatgccaactatgcatggattgaacatatgatttctaaacttgccccaagtggtacagcaggatttgttttagcgaatggttcgatgtctacaagtggtaaagatgaattagaaatacgtaaaaacttaattgaacaagacatggttgagtgtattgtcacattaccagggcaactattctattcaactcaaattccagtatgtttgtggttcatgacaaaaaataaagctaaaaatggcaagaatgaacgacgtggagaagtactatttatagatgctagaaatataggaagcatggtatcaagaacattaaaagaattctcagatgatgaaataaaagatatagcaaatgtttatcactcatggcgtggaacaaacaataaccaatatgaagataaagcaggtttctgtaaagtagcaaagacagaagaaataaaaaacaatgaatatatcttaacgccgggacgttatgtaggattagcagaagtagaagaagactcagaaccatttgaacagaaaatggaaagaatcacagcagatttaagtgaacaatttgcgaaatcaaaagaactcgaggaccaaatctgtaagtcattggagggattaggttatggagtttga

SEQ ID NO: 411714 - DNA, 1074 bp, Staphylococcus aureus
atgaaacgttttttacaactcattataggttcattagttgtgggtatgctttgtcttactttaagtcattggtttaaatctaaagaacaagtgcatacaaatcaaaaaatttacgtatacaattggggcgaatatattgatccagagttaattaagaaatttgaaaaagaaactggcattcaagtcgtttatgaaactttcgattcaaatgaagcgatggaagccaaaattcgtaatggcggtacacattatgatgttgcttttcctagtgaatatacagttcaaaaattgaaaagagatcatttattgttaccaatagatcataataaggtacctaatattaaaaatttagattcagattatatgaatatgtcatttgataaaggcaataaatattctttaccttatttctttggaactgtaggtattttatataataaagaaaagtatccaaatgaatcatttgatagttggaagtcattgtataatcctaaatttaaaaaccaaattttactagttgacggtgctagagagattataggcatgagtttgaataaacttgggtataatcttaatgaccgtaattcgcaccatttaaaagaagcagagcgagatttaaccaaactagcaccacaagtaagaggtgtcgtaggtgatgaaattaccatgatgcttcaacaaaatgaaggtaacatagcggttgtttggagtggtgttgcagcacctctagtgcaagaaggggataaatataattatgttattcctaaagaaggatcgaatttatggttcgacaatatggtaattccaaaaacggcacaaaataaagagggtgcatataaatttatgaattttttattagatgctaaaaataacaagcaaaatacagaattcgtaggctatgcaacgccaaacaaggctgctcgacaattgttgcctaaagagattaaagacgaccatcgtttctatccgactaagaaagagcaagaacgccttgaagtttataaagatttaggacctgaagttttaagtgaatacaatgaaaactttttgaatttcaaaatgtcattaaaataa

SEQ ID NO: 411715 - DNA, 282 bp, Staphylococcus aureus; identical to SEQ ID NO: 407821

SEQ ID NO: 411716 - DNA, 867 bp, Staphylococcus aureus
ttgaaaaaaataaaaaaggcaatcattcccgctgctggtttagggactagatttttaccagcaactaaagcgatgccaaaggaaatgcttcctatcttagataaacccacaatacaatatatcgttgaagaagctgcaagagctggaattgaagatattattatagtgacaggtcgccacaaacgcgcgattgaagatcattttgatagtcaaaaagaattagaaatggtgttaaaagaaaaaggtaaatctgagttactagaaaaagttcagtattcaacagaacttgcgaatattttttatgtaaggcagaaagaacaaaaaggtttagggcatgcgattagttctgcgcgtcaatttatcggcaatgaaccatttgcggtattattaggtgacgatattgttgaatctgaagtgccagcagtgaaacagttgattgacgtttatgaagaaacagggcactcagttataggtgtccaagaagttccggaagcagatactcatcgttatgggattattgacccattaactaaaaacggacgtcagtatgaagtgaaaaagtttgttgaaaagccagcacaaggtacggcaccatcaaacctagctattatgggacgttatgtattaacgcctgaaattttcgattatttaaaaacgcaaaaagaaggcgcaggtaacgaaattcagttaacagatgcgattgaacgtatgaataatgataaccaagtgtatgcatatgacttcgaaggcgaacgttatgacgttggagaaaaattaggcttcgttaaaacaacgatagaatatgcattgaaagatgacagtatgcgagaagaattaacacgatttattaaagaattagggttataa

SEQ ID NO: 411717 - DNA, 1353 bp, Staphylococcus aureus
atgaataataaacgacattcaacaaatgaacaattaagtttagacgaaataaacaatacaattaaattcgatcatcgcagttcaaataaacagaaatttttatcatttcttgggcctgggttattagtcgctgttggttacatggatcccggaaactggataacatcaatgcaaggtggcgcgcaatatggctatactttgctattcgtaattcttatttcaagtttatcagcaatgttacttcaaagcatgacagtgagattaggaatagcaacaggtatggacttagctcaaatgacacgacattatttatcaagacctattgctataatcttttggattattgcagaactagcaattatcgccacagatattgctgaggttattggtagtgctattgctcttaatctcctatttaacatacctttaatcgtcggtgcactaataactgtacttgatgtatttttactactatttataatgaaatatggttttagaaaaattgaagctattgttggtacattaattttcacagtgttattcatctttatatttgaagtctatatttcatcaccacagttgaacgctgtgttaaatggatttataccacatagtgaaatcattacaaataacggcattctctatattgcattaggtattattggcgctacaattatgcctcataatttgtacttacattcatcaattgtacaatctagaacatactcaagacataacaatgaagaaaaggcgcaagcgattaaatttgctacgatagattcgaacattcagttatcaatcgcatttgtagtcaattgcttattattagtgttaggagcatcactatttttcaactcgaacgctgacgatttaggtggtttctatgatttatatcacgccttaaaaactgaacctgtactaggtgcaacaatgggtgcaatcatgagtacattatttgcagttgcattattagcgtcaggtcaaaattcaacgattactggtactttagcaggacaaattgtaatggaaggatttttaagattgcacataccaaattggttaagacgtttaattacacgttcccttgctgtcattcctgttatcgtatgcttaatcatttttaaaggtaatgcagctaaaattgagcaactacttgtattctctcaagtatttttaagtattgctctgccattctgtttaataccattacaattagctactagtaataaagacttgatggggcctttctataataaaacatgggttaatatcatttcatggacacttattattattctaagtattttaaatgtctatttaatcgttcaaacattccaagaactacaaggttaa

SEQ ID NO: 411718 - DNA, 516 bp, Staphylococcus aureus
atgactaactttacttttgatggtgcacacagtagtttagaattccaaattaaacatttaatggtttctaaagtgaaaggttcatttgatcaatttgatgtagctgttgaaggagatattaatgacttcagtactttgaaagctactacaacaattattccaagctcaattaacactaaaaacgaagcacgtgataaccacttaaaatctggtgatttctttggtactgatgaatttgataaaatcacttttgtgacaaaatcaattacagaaaacaaagttgttggtgatttaacaattaaaggtatcactaacgaagaaacattcgacgttgaattcaacggagtaagtaagaatcctatggatggttctcaagtaacaggtattattgttactggtacaatcaatagagaaaaatatggcattaacttcaaccaagcacttgaaactggtggagtaatgctaggtaaagatgtgaaattcgaagcatcagctgaattttcaatctcagaataa

SEQ ID NO: 411719 - DNA, 783 bp, Staphylococcus aureus
atgcattcaaagaaattaatgctcggtatatgtttggtattactcattatattgattgtaggttatgtcattatgacaaaaacaaatggtcgaaacgcccaaattaaagacacatttaatcaaacattaaaattatatccaaccaaaaatctcgatgatttttacgataaggaaggctttcgagatcaagaatttggcaaaggagacaaaggtacttggattattaattctggaatgaacatccaattaaaaggaggagccttaaaatccagagagatggtactttacatcaatcgtaacactagaacaacgaaaggatattttatagtaggtgagataactaaagataaaaaaggatatacacatgataaagataaaaaataccctgtcaagatggaacataatcaaataatcccaacaaaacctataaaagacgagaagttaaaaaaagaaattgaagactttaagttttttgtacaatatggcaactttaaagattttaaagattataaaaatggggatatttcatacaatccaaacgtaccaagttattcggcaaaatatcaattaagtaatgacgattataatgtccaacaattaagaaaaagatatgatataccgactaaaaaagcaccagaactattgttgaaaggtgatggcgatttaaaaggttcatccataggctctaaagacttagaatttatctttgtacaaaataaaagagagaatatctattttacagattcggttgaatttactccaagcgaggatgataaatcgtga

SEQ ID NO: 411720 - DNA, 288 bp, Staphylococcus aureus
gtgggacttgattttagtggtttaccagatttagcagtattggaacaaatgaaggaaaaagaacagattagtgaggttattgcgcctgaacatgttcggatgcatcatgatcatcaaaataagctgaaaagtgatgagaaaatattacttgaccaaatggtaagtcattttaaaaaatttgaagatgattttaaaaatgcggcacaaggggcttgggtgaaaaatgccacagacgaattaaaagatattagtaatgatttagaaaaaattcaagatattaaagtataa

SEQ ID NO: 411721 - DNA, 327 bp, Staphylococcus aureus; identical to SEQ ID NO: 409291

SEQ ID NO: 411722 - DNA, 483 bp, Staphylococcus aureus
atgaatagaaatacaagaaggacaacaggttatttttttgtaagtgaaacaaaaggaaaaacgtatgaaaaagaaagaaaatatccagtcaaaatggaacataatcaaattatcccaacgaagccaatacaagatgacaagttgaaaaaagaaattgaaaactttaaattttttgtacaatatggcaattttaaagatattaatgattataaaaatggtgatatttcatataatcctaatgtgcctagttattcagcggaatatcaattgaggaatgatgattataatgtgcaacagttaagaaaaaaatatgacataccaacgaaacaagcaccgaaactgttattaaaaggcgatggtgatttaaaaggatcatctgtagggtctaaagagttagaatttacttttgtcgaaaataaaaaagaaaatatttacttttctgataatattgattataaaccgactgagcgagatgaattatga

SEQ ID NO: 411723 - DNA, 165 bp, Staphylococcus aureus
atgacggtggggacgtttgtaggttcgatgattccattattgatgaataaattaaatatcgatccagcagtggctagtggaccatttattacaacaattaatgatattattagtatgttgatttattttggtttagctacatcatttatggcttacttaatttaa

SEQ ID NO: 411724 - DNA, 1011 bp, Staphylococcus aureus
atgtcaattaagattttacaaccaggtctcttttcaacggtacaagatctaggaagaaaaggttatgaacatattggattttcaggctcaggtgccatggatcaatttagttttaaggttgcgcagtcattaattaacaatgatggtccagcgattgaatatactttgattggtcctaccattcaatttaatacgcaaaatacatttgttataaccggtggtagtgttaatgcctcgctaaataataaaactatatcaatgaattctgtcatattagctgagaaaggtgacattttaaaaataggtgctataaccaaaggtgcacgcggttatcttacttttggtcattctatcaacgtaccttctattgctgaaagttatgcaacacatacccgaagcagtataggaggattcaaaggtagaaagttattagctaatgacgtaataacagtgaaaataaataatgactttaaagaaaacattggaaagactattcatttacaggacgatttattaccagaaaataatattatacacattcttcaaggacctcaattcgaggcattttctgaagaggctagagcgaaaattgtaaattatccatatttaataactgaacaatcagaccgtatggggtatcgtttggaaggtgacagcgttgcaccaattaatcaagcagatatcatttctgaaccggttgctcttggcagtgttcaagtaccaaatgatggtcaacctattattctgcttaatgataaacaaacgataggtggttataccaaaattgcaactgtatgcaaatttgatctgccaaagttagcacagatgaaaccacaagatacaattcaatttaaatggatatcattccaagaagctgtagataagaatcgggaacaaatgtctctgtttaatgaaattcttaagagtcatcaaaagactccaatttttgatacatctagcttgcgacatacttcgaaaaaattagcaacaattttaaaaggggatttgtaa

SEQ ID NO: 411725 - DNA, 603 bp, Staphylococcus aureus; identical to SEQ ID NO: 409822

SEQ ID NO: 411726 - DNA, 1593 bp, Staphylococcus aureus
atgacactacttactgtaaatccattcgataatgttggattatcagccttagttgcagcagtacctattattttatttttattatgcttaaccgtttttaaaatgaaaggcatttatgcagcattgacaactttggttgttacattgattgtggctttatttgtatttgaattaccagcgcgtgtatcagcaggtgcgattacagaaggcgttgttgccggtatttttccaataggatatatcgttttaatggcagtttggttatataaagtttctattaaaacaggacaattttctattattcaagatagtattgctagtatttcagaggaccaaagaatccaactattattaattggattttgtttcaacgcatttttagaaggtgcagcaggatttggtgtgccaattgcgatttgtgcagtattattaattcaacttggatttgaaccattaaaagcagcgatgttatgtttaattgctaatggtgcggcgggtgcctttggtgcaattggtttaccagttagtattattgatacgtttaacttaagtggaggcgttacaacattagatgttgcgagatactcagcattaacacttccaattttaaactttattattccatttgttttagtattcattgtagatggtatgaaaggtattaaagaaattttacctgtcattttaacagtgagtggtacatatactggattacaattattattaacaatattccatggtccagaactagcagacattattccatcactagcaacaatggtggtgttagcatttgtttgtcgtaaatttaaaccgaaaaacattttcagattggaagcgtctgaacataaaattcaaaaacgaacgcctaaagaaattgtctttgcttggagtccgttcgtaattttaactgcctttgtattagtatggagtgcaccattctttaaaaaattattccaacctggaggtgcgcttgaaagtttagtattaaaaatgccaattccaaatactgtgagtgatttatcgcctaaaggaattgcgttgcgtctcgatttaattggtgcaactgggacagcgattttattaacagtaattattacaattttaattacgaagttaaaatggaaaagtgcaggtgctttattggtcgaagcaattaaagaattatggttaccgatccttacaatttcagctatcctagctattgctaaagttatgacatacggtggtttgactgtagcaattggacaaggtattgctaaagctggagcaattttcccattattctctccagtattaggttggattggtgtgtttatgactggttcagttgtaaataacaatactttattcgcacctattcaagcgacagtggcacaacaaatttcaacaagcggttcattacttgtggcagctaacactgcaggtggtgtagcagcgaaacttatttcaccacaatcaattgccattgcgactgcagctgttaaaaaagttggtgaagaatcagcattattaaaaatgacgctaaaatacagtattatatttgttgcctttatttgtatttggacgtttatactaacgttaatattctaa

SEQ ID NO: 411727 - DNA, 216 bp, Staphylococcus aureus
gtgcatacttcaattaaattaatcgaaatgaatcaaggtatatcattcctgcctatttatataacaacagatagtgattacaatatttcggttattaacacgaaaattttacaagcacctatttcatttacatatatatacagcaaaaaagaaagtccagaaatattggcgtttattagatcatttaaaaagtatattgccaatgaacaattataa

SEQ ID NO: 411728 - DNA, 2610 bp, Staphylococcus aureus
atggatataaataaaatgacatatgctgttcaaagtgctttacaacaagcagttgaactgagtcagcaacataaattacaaaatatagaaattgaggcaattttaagcgctgccttaaatgaaagtgaaagcttatataaaagtattttagaacgagcaaatattgaggtagatcaattaaacaaagcttatgaagacaaactaaacacgtatgcatctgtagaaggtgacaatatacaatatggtcaatatattagccaacaagcaaaccaattgataactaaggctgaatcatacatgaaagaatatgaagatgaatatatttcaatggagcatattttacgttcggcaatggacattgatcaaacaacaaaacattatataaataataaagtagaagttatcaaagaaattattaaaaaagtaagagggggaaatcacgtgacatcacaaaatccagaagttaattacgaagcattagctaaatatggccgcgacttagtagaagaagttagacaaggtaaaatggatcctgttataggaagagatgaagaaattcgaaatacgattcgtattttaagtcgtaaaactaaaaacaaccctgtgctcattggtgaaccaggtgttggtaaaactgcaattgttgaaggattagcgcagcgtatagttaagaaagatgtgccagaatcattattagataaaactgtttttgagttagatttaagcgcattagtagcgggcgctaaatatcgtggtgaatttgaagagagattaaaagcagtcctaaaagaagttaaagagtctgatggtagaattatattatttattgatgaaatccatatgcttgttggtgctggtaaaacagatggtgccatggatgcaggcaacatgctaaaaccaatgttagcacgaggagagttacattgtattggtgcaacaactttaaatgaatatcgagaatatattgaaaaagattcggcattagagcgtcgtttccaaaaagtagcagttagtgagcctgatgttgaagatacaatttcaattttacgtggtttaaaagaacgatatgaagtgtatcatggtgtgcgtattcaagatagagccttagttgctgccgctgaattgtctgatcgttacatcactgatcgttttttaccagataaagcgattgatttagttgaccaagcatgtgcaacaattcgtacggaaatgggatcaaatccaactgaattggatcaagttaatagacgtgtcatgcaattagaaattgaagaaagcgcacttaaaaatgaatctgacaatgcgagcaaacagagattacaagaactacaagaagagcttgccaatgaaaaagagaaacaagcagcacttcaatctcgtgtagaatcagaaaaagaaaaaatagcaaatttacaagaaaaacgtgcgcaactagatgaaagtagacaagcgttggaagatgcacaaacaaataacaatttagaaaaagctgctgaactacaatatggaacaattcctcaattggaaaaagaacttagagaattagaggataatttccaagatgagcaaggtgaagatacagatcgaatgattcgtgaagttgtaacagacgaagaaattggcgatattgtcagccaatggacaggcataccagtttcaaaattagttgaaacagaacgtgaaaaattacttcacttaagtgacatcttgcataaacgtgttgtaggtcaagataaagcggttgacctggtttcagatgcagtagttagagcaagagcaggtattaaagatccaaacagacctattggtagtttcttattcctaggtccaactggagtaggtaaaactgaattagctaaatcattagctgcatcattatttgattctgaaaaacatatgattcgtattgatatgagtgaatatatggaaaaacatgcagtatcaagattgataggggcacctccaggatatattggacatgatgaagggggtcaattaactgaagcggttcgtcgtaatccatactcagttattttattagatgaggttgaaaaagcgcatactgacgtctttaatgtattattgcaaattttagatgaaggtcgtttaactgattctaaaggacgtagcgttgattttaaaaatactattattattatgacaagtaatattggatctcaagttttattagaaaacgtaaaagagactggtgaaattacagaatcaacagaaaaagctgttatgacaagtttaaatgcatatttcaaaccagaaattttgaatcgtatggatgatatcgtattatttaaaccattatctattgatgacatgagtataattgtagataaaatcttaacgcaattaaatataagattactagaacaacgaatctcaattgaagtttctgatgatgctaaagcttggctaggtcaagaggcttatgaacctcaatacggtgcaagaccattaaaacgttttgtacaacgccaaattgaaacaccattagcacgtatgatgattaaagagggattcccagaaggtacaacgattaaagttaatttaaattcagacaataacttaacgtttaatgttgaaaaaattcatgaataa

SEQ ID NO: 411729 - DNA, 597 bp, Staphylococcus aureus
atgaatttggattggtactatacatttgtcattttagcgaagacgttaaactatcgattagctagtgaagaaattaatctcactataccttctatacataagcaaattaaaaatttagaacagcatctcaatgtgaaactatttgaaacttataaaaatcaaattatcttgactgaagatggtcatacatttcttccaattgcgcaaagttttattgaacaatatgaaagtggcatcaagcatatccaacttaaaaagacgatgtttcaatcgaaattaaatgttgtcgtgtcttcatatatcgcgacattcattatgcccaaatttttaaaatctttctttaacgagcatccgtttattgatgtttctctccatgtcaaaaatgaaaatattgaaaaagatattaataatcatacgtatgacatcgggattagcagaaatcaacctaaactaagagaagttcattctgaaaaagtatgcgaaggtaaaattgtattgattgctcccaataaagagaataatcatcttctaaccgaggcatctttatttgaaaaatacaaaataataagtgataaccatccagaatattggtcatga

SEQ ID NO: 411730 - DNA, 1041 bp, Staphylococcus aureus
ttggttgatcgtaataaaggcaaaggtgagccatcgaaattaaaggaagtatacaatagtaaagatccaaagtataagaagattgaccagtatttacaaaattcattatttaatggttcagtagcggtatatgaaaatggcaaattgaaaatgagtaaaggctatggatatcaagattttgaaaaaggaattaaaaatacaccaaatacgatgtttctaattggttcagctcaaaaattttcaacaggattactgttaaaacagttagaagaagaacataaaattaatattaatgatccagtaagcaaatatattccatggtttaaaacatctaagcccattcctttaaaagacttgatgctgcatcaaagtggattatataaatataaatcttcaaaagactataagaacttagatcaagcagtgagagcaattcaaaaacgtggcattgatcctaagaaatacaaaaagcatatgtataatgatgggaattatttggtgctagctaaagttatcgaagaagttaccggcaaatcatatgccgagaattactatacaaaaataggggatcctctaaaacttcagcattcagcattttatgatgaaaaatcatttagaaaatatttagcaaaaggttattcttataatagtacaggactttctttcttgaagcctaatgttttagaacaatattatggtgcaggtaatatatatatgacaccaacagatatgggtaaattaattactcaaatgcaacaatataaattatttagtcctaaaataaccaacccattattacatgagtttggtacgaaacagtatccagatgaatatcgatatggtttctatgttaagccaacattgaatagacttaacgggggattctttggacaagtctttactgtttactataatgataagtatgtagttgtacttgcattaaatgtaaaaggaaacaatgaagttcgaatcaaacatatttataatgatattttaaaacaaaataaaccttacaatacgaagggtgttattgttcaataa

SEQ ID NO: 411731 - DNA, 753 bp, Staphylococcus aureus
atgaaatataataaccatgacaaaattagagattttataatcattgaagcatatatgtttcgttttaagaaaaaagtcaagcctgaagtcgatatgactataaaagaatttatattactgacttatttatttcatcagcaagaaaacacacttccatttaagaagattgtttcagatttatgttataaacaatcggatttagtacagcatataaaagtacttgtgaaacattcatatattagtaaagttcgaagtaaaattgatgagcgtaatacttacatttcaatatctgaagaacaacgagagaaaattgcagaacgtgttacattgtttgatcaaatcattaaacaatttaatcttgcagatcaaagtgaatcacagatgataccaaaagatagtaaagaatttctaaacttgatgatgtatacaatgtatttcaagaatattatcaaaaagcatctaacattaagttttgtagaatttacaattctagctattatcacttctcaaaataaaaacatcgttcttcttaaagatttaattgaaacaatccaccataaataccctcaaactgttagagctctcaataatttaaaaaagcaaggctatctaataaaagaacgctcaactgaagatgaaagaaaaattttaattcatatggatgacgcgcagcaagaccatgctgaacaattattagctcaagtgaatcaattattagcagataaagatcatttacatcttgtttttgaataa

SEQ ID NO: 411732 - DNA, 195 bp, Staphylococcus aureus
ttggtagcgcccaaatttgataaagaaacgcgacaatcgattgccaaagatttaagtaagttaggtgcaaatgtgaatcaaatagctaaatactgcaatcaacatcaacatgaagcaccaaattatgaaggtctagaacataatatcaatgcagttcgtgaaaggcttgatgaaatatggcaacaactaaattag

SEQ ID NO: 411733 - DNA, 150 bp, Staphylococcus aureus
atgacaagagaaagaagatcatttagttcagagtttaagttacaaatggttagattatatgaaaatggtaagcctaggaatgaaattatacgcgagtatgatttaacacctttgacgttaggaaaatggataaagcaacatcaaaaataa

SEQ ID NO: 411734 - DNA, 147 bp, Staphylococcus aureus
atggactcgaatgcaatcatcatcgaatggaatcgaatggaatcatcatcagatggaaatgaatggaatcatcatagaatggaatcgaatggattcattgaatggaatcagatggaatcatcgaatggacttgaatggaatcattga

SEQ ID NO: 411735 - DNA, 687 bp, Staphylococcus aureus
ttgaaaattaaagaaatggtaacttcagaaatgccaagagaacgtttgttaagccatggtgcaaaaagtctttcgaatacagaattattagctatattaattaacaccggaagaaaaggattctcgagcatagacattagtaatgaactgcttaaatctgcttcgaatctgaatgaattgaaaaaatcttcaattaacgatttgataaaagttaaagggattggattacaaaaagcaattactttaaaagcagcatttgagttaggggaaaggatggggagaagagctgaaaataatcgtataaaaataacgcaaccaagtgatgttgctgattatatgattccaacaatgaaagatttaacacaagaacattttgtcattttattgttaaattcaaaaaatgtagtgattaaagaaacctgtgtttttaaaggtacattaaatagttcgattgtacatccacgtgaaatttttagtattgcggtgagagaaaatgccaatgcaatcatcgcagttcataatcatccatccggtgatgtaacgccctcacaaggagatatcataacaacaatgaggttgaaggagtgtggtttgattttagggatagatttattggatcatattataatcggtgataatagatttaccagtcttgtagaagcgggttactttgatgaaaatgattga

SEQ ID NO: 411736 - DNA, 1032 bp, Staphylococcus aureus
atgatgggggataaaataacagcaagacaaacagttcatcatgcaggtgttcctgtgattccaggatcaaatggtgctgtgaatcatgtgtctgaaattgagaatcttgccaaagacatcggttatccagttgttatcaaagctgccagtggcggtggtggtaaaggtatacgtattgtaaagaaagctgaagatttagaaaaggcatttaaagaagctaaaagtgaaggaaaaaaatactttgatgatgatcgtgtttatgttgaggcttttatacctgttgcaaaacatgttgaagttcaagttatgggagatgggcaggataattatgtacatttaggggaacgtgattgttctgtacaacgtaaaaatcaaaaattaatcgaagaatctccttgtgcagcattaactgaagaaagacgacaacaaatatgtaacgatgctgttaaagttgcacgtgcagcaaattatagaagtgcaggtacgattgaatttttagtaactgataccgcacattactttattgaaatgaatgctcgaatacaagttgaacatactgttacagagatgcgagcagaacgtgatttggttgcagcacaactgtatttattggaacataatcatttacctttttcacaaagcgatattcaatttaatggtcatgtgatagaagcgagaataaatgccgaaaatcctgaaaagaaatttcaaccaacaccaggtaaagtgacagcgttacatttacctcaaggctttaatgtgcgagtcgattctttactatatcacggttatcaagtttcaccatattatgattctttagtagctaaagtaattgtaaaatctcatgatagagcttcagcaattgataagttgaaagtcaccttagatgaaatggtgatagatggattttctacaactgccgattttttatatgcagttttaaattatccactatatcgtgatggagatgcaaaagatgttgatattaaatttttagaaaaacatcaaattgttaaaggggtggaattataa

SEQ ID NO: 411737 - DNA, 1230 bp, Staphylococcus aureus
atggggagaaatttaaagcttaaaaaagaaagtgactttgaattcacaaaaaatcataaaaggttattattaggttctgtatttttgatggcaacttctgcaattgggccagcatttttaacgcaaacagcagtatttacatcacaattttttgcaagtttcgcatttgccatattactgtctatcatcattgacattggtgcacaaattaatatatggcgcatattagttgtaactggtttaagaggtcaagaaatatcaaataaagttgttcctgggcttggtactgttatctcaatattgattgcatttggtggtctagcttttaatattggtaatattgctggtgccggtttaggtttaaatgcaatttttggattagatgtaaaatggggcgcagctattactgcaatttttgcaatattaatctttgtaagtaaaagtggccaaaaaattatggacgttgtttcaatgattcttggtattgtgatgattttagttgtggcatatgtgatgtttgtttctaatccaccttatggtgatgcttttgtgcatacatttgcgccagaacatccaatgaaattagtcttgccaatcattacgttagttggtggaactgtaggtggttatattacctttgcaggtgcacatcgtatattagactctggcattaaaggtaagcaatatttaccatttgtaaatcaatcagcaattgctggtattttaactacaggtattatgagaacgttactattcctagcggtattaggagttgttgtaacaggtgtgacactaagttctgaaaatccaccagcgtcagtttttgaacacgcaattggaccaattggaaagaatatttttggtattgtgttatttgctgcagctatgtcatcagtaattggctcagcatacacaagcgcaacatttttaaaaacacttcataaatcacttaacgaaagaagtaatttaattgtgattgtgtttatcgttatttcaacaatgattttcttatttattggaaaaccaatcagccttttaattatagcaggcgcgataaatggatggattttacctattacgttaggtgcaattttgattgcaagtaaaaagaaatcaattgttggtgattataaacacccaaattggatgttcatctttggtatcgttgcagtacttgttacaatattgacaggtatattctcattcaaagaagtacttcagttattttaa

SEQ ID NO: 411738 - DNA, 387 bp, Staphylococcus aureus
gtggcatgtgtgatccataagcataaaaaagatcattatattgagacgcaagaaaagagaatagatttatattttaagtataaccttaatcattatagctctatgaaagttactagttttaaaaagacgcctatgggtggctatattgtagatggatatgttaatcacaacaaaaattatgattttaaggttctcatctctgcaactgacaatcatcaatttgaagatagcataggatacgatgataagacatttggtaaattatttaaagaaaaagaccataaaaatgaattaaaacctaaagatattataaaaaaagaacacttggataaaaatgaatatgaagcagaaccaccactgttcttcttttcagggagattagagtga

SEQ ID NO: 411739 - DNA, 231 bp, Staphylococcus aureus
atgattttctatgcatttgatttagaagattatattacgacgcgtgatttttatgaaccatatgaatcatttgttccaggtaaaattgtgcaatcatttgacgcattaatggacgccttggacaatgaagattatgaaggagaaaaagtcattccattcttagataaacattttaaatatcaagatggccgatcaagtgagcgtttagtcagaaatttatttggtagctaa

SEQ ID NO: 411740 - DNA, 960 bp, Staphylococcus aureus
gtgacatatatgaaagttgttgggttgaatcgtatgcgtgaagttgaaactgaattacaacaacgcttttcagatttagattttaaattttataaaaaagcatcagaaatacctgagagtgacttggctgatttagatatattagttggttatgatggcggtatcaatgaggcatttttacaacgttgcccgaatttaaaatggattgcatggtttgcaacgggtgtaaatacattaccgttagattatattgcagatcacggcatacttttaactaatggaaaaggtgttcaagctaaacaattatctgaatacattttagctttcattttagatgattataaaaagatgaaactatcatatgataaccaacgacaacatatatatgattcgaaaataactggtaaacgcctatcaggacaaacagttttatttttaggtacaggtgcaattgctactagaactgcgaagttagcaaaggcttttaatatgaatttaattggtctgagcaagtcaggtcagaacaaagatgagtttgacgagatatatactatcgaatcacttgaaagcacattaccaaatgctgacattattataaatgctttaccagaaacgcaagaaacgattcatttactaaagaaaaaacattttgaattaatgaaagatgaagcactttttataaatataggacgaggtagcatagttaaagaagcggtcttaatagaagtattaaaaagtaaagttattcgacatgcatatttagatgtgtttgaaaatgaacctttgaaacctaatcatgaattatatgaattggaaaatgtaaccataacagcacatataactggtaatgattatgaagcaaagtatgacttattagatatttttaaaaacaatctagttaattttctcaataagaatggtctaattgagaatgaagtggatactaaaaaaggctattaa

SEQ ID NO: 411741 - DNA, 1071 bp, Staphylococcus aureus
ttgactgagagacgaattattcatatagatatggactatttttttgcacaagtcgaaatgagagataaccccaaattgaaagggaaaccagtcattgttggtggtaaagcaatcagtaggggtgttgtctctacggcatcttatgaagcacgaaaatacggcgtccattcagcaatgcctatgtcacaagcgcataaattatgtccaaatggatactttgtcacaagtaattttggtgcttaccgagaaacatctgcgcagattatgtctattttccgaagttatacagataaggtagaaccgatgtcattggatgaagcgtatttagatattacagaattagtgagaccagaccttcctgcttcgaaaattgctcagtatattagaaaagatattctagagcagacacatttaacagcatctgcaggtgtttcttataacaaatttttagctaaattagcgagtggtatgaataaacctgatggtatgactgtgattgattatcaaaatgtccatgatattttgatgacattggatattggagattttccaggcgtaggtaaagcttccaaaaaagtaatgcatgataatggtatttttaacggtagagatttatatgagaaaacggaatttgaattaatacgtttgtttggaaaaagaggtcggggtttatataacaaggcacgcggtattgaccatagtgaagtgaaatcatcaagagtaagaaaatcagtagggactgaacgcacatttgcaacagacgtgaatgatgatgaagagattttaagaaaagtatgggaattgtcaggtaaaacagctgaacgtctaaataaattacagaagtcagctaaaactgtaacggttaaaattaaaacttatcaatttgaaacgctatctaaacagatgagtttaagagattcggttagttctgaagaagatatttataatattgcatatttactttataacgatttaaaagaccctgatgtaccaattcgacttattggtgtcactgtaggtaatttagaacaatcaacttataaaaatatgacgatatatgactttatataa

SEQ ID NO: 411742 - DNA, 1362 bp, Staphylococcus aureus
ttgcaagcaatagctaaaaatgacataaaaacgggaacagttgttgatttaacgcatgaaggccatggtgtcgtaaaaatagatcgctttcctattttcataccacaagctttaattaatgaacaaattgaatataaaattatcaaagtaaaaaagaactttgcgataggtaagttgcttaatataaatacgagaagtgagaatcgtgttgcaccgccatgtatatattatgaacgttgtggtgggtgccaacttcaacacttatcatacgaagcacaacttgaaatgaaaaaggaacaagtgattaatttgtttcagcgaaaagcgcattttgataattctaagattaacgatacagttggcatgacagatccttggagatatcgaaacaagtcccagattccagttggtaagaatgaacagaatgaagttattatgggcttttatcgtcaaagaagccatgacattattgacatggaaagttgtttaatacaagattcacaacatcaagaagtgatgaatgaagttaaatctattttaaaagatttaaatgtaagtatttatcaagaacaattgaaaaaaggtttaatgagacatttggttgtaagaacaggatatcatacagacgaaatgatgattatttttgtaactaatggtaaaaagtggtcacaaaaaaatgctgttgttgagaagatattagatgcatttcctaatgtgacaagcattaaacaaaacattaatgatagccactctaatgttattatgggacgtcaatctataacgctatatggtaaagatacaattattgatcaattaacagatagtacatttaaaataagtgatcagtcattctaccaaattaattctgaacaaacagagaaattatataataaagcaattgagtatgcgcaattgacaggtaatgaagttgtattagatacctattgtggtattggaacaatagggctatatatggcaccacatgcaaaacatgtatacggtgttgaagtagtaccttctgcaattgaagacgcacaacaaaatgcgactataaaccaatgcaataatacaacttttgtctgtgggaaagctgaagaagttattttacaatggaaagcacaagggattaaaccagatgttgtaatggttgatccgccaagaaagggctgtgacgaaacgtttattcagactttgcttacattagaacctaagcgtattgtctatatttcatgtaatcccgcaacacagcaacgtgatgcattattattagctgaaaaatatcaacttgaagaggtaacaccggtagatatgtttccacaaacaacacatgttgagacagtggcattattcaatttgaaatag

SEQ ID NO: 411743 - DNA, 2592 bp, Staphylococcus aureus
atgaatatgaagaaaaaagaaaaacacgcaattcggaaaaaatcgattggcgtggcttcagtgcttgtaggtacgttaatcggttttggactactcagcagtaaagaagcagatgcaagtgaaaatagtgttacgcaatctgatagcgcaagtaacgaaagcaaaagtaatgattcaagtagcgttagtgctgcacctaaaacagacgacacaaacgtgagtgatactaaaacatcgtcaaacactaataatggcgaaacgagtgtggcgcaaaatccagcacaacaggaaacgacacaatcagcatcaacaaatgcaactacggaagaaactccggcaactggtgaagctactactacggcaacgaatcaagctaatacacaggcaacaactcaatcaagcaatacaaatgcggaggaattagtgaatcaaacaaataatgaaacgacttctaatgatactaatacagtatcatctgtaaattcacctcaaaattctacaaatgcggaaaatgtttcaacaacgcaagatacttcaaatgaaacaacaccttcaaacaatgaatcagctccacagaatacagatgcaagtaataaagatgtagttaatcaagcggttaatacaagtgcgcctagaatgagagcatttagtttagcggcagtagctgcagatgcaccggcagctggcacagatattacgaatcagttgacagatgtgaaagttactattgactctggtacgactgtgtatccgcaccaagcaggttatgtcaaactgaattatggtttttcagtgcctaattctgctgttaaaggtgacacattcaaaataactgtacctaaagaattaaacttaaatggtgtaacttcaactgctaaagtgccaccaattatggctggagatcaagtattggcaaatggtgtaatcgatagtgatggtaatgttatttatacatttacagactatgttgataataaagaaaaagtaacagctaatattactatgccagcttatattgaccctgaaaatgttacaaagacaggtaatgtaacattgacaactggcataggtagtacaacagcaaacaaaacagtattagtagattatgaaaaatatggtaagttttataacttatctattaaaggtacaattgaccaaatcgataaaacaaataatacgtatcgtcagacaatttatgtcaatccaagtggagataacgttattgcgccggttttaacaggtaatttaaaaccaaatacggatagtaacgcattaatagatcagcaaaatacaagtattaaagtatataaagtagataatgcagctgatttatctgaaagttactttgtaaatccagaaaactttgaggatgtcactaatagtgtgaatattacattcccaaatccaaatcaatataaagtagagtttaatacgcctgatgatcaaattacaacaccgtatattgtagttgttaatggtcatattgatccgaatagcaaaggtgatttagctttacgttcaactttatatgggtataactcgaatataatttggcgctctatgtcatgggacaacgaagtagcatttaataacggatcaggttctggtgacggtatcgataaacctgttgtccctgaacaacctgatgagcctggtgaaattgaaccaattccagaggattcagattctgacccaggttcagatagcggttcagattcgggtagtgattctaattcagatagcggttcagattcagcaagtgattcagattcagcaagcgattcagattcagcaagtgattccgactcagcgagcgattcagactcagatagtgactcagattccgatagcgattccgatagcgattccgactcagatagcgactcagattcagacagcgattcagactcagacagcgattcagactcagacagtgactcagattccgatagcgattccgatagcgattccgactcagatagcgattccgactcagatagcgactcagattcagacagcgattctgactcagacagcgattctgactcagacagcgattctgactcagacagtgactcagattccgatagcgattccgactcagatagcgactcagattcagacagcgattctgactcagacagcgattccgactcagacagcgattcagattcagacagcgattccgactcagacagtgactcggattccgacagtgattccgactcagacagtgactcagattcagatagtgattccgactcagacagtgactcagattcagatagtgactcggattcagcgagtgattcagactcagatagtgactccgattcatcaagtgattccgactcagaaagtgattcaaatagcgattccgagtcaggttctaacaataatgtagttccgcctaattcacctaaaaatggtactaatgcttctaataaaaatgaggctaaagatagtaaagaaccattaccagatacaggttctgaagatgaagcgaattcgtcactaatttggggattattagcatcattaggttcattactacttttcagaagaaaaaaagaaaataaagataagaaataa

SEQ ID NO: 411744 - DNA, 786 bp, Staphylococcus aureus; identical to SEQ ID NO: 407869

SEQ ID NO: 411745 - DNA, 1674 bp, Staphylococcus aureus; identical to SEQ ID NO: 405657

SEQ ID NO: 411746 - DNA, 822 bp, Staphylococcus aureus
atgaaaaaattatttggtcttattttagtattaacatttgcagttgcattagcagcttgcggtaatggaagcaaaagtggcagtgacgacaagaaaataacagtaggtgcttcaccagcaccacatgctgaaattttagaaaaagcaaaaccattattagagaaaaaaggttatgaactagatattaaaacaattaacgattacactacacctaataaattactagacaaaggtgaaattgacgcaaactatttccaacacacaccatatttaaacacagagaaaaaggataaaggttacaaaatcgtaagtgccggtgatgttcacttagaacctatggctgtatactctaaaaagtataaaagtttaaaagaattaccaaaaggtgcaacagtctatgtgtctaataatccagctgaacaaggacgtttcttaaaattcttcgttgatgcaggtttaattaaaatcaaaaaaggcgtaaaaattgaagatgctaagtttagtgatattacagagaataaaaaagatattaagtttaataataaacaatcagcagaattcttacctaaaatttatcaaaatgaagacgcggatgctgttatcattaattcaaactttgcaatcgaacaaaaactaaatcctaaaaaagattctattgctgtagaaagtgcgaaagataatccttatgcaaacttaattgctgttaaagaaggacatcaagatgacaagaaaatcaaagcattaattgaagtattacaatctaaagatattcaagacttcattaatgaaaaatacaacggtgcagttattcctgctaaataa

SEQ ID NO: 411747 - DNA, 696 bp, Staphylococcus aureus
atgggtaaatcatttagtgaaattataaatgaaatgattacaatgcctaatattcagtggccagaagtttggactgcaatagtcgaaacactatacatgacagtcgtctcaactatatttgcatttatactcggtcttattttaggtgtgttattattcttgtctgctaaaggtaagtctatcggtgcaaggttattttattctatcgtttctttcattgttaacttatttagagcgataccatttattattttaattttattattaattccatttacaagtttgatacttggaacgataagtggtccgacaggtgcgttaccagccttgatcattggcgcagcaccgttttatgcaaggctcgtagaaattgcttttaaagaaattgataaaggtgtcatcgaagcggcttggtcaatgggtgctaatacttggacagtaattcgtaaagtccttttacctgaagccatgccagcgctagtgtctggcattacagttacagcaatcgctttagttggttcaacagcagttgcaggtgtaattggtgccggtggtttaggaaatttagcatacttaacaggtttcactcgaaatcaaaatgatgtcattttagtatcaacagtttttattttaattattgtatttataatccaattcattggggattggcttacaaataaacttgataaacgataa

SEQ ID NO: 411748 - DNA, 1026 bp, Staphylococcus aureus
gtgattgaattaaaagaagttgttaaagaatatcggattaaaaataaagaagtccttgctgtagatcacgttaatttatcgattcgagcaggatcgatttatggcgtcattggtttttctggagcaggaaaaagtactttgattcgaatgtttaatcatttagaagcgcctacatcaggtgaagttattatagatggagaccatataggtcaattgtccaaaaatggattaagagcaaaaagacaaaaagtaagtatgatcttccaacattttaatttgttatggtcaaggactgtgttaaaaaatattatgtttccgcttgaaattgcaggtgtccctagaaggagagctaagcaaaaagcattagaacttgtcgaactcgtcggtttaaaaggtagagaaaaggcttatccatcagagttatcaggtggacaaaagcaacgtgttgggattgcacgagcgttagctaatgatccaacggtcttgctttgtgatgaggcaacaagtgcacttgacccgcaaacaacagatgaaattttagatctactactaaaaattagagaacaacaaaatttaacaattgtactaattacgcatgaaatgcatgtcattcgtcgtatttgtgatgaagttgcagttatggaaagtggtaaagtgatagaacaaggaccggtgacacaggtttttgaaaatccgcaacacactgtgacaaaacgatttgtgaaagacgatttaaatgatgatttcgaaacatctttaacagaattagagccattagaaaaagatgcttatatcgttagattagttttcgctggttcaacaacaaccgagcctattgtatcgagcctatcaactgcctatgatattaaaattaatattttagaagcaaatattaaaaatacaaaaaatggaacagtcggctttttagttctgcatattccatatatttcaagtgtagatttcggaaaattcgaaaaagagttaattgagcgacaagttaaaatggaggtgttaagacatgggtaa

SEQ ID NO: 411749 - DNA, 297 bp, Staphylococcus aureus; identical to SEQ ID NO: 407322

SEQ ID NO: 411750 - DNA, 390 bp, Staphylococcus aureus
atgatggctattgtaaataaagtgataattgttgaaggaaaatctgataaaaaaagggtgcaacaggttattgcagaaccagtcaatattatttgtactcatggaacaatgagtatagataagcttgatgatatgatagaatcactgtatgataaacaagtttttgtattagccgattctgatgacgaaggagatcgaattagaaattggtttaaacgttatttgagtgaaagtgaacatatatttattgataaaacttactgtcaagttgcgaattgccccaaacaatatttggcgcatgtactttcaaaacatggctttacttgtaagaaagaaacacctcttttaccgaatataaataatgaaaggttagttttagtaaatgaataa

SEQ ID NO: 411751 - DNA, 1359 bp, Staphylococcus aureus
gtgtcaatttttagccagtttttaaaaagatcaagccctcaacaaggtattgtattgtactatatcgtcgcaattgtcgttgcatttttattattaaacttaccgtatgttcataaaccaggtgtagaagtaaatccaattgacacattatttgttgccgtatccggaattagtgttactggattgtctccgataagtattgtcgatacctattctacatttggacaattaattatcctcgtgatattaaatattggtggaattggcgtcatggcaattggtacgatgttatgggtggtactaggtaaacatattggaattagagaacgtcagttaattatgttagataataacaaaaacacaatgagtggtaccgtcaaattgattattgatattgtaaaatcaatatttgtaatcgaactcgtaggagccatgttattagcattttacttttatcgagataatccagatttaaagtatgcaatcatgcaaggtgtttttgtttctatttctgccactactaatggtggattagatattacaggtaagtcattaattccttatgcacatgattattttgtacaagcgatagttatatttttaataattttaggatcaatcggcttcccagtattattagaagttaaagcttatattcaaaatagagttactaattttagattttcattatttactaaaattacgacatcaacatatttattcctatttattgttggggtattagccattctattatttgaacataaccatgcgttcaaaggattaagttggcatcaatcgttattctattcgctgtttcaatcagcgactacaagaagtgcgggtcttcaaacaattgatgtgacaacactaagtgaccctacgaatattatcatgggtattttaatgtttataggatcttcgccaagttcggttggtggcggtattcgtacaacaacattcgctattttaattttgtttttaattaactttagtaataatgccgataaaacatccattaaagtttacaatagagaagtacacattatggatattcaacgttcatttgcagtatttacaatggcgacaattttaacatttttaggaatgctaattatatcagctactgaaaatggtaagcttacatttttacaagtattttttgaagtcatgtctgcatttggaacttgtggactatcgcttggtgtcacaagtgatattagtgatatttctaaggtcgtactaatggtactcatgtttataggacgtgttggcttaatatcatttatcattatgatagcaggacgtcgagaaccagataaattccattatccaaaagaacgtattcaaataggataa

SEQ ID NO: 411752 - DNA, 861 bp, Staphylococcus aureus
atggctaaagaactttgttttgaaggtatcactttaaaagcatttgatgaacaatatcgttcagcaattaatgattttgacttgaatgaaagacaacaaatatattcatctttacctaaagaagttattgatgatgcaattaatgatgctgataggattgctaacgtagcaataaacgataaaaatgaagtggtgggcttttttgtattacatcgttactatcagcatgaaggttatgatacacctgaaaatgtcgtttatattcgttcattatcgattaatgaaaaatatcaaggttttggatatggcacgaaaataatgatgtcattgccgcaatatgttcaaggtgtatttcctgattttaatcatctatatctagtagtagatgcggaaaatgacaatgcttggaacctatacgaacgtgctggattcatgcatacagctactaaagaagaaggaccaattggcaaagaacgactatattacttggacttagattcaaaacatgtttcgtcattaaagcttgaagaagaaagtcgttcagaagtgaccaatgtacatatcattaatttaatgattgatggccaaaaggttggctttatcgcattggagcagattggtgaacgcatgaacattgctgctattgaagtggataaatcatatcgctttaatggtattggttcaagtgcgctgcgacaattgccaacttacttaagaaaaaactatgacaaccttaatgtgattacgatgattctgtttggagagaataatgattttaaaccattatgtctaaatagtaatttcgttgaaatcgaacaaactgatgattatgtcgtttttgaaaaatatttaaattactaa

SEQ ID NO: 411753 - DNA, 435 bp, Staphylococcus aureus; identical to SEQ ID NO: 407896

SEQ ID NO: 411754 - DNA, 3348 bp, Staphylococcus aureus
atgatttcaaatcgcttaaacaaattttcgattagaaagtatactgtaggaactgcatcgattttagtaggtacgacattgatttttggtctagggaaccaagaagctaaagctgctgaaaacactagtacagaaaatgcaaaacaagatgatgcaacgactagtgataataaagaagtagtgtcggaaactgaaaataattcgacaacagaaaataattcaacaaatccaattaagaaagaaacaaatactgattcacaaccagaagctaaagaagaatcaacttcatcaagtactcaaaaacagcaaaataacgttacagctacaactgaaactaagcctcaaaacattgaaaaagaaaatgttaaaccttcaactgataaaactgcgacagaagatacatctgttattttagaagagaagaaagcaccaaataatacaaataacgatgtaactacaaaaccatctacaagtgaaattcaaacaaaaccaactacacctcaagaatctacaaatattgaaaattcacaaccgcaaccaacgccttcaaaagtagacaatcaagttacagatgcaactaatccaaaagaaccagtaaatgtgtcaaaagaagaacttaaaaataatcctgagaaattaaaagaattagttagaaatgataacaatacagatcgttcaactaaaccagttgctacagctccaacaagtgttacaccaaaacgattaaatgcgaaaatgcgttttgcagttgcacaaccagcagcagttgcgtcaaataatgtaaatgatttaattacagtgacgaagcaaacgattactgaaggtattaaagatgatggtgttattcaagcacatgacggtgaacatattatttatacatctgattttaaaattgataatgctgtaaaagctggggatacaatgacagtaaagtatgataagcatacaattccttcagatattacggatgatttcacaccagttgatattacagatccatcaggtgaagtaatagcgaaaggaacatttgatttaaatacgaaaacaattacttacaaatttactgattatgttgatagatatgagaacgtcaatgcgaaattagaactaaactcatatattgacaagaaagaagttccaaatgaaacaaatttaaatttaacgtttgctacagcagataaagagactagtaaaaatgttaaagttgaatatcaaaaacctatcgtaaaagatgagtcaaacattcaatctatatttagccatttagatactactaaacatgaggtagaacagactatttacgtaaatccattaaaattaaatgcaaaaaacacaaatgttaccataaaaagtggtggtgtagcagataatggtgattattatactggagacggtagtactataattgataacaatacggagattaaagtttataaagttgcaccaggtcaacaattacctcaaagtaataaaatttatgattatagtcaatacgaagatgttacgaattcagtaactattaataaaaattatggtactaacatggctaatattaattttggtgacattgattctgcatatatagttaaagttgttagtaaatatacaccgggtgctgaggatgacttagcagttcaacagggtgtaagaatgactacaacaaataaatataattattcatcatatgcaggttacactaatactattttatcaactactgactctggcggtggtgacggtactgttaaacctgaagaaaagttatacaaaattggtgactatgtatgggaagacgttgataaagacggtgttcaaggtacagattcaaaagaaaagccaatggcaaacgttttagttacattaacttacccggacggtactacaaaatcagtaagaacagatgctaaaggtcattacgaattcggtggtttgaaagacggagaaacttatacagttaaattcgaaacgccaactggatatcttccaacaaaagaaaatggaacaactgatagtgaaaaagactcaaatggtagttctgtaactgttaaaattaatggtaaagatgatatgtctttagacactggtttttataaagaacctaaatataatcttggtgactatgtatgggaagatactaataaagatggtatccaagatgcaaatgagccaggaatcaaagatgttaaggttacattaaaagatagtaatggaaaagttattggtacaactactactgatgcctcgggtaaatataaatttacagatttagataatggtaactatacagtagaatttgaaacaccagcaggttacacgccaacggttaaaaacactacagctgaagataaagattctaatggtttaacaacaacaggtgtcattaaagatgcagataatatgacattagacagtggtttctataaaacaccaaaatacagtttaggtgattatgtttggtacgacagtaataaagatggcaaacaagactcaactgaaaaaggtattaaagatgtgacagttacattgcaaaacgaaaaaggcgaagtaattggaacaactaaaacagatgaaaatggtaaatatcgtttcgataatttagatagcggtaaatacaaagttatttttgaaaagcctgctggcttaacacaaacagttacaaatacaactgaagatgataaagatgcagatggtggcgaagttgacgtaacaattacggatcatgatgatttcacacttgataacggatacttcgaagaagatacatcagacagcgattcagactcagatagcgattcagactcagacagcgattcagattcagacagcgattcagactcagatagcgactcagactcagacagcgattcagactcagatagcgattcagattcagacagcgactcagattcagatagcgattcggactcagacagcgattcagactcagatagcgactcagattcggacagcgattcagactcagatagcgactcagattcagatagcgattcggactcagatagcgactcagactcagatagcgactcagactcggacagcgattcagactcagatagcgattcagattcagatagtgactcagactcagatagcgactcagattcagacagcgactcagactcagatagcgattcggactcggatgcaggaaaacatacacctgttaaaccaatgagtactactaaagaccatcacaataaagcgaaagcattaccagaaacaggtagtgaaaataatggctcaaataacgcaacgttatttggtggattatttgcagcattaggttcattattgttattcggtcgtcgcaaaaaacaaaacaaataa

SEQ ID NO: 411755 - DNA, 1491 bp, Staphylococcus aureus
atgaattattttgtaggtaatagtttaggtgttaatttaactgggatagagaaagcaattattaatcgtttaaatttatttaaagaaatgggaagaccagcgcaatgtgtatttctgtcatggaatagatatttatatagaaatgcccaaaattatattactagttctgactatattaatatgtatgatttcttccaagaagcaacatatttagaacgcaatgaaccatttgactggttgtcgtattggactgatgaatgtcattatactttaaaacatgttgaaaatagtcatgactttagaatatatgatcaagaacgtttcttaatgtatgcccattttcaagatcctaaatatcgtatattagattatgtgaatcattttgatagtcaaagacgaaaagtaaaacgtgatttttatgatgtgcgtggctttttaagttgtagtaggattcttgttgataaacaacaaacattatgtgaatttttctataatccagaaggtgacacaaaattagaaaagtatttttcttacaaggatggcaaaccagaagtacaaaaaattattgtttactatgctaacaaacaatatttctttaataatgaaacggaattaggcgcatttttcattaaacaactatatcaacatggggatttatttttcagtgaccgtaatgtgtatacagcacctattttcaacttaacacctgagtcaatcccagtagtagctgtgcttcacagtacacacattaaaaatattgatgcattagattcatcgccatttaaaaatgtatataaagcgatgtttgaaaatttatctcgatatcgtgcaattatcgtttctactgagcagcaaaaattagatgttgaaaaacgtattaaccatactattccaattgttaatattcctgtcggctatagtgaaacaattgatacaccagtccaaacattagatcagcgcagtgttaaattaatttccgttgctcgttattcacctgaaaaacaattacatcaacaaattgaattaattaaacgcttagtatcgtatgtcccaaaaatagagcttcatatgtatggttttggttctgaaagtaaaaaattaaatgaattgatacaaaaatatggattggaaaatcatgtttacttacgcggctttttaagcaatctagaccaagaatatagcgatgcctatttgagtttaataacaagtaacatggaaggtttctctttagcgctacttgaatctttagcacatggtgttccagttattagttatgatattaaatatggacctaacgaattaattacgcctgatttcaatggttatttaattactaaaaatgatgaagatgccctatttgataaagtaaaatatgtgattgatcatcctgaagtacagcaacgactgtcaaaaggtagtttggcaaaagcacaacaatatagtaaagcgtcgttaattaaacaatgggaccaatttgttcgtcttatataa

SEQ ID NO: 411756 - DNA, 318 bp, Staphylococcus aureus
ttgacgcaaattgatttaatagcgcaatatccagtacaactatatggtacaaatgcactgattggggtcgtcaacgcatgtatcgtgacatttagcggactagtaataggtgtcaaaggtatggcaacaccaattgcaggcgccatcgtattgtttggctttaataatgcagtgacatcaattgtaacaatcgcaacagtgattattgtcagcattgtcttagcctatattattggaacactaattaataagtttaatttaatgaatatcaactttaaaatgccgagcaaaaagaatcatattaaggagagtgtttaa

SEQ ID NO: 411757 - DNA, 729 bp, Staphylococcus aureus
atgatgatttcacacttgataatggctactacgaagaagaaacatcagatagcgactcagattcagacagtgactcagactcagatagcgactcagactcagatagcgactcagattcagacagtgactcagactcagatagcgactcagactcagatagcgactcagattcagacagtgactcagactcagatagcgactcagactcagacagtgactcagactcagacagcgattcagactcagatagtgattcagattcagatagcgactcagattcagacagtgattcagattcagacagcgactcagattcagatagcgactcagattcagatagcgactcagactcagatagcgattcagactcagacagtgactcagactcagacagcgattcagactcagatagcgactcagattcagatagcgattcggactcagatagcgattcagactcagatagcgactcagactcagacagcgactcagactcagatagtgactcagattcagatagcgattcggactcagacagtgattcagactcagatagcgattcagattcagacagcgactcagactcggatagcgattcagattcagacagtgattcagattcagacagcgactcagactcagaaagtgattcagactcggatagcgattcagattcagaaagtgatgccgattcagattcaggtaagcacacacctgttaaaccaatga

SEQ ID NO: 411758 - DNA, 891 bp, Staphylococcus aureus
atgtgtataagagacagtgttagaccagatcctgatgcatatggttcacaacttggtttaaaatactatattcagcagaaatttccgcaaaagcaagtatttgcagtgggtgaagcggaatcatcattaagttttattggagagttagataacattgatgataaaacatatcaagatgcgcttgtaattgtatgtgatactgccaatgctccacgaattgacgatgaacgttatagtacaggtcgtaaaattattaaaatagatcatcatcctgcagttgatcagtatggtgatattaatttagttaatacgaacgcgtcatctacaagtgaaatcatttacgatttaatctcacattttaatgatgaagcaattgttaataaagatatcgcgagcgttttatatcttggtatcgtcggtgatactgggcgattcctttttaacaatacctcagaacatactatggaaattgctggaaagttaattgggcatgatattgatcataatgcgcttttaaataaaatgatggagaaggacccaaaaatgttgccgtttcaaggttatgttttacaacatttcgaacttatggatgatggattctgccaagttaaaataactgaagatgtattggagcaattcggtattcagccaaatgaagcatctcagtttgttaatacaattgctgacatcaaaggcttgaaaatatgggtatttgcagtcgatgaaggtaatgaaatcagatgtcgattacgttctaaagggcaattgattattaatgatattgcgcaagattttggtggcggtggtcatccgaatgcgtcaggagtttcagtggacagctgggatgaatttgagcaacttgctacagctttacgcacaaaacttaactaa

SEQ ID NO: 411759 - DNA, 789 bp, Staphylococcus aureus
atgactacgtttgatgctaaaaaattaaaaaaagaatatcttgattggtataatcagattttagagttttctaatttatcaaacaattcagtaaaaatagatattccttttaaagataattctttagataatttaaaaatatacgctttatacgatcagtccagagacatgattacactgactgatgacggctatactatatttggtttagaaaataacagtgtttctataaataaatttaaaaaacgtaaaaagatttttgaagagcacctttcagcttacggtattaaatataacgataaaactcacgaaatttttgttcaaactaactttaaaaattttaataaatcgaaacataatttattacagtgccttatatttgttaatgatatgtacttactttctaatcctaagtcacagaacatatttacagaagatgttgcaaacaaattggatgaacataacatttattacggaagagatatacctattataggaagcagtggtgttgttcataatttcgacttttttattagcgctaagaaaaatcaaaaagaaaaatttatcaatgctatttctaaccctaataattctatgattattaagtcgaaaataacggatgctatgcaagcaaaaaaaataaaaacacacaggcaaaatgagtttatttttattttaaatgactcaaaaaaagaaataaatgaacataataaaaatcttcttcatgaaaactatattagtacaatagattatagcgaattagatgaaaagataggtttattgatttaa

SEQ ID NO: 411760 - DNA, 195 bp, Staphylococcus aureus
atgaataagttaatacttgggatttatttataccgaattttttcacgagcatacttttatttaccgtttttattaatttactttttgattcaaggttattccataatacaattagaaatattaatggcgtcttatggcattgcagcatttttttctctctatacaaagagaagtgttttaaaatttgtaacttaa

SEQ ID NO: 411761 - DNA, 213 bp, Staphylococcus aureus; identical to SEQ ID NO: 407844

SEQ ID NO: 411762 - DNA, 234 bp, Staphylococcus aureus
atgcctaaagcttttgctccattttcagcaatttttgcaaattcacttttattatcaataggtgcgggtataatatggcctaattctacaaaatatggtggttttgattttaatttttttgtgacttccaagaactctgtttttccagaatttaaaaataattcaatgctatattcctggccacgcataaattcttcgattaagaaaatatcgttgaccttaaaccccatataa

SEQ ID NO: 411763 - DNA, 264 bp, Staphylococcus aureus
ttgatttatgtagataaagattcgctaaaaacttatataaatgaattgtcttctttacttaaaggacacaaaatcattacagttgaagaacatagacaaacaggttctatatcgaacttactagcatctttaattgacaatacagtgatcccattcacacctaatgatgaatatccacaccatggcggttcacatgctgaagtactaaatcaattgggatttagtaaagaaaagttattaacattactaaaagaggtggaataa

SEQ ID NO: 411764 - DNA, 567 bp, Staphylococcus aureus
atggatataaaaattaaaggcgatactattgttagtgacaaatttgaagctaaaataaaagaaccgtttatcatcaatgaaaaagatgagaaaaagaaatatatcgcttttaaaatggaaattactgctaaaaaagacgataaagatttaaatccatcttctatttctcatgactatattaatatcactcaagatgataaaaatacagtaaataaattaagagatggttatcttttaagtgataaaaaatataaagattggacagaacataaccaagatcaaattaaaaaaggcaaaactgcacaagccatgtttatctatgagttaagaggtgatggaaatattaatttaaatgtccataaatactcagaagataaaacagttgattctaaatcattcaaatttagtaaacttaaaaccgaagatttttctcatagagcggaaacaagagaagaagtagaaaagaaagaaaaagaatttgaagaagagtacaaaaaagaacaagaacgagagaaagaaaaagaaaagcaaaaagatgacgaccacagtgctttagatgaagtataa

SEQ ID NO: 411765 - DNA, 282 bp, Staphylococcus aureus; identical to SEQ ID NO: 407864

SEQ ID NO: 411766 - DNA, 555 bp, Staphylococcus aureus
atgaatttaatgatgccaagtttagacaaacaactagacgaatacaaatgtaaaattgagcaacaaattgctgatatttttagtaaatatagttatatttgtgaaaaatatgaagataccattgcgattgaatttgaagcgttacttttaaatattaaaaaggcgaagtctatcgcgttccgagatgttaaaaatcattttgttagaaacgaaaattcatactatcattattttgatatgcgagaagagcaagtggaattgttaatgagaatgaaaccgctcatcgaaagtatctgtcataaagatccacttttaaatgatgttgcgtcactgctgaaagaaattggtctaaatgtgaatagtaatgactatacagcaatgcgtttacacaatttgtatgagacgcgtttgaaattggatgaactgccattgccaacaacacacaaagcgcttaactcgagagcaagtattattcaaatattaaatgaattagaagaatatttacaaatcaaatcgcaatttggttcattgaaaatgcatagtgaagtagcttaa

SEQ ID NO: 411767 - DNA, 252 bp, Staphylococcus aureus
atgtttggatttataggaatgttaattatcggtggcttaattggatgggctgctggtgctattatgggtaaagatatcccaggtggtattttaggcaatattatcgcaggtattattggatcatgggtaggtggcaaactattcggacaatggggtcctgaattaggaagtatttacatcttgccagcattaattggttcaattatcttaattgcaatcgtaacgttaattttaagagctatgcgtaaataa

SEQ ID NO: 411768 - DNA, 201 bp, Staphylococcus aureus
atgaccgctaatgcatatggattgttatcacctaccgcagtgacagcactacctatttgttttaatgttgctagcacaccaggtgtaatgattgatgcaagtccgaaagcaattgctggtgcaaataagatcaccacaattaagtccaagccttctggaactttcttttcaatccatttaattaaaaaagctacgccataa

SEQ ID NO: 411769 - DNA, 240 bp, Staphylococcus aureus
atgaataacactgtgaaaattaatgtaccaacaatagcttcaatttttctaaaaccatatttcattataaatagtagtaaaaatacatcaagtacagttattagtgcaccgacgattaaaggtatgttaaataggagattaagagcaatagcactaccaattacctcagcaatatctgtggcgataattgctagttctgcaatgatccaaaatattatagcaataggtcttgataaataa

SEQ ID NO: 411770 - DNA, 558 bp, Staphylococcus aureus
atgaatcctccaatatgcgccacaatatttatatttgacataaacagagaaacaccaactaatatcactaatgcaattaataactgtcctaacatttttttgttaaatgtttttgaaacatacatcatcgcaaaaattgatccaatcagaccaaatatagcaccactagccccaactgaaattgtagtcgtattaaatgatagtgatacaaagtttccaaacaaccctgcaataaagtatacagttaacatccgccatgaaccaataattgcttcgactattttaccaaaaataaataatgaaagcatattcataagtatatgttcaaaactaaaatgtaaaaacatcgatgtaacaattcgataccattcaccatgtacgacattaaaatgcactaacccgccaacatctaataattttacatccgaaaaattatttaaatataaaatcatacataaccatattaagacatttacaaatattattgtgtatgttgccggtgaaaatttctgcatatatttatctaaaaagttatcggttaatactttgcgtttatag

SEQ ID NO: 411771 - DNA, 531 bp, Staphylococcus aureus
ttgttctttccgtttattaattggttaatcccaaaaagatatgtccaaatcagtagagaagagtttgataacttaaatattgtcaaaccagttaaaaataaatcgataggatggactatattcgcgggtattgtgttacttggtggtacagtaagaagaaatacttatttatttgattttcaattagaagaactaattgtttggagcagctgtttcattgggtttttagggattatatttttttattgttatctaaataagaaattaacattaaatatttataatgaaagtaaaaataatgaacttaaattaagattattaccctcctttaaaaatatttgtttcacaattttttattacctatttactggtttcatgtcttatggggcattttacttgttggtgtttgaaaatgtacaaaatttaatcttatatgtttcttggcttttcatgactatgctatttatgtttatgaacatgcattcaattatagataaaaaagtacatatattcttaaagtctaataaatag

SEQ ID NO: 411772 - DNA, 201 bp, Staphylococcus aureus
atgggtagcgctgtgattgaaggctacatcaatgaaaacaaaaaagataattttactgcttatgctacacctgaacataattatcagtttggtggtgctatgatagaaagtgaaagattaagtgagttactaaaaccagcgcatcaattaaaatcaccagatgatataaaaaaagaactaaataaaaagaagagtcactaa

SEQ ID NO: 411773 - DNA, 168 bp, Staphylococcus aureus; identical to SEQ ID NO: 408612

SEQ ID NO: 411774 - DNA, 1431 bp, Staphylococcus aureus
atgaagagtgattcactaaaagaaaatattatttatcaagggctataccaattgattagaacgatgacaccactgattacaatacccattatttcacgtgcatttggtcccagtggtgtgggtattgtttcattttctttcaatatcgtgcaatactttttgatgattgcaagtgttggcgttcagttatattttaatagagttatcgcgaagtccgttaacgacaaacggcaattgtctcagcagttttgggatatctttgtcagtaaattatttttagcgttaacagtttttgcgatatatatggtcgtaattactatatttatagatgattactatcttgttttcctactacaaggaatctatattataggtgcagcactcgatatttcatggttttatgctggaactgaaaagtttaaaatacctagccttagtaatattgttgcgtctgttattgtattaagtgtcgttgttatctttgtcaaagatcaatcagatttatcgttatatgtctttaccattgctattgtgacggtgttgaatcaattacctttgtttatctatttaaaacgatacattagctttgtttcggttaattggatacacgtctggcaattgtttcgttcgtcattggcatacttattaccaaatggacagctcaacttatatactagtatttcttgcgttgttcttggtttagtaggaacataccaacaagttggtatcttttctaacgcatttaatattttaacggtcgcaatcataatgattaatacatttgatcttgtaatgattccgcgtattactaaaatgtctatccagcaatcacatagtttaactaaaacgttagctaataatatgaatattcaattgatattaacaatacctatggtctttggtttaattgcaattatgccatcattttatttatggttctttggtgaggaattcgcatcaactgtcccattgatgaccattttagcgatacttgtattaatcattcctttaaatatgttgataagcaggcaatatttattaatagtgaataaaataagattatataatgcgtcaattactattggtgcggtaatgaatttagtattatgtcttgttttgatatatttttatggaatttacggtgctgctattgcgcgtttaattacagagtttttcttgctcatttggcgatttattgatattactaaaatcaaagtgaagttgaatattgtaagtacgattcaatgtgtcattgctgccgttatgatgtttattgtgcttggtgtggtcaatcattatttgcctcctacaatgtacgctacgctgctattaattgcgattggtatagtagtctatcttttattaatgatgactatgaaaaatcaatacgtatggcaaatattgaggcatcttcgacataaaacaatttaa

SEQ ID NO: 411775 - DNA, 477 bp, Staphylococcus aureus; identical to SEQ ID NO: 408657

SEQ ID NO: 411776 - DNA, 933 bp, Staphylococcus aureus; identical to SEQ ID NO: 407755

SEQ ID NO: 411777 - DNA, 711 bp, Staphylococcus aureus
atgatttcacacttgataacggatacttcgaagaagagacatcagatagcgactcagactcagacagtgattcagattcggacagcgactcagattcagacagcgactcagactcggatagtgattcagattcagatagcgactcagattcagacagcgactcagactcggatagtgattcagactcagacagtgactcagactcagattcagatagcgattcagactcagacagcgattcagactcagatagtgattcagattcagacagcgactcagattcagatagcgactcagattcagacagcgactcagattcagacagcgactcagactcagacagtgattcagactcagatagtgattcagattcagatagcgactcagattcagacagtgattcagactcagacagcgattcggactcagacagtgactcagattcagacagtgattcggactcagatagcgattcagactcagatagcgactcagattcagacagcgactcagactcggatagcgactcagattcagatagcgattcagactcagacagtgattcagactcagacagcgactcagattcagatagcgattcggattcagatagtgactcagattcagacagcgactcagattcagacagtgattcggactcagactcagacagcgattcagattcagatgcaggaaaacatacacctgtga

SEQ ID NO: 411778 - DNA, 969 bp, Staphylococcus aureus
atgaaacatctacttgttattcatactggtggcaccattagtatgtcacaagaccaatctaataaagtagtaacaaatgatattaaccctatttcactgcatcaagatgtcataaatcaatatgcacaaatagatgaattaaatccttttaatgtaccatcacctcatatgacaatccaacatgttaaacaattaaaggatattattttagaagcagtaacaaataaatattatgatggtttcgttatcacgcatggtaccgatacgttagaagaaactgcctttttacttgatttaatattaggtatcgagcaacctgttgttattactggcgcaatgcgctcgtctaatgaaattggttctgacggattatataattatatttccgctattcgcgttgcctctgatgaaaaggcccgtcataaaggcgtgatggttgtatttaatgatgaaatacatacggcgcgtaatgttaccaaaacacatacgtctaatacaaacacatttcaaagtccaaatcatggtccgctaggtgtattgacaaaggatcgtgtgcaattccatcatatgccatatcgccaacaagcattagaaaatgtcaatgagaaactaaatgttccattagtaaaagcatatatgggtttgccaggtgacatttttagtttttatagtcgtgaaggtatcgatggtatggttattgaagcgttagggcaaggcaacatacctccaagcgcattagaaggcattcaacaattagtatctttaaatatacctattgtgctagtttcacgttcctttaatggtattgtgagtccaacttacgcatacgatggtggtggttaccaacttgcacaacaaggttttattttttctaacggcttgaatggtccaaaagcaagattaaaattattagttgcgttaagcaacaatttagataaagctgaaatcaaatcatattttgaattataa

SEQ ID NO: 411779 - DNA, 618 bp, Staphylococcus aureus
atgattcagactattgtaactgctgctattctttatattgctacagcagtagatttattagtgattttattaatattttttgctagagcaaagactaggaaagaatatcgagatatttatattggtcagtatttgggttctattattttaatattagttagtttgtttttagcttatgtattaaattatgttcctgaaaaatggatattaggattattagggttaataccgatttatttaggtattaaagtagcaatttatgatgattgtgaaggagaaaaaagagctaaaaaagaattaaatgagaagggtctatcaaaattagttggtattgttgctatagtaacgatagcaagttgtggtgctgataatattgggttgtttgttccgtattttgtgacattaagtattactgatttattaattactttatttgtctttttaattttaattttcttcttggtatttactgcacaaaaattagctaatattcgagggattggagaaattgttgagaaatttagtcgttggattatggctgttatttatatagctttaggtttatttattattattgaaaatgacactattcaaacaattttaggatttatattttaa

SEQ ID NO: 411780 - DNA, 348 bp, Staphylococcus aureus
atgagttatgaaaatgcttgtgatgtaatctgtgtacatgaggataaagttaataatgctttaagttttttggaagatgataaatctaagaaattacttaacattttagaaaaaatttgtgatgagaagaagttgaaaatcatattatctttgattaaagaagatgagttgtgtgtttgtgatatttctttgatattgaaaatgagtgttgcttcaacttcacatcatttaagacttttatataaaaatgatgtacttgatttttataaagaggggaagatggcatattactttattaaagacgatgagataagagagtttttctctaaaaatcaggaaggtttttga

SEQ ID NO: 411781 - DNA, 927 bp, Staphylococcus aureus
atgacttcatctactaatgttaaagctttaattgaaaaaaataataataaaaaagggaagcataatgacaaaattataccagttattttagccgcaatttcagcgatttccattttaacaacactaggtatattaatcacattgcttttagaaaccatcacttttttcaccagaattccaataactgaatttctattttctactacttggaatcctaccggttcagaccctaagtttggtatctgggcattgataatagggactttaaaaatcacagttattgcgactatatttgcagttccagtcgggcttggtgcagcaatttatttaagtgaatatgcaagtgaccgtgcacgacgcataattaaaccgatattagaaattttagcaggaataccaacaattgtgtttggtttctttgcactaacctttgttacaccagtattaagatctttcataccaggtcttggagaatttaatgctataagtcccggcttagttgtcggtattatgattgtccctctcatcacaagtttgagtgaggatgcaatggcatctgtaccaaataaaattcgagaaggtgcctatggacttggagcaactaaattagaagtagcaactaaagtcgtacttcctgcagcaacatcaggtattgtagcttcaatcgttctcgcgatttcaagagcaattggagaaacgatgattgtatcattagcggcagggagttcgccaacagcttcattaagtttaacaagttcaattcaaacaatgactggatatattgttgagatagcgacaggtgatgcaacatttggatcaaatatttattacagtatttatgctgtaggattcacattatttatctttaccttaatcatgaatttactttctcaatggatttctaagcgttttagggaggagtattaa

SEQ ID NO: 411782 - DNA, 390 bp, Staphylococcus aureus; identical to SEQ ID NO: 408590

SEQ ID NO: 411783 - DNA, 2424 bp, Staphylococcus aureus
atgacatataaaatgaagaaatggcaaaaattatccaccattacgttattaatggccggagtgattactttaaataatggtgaatttagaaatgttgataaacatcaaattgctgtggctgatacgaatgttcaaacgccagattatgaaaaattgaagaagacgtggctcgacgttaactacggttatgatcagtatgatgagaataatcaagatatgaagaagaagtttgatgctaaagaaaaagaagctaaaaagttacttgaagatatgaaaactgatacaaatagaacatatttgtgggatagtgcaaaagatttggataaaaagtccgcagacatgacaaaaacctatcgtaatatcgagaaaatcgcagaagcaatgcgacataaaaatacttcattaaaaacagatgaaaacaagttgaaaataacagatgcaattaagtggttacatcataacgtatatggtaaggatccagataagaaagtcacagatttaaccaccaatcgtaaagaaaaagattctagtaaaaagaataactcattgaattggtgggattatgaaattggtacgccaagagcattaacaaacacactacttctaatggacgatatgctcactaaagatgaaatgaaaaattattcaaaacctattagtacatatgcaccatccagtgacaaaattttatcttctgttggtgaatcagaagatgctaaaggtggaaatttagtagacatttctaaagtaaaacttttagaaagtgttattgaagaagatgaaactatgatgaaaaattcaatagattcatttaataaagtgttcacttatgttcaagattctgccactggtaaagctcgcaatggattctataaagatggctcttacattgatcatcaagatgtcccttacactggcgcttatggtgttgtactattagagggtatttctcaaatgatgccgatgataaaagaatctccttttaaacatacacaagataaagctacattaagcaattggattgacgaaggttttatgccattaatctataaaggtgaaatgatggatttatcaagaggtagagctatcagtcgtgaaaatgaaacgagtcatacagcgtcagcaactgtaatgaaatcattgttgagattgagtgataccatggatgattcaacaaaagctaaatataagcaaatcgtcaaaacttctgttaattctgattcaagttacaaccaaaatgattatttaaattcatattcagacatagataaaatgaaaaagttaatggatgatagcactatttctaaaaatgatttaacacaacaacttaaaatatataatgacatggatcgtgtcacctatcacaataaagaccttgactttgcatttggattaagtatgacatcgaaaaacgtcgcacgttacgaaagtatcaataatgaaaacttaaaaggttggcacaccggtgcaggcatgtcttatttatataacagcgatgtcaaacactatcgtgataacttttgggcaacagccgatatgacttgtcttccaggcactactactttaaatgatatgccatctactaatactaagaatgataaatcctttgttggcgggacaaaattaaataataaatacgcaagcatcggtatggattttgaaaatcaggacaaaactttaactgccaaaaaatcatatttcatattaaacgataaaattgtcttcataggaactggcattaaaagtactgattcatcaaagaatccagttacaagtgttgaaaatcgcaaagcagttgggtataaattatttaaaggtgatattgaaattaccacttcagatgttaatgctcaggaaacccattcagtctttttagagtccaacgatacaaaaaagaacattggttatcatttcttagacaagccaaaaataactgtaaaaaaagaaagtcatactggtaagtggagtgaaattaataaaagtcaaaaaacagatgacaaaaaagatgagtattatgaagtaactcaaacacataatacatctgacagtaaatatgcatatgttttgtatcctggtttatcaaaaagtgattttaaatcgaagaataataatgtaagtattgttaaacaagatgaagattttcatgtgataaaagataatgatggcgtatttgctggggttaattatagtgatagtactaaatcttttgatataaacggaactattgttgaattaaaagaaaaaggtatgtttgtaattaaaaagaaagataataacacatatgaatgtagtttttataatccgacatccacaaattccacttcaaataaagaatcaaaaatttcagttacaggttacactataactaatcaaagtgtctcaaattttaaagaatctgacatacactttgaattaactaaataa

SEQ ID NO: 411784 - DNA, 261 bp, Staphylococcus aureus
atggaacgagcaagaaaagaagtgaattacgctgcaaatacagatgctgttgctacacttttttctactaagaaaaactttactaaagacaatacagtagatgatgtaatcgaactaagtgacaaattatataatttaaaaaataaaccagataaatctacaatcacaatacaaatagggaaacccactattaatactaagaaagccttttatgatgataatcgtccaatagaatatggggtgcacagtaaagatgaataa

SEQ ID NO: 411785 - DNA, 717 bp, Staphylococcus aureus
atgagaaagcgtattatgaaaaaattaatttttatgacaacattgttattattaggaacaacagctacacaaacccctaattcgccattaaatgtttctactgacgctaaagcttatcatattggccaagacgaaacgaacatcaatgagttaattaaatattacacacaaccgcctctcacattttcaaatagatggttataccaatatgatgacggcaacatttatgttgaatttaagcgttattcttggtcagcgcatatacgattatggggtgctgaaagttggggcaacgttaatcaattaagagaccgctatgtagacgtgtttggtttaaaagacgaagacactagccagttatggtgggtatatcgtgatacatttacaggtggtgtaacacctgctgcatcaccttctgataaaccatatagtctttttgtccaatacaaagataaactacaaacaattattggtgcacataagatgtaccaaggtaataaaccaatattaacattgaaagaaattgattttcgagcacgtgaaacactaattaaaaataaaatattatatcatgaaaatcgcaataaaggtaaacttaaaatcatcggtggcggcaatgactttacaattgatttgagtaaaagattacattctgatcttgcaaatgtttatgttaaaaatcctcaaaaaataacagtcgaggtccttatcgattaa

SEQ ID NO: 411786 - DNA, 726 bp, Staphylococcus aureus
atgaaaaagaacatcacgaacaaaattgttttatctacagcattgttacttttaggaactacatcaacacaaccgcctaaagcaccaatcagtttttcatctgaagcaaaagcatacaatataagtgaaaacgaaacgaatatcaatgaattaatcaaatattacacgcagccacacctttcattttctggaaaatggctatggcaaaaccctaacggtaccatacatgcaacattacaaacgtgggtttggtacacgcatattcaagtatttggacctgaaagttggggcaacattaatcaattaagagataaatatgtagatatttttggtaccaaggatgaggatactatagaaggctattggacttatgatgaaacctttactggaggtgtaacaccagcagctacttcatctgataagccttataaattatttttaaaatataaggataaacaacaaactatgattggtggacttgagttttatcaaggtaataaaccagtaataactttaaaagaactagatttccgcgtacgtcaaactttaattaagaacaaaaagctatataatggagaatttaataaaggtcaaattagaattacaggtggtggtaatcattatacgattgatttgagtaaaaagttaaaactaactgacacaaaccgttatgttaaaaatcctcgacatgcagaaattgaagtcattcttgaaaaatctcattag

SEQ ID NO: 411787 - DNA, 999 bp, Staphylococcus aureus
atggccatttttaaatatatagagaaaaagggttatgaaggtaaatatactattctacgagaatactgtaaaaataaaaaacaaaatgagactaaaaaagcaactatacgcgtagaaactaatcccggtatagctgctcaagtagactggaaagaagatatggtaatgcatgataagtttggcagaacttatcaattcaacatctttctttacgttctacactattcaaaaatgaagtatatcacattaacttgggatagaaaacaagataccttatttgaatgtttaaaagacgcttttgaatacaccgaaggggttccaaaagaaatctggttcgataatatgagaactgtagttgatcgaccgagaacacaatataaaaaagtcgtttttaataatttattttatcaatttagtaaggatgccaactttgaacctattgcttgtagaccctatcgccctcaaacaaaagggtctgttgaatcattagctaaatttgttgaacagcgcttaagaccctatgattatgaattttatgatgctgtagaacttattgagctagtagacgatttatgtcacgaattgaatcacttagaaatttcacaagtaacagaacaacgacctatcgacgttttcaattatgaagaaaaagaacatttaaatttttttaatgccaagttactagatacttacatcgaaaatgagtgtataagaatcgtttctaaagaatcgatgattaactttagaaaaggtaaatactcggtacctactaaatacattggtgaagaagtacaagtgatattcaacaattctactgatgaattgctgatttattatgatggtgaattaataagacggcataatctatccgaaagaaaatttaattatatcgttgaagatatgagtgaaatattaaaatcagatgtatttaaacataaggatgacaaagaaattcttacgtatatagaaaattcattattactgtatgacgaaatttag

SEQ ID NO: 411788 - DNA, 822 bp, Staphylococcus aureus
gtgaaaaacattaatgaaattttaaataaatttgatttcaaaggatttaaacttcaagagaatagtaatgcaaaagggacatacctcattgtaagagaagacggatcaaatgccaatgaaacaatgagcgaaggtgaatataactttattacatttttatatttttattacttagtttatggtagtcacgagagtacaagtttaacttcaaataaaatcgttattatagatgatccaatttctagcttagatagtaatgtattatttattgttagtactttagttaagaatttgataaatgactgtagaaataataagaatggaatacaacaaatattcaatcttactcataatatttactttcataaagaaatcacttttttaggaagtagagaaaggttttcgcctaatgaagtaatgtatggaattattagaaaaaaggataatataagttattttaatacttatgagaataatcctatagaatcttcatatcaattaatgtggaaagaacttaattctgaagaaatgtcaccaataacatcatttaatactatgcgtagaatactagaatattattttaatattatagggggcatggattatgaaaaatgtattaataaatttgacggtatagacaaaatattatgtaaatcacttatttcaggaataaatgacggatcacattttataagcgatgattttgttattacctttgatgaagcaagtatgagaaattataaaagagtctttaagttagtctttgaaaaacttggacatatccaacactttgaaatgatgagtaagaataagattaaataa

SEQ ID NO: 411789 - DNA, 1971 bp, Staphylococcus aureus
atgtttaaagctaatgttgaaaataacaaaactataaagcctaattctgcaaaaatagaagaacttaaaaataaaataccagaatattttaatgcaaatggtgaatttaatattgaaaaattaaaatatgatttgcaggaaaataatgtagatgaattatcttccggatttcgtttagattttattggtaaagattattcgaaaaaacaagctggagaaaagccaacaagtgttattgttccagatcaaaaacataatactaaaatagaaaatcaaaatagtaaaaatttatttttcactggtgataatttagaagttatgcgtcatttgcattcaaattatcaagaagcaattgattgtatatacattgaccctccatataatacgggaggagatggttttgtttatccagatcatttcgagtataaagacgaacaattaaaagatatgtttggtttggatgaagacgagttaaaaaagctaaaatctattcaaggtaaatcaactcactcagcatggttgacatttatgtatccacgattatatttagcgaaaaagctattaaaagatacaggctctatatttatttccattgataataatgagcaagccaatttaaagcttttaatgggtgagatttttggtgaggctagctttgttactaatattgttcaaaaacatcgttctggagtatccaatgataaaataatttcagataatcataattatttattattttatgttaaaaatagagcaattgcagaaaaacatagacatgaatttggtacattaagaacagaagatgattttaaaaattacaataaaaatgataatgatggattaggtgattatactttaaatccagttacaggaccaggtggggctagaaaaggaaatccattttatgaatttctaggcattgaaaattattggcggtttagtaaagaaactatgaataaattatataaggagggaagaataattaagtctggtaaaactttatatcaaaaaacttatcgaagtgaaatggaaaataagaaaaaaggtgctacgacttggtgggacaatgctgggacaactagtactggaactaatgaaattaaaaaattatttaatgatactgtttttgattttcctaaacctacaaaattaattatggacattttaaagtttactaacactcctaaagatgcattgattctggatttttttgcgggttcctcaactactgcagatgctgttatgaaaattaatgctgaagatggtggagaacgtaaatttattatgattactttaccagaaccgacgtataagattaatatgaatggaattaaagtacccactaaagggggtatatctgcatttaatgctggttttaattcaattgatgaaatctcaagagagcgtataaaaagagcagcttcaaaaataaaaaatgagaatagagaattatcagattcatttgatggtggttttaaacactattattttgtatcaccaactattaaaatgcttgatcaattagaattatcagatgacatacaattagatttatttgatgatatggttaatcaattttcctctgagtatctgactgaagctcattccgaaactaagccagaaaatgattttccatggcatggatataacttaggcaatgagacaagtggaactcagaccattttacaaacttggttagtttcagatgggtatcaatttggtatagatgttaaaagtgttgaattttctggatatacagcttcattagtagatgatactcgtatttatttaattaaccaaggatggagtactaaaagtactaaatctttagttaacttaataggaaaaaatgaaatcaatattcaaactgttatagtctatggctatagttttgaacttgaaagattacgagaattagaaattgcacttaaacaattggatacccaagtcaatatgattgtgaggtattaa

SEQ ID NO: 411790 - DNA, 2889 bp, Staphylococcus aureus
atgaaaataaatttagtagagctgtatcatcaaaaaatagcacttaatgcaattataaatgaatttccaaagattgatttaggtgaattagattatcatggggttagcaagatgttcgaaaatccaacaataaaagggcgataccaaagtaatagtaatattgatataaaaatggaaacggggactggtaaaacatatgttggtactcgaatgatgtacgagttacatcaaaagtttggtttatataaatttattgttatagtaccatctccagctattaaagagggctggaagaattttttaacagcaagatattcgcgacaacattttgctgagtattatgaaaatgtgaaattggatgttaatacaatatatgctggtgattttaacacaaagtctggtaggcgtatatttccacctcaattgaataatttcattgaagggactagactaaatactaatcagatagaagtactattaataaacgttgatatgttgaaatccaaaaatatgacacgggacgattataatcaaactttacttaataattactcaagaccttttgatgcactaaaagcaactaaaccaattattattatcgatgaaccacacagatttccgagagataaaaagaactatcaagttatagaaaaacttaaaccgcaagtcattattagatttggagctacatttccagaaatgaaaaaaggaactggaaaaaaagcgattaatattaaagattactatcgtggcaagcctcaatttgaattaaatgctattgacagttttaatcaagggcttgtaaaaggtgtagatatatactatccaaaattgacgccagaacaagcccaaaatagatatacggttgatagtgtaaaagccaaagagatagttttgaaaaaaggaaagaacagatggacgttaggtataggagagaatttagcaaatgttgattcgttatttgagggggacttaagctatgcaggtgctaaaactttgtcaaacaacctagaaattagcaagggtatggatttattgcctggtacatttacaactagctatcaggagctaattattaatgacgctatcaatcaacattttgaacatgaaattaataattttatgagagataacataaaagaaaatttcaaaccaaaagtaaaaacactttcattatttttcattgattctattaggtcatataggaataaagatggttggctaaaacagacttttgaaagacttttaaaagttaaacttagaaagttaataaaagaatatgaagcaaaaaaaatgccaagggagattgaatacttagatttcttaaaagcgacatataatagtcttaatagcgaaaaccaaatggtacatgcaggttactttggtgaagatagaggttctggcgaagaagcaattcaagctgagataaatgatatcctcaaaaataaagagagaatgttgagttttaaggattctaatggtaattggattacaagaagattcttattttctaagtggacattaagagaaggttgggataatcccaatgtatttgtaattgcaaaactaaggacatccggatcagaaaatagtaaaatccaagaggttggtagagggttacgtttaccagttgatgaaacaggtcatagactaacgcaagatgagtttccaagtaggctttcatttttaattggatatgatgaaagggatttcgcagaaaaattaattggagaaataaattctgatgtagatgttaaattaaatgaggataaactaacagatgagatgattaataaaattgttaaacatagacaacaaactcaaccagattttaatgacgaatccttattagaacaattagatgaacaaaacttaatcaatagaaaaaatgagtttaaaaatgatgtggaaattgatggtatgaagaaatcaggatttgaatggcttttagaattatatccagaagttaatgtacctaaattaaaagcagacaaagtcagagatatgaataaaaaacaaccttctttaaagattaaattaaataaagaaaattggaataagctaagatacttatgggaaaatttatctagaagatatatgttggaattcaaaaaaatgaatgaaaatgaactatatttctttattgagaatttgttgaatgacgatggtttatttgttaaacaacaaccagaaagagtacatcagtcaatagaaagtgatgatgaaggtaaacaaaatatcaaggagtcaatttcagaatataactctagaaatgaatacatctatatgaactatggtaaatttttaaaacaacttgtacttaaaactaaagtaccgatatctataatgcataaaaatttactttccatcttaaaatttaaatacaatagtgatgaacgattcttgagtgagctaagtttgaataacataataagagaatttaacaagcgttttgaagaaaaatatagtcaaagttacgaatataaaaaattagatttttctgccactacaactatttatgattcagaaatatcagagtttaaagattgggtagatgcaaattatttaggtactaacgttgaaaataatattcaaactgaaaaacgatttttatatgaaagaccaccagttagatatgatagtgtaacacctgagttagagttgttaaaaagaaattacgataaaaatgtaattgtatttggtaatttgcctaaaaaagcgatacaagttcctaaatatactggtggcacaactacgcctgattttatctatatgatagaaactgatgaacaagatgcaaaatatcttattgttgaaacaaaagcagaaaacatgagactaggagataaaagtattggtgaaatacaaaaaaattctttaacacattag

SEQ ID NO: 411791 - DNA, 1290 bp, Staphylococcus aureus
atggtagaaacagaaaaaatttcattacttgaaaaagtccgagatggtttggtggataaaacaggagcaaaacctaagttaccaacaactattaccgatttaaatcaagaaactttagaggtatatagaataccactaaagtttctatattataatgatagaaatggaagaattgcttctgtaatatctagagtaagcgacgatataaaagttgcttatgaatttgaagataataattataataaaagtattgaaaatatgatatatgagaccaatacctctgctttaaaaaacactaaaaaatctattaaagataaagggcagcaagtatttggttatgtattagatgatggtagagttattgacggaaatagaaggtttactgcgctcagacaattagaacaagaaacaggtaagactttttattttgaagctgtaattttaccatttacttatgataaaaaaactgatcgagctaaaatcaagcaattagaacttgcaatacaaatggggattgaaggcaaacaagattatgataaagttgatgaagcggtggatatttatcaaactattgaggttgaaaagttgatgactatagctgattatgcaaaagagtcaaataaaacaaaaaaaactattgaaaaacaattaggttctgcaaaattaataagaaaatttttagattttattaatgcacaagagaattcctattacattataaaagatgccggcatttattcactatttgaagaagcagtacctaaatttaataaggcttatcctaaaggtgggccttcgttagaggatgctattgaaaaattttttagttttgtccttttgcaaattcaatctgggacaagcacacgtgcatatgctggaagagattattttgaaaatattgttttttcagatggaggtaatcagcaattttatacagaaacagaagatgccatcgatagtttgagagataaattagaagaaaaaaatatagaatctaccgcagatttaaaaagtacgctaagccgatcgatacctgaactaagagaagtaagttcttcatataacaaagttgtaagcaaaagtaaacgagatgctaatgtggaaagttttattgataatattaaatcaatatctgaaagcctaagcgatatggaaaaaggcaatggtttaccaagtagccttaattttgaacagtttgatttaaaacaattaaaagaaattagagaaatgctaataaaaataaataattgtagtagagagttgatagatatttatgaacatgaaatctga

SEQ ID NO: 411792 - DNA, 1875 bp, Staphylococcus aureus
atgaacatgaaatctgagatacaattagttgaagttaataatgaatttgtttttgttgatagtatagacagcgatcttacgaacagaaaggttcatagaactctaaagaaattcacaagttatttttccgatttcactaattatgttttaaaagccgatttatcacatcttgaaatagaaaatttagtttcagagctgaataaagcattatctaaggtatcgaaacctgatatattaatagataataatataaaaagttttattagtaaaaatgcttatgctattaatgaacaaaaaattgctggtttaacaattaaagaaaatgattcaagatggcaagaagaactttcaaattttaataatgttataaatcaagagattacaagaccattaaaacctattcaagtaagagcgagtttttatttagcaactatgaaaagagcagccaatttttctgtacctggatctggtaaaacagctatgatgtatggcacgtttgcttttttgtctagtgaaataaagcgtaaagttgataaattaatagttatttctccaattaatgcatttgaagcttggcgttcagaatttattgaagtttttcaagataaaagagaattacactttatgaacctaagagataaaaaatataatgatttaggtaaagtacgaacagattggggaagtgcaaatgtcattgttttgaattttgaagcaatacaaaagtatgtaggggttttaaatgaacttattaatgataagacaatgatagtttatgatgaggttcataggataaaaggtactaatagtagcagagcaagttatgcattaactttaggtcctaaaagttattacagatacgttttaactggtaccccaattccaaatagttatcaagacatatttaacttcttaaatattttatataaagatgagtatgatacttattttggttggaatattgctgatttacaaaatcctaatattgatgaaattaatgataaactgcaaccttttttttggcgtacaaataagagcgatttggaagtgccagaagctgataaggatagtatattgtgtgttaaccccagtaatattcaaaatgaattagcagtagcaatatacgaaaatgaaccggggatattagccatttatataaggcttttacaagcttcaactaacccagaattattgcaaaagaatattaactatagcgaactaggattgttgaatgatgaattaaatttcgatttggataaagcattaaataaagaagaagaaaaacaagtaaaacaacaaatttataattcttttgatttaaaaaatgtaacttctccaaaatttgaaaaaggtattgaattgattgaaagcttagttagccaaggaaaaaaagttctagtatggggattgtttgtagatacaatgaataaaatcaataaaaggttactagaaagtgatattaattcaatattgatttatggagaaacacctaaagaagatagggtagagatgatcaataattttagggatggaaatgcacaagttctaatatctaatcctaatacattaggcgagtccatatctttacatcagacagtacatgatgcaatatattttgaatataattttaatttaacgtttatgttgcaatcacgtgatagaatacatcgtttagggttaaataacaatcaatatacaaggtattattatttaatgactgaaggggatagagcccataaaggttttatcgataaagcagtttataacagactgaaggaaaaagaagatgtaatgttaaatgctattgatggaaatactttaaagccaatgattgaagatgattacttagaagatgttaagaaaattattattgaatga

SEQ ID NO: 411793 - DNA, 501 bp, Staphylococcus aureus
atgactttcgaagagaaactaaatgaaatgtacaacgagattgcgaataagatcagtgggatgataccagtagaatgggaaaaggtatatacgatggcgtatatagatgatgaaggaggcgaagtgttttactattacacagaacctggaagtactgaattatactattatactagtgtattaaataaatatgatatattggaatcagaatttatggattcagcgtatgagttgtataaacaatttcaaaatttaagagaattgtttatagaagaagggctagagccatggacatcatgtgaatttgactttacaagagaaggtgaattaaaagtttcatttgattatatagattggataaatacagagtttgatcaattgggtcgtcaaaattattatatgtacaaaaaatttggggttataccagaaatggaatatgaaatggaggaggttaaacaaatcgagcaatatattaaagagcaagaagaaactaacctttag

SEQ ID NO: 411794 - DNA, 195 bp, Staphylococcus aureus; identical to SEQ ID NO: 410035

SEQ ID NO: 411795 - DNA, 450 bp, Staphylococcus aureus
atgatgccgaaatatcgagtgtgggacgaatatacaggaagaatacacgatgttgtaggattcgacttcattgagactgaagttcactatgaaaactacgcggaagcagaagctttaatacatgcaagagattttaaagatgtagaacttatgcaaagtacaggacttaaagacaaaaacaacaacgaaatatatgcgggagatatagttgagtttgaagatgaaatattagagatgccagacgatgaatctgtaataggaacaattaatagagcagtaatatctattgatgttgtaaatggtattcaattaaaagattttatgtttgagggcgcagtctccgaaaatgattactttgagtatatagacataaaatccttccttagatatgactgtgaggttaaaggcaacatatttgaatcatcacatttattggaggtaacagaatga

SEQ ID NO: 411796 - DNA, 285 bp, Staphylococcus aureus
atgaactatgaaacaggggtccaactaggtgtaatggacgctaggttgaagaagatgagaaaacaacgtgatgagtacaagaagcaacgtgatgagcttattggggatataggtaagttaagagaacgcaacaaagagctggagaagaaagcaagtgcatgggataggtattgcaagagcgttgaaaaagatttaataaacgaatttggcaaagatggtgaaagagttaaatttggaatggaattaaacaataaaacttttatggaggaagacactaatgaataa

SEQ ID NO: 411797 - DNA, 537 bp, Staphylococcus aureus
atgactaacacattaacaattgatcagttacaagagttattacaaatacaaaaggagttcgacgatagaataccaacgctgaacttacgagatagcaaaatagcatatgtagttgaattctttgaatggtttaatacattggaaacgtttaagaactggaagaagaaaccaggtaagccgttagacgtacaacttgatgaattagctgacatgttggcgtttggattgagtattgcgaatcaagtaggagtgtcatcagaagagataaaagaagcgattgaatcaagttttaaagatacagaatttcacaaaatgtttaattttaaagataaagaatttgctcaagacgcagttgttagtacaccacagataatattcaaagaattttatcccgaccaacaagcaattgttatagtgatagacatagcttacaacttatattctatcgaccaactcattgacgcatacaaaaagaaaatgaaaaggaatcatgaaagacaagatggaacagcagacgcaggaaaaggatacgtgtaa

SEQ ID NO: 411798 - DNA, 1482 bp, Staphylococcus aureus
atgcgatatacattttcaaatgatttaggaacactttttaccattattttagccattggattcatcattaacttagtattggcttttgttattatctttttagaaagaaataggcgtacagcgagttcaacttgggcatggctatttgtactttttgtcttaccattgattggttttattctttacttgttttttggtagaaccgtttcggcacgcaaattgaataaaaacaatggtaacttgttaacggatttcgatggacttttaaaacaacaaatagaaagctttgataaaggtaattatggtactgataacaaacaagttcaaaaacatcatgatttagtacgtatgcttttgatggatcaagatggttttttaactgaaaataataaagttgatcatttcattgatggaaatgatttatatgatcaagttttaaaagatattaaaaatgcaaaagaatatatccatttagagtactatactttcgctttagatggtttaggtaaaagaattttacatgctttagaagaaaaattgaaacaaggtctagaagtaaaaatattatatgatgatgttggatctaaaaatgttaagatggcaaattttgatcactttaaatcattaggtggcgaagttgaagcattttttgcttctaaattacccttattaaatttccgtatgaataacagaaatcatagaaaaatcatcgtaatcgatggtcaactaggttatgtcggaggatttaacattggtgatgaatatctaggattaggtaaactagggtattggagagatacgcatttacgtatacaaggggatgcggttgatgcactgcagttgcgatttattttagactggaattcgcaagcgcaccgtccacaatttgaatatgatgttaagtatttccctaaaaagaacggaccattgggcaattcaccaattcaaatagctgcaagtggcccagctagtgactggcatcaaattgaatatggttatacaaaaatgattatgagcgctaagaagtcggtatatttgcaatcgccttatttcattccggataactcatatataaatgccattaaaattgcagctaaatcaggtgtagatgttcatctaatgattccatgtaagccagatcatcctttagtttattgggcgacattttcaaatgcctctgacttattatcaagtggtgttaaaatttatacgtatgaaaatggatttatacattctaaaatgtgcttaattgatgatgaaatcgtatcagtgggcacagcaaatatggactttagaagttttgaattaaattttgaagtaaatgcctttgtatatgatgaaaatcttgctaaggatttaagggtggcttatgaacatgatattacaaaatcaaaacaactaaccaaagaatcatatgccaatagaccgctgtctgttaaattcaaagaatcgttagcaaaattagtttcgccaattttataa

SEQ ID NO: 411799 - DNA, 249 bp, Staphylococcus aureus
atgtcagcttctatttcatgcaagttggcggagctccaacatagtggaattggattcccaatttctacagacattgcaaattggggaaacgggccacaaactcagaaactggtggaaagtcagcttaaaataacatgcaagttggcggggctccaacatagtgaaatcggatttctaatttctacagacattgcaagttggggaaacgggccacaaactcagaagctggtggaaagtcagcttctatga

SEQ ID NO: 411800 - DNA, 135 bp, Staphylococcus aureus
atgacattactaaattcaatgcatcataaagaccgtgaacataaacaaaagccatgttcactatttagacatatattcacactaacccaatttccgaataaatattatgatttcaatcctattattaatatttga

SEQ ID NO: 411801 - DNA, 744 bp, Staphylococcus aureus
atgaaaagtgtgaaaaagttgagtgaagaattaggggttagtaagcaaacgatttttaataatattaagcgattgaatatagagacaataaaacaggaaaacacttcgtttattaaagaagataccgatatagaaaaaatcattcaaagagtaaatgaaaataaaaagaaatatggttttgaaagtactactgaagacaaacaaaaaaaagggtcggataatattaattttgaatcgaaaagcgatgctcaaatagtagaaatccttaaaaatcagattgatactttaaataatcaaattgaaaaacaagaaagtcgtcatgaaacaacaattgaattttacagaaaagagttgcaagaaagatcaaaattgcttgaaaatcagcaagttctggcattagagagtaataaaaagattcaaaaattagaaaatcaattagaaaaagaaaaacaccttaattatccctttgatacatctactaacactagacaaaacgttgatgcacaagaaaaaacatatactactaatcctgtaaatattaacagagatcaggaagaaactaaagaaacagagattcaatataaggatatatctggaagtcaaagcgacgaaagtacacaaggtgaagaagcaaaaagagaagacgtttcagctaatctaaatgacaatgatagtgatatagaagaaaagagtgaagaaacggaacctaaaaaggggttttggagtcgtttgtttggtagctaa

SEQ ID NO: 411802 - DNA, 141 bp, Staphylococcus aureus
atgaaaaatagttatcaagctcaaaaagtaattgaagaagttataaaagaaaaaccaaaagcacggtggttatttcttacgttatcaacacgaaatgtaatagacggtgaacatttagaacaaagtttaaaaagaatttaa

SEQ ID NO: 411803 - DNA, 786 bp, Staphylococcus aureus; identical to SEQ ID NO: 410901

SEQ ID NO: 411804 - DNA, 447 bp, Staphylococcus aureus
atgaaaaagaattatatatttgtgatagttgttgcaatattaatagtactaattgttattgcatacgcgtttcacaaaagtaaaaaagaacattatattgagacacaagaaaaacgaatcgatttgtattttaagtataacctcaaaaattatcatggtttgaaaataacaaaatttcaaaaaggtccgatgggttcatattctgctaaaggttatataaataataacaaaaaatataagttccaggcgtttattggtttaggtgatgataaaaatcaatataatagcgactttgaatataatgaagaaaaaataggggaattattgaaagagaaagatgctaaagaccgattaacagtggatgaaataattgaaaaagaacacttggacaaaaatgaatatgaagccgagccaccgttatttttcttttcaggatcgttggattag

SEQ ID NO: 411805 - DNA, 1221 bp, Staphylococcus aureus
atgagtaatacacaaaagaaaaatgtgccagagttgagattcccagggtttgaaggcgaatgggaagaaaagaagttaggggagttttgtgagtttaataatggaataaatgctaaaaaagaacagtatggaattggtagaaaatttataaatgttttagatatattaaacaacaatttcattacttatgaaagtataattggtaaagtttctgtacctgaaaatgtcgaaaaaaataataaagttgaatttggagatttagtgtttttaagaagttcagaaactcgagaagatgttggcttatgcaatgtgtatttagataaaaattatgcattgtatggtgggtttataattagagggaaaaaggtatcggactataatcctatatttctcaaagaagctttgaatatacctaaaaaaagatatgaaattggtgcagcggctggtggtagtacaagatttaatgttagtcaagatatattaagaaaaataaatgtgaagtttccaccaattaaagagcaacaaaaaatcggtgacttatttagtaaactcgaccgacaaattgaattagaagaacaaaaacttgaattacttaaacaacagaaaaaaggctatatgcagaaaatcttctcacaagaattgcgatttaaggatgagaatggaaatgattatccagattgggaagagaagaaaatgggggcaatcactacaatgtttagtggaggtactccgcaatcaacaaacacgagatattataaaggggatattccatttataagatctggcgagatttctaaaacatacactgaactgaaaattaatgaagaagctcttaataattcatcagctaaattagttgaagtaggagatttattatatgctctatacggtgcaactagtggtgaagttgcaataagtaaaattaatggtgcaattaatcaagctgtattgtgtattagaacaaatgaatctgttgaattcttattgaattatttattttttagtaaaaataaaattttaaatactttcattcaaggtggtcaaggaaatttatcggcaaatattataaaaaatttaattatagaaactcctacaataatagaacaacgaaaaatagctgacttttttggtattattgataacttaattgaaatacaggaacgaaaacttgaatttttaaaacagaggaaacaatcgcttctacaaaaaatgtttgtttaa

SEQ ID NO: 411806 - DNA, 1989 bp, Staphylococcus aureus
atgtttaatgaaaaagatcaattagctgttgatacgctacgtgcactaagtatcgacacaatcgaaaaagcgaattctggtcatccaggattacctatgggagctgccccaatggcttacactttgtggacacgtcatctgaattttaatccacaatctaaagattacttcaatagagaccgtttcgtattatctgcagggcatggttcagcactattgtatagcttgttacatgtttctggtagtttagaattagaagaattaaagcaatttagacaatggggttctaaaacaccaggtcatcctgaatacagacatacagatggtgtagaagttactactggaccacttggacaaggttttgctatgtcagtaggattagctttagcagaagatcacctagcagggaaatttaataaagaaggatataatgttgtagatcattacacatatgtattagcttctgacggtgatttaatggaaggtatttcgcatgaagcagcttcatttgctggacataataaattaagtaaattagttgttttatacgattcaaatgatatttcattagatggcgaattaaacaaagctttttctgaaaacacaaaagctcgttttgaagcatatggttggaattacttactagttaaagatggtaatgatttagaagaaattgataatgcgattactactgctaaatctcaagaaggaccaacaattatcgaagttaaaacaacaatcggatttggttcaccgaataaagcaggaactaatggtgttcatggggcacctttaggtgaagatgaaagaaaattaacatttgaaaattacggtttagatcctgaaaaacgttttaatgtttcagaagaagtatacgaaattttccaaaatactatgttaaaacgtgctaatgaagatgaatctcaatggaattcattattagaaaaatatgcagaaacatatcctgaattagcagaagaatttaaattagcaattagtggtaaattgcctaaaaattataaggatgaattaccacgttttgaacttggtcataatggtgcatctcgtgctgattctggtactgttattcaagcaatcagtaaaactgtcccttcattctttggtggatcagcagaccttgctggttcaaacaaatccaatgtaaatgatgcaactgattatagttctgaaacacctgaaggtaaaaatgtgtggtttggtgtacgtgaatttgctatgggtgctgctgtaaatggtatggctgcacatggaggtttacatccatatggtgcaacattcttcgtatttagtgattatttaaaaccagcgttacgtttatcatcaattatgggattaaatgcaacgttcatcttcacacatgattcaattgcagtaggtgaagatggtcctactcatgaaccaattgagcaattagctggattaagagccattccaaatatgaatgttatccgtcctgctgatggtaatgaaacaagagtagcatgggaagttgccttagaatctgaatctacacctacttcattagtattgacacgtcaaaacttaccggtattagatgtaccagaagatgtagttgaagaaggcgttcgaaaaggtgcctatacagtttatggctctgaagagacaccagaattcctattattagcttcaggttcagaagttagtcttgcagttgaagctgctaaagatcttgaaaaacaaggtaaatcagtacgtgttgtttcaatgcctaactggaatgcatttgaacaacaatctgaagaatataaagaatcagttattccatcaagcgtaacaaaacgtgttgcgattgaaatggcttcaccgcttggatggcataaatatgtaggtactgcaggtaaagttattgctattgacggctttggcgcaagtgcacctggcgatttagtagttgaaaaatatggatttactaaagaaaatatcttaaaccaagttatgagcttataa

SEQ ID NO: 411807 - DNA, 234 bp, Staphylococcus aureus
atgattgaggctggtatattagacggagacaaagtaattgttcgcagtcaaaccatagcagaaaatggagacattattgttgctatgactgaggaagatgaagcaactgtcaaacgcttctataaagaaaaaaatcgttatcgattacaacctgaaaatagtacaatggagccaatttacctcgacaatgttgctgtaattgggaaagtaattggtttgtaccgcgaaatgtaa

SEQ ID NO: 411808 - DNA, 156 bp, Staphylococcus aureus; identical to SEQ ID NO: 410157

SEQ ID NO: 411809 - DNA, 717 bp, Staphylococcus aureus
atgaataaaaatataatcatcaaaagtattgcggcattgacgatattaacatcagtgactggcgttggcacaacaatgtttgagagtattcagcaaacagcaaaagccgaacataatgtgaagcaagtacaaaacacaaatatttctccgtataaaggaattgttagaattggatcagctacaggatttgtggtaggaaaaaatacaattttaacaaataagcatgtattacctggtgttcaagttggtagcacaattcttgctcatccaaatggcgaaaatgataccggtggatactataaagtcaaaaaaatcattccatacgcaggatctgaagatttagcaatagttcaagttgaagaagattctgtttatccaaaaaataaaaaattcagtgaaaatactgaagtccttaaatttgcgagtggcgctcaagtaaatgatcgattatcaattgttggttaccctaaaccatataaaaataagcatcatatgttcgaatcaacaggaaagatattatccatcgatggtaatcaaatgacttcagatgcatttgctgaaggtggcaattcaggatcaccagtgtttaattcaaatcatgaagttattgcaattgcatatgcggtcgatgtcaaaaatgatgcaacaaaaaaatcatatttagtttatttcacgcccgagatcaagaaattcattgcagataacacagaaaaataa

SEQ ID NO: 411810 - DNA, 300 bp, Staphylococcus aureus
ttggcatcggaagctaaagcgaatgaaagagttgcaatggttggttatccagcgccatataaaaataaacatcatatgtatcaatcgactggcacgatattatcaatagtaggtaataaattaacatctgacgtcttttctgaaggtggcaattcagggtcaccagtttttaataataaaaatgaagttgtaggtgttcaatatggtggagatttcggtaaaagtacgaagaaagaatcttatgctgtgtatttaactccagagattaagaaattcatcgcagataacacaggtaaataa

SEQ ID NO: 411811 - DNA, 1074 bp, Staphylococcus aureus
ttgaatgatttagaccacctacaaatcatttttgaatctactggtatttattcaagaggtatgactcgattttgtcgcataaatcaaattaattatattgagatgaacccgttagaagctaaattcagaacaagttctttaagatcatggaaaaccgatcaagctgatgcacataaacttgcgcaattagcacctactttaaaagcaatggaaaccttacctatgtatgaatctatcttctttgagttgcgagagcgtgcacgttttcatctagaaattgaaaatgaacaaaatcggcttaaatttgaaattgttgaacagcttcatcaaacttttcctggtttagaaaaattatttagtagtcgatattctatcattgcacttaacatcgcagaacgatttactcatccagatatggtgagaaatatggatattgatactcttatttcttatatattcaattcgactgataaaggtctatctatgaataaagctgaaaatcacgcacaccaattggttaacattgctcgggaaagctatccgaatgtcgatagacattcatttcttgtagaaaaagcacggttgttaattagacatttaaaacaatctatacaacatcttaaacaattagatgaagacatgattcaattggcgcaacaacttgattgttttgaacatattcattcaataccaggcattggaaaactatctgcagctatgattattggggaacttggaaatattacgcgatttaaatctaataaacaattaaatgcatttgtaggcatcgatatcaaacgatatcaatcaggtagtacgcaaagtagagacacaattaataagcgtggcaataaaaaagcaagaagattactgttttgggtggttatgaatataataagagggcagcatcattatgacaatcatgtagtcgattattactataagctaagaaaacagcctcatgagaaagctcacaagactgccgtcatcgcttgtattaatcgtctcttaaaaacgattcattatttagtaatgaatcaaaaattgtacgattatcaaatgtccccacattag

SEQ ID NO: 411812 - DNA, 201 bp, Staphylococcus aureus; identical to SEQ ID NO: 411612

SEQ ID NO: 411813 - DNA, 1017 bp, Staphylococcus aureus
atgcaaatgggtgaagaaatgcttaaaaaagttgttaaagaagttaaaggcgttgaaattaatggcgctttcccacgcatgacatataaagaagcgatgcgtcgctatggttctgataaaccagatacacgttttgaaatggaattaattgacgtttctcaattaggacgtgatatggactttaaagtatttaaagatactgttgaaaatgatggtgaaattaaagcaattgtcgctaaaggtgcagctgaacaatatactcgtaaagatatggatgctttaacagaatttgtaaacatctatggtgctaaaggattagcgtgggttaaagttgtggaagatggtttgacaggtccaattggacgtttctttgaaacagaaaatgttgaaacattacttacattaactggtgctgaagctggtgacttagtaatgtttgttgcagacaaaccaaatgtcgttgcacaaagtttaggtgcattacgtgtcaaattagctaaagaattaggtttaatcgatgaaacaaaattaaacttcttatgggtgacagattggccattattagaatatgatgaagatgcgaaacgttacgttgcagcacatcatccatttacatctccaaaagaagctgatattgctaagcttggcactgcgccagaagaagctgaggcaaatgcttatgacatagtattaaatggttatgaattaggtggcggttcaatcagaattcatgatggtgagttacaagaaaaaatgttcgaagttcttggatttactaaagaacaagcacaagaacagttcggcttcttactagatgcatttaaatatggtgcaccaccacatggcggtattgcattaggattagaccgattagtcatgttattgactaatagaacaaacttgagagatacaatcgcattccctaaaacagcatctgctacatgtttattaacgaatgcgcctggtgaagtttctgataaacaattagaagaactttctttgcgaattcgtcactaa

SEQ ID NO: 411814 - DNA, 774 bp, Staphylococcus aureus; identical to SEQ ID NO: 405863

SEQ ID NO: 411815 - DNA, 507 bp, Staphylococcus aureus; identical to SEQ ID NO: 405800

SEQ ID NO: 411816 - DNA, 168 bp, Staphylococcus aureus
ttgagacaagtgcaatgcattatctgtgatgcaaaagtatttatagatgagcgcacaactgagtctaaacgacttaaaaacaatcctattcgaacatttatgtgtgatgattgtaaaagtcgattagacacacctaaacaacgtgcgcaacactatccgctcgattaa

SEQ ID NO: 411817 - DNA, 147 bp, Staphylococcus aureus; identical to SEQ ID NO: 405867

SEQ ID NO: 411818 - DNA, 1143 bp, Staphylococcus aureus; identical to SEQ ID NO: 405869

SEQ ID NO: 411819 - DNA, 396 bp, Staphylococcus aureus
atgtcttcaacagatagattgctgagtgacaatacttcaggaatcgcatatgcaggcccaatacccataattttcgggtcaacgcctactgccttaaaaccaacgaatcgtgcaataggtgtcacgccgagttctttcactttatctccagacattaaaactacaaatcctgcaccatcagaaagtggggcagatgttcctgcagtcacagtgccgtcagctttaaatactgtacgtaatttggctaatgcctccatcgtggtgtcagggcgtataaattcatcttggtcaaagatatttgtgtgtacttttggtcctgcgtttgtatattcaactgagtttacttgtattggaataatttcatctttgaaccgaccatcacgttgtgcgtcatag

SEQ ID NO: 411820 - DNA, 777 bp, Staphylococcus aureus; identical to SEQ ID NO: 404947

SEQ ID NO: 411821 - DNA, 522 bp, Staphylococcus aureus
atgaaagttattcaagcaagttataacttcactgactattacatagaagcccgtacaagattagaagaagatatgcaccaaccaaatatcattccttatcacaaagggttttatcgtgctttcagcaaattacacacaactacatttaaatatcaggcacagtcaccacaagatatcattgatagtttagacgaccatcatcatttgtttttatttgttagcgaaggtttacttaaaggttatttataccttgaaattgattcacaacagtcaatcgccgagattaaatacttcagttctcatgtagattaccgtttgaaaggtatcgctttcgagttgcttgcgtatgcattgcaatatgcttttgataattttgatattagaaaagtttattttaaaattcgtaataaaaataataaactcatcgaacgatttaatggtctaggtttccatatcaactatgagtacattaaattcaaattcgaatcacgtaacgtaaaagatcaaacaatccctgaataa

SEQ ID NO: 411822 - DNA, 906 bp, Staphylococcus aureus; identical to SEQ ID NO: 406286

SEQ ID NO: 411823 - DNA, 147 bp, Staphylococcus aureus
atgataccaggagaaattattacaaaaagtacagaggttgaaattaataaccatcatcctgaaacagttatcgaagttgaaaatacaggagatcgaccaattcaagtgggctcacattttcattttatgaagcaaatgcagcattag

SEQ ID NO: 411824 - DNA, 249 bp, Staphylococcus aureus
atggcatatggaaaacatttagatattccagctggagcagctgttcgatttgaacctggggataaaaaagaagttcaattagttgaatatgctggcaaacgtaaaatttttggttttcgtggtatggtcaatggtcctatcgatgagtcacgtgtctatcgcccaactgatgaaaatgatgaatatgcaggtgtattcggagataacggtgctgaaaacgtgaataaaaaaggaggaaaaagatcatga

SEQ ID NO: 411825 - DNA, 393 bp, Staphylococcus aureus
atgaagaaaatcgctacagctactatcgcaactgcaggattcgctacaatcgcaattgcatcaggaaatcaagctcatgcttctgagcaagataactacggttataatccaaatgacccaacatcatatagctatacttacactattgatgcacaaggtaactaccattacacatggaaaggtaactggcatccaagtcaattaaaccaagataatggctactacagctattactactacaatggttacaataactatactacaacaattacaacaacggttatagctacaataactacagccgttacaacaactactcaaataataatcaatcatataactacaacaactataatagttacaacacaaacagctaccgtactggtggtttag

SEQ ID NO: 411826 - DNA, 369 bp, Staphylococcus aureus
atggctccatcatcaaatggccgttcaatctcaagtggttatacttcaggacgtaacttatacacttctggtcaatgtacatactacgtatttgatcgtgtaggtggtaaaatcggttcaacttggggcaatgcaagtaactgggctaacgcagctgcaagagctggttacacagtgaacaatacaccaaaagctggtgcaattatgcaaacaactcaaggtgcatacggtcacgttgcatacgttgaaagtgttaacagcaatggttcagtaagagtttcagaaatgaactatggttatggcccaggtgttgtaacttcacgtacaatctcagctagccaagctgctggttataacttcattcactaa

SEQ ID NO: 411827 - DNA, 174 bp, Staphylococcus aureus
gtgccagaaaacatccaactgcctactataattcctaccgctagtataattaaaattgcaggcattgcagtatttaaacgttctgcaatgcctttttctaaatcttgccatgttaagcctacacgttttgcaatccatgtggcatatgctgaggcaataattaataatacttga

SEQ ID NO: 411828 - DNA, 330 bp, Staphylococcus aureus
atggatggtgcgtctagttggcaaaagtttagaaacatcacattcccgcatgtcatttacgccacagcgccattgttaattatgcaatatgcaggtaatttcaataattttaatcttatttatctatttaataaaggcggtccaccagtgtcagggcagaatgctggtagtacagatatcttgatatcttgggtgtataatctgacatttgagtttaacaacttcaacatgggtgcagttgtgtcattaattattggatttattgttgctattgtcgcatttattcaattcagacgtacaagtacgtttaaagatgagggaggtttataa

SEQ ID NO: 411829 - DNA, 138 bp, Staphylococcus aureus
gtgatatctattgcaaacgcattacatttaatgttaagtttcggtatgtttatcgtcactttcattgatatagaagtcgcaatgattaatttaaacaataaaaaacaaccatcatttccaaactttgacatagaatga

SEQ ID NO: 411830 - DNA, 555 bp, Staphylococcus aureus
atggaattaattaagattttattccaaaaagcacaggaagttgattctattgataaacttgataacgtgattcaaattgtaggtaaaaatgcaaagcataatttaactaactctgaaattaaagctttagcaaaaatgtacttaacaaatgatgttgaaattaaaactgcgcaattaaaaggtaaagatgatatgttaaatggtatttactattatcatccaagtgttgaaagcattcaaaaatatgcaaacttacttcgtaaagacttagaattatcacctattaatgataaaaatgatttcttagatcaacgtgtcattaatcattatggttcattaataccattaacgcctttagataatagtttattgagaaaagaacaaaatgatacgacagataaagataagacatctaacgagaacagtgattcaactaataacagtgattccagcaatcaacaacaacctgctacagatcaaaactcaaatcaaaatcaaggtggcacacaacaagcgccacaagcttcaaataaccaaaatggtgttgtaaattaa

SEQ ID NO: 411831 - DNA, 603 bp, Staphylococcus aureus
gtgaaatcatgtttaaaccatattgaaagcttagaggaagtacaagcactaaatctaaagttttattatggtcaggaaataagaattaccgatcaaatccttaatgatattgatcgaaaagttattaacggtattaatgattcacgctatttactaatagaatttccatcaaatgaagttccacactatactgatcaattatttttcgaattacagagtaaaggctttgtaccgattattgcacatccagagcggaataaagcaataagtcaaaaccttgacatactatacgatttaattaacaaaggtgctttaagtcaagtgacaacggcgtcattagcgggtatttccggtaaaaaaattagaaaattagcaattcaaatgattgaaaacaatctgacacatttcatcggttcagatgcgcataacacagaaatcagaccgttcttaatgaaagacttatttaatgataagaaattacgtgattattatgaagatatgaacggatttattagtaatgcgaagttagttgttgatgataaaaaaattcctaaacgaatgccacaacaagattataaacagaaaagatggtttgggttataa

SEQ ID NO: 411832 - DNA, 606 bp, Staphylococcus aureus
atgaagcgattattcgatgtagtgagttcaatatatggtttagtagttttaagtccgattctgttaattacagcattactaattaaaatggaatcacctggaccagccattttcaaacaaaaaagaccgacgattaataatgaattgtttaatatttataagtttagatcaatgaaaatagacacacctaatgttgcaactgatttaatggattcaacatcgtatataacaaagacagggaaggtcattcgtaagacctctattgatgaattgccacaattattgaatgttttaaaaggagaaatgtcaattgtaggtcctagaccagcgctttataatcaatacgaattaatcgaaaaacgtacaaaagcgaacgtgcatacgattagaccaggtgtgacaggactagctcaagtgatggggagagatgatatcactgatgatcaaaaagtagcgtatgatcattattacttaacacatcaatctatgatgcttgatatgtatatatcatatataaaacaattaaaaatatcgttacttcagaaggtgtgcatcactaatgagaaaaaatattttaattacaggcgtacatggatatatcggtaa

SEQ ID NO: 411833 - DNA, 645 bp, Staphylococcus aureus; identical to SEQ ID NO: 405073

SEQ ID NO: 411834 - DNA, 159 bp, Staphylococcus aureus
atggatggactactaataaatttaaagttttacacattaaaatcaaaaaccattcaattattctatggaacagacaaatttctgttatggaatttgtctgtttttcaaaagtatagggaggcaaatagagatggaaaagccgtcaagagaggcatttga

SEQ ID NO: 411835 - DNA, 771 bp, Staphylococcus aureus; identical to SEQ ID NO: 405521

SEQ ID NO: 411836 - DNA, 408 bp, Staphylococcus aureus; identical to SEQ ID NO: 405496

SEQ ID NO: 411837 - DNA, 627 bp, Staphylococcus aureus
atggaaaaaaatgtagaaaaatcattcataaagataggtttatattttcaaatagcttatatagtactcatggctataactttatgtgggtttgtaatttgctatggactaattttcggccttttctatttattgtcaggtagcagagctgattatttaatagtaacgatagttatatcggcaataatttctatatttgtaattatactttcaatcgtacctgtcatcgtattggcatctgacttatttaaagaaaggatttcaaaaggtgtcatattaattgtattggctattatcgctttagtattatgcaactttgtatctgcaatactctggtttgtttcagccatatctattttaggtagaaaaaaattagtagctgcagcagatactaccactattcaaaaaagtaaagggaacgcaaatcaagcatcacataaagacacgtgtaaaaaggaacttgatagtcaagacatgatggaacatcctgaggttaaaaatcccacgactaaaaaccttgaaggatttaacgaagaaatacataaagatgaagctacaactaaagttgtcagtgataacacggaaccgcctattgaatcaaaagaccatgtctcgaaaaaagattga

SEQ ID NO: 411838 - DNA, 777 bp, Staphylococcus aureus; identical to SEQ ID NO: 405494

SEQ ID NO: 411839 - DNA, 924 bp, Staphylococcus aureus; identical to SEQ ID NO: 406870

SEQ ID NO: 411840 - DNA, 315 bp, Staphylococcus aureus; identical to SEQ ID NO: 406871

SEQ ID NO: 411841 - DNA, 1029 bp, Staphylococcus aureus; identical to SEQ ID NO: 406872

SEQ ID NO: 411842 - DNA, 261 bp, Staphylococcus aureus
atgaagcatgctgttcaaattatgcaaacgttaaaaatgttagcgcataaaatgaataaagcgattgtcattgtgttacatgatattaactttgcgtcctgttattcagatcagattgtagcattgaaaaacggacaactagttaagtcagatttgaaagataatgtcattcaaagtagtgttttaagtgatttatatgacatgaatattcaaattgaacatataagaaatcaaaggatttgtttatattttaaggattga

SEQ ID NO: 411843 - DNA, 1200 bp, Staphylococcus aureus; identical to SEQ ID NO: 405211

SEQ ID NO: 411844 - DNA, 156 bp, Staphylococcus aureus; identical to SEQ ID NO: 409270

SEQ ID NO: 411845 - DNA, 189 bp, Staphylococcus aureus; identical to SEQ ID NO: 407438

SEQ ID NO: 411846 - DNA, 2046 bp, Staphylococcus aureus; identical to SEQ ID NO: 405609

SEQ ID NO: 411847 - DNA, 438 bp, Staphylococcus aureus
atggcttgtaatacacgtccaaccatcatgattgggaaattcattgaaatcgcacagattaatgaaccaattgtaaagagtactaacgcaactaaaaataattttcgatatgaatatttattaaatagatacgccgtaattggtattaaaataccgtttactaacatgaatcccgtcatcaaccattgccctgttgacgcagaaatattaaattccgtattaatttttggtaaagcaacatttaataatgtttggtttaaaatcgcaataaacataccgaataataatgccgctaatattttaccgcgtgaaacaccttcaccaaaaataaagtttttatgttctttttttattttttcattcactttatattcttctgattcaggatttttagcagcaactgcttcctcatccttattattagtgaatgcttcttga

SEQ ID NO: 411848 - DNA, 174 bp, Staphylococcus aureus; identical to SEQ ID NO: 406665

SEQ ID NO: 411849 - DNA, 603 bp, Staphylococcus aureus; identical to SEQ ID NO: 406664

SEQ ID NO: 411850 - DNA, 303 bp, Staphylococcus aureus; identical to SEQ ID NO: 406669

SEQ ID NO: 411851 - DNA, 693 bp, Staphylococcus aureus; identical to SEQ ID NO: 406670

SEQ ID NO: 411852 - DNA, 2193 bp, Staphylococcus aureus; identical to SEQ ID NO: 406671

SEQ ID NO: 411853 - DNA, 2004 bp, Staphylococcus aureus; identical to SEQ ID NO: 406672

SEQ ID NO: 411854 - DNA, 1200 bp, Staphylococcus aureus
atgaagcgtacattagtattattgattacagctatctttatactcgctgcttgtggtaaccataaggatgaccaggctggaaaagataatcaaaaacataacaatagttcaaatcaagtaaaagaaattgcaacggataaaaatgtacaaggtgataactatcgtacattgttaccatttaaagaaagccaggcaagaggacttttacaagataacatggcaaatagttataatggcggcgactttgaagatggtttattgaacttaagtaaagaagtgtttccaacagacaaatatttgtatcaagatggtcaatttttggacaagaaaacaattaatgcctatttaaatcctaagtatacaaaacgtgaaatcgataaaatgtctgaaaaagataaaaaagacaagaaagcgaatgaaaatttaggacttaatccatcacacgaaggtgaaacagatcctgaaaagattgcagaaaaatcaccagcctatttatctaacattttagagcaagatttttatggtggtggagatacaaaaggtaagaatattaaaggtatgacgattggtttagctatgaatagtgtttattactataaaaaagaaaaagatggatcgacttttagtaaaaaactagatgatagcgaagttaaaaagcaaggtaaacaaatggctagtgagatattatcaaggttacgtgaaaatgatgatttaaaagatataccaattcattttgcaatttataagcaatcaagtgaagattcaatcacaccaggtgaatttatcactcaagcgactgcagaaaagagtcaaacaaagcttaatgaatggcataatatcaatgaaaaatcagctttattaccttcttcaacagcagcagattatgatgaaaatttaaataataatttcaagcaatttaatgataatttgcaatcatatttttctaatttcacacaagcagtagggaaagttaaatttgttgataaaaagccacaacgattagtagtagatttaccaatcgattactatggacaagctgaaacaattggtattacacagtacgttactgaacaagcgaataaatatttcgataaaatcgataactatgaaattcgtattaaagatggtaaccaaccacgtgctttaattagtaagacaaaagatgacaaagaaccgcaagttcatatttacagtaattaa

SEQ ID NO: 411855 - DNA, 264 bp, Staphylococcus aureus
gtgctatttgcactttactggaaaggtttgacacgtgccggtgctgtaagtggaatggtttcaggtgccttagtcgttatcgtttggattgcgtggattaaaccattggcacatatcaacgaaatattcggcttatatgaaattattcctggatttattgtaagtgtaatcgttacatatgttgtaagtaaacttactaaaaaacctggtgcatttgttgaaactgacttaaacaaagttcgtgacatcgttagagaaaaataa

SEQ ID NO: 411856 - DNA, 1119 bp, Staphylococcus aureus; identical to SEQ ID NO: 406624

SEQ ID NO: 411857 - DNA, 594 bp, Staphylococcus aureus
ttgaaaataggttatgcaagagtttcaactggattacaaaatctgaatttacatgaggaccgattaaacgcatatggttgtgaaaagatatttagcgaccatattagtggttcaaaaagtaaaagacctggattagataaagcaattgaatttgcgagatcaggagatacgattgttgtttggagactcgacagactaggacgtaatatggaggatttaatcacattagttaatgagcttaacgaacgaggtgtaagtttccatagtttagaagaaaatataacgatggataaatcaagttctaccggacaattattatttcatttattcgcagcgtttgcagaatttgaacgtaatttaattttagaacgttcttcagctggccgaattgcagcacgtgctagaggacgctatggaggtagacccgaaaaattaaatcaaaaagatttaaacttacttaagacactttatgataatggcacgccaattaagacaattgcagagcagtggcaagtttcacgtacaacgatttatcgttacctcaataaattggaggaaaaggaagatgaaaaacaaggagaagtatctaactaa

SEQ ID NO: 411858 - DNA, 1443 bp, Staphylococcus aureus; identical to SEQ ID NO: 408240

SEQ ID NO: 411859 - DNA, 990 bp, Staphylococcus aureus; identical to SEQ ID NO: 406598

SEQ ID NO: 411860 - DNA, 780 bp, Staphylococcus aureus; identical to SEQ ID NO: 405499

SEQ ID NO: 411861 - DNA, 1779 bp, Staphylococcus aureus; identical to SEQ ID NO: 405500

SEQ ID NO: 411862 - DNA, 1737 bp, Staphylococcus aureus; identical to SEQ ID NO: 405501

SEQ ID NO: 411863 - DNA, 1257 bp, Staphylococcus aureus
atgattaatcagtctatatggcgcagtaactttcgcattttatggctcagtcagtttatagcgattgctggactgacagtacttgtgccattattgccaatttatatggcatcactacaaaatctatcagtcgtagaaatacagttgtggagtggtatagcgattgctgctccagctgtaacgacgatgatagcttcgccgatatgggggaagctaggtgataagatcagccgaaaatggatggtgttaagagcgttacttggtttggcggtatgcttatttttaatggcattgtgtacgacaccattacagtttgtacttgtgaggttattgcagggactatttggtggtgttgttgatgcatcaagtgcgtttgcgagtgcagaggcgccagctgaagatcgtggaaaggtattaggaagactgcaaagttcagtcagcgcagggtctcttgtggggccattaattggcggtgttacagcttcgatattaggttttagtgcgttactgatgagtattgccgttattacttttattgtctgtattttcggtgcattaaaattgattgaaacgacacatatgccaaaatcacaaacaccaaatattaataaaggtattcgccgttcatttcaatgtctattatgcacacaacaaacatgtcgatttattatcgttggcgttttagcaaactttgctatgtatggcatgctaactgcattatcaccacttgcttcatcagtgaatcatacagcgatagatgaccgtagtgtgattggatttttacagtccgcattttggacggcttcgatattaagcgcgcctttatggggacgctttaatgataaatcatatgttaaatcagtatatatatttgccacgattgcatgtggttgtagtgcgatactgcaaggtttagcgacgaatatagagtttttaatggctgcaagaatacttcaaggattaacatatagtgcattgattcaaagtgtcatgtttgttgtcgtgaatgcgtgtcatcaacaacttaaaggcacatttgttggaacgacgaacagtatgttagttgttggtcaaattattggcagtcttagtggcgctgccattacaagttatactacaccagctactacgtttatcgttatgggcgtagtatttgcagtaagtagtttatttttaatttgttcaaccatcactaatcaaatcaacgatcacacattaatgaaattatgggagttgaaacaaaaaagtgcaaaataa

SEQ ID NO: 411864 - DNA, 903 bp, Staphylococcus aureus
atgcagtcattaggcgcattaaggctaacgcctacgcgttacatgaaaaacggagaacaagcagaacaattattacgtcagcttatagaaaaagatgaagcactagctaagtatgtcatggtttgtgatgaaacagcttggtggtcatatatgggtcaagataatgatattttcaaagatcaattaggtcatctaactgttcagctaagaaagtatcccgaagtgctagccaaaaatgatacgcaacagctagtgtcaatggcagcactcgcggcaaatgatcgcactttatatcaaatgatttgtggaaaagataatatttctaaaaatgatgtcatgacgttatttgaagatatcgcgcaagtctttttaaaggtaacactatcatttatgcaatacggcgcattaccagagttgcatggtcaaaatatattgttgtcatttgaagatggacgtgtacaaaaatgcgtgttacgtgatcatgatactgtcagaatttataaaccatggctaacagcacatcagctttcattgccgaagtatgtcgtcagagaagatacacctaatacgctaattaatgaggatttggaaacattctttgcttattttcaaacattagctgtatcggtaaatctatatgccattattgatgcaattcaagatttatttggtgtaagtgagcatgaacttatgtcgttgttaaaacaaattttaaaaaatgaagtggcaactatttcctgggttacaactgatcagctagctgtcagacacattttatttgataaacagacgtggccattcaaacaaattttattaccattgctatatcaacgtgatagtggtggaggtagtatgccttcaggtttaactaccgtaccaaatccaatggtgacatatgattaa

SEQ ID NO: 411865 - DNA, 315 bp, Staphylococcus aureus; identical to SEQ ID NO: 406588

SEQ ID NO: 411866 - DNA, 1077 bp, Staphylococcus aureus; identical to SEQ ID NO: 406589

SEQ ID NO: 411867 - DNA, 312 bp, Staphylococcus aureus; identical to SEQ ID NO: 406590

SEQ ID NO: 411868 - DNA, 858 bp, Staphylococcus aureus; identical to SEQ ID NO: 406591

SEQ ID NO: 411869 - DNA, 357 bp, Staphylococcus aureus
atgaaaaagaaaaaaggttttggtcttggtattagtttaatcgccatcatgttaattgtatgtattgtattagtaatcatgatgatgactggcggaaagaaagatacatactatggaattatgaaagataatactactattgaaaaaatgattagtgaaaaagatgaaagcattgagaagaacgttaaattaccttcagatgcagacgtttcagttaaaaaaggcgactttgtaattgtttataaattagcagattcagataaaattgttaaagttaaaaaagttgaccatgacgatgtaccacatggtttaatgatgaaaattcatgacatgggcaaaatgcacatgaaacactaa

SEQ ID NO: 411870 - DNA, 639 bp, Staphylococcus aureus; identical to SEQ ID NO: 405011

SEQ ID NO: 411871 - DNA, 231 bp, Staphylococcus aureus
ttgaaatacgctgatgtaaatgaaataaatgtaggtatccgtcaaactgggcgccatttggtagcagaagtgatagatgcgggaaatggttttgatccaagttctaagcctaaaggttctggactcggtttatatggaatgaatgagcgagctgagttagtcagcggtagcgtcaatattgaaacgaaaattggtgagggtaccaatgttacattgaacattccaatttga

SEQ ID NO: 411872 - DNA, 291 bp, Staphylococcus aureus
atgttatttatttcttggttaggtttatttttattttataaaaacgaatttgatagtgaaaatcctaatcctgcagttaatgccatagcaattattataaaattatttgcttttggaggaatattttatataagtctaatagttcctgtaacacagcaagaagagatttttatagggttaagtatattcatcaatataattgttgatgctcttcttgttaggtcatattttaattacgcgttatataagagtattaagaaagatatcgaaaatgaaggtaagacaatgtaa

SEQ ID NO: 411873 - DNA, 750 bp, Staphylococcus aureus; identical to SEQ ID NO: 404938

SEQ ID NO: 411874 - DNA, 558 bp, Staphylococcus aureus; identical to SEQ ID NO: 407098

SEQ ID NO: 411875 - DNA, 963 bp, Staphylococcus aureus; identical to SEQ ID NO: 407097

SEQ ID NO: 411876 - DNA, 942 bp, Staphylococcus aureus; identical to SEQ ID NO: 407096

SEQ ID NO: 411877 - DNA, 2937 bp, Staphylococcus aureus; identical to SEQ ID NO: 407095

SEQ ID NO: 411878 - DNA, 1197 bp, Staphylococcus aureus
atggttaaatttattcattgttcggatttacatttagatagtcctttcaaatctaagagtcatataagccctaaaatttttgaggatgttcaaaaaagtgcttatgaaagctttaaaaacattgtagatattgcattacaacaagatgttgattttgtaattatcgcgggtgatttatttgatagtgaaaacagaacattacgtgctgaaattttcttaaaacagcaatttgaacgtttacaaaatgaacaaatctttgtttatgtttgtcatggtaatcacgatcctttatcatcaaagatttcatcaaactggccagataatgtttctgtattttcaaataaagttgagacgtatgaagcaattactaaatctggtgaaacaatttatattcacggatttagttatgaaaatagagcaagttatgagaacaagattgatgaatatccatcaagtcaaggccaaaaaggcatacatattggtgtcttgcatggtacgtatagtaaatcttcagttaacgaaagatataccgagttcattttagaagatttaaacagtaaattgtatcattattgggctttaggtcatatacatgaacgtcaacaattaagtgatatgcctgtaattaactattcaggtaatattcaaggtagacattttaatgagcaaggtgaaaaaggttgcttattaatcgagggtgaccacttaaaattaaagactaaattttatcctacacagtatattagatttgaagaagcaactattgaaacggataagacatctaagcaaggtttatacgaggtcattcaaaactttaaagaacaagtgagagaagaaggaaaagccttttatcgtttaacgcttgttattaatagtgagacattaatttcacctcaagatttattacaagttgaagaaatgattacagattatgaagaaaacgaaaatcaatttgtatatattgatgagttaaaaatacaatatgcacaaaatgatgagtcacctttagttaatgaattttcagcggaattattagtcgatcaaactgtttttgataaagcgatgtcagatttatatttaaatccaagggcatctaagttcctagacgattatggaacattcgaccatacagcattagttaatcgtgctgaagaaatattaaaagctgaaatgagaggtgaacaaaatgataattaa

SEQ ID NO: 411879 - DNA, 867 bp, Staphylococcus aureus; identical to SEQ ID NO: 406859

SEQ ID NO: 411880 - DNA, 642 bp, Staphylococcus aureus; identical to SEQ ID NO: 406860

SEQ ID NO: 411881 - DNA, 1056 bp, Staphylococcus aureus; identical to SEQ ID NO: 406861

SEQ ID NO: 411882 - DNA, 1071 bp, Staphylococcus aureus; identical to SEQ ID NO: 406862

SEQ ID NO: 411883 - DNA, 762 bp, Staphylococcus aureus; identical to SEQ ID NO: 406863

SEQ ID NO: 411884 - DNA, 495 bp, Staphylococcus aureus; identical to SEQ ID NO: 406864

SEQ ID NO: 411885 - DNA, 1227 bp, Staphylococcus aureus; identical to SEQ ID NO: 406865

SEQ ID NO: 411886 - DNA, 1125 bp, Staphylococcus aureus; identical to SEQ ID NO: 406866

SEQ ID NO: 411887 - DNA, 321 bp, Staphylococcus aureus; identical to SEQ ID NO: 406867

SEQ ID NO: 411888 - DNA, 948 bp, Staphylococcus aureus
atggctttaaagatacggtatcaaactacatatgaaccgtttaaagtagttgatgatatcaaagagataccaaaagatgcgactattgtttggtatgattttgatgaaccgaatgaacaagaaaatgaatggtttaaagcacattttaattttaatgatttagaagtggatgatgcaattaacggtatgccacgagctaaatataaatcttataaagattatcaatacttagtattccatagtattatggggtcaaactattcaccaatagcactaaatatttttatacaagacaatgtattagtaacatatcatcatcaaacgttggaatcattaaataaagtagtctataagtatatgaatacattagatgcagaattagattgtgcagatgtcgtcatattaattttagatatgatggttgataaatatttcaactttgtatatgcacttgaagatagtgtttatcattttgaagaccgccatgtagatgatcgctttaataaaatggtcatggatagtgtctttaagttacgttcggatttgattaaagtaaaacgtgtactgtttcctatgcaagagctaattgatacaatgaaacaaaatggtgatttgattatagataataaacattcgctatacattcaacatatcgatgaccacttgattaagcaacgtaatatcattcgtactgctcaagaaatgacaaacgaaatacgagaaaattttgagtcatacacgtcatttagaatgaatagtattatgcaagtactgacattagtatcagttatattttcaccgttaacattcatagctgggatttatggtatgaactttgtaaatatgccggcattacatttacattatggatattatatttgcttagctgtaatgtttgttatagctgtcgtattaatcatctttttcagacgtaaaaaatggttttaa

SEQ ID NO: 411889 - DNA, 420 bp, Staphylococcus aureus; identical to SEQ ID NO: 406347

SEQ ID NO: 411890 - DNA, 309 bp, Staphylococcus aureus
atgaaacgatggtttactttattttgcgtaataaatctattcacctctgggtctttagcaacaatttgcttgtcaacttgttttgaagctggattgtttgttgttacattcactcgattattgatttctttatactctggtacaatgattcctaattttgattctggtacggcaaagtttttatctacaattttactagctgccgatggatctgcaatcttattcaatttatcttcagaagctacaaagtttttgttgtcagctaaattactaacatttacttttggtgcttttttaaattcatcgtaa

SEQ ID NO: 411891 - DNA, 267 bp, Staphylococcus aureus
atgcatgtaccaagtttccaaaataacacaacagcaacacatcaaaatgctaaagtaaataaagcatatgactataaatacttctattcttataaagtagttaaaggtgtaaaaaaacatttctcattttcaaaatcacatggttgtaaaattgttaaaccagcattaaacatcaaaaatgtaaattatcaatatgctgttccaagtaatagccctacacactacgttcctgaatttaagggtagcttaccagcaccacgagtataa

SEQ ID NO: 411892 - DNA, 366 bp, Staphylococcus aureus
ttgaatgcatttgttactgagttaaataatgacgtccgtcaatttttaagccaatatcaaggtgtttatattaattcatcaacttcaggttcaccattcgttttaaatattagttttcctggcgtaaaaggtgaagtattagttaatgctttttcaaaatatgacattatgatatctacgacaagtgcttgttcatctaaacgtaataaattaaatgaagtattggctgcaatgggattatcagacaaatctattgaaggtagtataagattatcatttggggctactacaactaaagaagatatagcgaggtttaaagaaatatttatcatcatttatgaggaaattaaggagttgctaaaataa

SEQ ID NO: 411893 - DNA, 1224 bp, Staphylococcus aureus; identical to SEQ ID NO: 406618

SEQ ID NO: 411894 - DNA, 495 bp, Staphylococcus aureus; identical to SEQ ID NO: 406620

SEQ ID NO: 411895 - DNA, 522 bp, Staphylococcus aureus; identical to SEQ ID NO: 411821

SEQ ID NO: 411896 - DNA, 264 bp, Staphylococcus aureus; identical to SEQ ID NO: 411855

SEQ ID NO: 411897 - DNA, 1200 bp, Staphylococcus aureus; identical to SEQ ID NO: 411854

SEQ ID NO: 411898 - DNA, 2004 bp, Staphylococcus aureus; identical to SEQ ID NO: 406672

SEQ ID NO: 411899 - DNA, 2193 bp, Staphylococcus aureus; identical to SEQ ID NO: 406671

SEQ ID NO: 411900 - DNA, 693 bp, Staphylococcus aureus; identical to SEQ ID NO: 406670

SEQ ID NO: 411901 - DNA, 303 bp, Staphylococcus aureus; identical to SEQ ID NO: 406669

SEQ ID NO: 411902 - DNA, 1296 bp, Staphylococcus aureus; identical to SEQ ID NO: 406668

SEQ ID NO: 411903 - DNA, 1167 bp, Staphylococcus aureus; identical to SEQ ID NO: 406667

SEQ ID NO: 411904 - DNA, 327 bp, Staphylococcus aureus; identical to SEQ ID NO: 406666

SEQ ID NO: 411905 - DNA, 174 bp, Staphylococcus aureus; identical to SEQ ID NO: 406665

SEQ ID NO: 411906 - DNA, 603 bp, Staphylococcus aureus; identical to SEQ ID NO: 406664

SEQ ID NO: 411907 - DNA, 1155 bp, Staphylococcus aureus
atgaaactttctttaaactctaattctaaatttttaagagcaccaagtattcgccaattttcaaatcgtatgaataatttggatgattgtgttaatttaactattggccaaccagacttcccgatgcctgatgttgtgaaaaaggcatatattgatgctattaacaatgacaagacatcatactctcacaataaagggttattagaaactcgcgaagcaattagtcaatacttcaaaaatcgttatcatttttcctatgatcctgaagaaattattgtgacaaatggagcaagtgaagcaatagacacaacgttacgttctatcatagagcctggagatgaaattataataccgggaccaatttatgcaggctacataccactcatcgaagtactaggtggtaaaccaatttatattgatacaacagcaacacaatttaaaattacacctgatgcattagaaagtcatatttctccaaagacaaaagctgtcttgttaaattatccgactaatccaactggcgtagttttaaaaagaaatgaagttttaaatatcgtaaatgtattaaaaaaatatccgttatttattattagcgatgagatttatgctgaaaatacatttagtggtaaacatgtatccttcgctgaatttgaagacattcgtgatcaattaatattaattggtggtttaagtaaatcacactcagcaaccggaataagaattggttttctattaggacctcaatatttgattgataaattaacatttatgcacgcctataattgtatttgtgccaatgttccagctcaaatagcatgtataacagcacttaacgaaggattagaagctcctaaatatatgaacgaagcttatgtagaacgaagaaattatttagtatctgaattaactaaattaggttttgagattaccgctcaacctgaaggcgcgttttatattttcccaagtattaaacatatcaccgatgacgatttcgaattttgtgtcgatttacttgaatcaacacatttagcaatcgttccaggctcatcctttacagaattcggtaaaggatttgtaaggatttcctatgcttatgaaatggatgttttaaaagaaggtatgaagagacttgctaaatatttaaatactaaataa

SEQ ID NO: 411908 - DNA, 1011 bp, Staphylococcus aureus
atgacttcattaaaagagagagattatttttttgacaacgcaagagcaattttaatattattagtcgtatttggacatatgttacaaccctacactagtggcgataaatatttatcagcattatacctagttatttatagtttccatatgccaacatttttgtttatatctggttatttcgcgaaaaatattgataaaccatactatttagaaaaaatttcaaaacgtttgatagtaccttatatgatattttttgcattcttttcaatttattatttcttaacaggtaaaagtgacgaattacaacttgatccttttaacccagtatttgcgttatggtttttgatcacgctatttttctttcatgtcattttagtaatagttagaagatttaatccatataaagtgctatcagtttcaattattatatctattggagcaggtttttcagataacatcgatagctacttaagcatttcaaggacaatcgtatttttcccaatattttacctaggctacattttcaccaaaaaacatacggctatttttaaaaataaaaaactaataccagtatctatcattacctttattttgttttttatcgtttacgtgattcatcctatcaatgcagattggttattgggaagttcaccatatacttcacttgaaaatgaaggacagagtatattcagtccttttaaacgacttatattatatggaattatattaatcgcaatgactgcgtttctaaatttaatgtcaacaaagaaaaaattatatacttatattggtagtcgtacgctatacgtatatttattacatggtttaattattggcattgttagaggatttgaatggtacccattcgataatcctatatcattaatgacgtatctttatttaataagtatatctgtaatcatcgtatatgtattatctacaaactttgtttgtaaatggacaaatccaataattaatttacaaagaccatcacagtttaaagattcataa

SEQ ID NO: 411909 - DNA, 420 bp, Staphylococcus aureus; identical to SEQ ID NO: 405336

SEQ ID NO: 411910 - DNA, 3771 bp, Staphylococcus aureus
atggcgaaaaaattcaattacaaactaccatcaatggttgcattaacgcttgtaggttcagcagtcactgcacatcaagttcaagcagctgagacgacacaagatcaaactactaataaaaacgttttagatagtaataaagttaaagcaactactgaacaagcaaaagctgaggtaaaaaatccaacgcaaaacattactggcactcaagtatatcaagaccctgctattgtccaaccaaaaacagcaaataacaaaacaggcaatgctcaagtaagtcaaaaagttgatactgcacaagtaaatggtgacactcgtgctaatcaatcagcgactacaaataatacgcagcctgttgcaaagtcaacaagcactacagcacctaaaactaacactaatgttacaaatgctggttatagtttagttgatgatgaagatgataattcagaaaatcaaattaatccagaattaattaaatcagctgctaaacctgcagctcttgaaacgcaatataaaaccgcagcacctaaagctgcaactacatcagcacctaaagctaaaactgaagcgacacctaaagtaactacttttagcgcttcagcacaaccaagatcagttgctgcaacaccaaaaacgagtttgccaaaatataaaccacaagtaaactcttcaattaacgattacattcgtaaaaataacttaaaagcacctaaaattgaagaagattatacatcttacttccctaaatacgcataccgtaacggcgtaggtcgtcctgaaggtatcgtagttcatgatacagctaatgatcgttcgacgataaatggtgaaattagttatatgaaaaataactatcaaaacgcattcgtacatgcatttgttgatggggatcgtataatcgaaacagcaccaacggattacttatcttggggtgtcggtgcagtcggtaaccctagattcattaatgttgaaatcgtacacacacacgactatgcttcatttgcacgttcaatgaataactatgctgactatgcagctacacaattacaatattatggtttaaaaccagacagtgctgagtatgatggaaatggtacagtatggactcactacgctgtaagtaaatatttaggtggtactgaccatgccgatccacatggatatttaagaagtcataattatagttatgatcaattatatgacttaattaatgaaaaatatttaataaaaatgggtaaagtggcgccatggggtacgcaatctacaactacccctactacaccatcaaaaccaacaacaccgtcgaaaccatcaactggtaaattaacagttgctgcaaacaatggtgtcgcacaaatcaaaccaacaaatagtggtttatatactactgtatacgacaaaactggtaaagcaactaatgaagttcaaaaaacatttgctgtatctaaaacagctacattaggtaatcaaaaattctatcttgttcaagattacaattctggtaataaatttggttgggttaaagaaggcgatgtggtttacaacacagctaaatcacctgtaaatgtaaatcaatcatattcaatcaaacctggtacgaaactttatacagtaccttggggtacatctaaacaagttgctggtagtgtgtctggctctggaaaccaaacatttaaggcttcaaagcaacaacaaattgataaatcaatttatttatatggctctgtgaatggtaaatctggttgggtaagtaaagcatatttagttgatactgctaaacctacgcctacaccaacacctaagccatcaacacctacaacaaataataaattaacagtttcatcattaaacggtgttgctcaaattaatgctaaaaacaatggcttattcactacagtttatgacaaaactggtaagccaacgaaagaagttcaaaaaacatttgctgtaacaaaagaagcaagtttaggtggaaacaaattctacttagttaaagattacaatagtccaactttaattggttgggttaaacaaggtgacgttatttataacaatgcaaaatcacctgtaaatgtaatgcaaacatatacagtaaaaccaggcactaaattatattcagtaccttggggcacttataaacaagaagctggtgcagtttctggtacaggtaaccaaacttttaaagcgactaagcaacaacaaattgataaatctatctatttatttggaactgtaaatggtaaatctggttgggtaagtaaagcatatttagctgtacctgctgcacctaaaaaagcagtagcacaaccaaaaacagctgtaaaagcttatactgttactaaaccacaaacgactcaaacagttagcaagattgctcaagttaaaccaaacaacactggtattcgtgcttctgtttatgaaaaaacagcgaaaaacggtgcgaaatatgcagaccgtacgttctatgtaacaaaagagcgtgctcatggtaatgaaacgtatgtattattaaacaatacaagccataacatcccattaggttggttcaatgtaaaagacttaaatgttcaaaacttaggcaaagaagttaaaacgactcaaaaatatactgttaataaatcaaataacggcttatcaatggttcctttgggtactaaaaaccaagtcattttaacaggcaataacattgctcaaggtacatttaatgcaacgaaacaagtatctgtaggcaaagatgtttatttatacggtactattaataaccgcactggttgggtaaatgcaaaagatttaactgcaccaactgctgtgaaaccaactacatcagctgccaaagattataactacacttatgtaattaaaaatggtaatggttattactatgtaacaccaaattctgatacagctaaatactcattaaaagcatttaatgaacaaccattcgcagttgttaaagaacaagtcattaatggacaaacttggtactatggtaaattatctaacggtaaattagcatggattaaatcaactgatttagctaaagaattaattaagtataatcaaacaggtatgacattaaaccaagttgctcaaatacaagctggtttacaatataaaccacaagtacaacgtgtaccaggtaagtggacagatgctaactttaatgatgttaagcatgcaatggatacgaagcgtttagctcaagatccagcattaaaatatcaattcttacgcttagaccaaccacaaaatatttctattgataaaattaatcaattcttaaaaggtaaaggtgtattagaaaaccaaggtgctgcatttaacaaagctgctcaaatgtatggcattaatgaagtttatcttatctcacatgccctattagaaacaggtaacggtacttctcaattagcgaaaggtgcagatgtagtgaacaacaaagttgtaactaactcaaacacgaaataccataacgtatttggtattgctgcatatgataacgatcctttacgtgaaggtattaaatatgctaaacaagctggttgggacacagtatcaaaagcaatcgttggtggtgctaaattcatcggcaactcatatgtaaaagctggtcaaaatacactttacaaaatgagatggaatcctgcacatccaggaacacaccaatatgctacagatgtagattgggctaacatcaatgctaaaatcatcaaaggctactatgataaaattggcgaagtcggcaaatacttcgacatcccacaatataaataa

SEQ ID NO: 411911 - DNA, 435 bp, Staphylococcus aureus; identical to SEQ ID NO: 405334

SEQ ID NO: 411912 - DNA, 471 bp, Staphylococcus aureus; identical to SEQ ID NO: 405333

SEQ ID NO: 411913 - DNA, 312 bp, Staphylococcus aureus; identical to SEQ ID NO: 406198

SEQ ID NO: 411914 - DNA, 1014 bp, Staphylococcus aureus; identical to SEQ ID NO: 406926

SEQ ID NO: 411915 - DNA, 1011 bp, Staphylococcus aureus; identical to SEQ ID NO: 406927

SEQ ID NO: 411916 - DNA, 1191 bp, Staphylococcus aureus; identical to SEQ ID NO: 406928

SEQ ID NO: 411917 - DNA, 762 bp, Staphylococcus aureus; identical to SEQ ID NO: 406929

SEQ ID NO: 411918 - DNA, 1518 bp, Staphylococcus aureus; identical to SEQ ID NO: 406930

SEQ ID NO: 411919 - DNA, 1305 bp, Staphylococcus aureus; identical to SEQ ID NO: 406931

SEQ ID NO: 411920 - DNA, 459 bp, Staphylococcus aureus; identical to SEQ ID NO: 406932

SEQ ID NO: 411921 - DNA, 234 bp, Staphylococcus aureus; identical to SEQ ID NO: 406933

SEQ ID NO: 411922 - DNA, 1155 bp, Staphylococcus aureus; identical to SEQ ID NO: 411907

SEQ ID NO: 411923 - DNA, 420 bp, Staphylococcus aureus; identical to SEQ ID NO: 405336

SEQ ID NO: 411924 - DNA, 3771 bp, Staphylococcus aureus; identical to SEQ ID NO: 411910

SEQ ID NO: 411925 - DNA, 435 bp, Staphylococcus aureus; identical to SEQ ID NO: 405334

SEQ ID NO: 411926 - DNA, 471 bp, Staphylococcus aureus; identical to SEQ ID NO: 405333

SEQ ID NO: 411927 - DNA, 555 bp, Staphylococcus aureus; identical to SEQ ID NO: 411830

SEQ ID NO: 411928 - DNA, 183 bp, Staphylococcus aureus
atggaaaatgaaaaaagaaccgtagattcgattgagaatcaacggttctttttaatcacggtttgttacgaaaattatttaaaaaatgatgtaaaactagagaagatatttttgattgattatttccagaatgatttgaatatgcctgttaaagcgtttttgaaagttgttgctgtttcttga

SEQ ID NO: 411929 - DNA, 687 bp, Staphylococcus aureus; identical to SEQ ID NO: 404983

SEQ ID NO: 411930 - DNA, 780 bp, Staphylococcus aureus
atgaaaagacttttatttgtgatgatagctttcgttttcatattggctgcatgcggaaacaattcgtcgaaagacaaggaagctagtaaagatagcaagacaattaatgttgggactgaggggacttatgcaccatttagtttccacgataaagatggtaaattaactggttacgatattgatgttattaaagcagtggctaaagaagaaggtttaaaacttaaatttaatgaaacttcttgggattctatgtttgcaggtttagacgcagggcgttttgatgtaatcgcgaaccaagtgggtattaatcctgatagagaaaagaaatataaattttctaagccttacacattctcaagtgctgttttagttattcgtgaaaatgaaaaagatattaaagattttgatgatgttaaaggtaagaagttagcacaaacattcacatctaattatggtaaattagctaaggataaaggtgctgatattacaaaagttgatggctttaaccaatcaatggatttattattgtctaagcgtgttgatggtacatttaatgatagtctgtcatacttggattataaaaaacaaaaacctaatgctaagatcaaagcaatcaaaggtaatgctgaacaaagtagatctgcatttgcattttctaaaaaagcagatgatgaaacagttcaaaaattcaatgatggcttgaaaaaaatcgaggaaaacggtgaattagctaaaataggtaagaaatggtttggtcaagatgtttctaaatctaaatag

SEQ ID NO: 411931 - DNA, 198 bp, Staphylococcus aureus; identical to SEQ ID NO: 407387

SEQ ID NO: 411932 - DNA, 2106 bp, Staphylococcus aureus; identical to SEQ ID NO: 406877

SEQ ID NO: 411933 - DNA, 399 bp, Staphylococcus aureus; identical to SEQ ID NO: 406878

SEQ ID NO: 411934 - DNA, 1506 bp, Staphylococcus aureus; identical to SEQ ID NO: 406880

SEQ ID NO: 411935 - DNA, 918 bp, Staphylococcus aureus; identical to SEQ ID NO: 406881

SEQ ID NO: 411936 - DNA, 954 bp, Staphylococcus aureus
atgggcaatcatttccaatacgcttttgaaaacaaacgttatcacacatggaattaccatttaaaaaataaatttggacaaaaaatatttaaagttgcattggatggcgggtttgactgtcctaatcgtgatggcactgtagcacatggtggatgtacattttgttctgctgcaggtagcggagactttgcaggtaatcgtgcagattcaatcgcagtacaatttaaagaaattaaagaaaagatgcatgagaaatggcacgaaggaaaatatattgcttattttcaggcatttacaaatacacatgcaccggttgaagtattaaaagaaaaattcgaacctgtacttaaagaaccgggtgttgtgggattatctattggtacgcgtcctgactgtctaccagacgatgttgtcgaatatttagcagatttgaatcaacgaacatacttatgggttgaattaggactacaaacaatccatcagtcaacatctgatttaatcaatcgtgcccatgatatgaaaacttattatgatggtgtggcaaaattacgtaagcataatatcaatgtatgtacacacatcattaatggcttacctggcgaagactatgacatgatgatggctactgccaaagaagttgcacaaatggatgtacaaggtattaaaattcatttacttcatttgttaaaaggtacaccgatggtaaaacaatacgataaaggtttattaacttttatgactcaagaagagtacacaaacctagttgtggaccaattagaagtgattccccctgaaatgatcgttcaccgaattaccggtgatggtccaatagatatcatggtaggtccaatgtggagtgttaataaatgggaagtattaaatggcatcgatgctgaattagcacgtagaaattcttatcaaggcttgcgttacaagtctaaggtgaagcaatga

SEQ ID NO: 411937 - DNA, 1182 bp, Staphylococcus aureus; identical to SEQ ID NO: 406575

SEQ ID NO: 411938 - DNA, 261 bp, Staphylococcus aureus
atgttgttatcatcaaatgaaagcacttcgttaggtgcattttgtcctatattattggcattgggatcagttgttggcgtgtatggcgctgtaattgcaactggtgcactaccgtttcctgccgttggatctgctggtgtagccgttggatctgctggtgttgcattaggatctgttggcgcagcacgtctgcttctctttttcggtctattagatgcttcttcagcaatcgcaactaactctggcttatcagacgaatga

SEQ ID NO: 411939 - DNA, 1032 bp, Staphylococcus aureus; identical to SEQ ID NO: 406904

SEQ ID NO: 411940 - DNA, 1092 bp, Staphylococcus aureus; identical to SEQ ID NO: 406905

SEQ ID NO: 411941 - DNA, 1263 bp, Staphylococcus aureus; identical to SEQ ID NO: 406906

SEQ ID NO: 411942 - DNA, 189 bp, Staphylococcus aureus; identical to SEQ ID NO: 406907

SEQ ID NO: 411943 - DNA, 984 bp, Staphylococcus aureus
atggataaagaaactaatgacaacgaatatagacgtcaaagtgaacatcgcacttcggcgcctaagcgaaaaaagaagaagaaaattaggaaattacctatcattcttctgattgttgtaattttacttatcgcattagttgtatatattgtacatagttacaatagcggtgtagaatatgccaagaaacatgcgaaagatgttaaagtacatcaatttaatggaccagtaaaaaatgatggtaaaatttctattcttgtactcggtgcagataaagcacaaggtggacaatcaagaacagattctatcatggttgttcaatatgactttatcaataaaaagatgaaaatgatgtctgtcatgcgtgatatttatgcagatattccaggatatggaaaacacaaaattaattcagcatacgctttaggtggtccagagctacttagaaaaacacttgataaaaatttaggaattaatcctgaatattatgcagtagttgattttactggatttgagaaaatgattgatgaattaatgcctgaaggtgtaccaattaatgtcgaaaaagatatgtcgaaaaatattggtgtatctttgaaaaagggtaaccataggttgaatggtaaagaattacttggttatgcaagattccgtcacgaccctgaaggtgacttcggacgcgtgcgacgtcagcaacaagtgatgcaaacattgaaaaaagaaatggttaattttagaacagttgttaaattaccaaaagttgcaggtattttaagaggctatgtgaatacaaacattcctgattcagggattttccaaacaggtttgagttttggtatccgaggtgaaaaagatgttaagtcattgactgtgccaatcaagaactcatacgaagatgtcaatacaaatactgatggtagtgcattacagattaataaaaacacaaataaacaagctattaaagactttttagatgaagattaa

SEQ ID NO: 411944 - DNA, 510 bp, Staphylococcus aureus; identical to SEQ ID NO: 406909

SEQ ID NO: 411945 - DNA, 774 bp, Staphylococcus aureus
ttgttagaagcattctataattacgctgagtatttaggctatgatgttatattctatcaagttacagatcaacacatgcctttatatcataatttcggtaaccaatttttcaaattaggtgaagaagcaattattgatttaacgcaattttcaacttcaggtaaaaaacgccgtggatttagagcgactttaaataaattcgatgaacttaatatttcgttcgaaattattgaaccaccgttttcaactgaatttataaatgaacttcaacatgtaagtgatttatggctagataatcgtcaggaaatgcatttctctgttggtgaatttaatgaagaatacttatctaaagcgccaattggtgtaatgcgaaatgaagaaaatgaagtaattgcattttgtagtttaatgccaacatactttaatgatgccatttcagtcgatttaattagatggttgccagagttagatttaccattaatggatggtctatacttgcatatgttactttggagtaaagaacaaggttatacaaaatttaatatgggtatggcaacgttatcgaacgttggtcaattgcattattcatatttaagagaacgacttgcaggccgtgtctttgaacatttcaacggtctatatcgtttccaaggattacgtcgttataaatctaaatataatccgaattgggaaccacgctttttagtttatcgtaaagataattcgctttgggaatcactttctaaagtaatgcgtgtaatacgtcacaaataa

SEQ ID NO: 411946 - DNA, 1143 bp, Staphylococcus aureus; identical to SEQ ID NO: 405869

SEQ ID NO: 411947 - DNA, 1014 bp, Staphylococcus aureus; identical to SEQ ID NO: 405868

SEQ ID NO: 411948 - DNA, 147 bp, Staphylococcus aureus; identical to SEQ ID NO: 405867

SEQ ID NO: 411949 - DNA, 183 bp, Staphylococcus aureus; identical to SEQ ID NO: 405866

SEQ ID NO: 411950 - DNA, 423 bp, Staphylococcus aureus; identical to SEQ ID NO: 405865

SEQ ID NO: 411951 - DNA, 1275 bp, Staphylococcus aureus; identical to SEQ ID NO: 405864

SEQ ID NO: 411952 - DNA, 774 bp, Staphylococcus aureus; identical to SEQ ID NO: 405863

SEQ ID NO: 411953 - DNA, 1017 bp, Staphylococcus aureus; identical to SEQ ID NO: 411813

SEQ ID NO: 411954 - DNA, 426 bp, Staphylococcus aureus; identical to SEQ ID NO: 406076

SEQ ID NO: 411955 - DNA, 2151 bp, Staphylococcus aureus; identical to SEQ ID NO: 406077

SEQ ID NO: 411956 - DNA, 645 bp, Staphylococcus aureus; identical to SEQ ID NO: 406078

SEQ ID NO: 411957 - DNA, 798 bp, Staphylococcus aureus; identical to SEQ ID NO: 406079

SEQ ID NO: 411958 - DNA, 1008 bp, Staphylococcus aureus; identical to SEQ ID NO: 406080

SEQ ID NO: 411959 - DNA, 618 bp, Staphylococcus aureus; identical to SEQ ID NO: 406081

SEQ ID NO: 411960 - DNA, 708 bp, Staphylococcus aureus
ttgttgttttcaataccaacacctgttgcagtaattttaatgggcattgcagcattgtttactgaagcattggtgggagcaaattatgcgattgcagtagtttttattacaatacaagttattttaatgaacggattagcatcacagaatttaacaattaacattgcgtttccaagagttattgacgttgcaatgggtattgtgattgcaatcataggtttatttgtccttggacaacgtaccgcatccgcattgcttcctaatgtaatggctgaagttgttcgtaaagaagcaacgctctttcattatttattttctgaaaatcaatataaagatgatgtgtatcagaaaaacacggctatgaacctatctgtgaaattaaataacatgacgcaagtttataatgcagctaatggtgaattatttagtgataagacattgattcaaaattattatcctagcttattcgcattagaagaaattagctttatgttaaatagagccatggctaatgaagatagacttacaataaatgaacaattaatgggcgagtatttagcaatatttgaaaacatcgctaagcatttcgaattaaatacagaattagaaataaagatattaccagatttaccacagtataattatattcaatcagcaatgatgaatattcaacacaatggttttcgtgagagagacaagaacgtttaa

SEQ ID NO: 411961 - DNA, 417 bp, Staphylococcus aureus; identical to SEQ ID NO: 404896

SEQ ID NO: 411962 - DNA, 693 bp, Staphylococcus aureus; identical to SEQ ID NO: 404897

SEQ ID NO: 411963 - DNA, 765 bp, Staphylococcus aureus; identical to SEQ ID NO: 404898

SEQ ID NO: 411964 - DNA, 1554 bp, Staphylococcus aureus; identical to SEQ ID NO: 404900

SEQ ID NO: 411965 - DNA, 1359 bp, Staphylococcus aureus; identical to SEQ ID NO: 404901

SEQ ID NO: 411966 - DNA, 438 bp, Staphylococcus aureus; identical to SEQ ID NO: 411847

SEQ ID NO: 411967 - DNA, 642 bp, Staphylococcus aureus
atgaatttcgaaatggcacaagagcttgcagaaatggaaggtataaatgttcaaactgttattgttcgtgacgacattgctgtgacaaacgaagtacaacgtcgtggtgttgcaggaacagtgtttgttcataagcttgccggttatcttgctgaaaaaggttattcattaacagagataaaatcgtgtgtagaagcgttgttacctgaaattaaaagtattggtatggcaattgagccaccgcttgttccaactactggaaaatatggctttgatattgaagacgacaaaatggaaatcggtattggtatacatggtgaaaaaggtattcatagggaagaagtaaaggatattgatcatattgttggaacattgttagacgaattgtataaagaagttactgccaatgatgtcatattaatggtaaatggtatgggtggtacgccgttatctgaattaaatatcgtaactaaatatattcaacaaaatttagctgcaagaacggttaatgttgctaaatggtttgttggtgattatatgacatctttagacatgcaaggtttttctataactatcgtgcctaataaaccagaatatttggaagcatttttagcaccaacaacaagtcaatactttaaataa

SEQ ID NO: 411968 - DNA, 585 bp, Staphylococcus aureus; identical to SEQ ID NO: 406093

SEQ ID NO: 411969 - DNA, 363 bp, Staphylococcus aureus; identical to SEQ ID NO: 406092

SEQ ID NO: 411970 - DNA, 498 bp, Staphylococcus aureus; identical to SEQ ID NO: 406091

SEQ ID NO: 411971 - DNA, 1068 bp, Staphylococcus aureus
atgatgatgaataaagaagcaacaaaaattggatttgcctacgtcggcattgtagtgggcgcaggattttcaactggacaagaagttatgcaatttttcactaaatatggcttgtgggcttatttaggtgttattatatctggttttattttagcttttattgggcgccaagtagcaaaaattggtactgcctttgaagcgacaaatcatgaatcaacattacaatacgtattcggtgaaaagtttagtaaagtctttgattatattttaatcttcttcttatttggtatagctgtaaccatgatagctggtgcaggcgcaacatttgaagaaagttataacatacctacatggctaggtgctttaattatgacattagcgatttatattacgttgctattagactttaataaaatagtacgtgcactaggtatcgttacaccatttttaattgttttagttgtattaatcgctggcgtttatttatttaaaggtcatgtttcattagcagaagttaaccaagtagtgcctgaagcaagtatttggaagggaatctggtttggtacaatatatggtggattagctttttctgtaggttttagtaccatcgtagcaatcggtggggatactgaaaagcgtacagtgtcaggtgcaggcgcgatgtatggtggtattatctatactgtattactagcattgatcaactttgcattgcaaagtgaatatccaactattaaaaatgcctcaattcctacattgacgttagcaaataatatccatcctttaatagcaacagtgttatctgttattatgctggcggttatgtacaatactattctaggactaatgtattcatttgcagcacgttttacagaaccgtatagcaaaaaataccatatctttattgttataatgatgatagcaggttatttattaagtttcgtaggatttgctgaattaattaataagttatatacaattatgggatatgtaggcttatttattgtagtagctgtaattattaaatatttcaaacgtaaaaatgcggataaaaaacatattgcttaa

SEQ ID NO: 411972 - DNA, 1044 bp, Staphylococcus aureus; identical to SEQ ID NO: 406089

SEQ ID NO: 411973 - DNA, 429 bp, Staphylococcus aureus; identical to SEQ ID NO: 406088

SEQ ID NO: 411974 - DNA, 507 bp, Staphylococcus aureus; identical to SEQ ID NO: 406087

SEQ ID NO: 411975 - DNA, 924 bp, Staphylococcus aureus; identical to SEQ ID NO: 406086

SEQ ID NO: 411976 - DNA, 2787 bp, Staphylococcus aureus
gtggcagagaataatatcgatgctgttcaagttgacgttgtaaaaaaacaagcagcgcgagataaaatcactgctgaagtagcgaagcgtattgaagcggttaaacaaacacctaatgcaactgacgaagaaaagcaggctgcagttaatcaaatcaatcaacttaaagatcaagcgtttaatcaaattaatcaaaaccaaacaaatgatcaggtagacgcaactacaaatcaagcgattaatgctatagataatgttgaagctgaagtagtaattaaaccaaaggcaattgcagatattgaaaaagctgttaaagaaaagcaacagcaaattgataatagtcttgattcaacagataatgagaaagaagttgctttacaagcattagctaaagaaaaagaaaaagcacttgcagctattgaccaagctcaaacgaatagtcaggtgaatcaagcggcaacaaatggtgtatcagcgattaaaattattcaacctgaaacaaaaattaaaccagcagcacgtgaaaaaatcaatcaaaaagcgaatgaattacgtgcgcaaattaatcaagataaagaagcgacagcagaagaaagacaagcggcgttagataaaatcaatgaatttgtaaatcaagccatgacaaatatcacgaatgatagaacaaatcagcaagttaatgactcaacaaatcaagcgcttgacgacattgcattagtgacgcctgaccatattgttagagcagctgctagagatgcagttaagcaacaatatgaagctaaaaagcacgaaattgagcaagcggaacatgcgactgatgaagaaaaacaagttgctttaaatcaattagcgaataatgaaaaacgtgcattacaaaacattaatcaagcaatagcgaataatgatgtgaaacgtgttgaatcaaatggtattgctacactaaaaggtgtacaacctcatattgtaattaagcctgaagctcaagaagccataaaagcgagcgcagataaccaagtagaatctataaaagatacaccacatgcaacagttgatgaattagatgaagcgaatcaattaattagcgacacactcaaacaagcgcaacaagaaatagaaaatacaaatcaagatgctgctgttactgatgttagaaatcaaacaatcaaggcaatagagcaaataaaacctaaagtaagacgtaaacgagctgcgcttgatagcattgaagaaaataataaaaatcaactcgatgcaatccgaaatacgttggatactactcaagatgaaagagatgttgctattgatactttaaataaaattgtaaatacaattaaaaatgacattgcacaaaacaaaacgaatgcagaagtggatcgaactgagactgatggcaacgacaacatcaaagtgattttacctaaagttcaagttaaaccagcagcgcgtcaatctgttggtgtaaaagccgaagctcaaaatgcactaatcgatcaaagcgatttatcaactgaagaagaaagactagctgctaaacatttagtagaacaagcacttaatcaggctattgatcagatcaatcatgcagataagactgcccaagttaatcaagatagtataaatgctcaaaatattatttcaaaaattaaaccagcgacaacagttaaagcaacagcattacaacaaattcaaaatatcgctacaaataaaattaatttaattaaagcaaataacgaagcgacagatgaagaacaaaatattgcaatagcacaagttgaaaaagagttaattaaagctaaacaacaaattgctagtgcagtgactaatgcagatgtggcatatttattgcatgatgagaaaaacgaaattcgtgaaatcgaacctgttattaacagaaaggcgtctgctcgagaacaattgacaacattattcaacgataaaaaacaagcaattgaagcgaatattcaagcaacggtagaagaaagaaatagtatattagcacagttacaaaatatttatgacactgctattggacaaattgatcaagatcgtagcaatgcacaagttgataaaacagcatcattaaatctacaaacaatacatgatttagatgtacatcctattaaaaagccagatgctgaaaaaacgattaatgatgatcttgcacgcgtcactgctttagtgcaaaattatcgaaaagtaagtaatcgtaataaggctgatgcattaaaagctataactgctttaaaattacaaatggatgaagaattaaaaacagcacgcactaatgctgatgttgatgcagttttaaaacgatttaatgttgcattaagcgatatagaagcagtaattactgaaaaagaaaatagcttactgcgaattgataacattgctcaacaaacatatgcgaaattcaaagcgatcgcaacaccagaacaattagctaaagtaaaagtattaattgatcaatatgttgcagatggcaatagaatgattgatgaagatgcgacattaaatgacatcaaacaacacacgcaattcattgttgatgaaattttagcaattaaattaccagctgaagcgacgaaagtatcaccaaaagaaattcagccagctccaaaagtttgtacgcctattaaaaaagaagagacacatgaatcgcgcaaagttgaaaaagaacttccaaatacaggttctgaaggaatggatttaccattgaaagaatttgcactgattacaggtgcggctttgttagctagaagacgtactaaaaacgaaaaagaatcataa

SEQ ID NO: 411977 - DNA, 759 bp, Staphylococcus aureus; identical to SEQ ID NO: 406688

SEQ ID NO: 411978 - DNA, 387 bp, Staphylococcus aureus; identical to SEQ ID NO: 406689

SEQ ID NO: 411979 - DNA, 702 bp, Staphylococcus aureus
atgacacacaaatatatatcaacgcaaatgttgatcatttttactgcattaatgattattgccaatttttactacatattttttgaaaaaattggctttttactcgttctattattgggatgtgtattagtttatgtaggatatctttattttcataaaatacgtggccttttggcgttttggataggcgcgctattaattgcattcacattattgtctaataagtatacaatcatcatcttgttcgtctttttattactacttattgtgcgttatttaatacacaagtttaaaccaaaaaaagtagttgcgacggatgaggttatgacttcaccatcttttattaaacaaaagtggtttggtgagcaacgtacaccagtttatgtatataagtgggaagatgtacaaattcaacatggaattggcgacctacatattgacttaacaaaagctgcaaatattaaggaaaataataccattgttgttagacacattttaggtaaagtgcaggttatattgccggttaattacaatattaatttacatgtagctgctttttatggaagtacttacgtgaatgaaaaatcatataaagttgaaaataacaatattcatattgaagaaatgatgaaaccggataactatacagttaatatctacgtatcaacgtttatcggagacgtagaggtgatttatcgatga

SEQ ID NO: 411980 - DNA, 1044 bp, Staphylococcus aureus; identical to SEQ ID NO: 406691

SEQ ID NO: 411981 - DNA, 630 bp, Staphylococcus aureus; identical to SEQ ID NO: 406692

SEQ ID NO: 411982 - DNA, 1218 bp, Staphylococcus aureus; identical to SEQ ID NO: 406693

SEQ ID NO: 411983 - DNA, 276 bp, Staphylococcus aureus; identical to SEQ ID NO: 406694

SEQ ID NO: 411984 - DNA, 465 bp, Staphylococcus aureus; identical to SEQ ID NO: 406695

SEQ ID NO: 411985 - DNA, 207 bp, Staphylococcus aureus; identical to SEQ ID NO: 406696

SEQ ID NO: 411986 - DNA, 672 bp, Staphylococcus aureus
atgagagtcaatgttttacaacatacaccaaatgaaggtgttggatacataggtgagtgggcgaaggaaagagggcacgaagtctatatttatcatccatatatgaatgatggcgtgctacctcttgcggaagaaacggatatgttagtgatacttggtgggccaatgaatccagacgatgagatgccttggattcaatcagagcgccaattaattttagtattgatggcacaaaacaaaccaatttatggtgcttgctttggtgcacaacaaatttcgaaagcattaggttatgcggtgttaaaatcaccagtaaaggaagtaggttgggatgatgtttacttagaatcagaaatcattccgaatataccaagtcgattgaaggcactacattggcatgaagatatgtttcaaataccgcaacaagcagaattattattttcggggaaccatattagaaaccaaggatttatcatcgatcatcatgtgattagattacaatttcattttgagcctggtccagacgatgtcagagaaatagtactaaatgatgcccaatacatcaatcattctattttagagcaatcggcggaggacatattagcctttgaggtgcctaaacagaataggcaggccattttccgaatacttgattttattactcaagcgtaa

SEQ ID NO: 411987 - DNA, 1080 bp, Staphylococcus aureus
atgtcgaaaggtatgaatgcagaagaaaaaagttctactgcaatgcaaggtgtgaaaagttcagattggttatctacaaactttggcgtacgttttcgatataatgcactaggtgatttaaatacgagcaatattgtttcttcaaaagaaagtttcggtattactgaaggtgtgaaatctgtctctatgcatgccggatcgacattagcaattactaatccagagaaagcaaaaggtattgtgtatacaccagaacaattgccagcgaaaagtaaatggtcacatgctgtagatcaaggtatttataatgggggcggtaaagcagaaggcccctatgtagcaatttctaaagttggaaaaggtaaagcagcatttatcggtgattcatcacttgtggaagatagttcgcccaaatatgtaagagaagataatggagaaaagaagaaaacatatgatggttttaaagaacaagacaacggtaagctattaaataatataacggcttggatgtctaaagataatgatgggaaatcacttaaggcgagtagcctaacattagatacaaagactaagttgcttgattttgaacgaccagagcgttcaactgagcctgaaaaagagccatggtcacaaccgccgagtggttataaatggtatgatccaacaacatttaaagcaggtagttatggcagcgaaaaaggcgcagatcctcagccaaacacaccagatgatcatacaccaccaaatcagaacgaaaaagtaacatttgatatcccgcaaaatgtttctgtaaatgagccatttgaaatgacaatacatttaaaaggatttgaagcaaatcaaacacttgaaaatcttagagttggtatttacaaagaaggcggacgtcaaatcggacaattttcaagtaaagataacgattataacccaccaggttacagtactttgccaacagttaaagcagatgaaaacggaaatgtcacaattaaggtcaatgctaaagtacttgaaagtatggaaggttcaaagattcgtttaaaactcggtgacaaaaccttgattacaacagacttcaaataa

SEQ ID NO: 411988 - DNA, 1326 bp, Staphylococcus aureus
atgtacttgttcgatttcggtaccaatggtttgatgccagtcacagatataccacatgtcgctgattactttacagtagatcaagaagacaagattgcgaaggcgatacggaagatacatgatattatttctgagcgaaaaagactattaagtcaagagagagtagttaatatagagcaatataataaagaaactggaaattcaattccaaatgttttcttaattatcgataactacgacacggtgaaagaatcaccatttatggaagaatatgaagaaatgatgtctaaggtaacacgtgaaggtttagcgttaggggtatacatcattctttcaggatcaagatcaagtgcaataaaatcagctatatttactaacattaaaacaagagttgcgctgtacctctttgaaaacaatgaattaacaaatattattggttcttataaaaaaggtgtgaaagatgttaaaggtagagctgcaataaatgatgataacttcacacagttccaaattgcgcaaccatttgaattagcagaaggacaaacatataacgagcgcattaaaaatgaagtagcacaaatgaaagaattctatgtaggagattatccaaaacatattccaatgatgccagataaggtatttatggaagatattcgagaagcatatgatttggaaaaaatcattcatgaagaacacaaattaccattaggattagactttgaggatgtggaactagttagtttagatctgacaagttcttcgattgtaacagcaattaaaccaactgagatggaaaaaatgaatgatgttataatgtctagtttatcagtatatagtaaaaaccaatttgttatcttggttgatgcagaagataatatgagccagtattcagaagatgtaacctcttattattcagcaccatcagatttgagcaacattagattaggatttaagcaagaaatagaagcaaggaaaaatggcgagaaaagtatagaggaatgcaagattgtatttataaataatattaaacgattcaatcaattaactggaatgacagaagatgaaattcgtgtgttatttaatgaaggtcaaaaagttaatattatcattattgcaagtggactatactcagatacaattggtgcatttgatagagaaagtaaaatgatggtaagaactataaatcaagctttgattagtcataagatatcggaacaagaatttataagagttaaagatcgatttggtgaaccagaattaaaagtgggagaaatgtattacattaataatcaagaatatcaaaaaataaaactaatggagggatag

SEQ ID NO: 411989 - DNA, 525 bp, Staphylococcus aureus; identical to SEQ ID NO: 406840

SEQ ID NO: 411990 - DNA, 1854 bp, Staphylococcus aureus
gtgcatgacatgacaaaagatattgaatatctaacagctgattatgacaatgaaaagtcatctatccaaagtgtaatagatgcaatagagggtcaagacttcttagatgtagatacaacaatggatgatgcggtaagcgatgtcagttctttagacgaagatggcgcaatatcattaacaagtagtgtagtaggtccacaaggatctaaattaatggggtattatcaaaatgagttatatgattatgcatctcaattagattcgaaaatgaaagaaattattgacacgccatttatagaagatatagataaagcattcaaaggtataacgaatgttaaattggaaaatatactaattaaaaatggtggtggacatggtagagatacctatggggcttctgggaaaattgcaaagggagatgccaagaaaagtgacagcgatgtttatagcatcgatgaaatattaaaatcggatcaagaatttgtaaaagtaattgatcagcattacaaagaaatgaaaaaagaagataagaaattatctaaaagtgattttgaaaaaatgatgactcagggcgcttcttgtgattacatgacagtagctgaagcggaagagctagaggagcaaaagaaaaaagaagaagctatagagattgcagcactagctggtatggtagttttatcttgtattaatcctgttgctggagcagtagctattggtgcttattccgcttattcagcagcaaatgcagccacaggaaaaaatattgtaactggaagaaagctatctaaagaagaacgaatcatggaaggactttcgcttattccattgccaggtatgggcttcctcaaaggtgctgggaaaagtttaatgaaattaggcttcaaaggcggagaaaaatttgcagttaaaacaggattgcaaaagacaatgcaacaagcagttagtcgtatttcacctaaaatgggaatgatgaaaaacagtgtgttgaatcaatctcgtaactttgctcaaaatactcatgttggacaaatgctgagtaacatgcgtggtcaagcaactcatactgttcaacaaagtagaaattggattggacaacaagcacaaaatgtcaaacgaatagtgaataatggacttgataaagaaatagcacatccatttaaacaacaacttgcaccagcgggaatgggtggtataaaatttgctgaaacaactactttgagaaacatgggtcaaaacataaagcgtgctgttacaccacaaaatcacgtgacacatggtccaaaagatagtatggtgagaagtgaaggcaaacatagtataagtagccatgaaatgaattcatcaaagtatgttgaatcaccaaactacaccaaggttgaattcggagaacactatgcaagacttagacctaagaaactaaaggcgaatattgaatacacaacacctactggtcacatatatcgaaccgatcataaaggtcgcataaaagaagtttatgtagacaatctctctctaaaagatggggatcgtaatagccatgcacaaagaactgtggggggagaggatagattaccagacgatgatggaggtcacttaatcgctagaatgtttggtggttcaaaagacattgataaccttgtggcacaaagtaaatttatcaaccgtccatttaaggagaaaggtcattggtataatcttgagaaagagtggcaagagttcttaaactctgggaaagaggtgaaaaatattaaaatggaagtaaaatatagcggtaatagtcaaagaccgactatatttaaagttgaatatgaaattaatggtgaaagaaatattagaagaatattaaataagtag

SEQ ID NO: 411991 - DNA, 1317 bp, Staphylococcus aureus
atgtacttgttcgatttcggtaccaatggtttgatgccagttacagacataccacatgtcgctgattactttacagtagatcaagaagacaagattgctaaggcgatacgtatatttaatgatgaaattgatcgtcgtaagaagattttaagtcagtatcgtgtcactagtatttctgaatatcgaaaattaactggtgaaacaattccgcatgtctttattcttattgataactttgacgcagtaaaagattcacctttccaagaagtttttgaaaatatgatgattaaaatgacgcgtgaagggctagcattagacatgcaagtaaccttaactgcttcaagagctaacgctatgaaaacaccaatgtacattaatatgaaaacgcgtatcgcaatgtttttatatgataaatcagaggtgtcgaacgtagtaggacagcaaaaatttgcggttaaagatgttgtgggtcgagcattgttaagtagtgatgacaacgtatcattccatattggccaaccatttaaacatgatgagaccaaatcatataatgatcaaattaatgatgaagtatcggcgatgacagaattttataaaggtgaaacaccaaatgatattcctatgatgccagatgaaattaaatatgaagattacagagaatcattaaacttaccagatatagttgcaaatggtgctttaccaattggattagattatgaaggtgttacactacaaaaaattaaattaactgaaccagcaatgatttcatcagaaaatccgagagaaattgcgcatattgctgaaattatgatgaaagaaattgacatattaaatgaaaaatatgcgatttgtatcgcagactcaagtggagagtttaaagcttataggcatcaagtggctaactttgccgaagaaagagaagacattaaagcgattcatcaactaatgattgaagacttaaagcaaagagaaatggacggcccatttgaaaaagattcactttatattatcaatgattttaaaacatttattgattgcacgtatattccggaagatgatgttaaaaagcttattacaaaaggaccagaacttggcttgaacattttatttgtcggcattcataaagaattaatagatgcttatgataaacagattgatgttgcacgtaaaatgattaaccaatttagtataggtattcgtatttcagaccaacaattctttaaatttagatttattcaacgagaacctgttattaaagaaaatgaagcatatatggtcgcaaaccaagcttatcaaaagattagatggtttaaatag

SEQ ID NO: 411992 - DNA, 627 bp, Staphylococcus aureus; identical to SEQ ID NO: 407013

SEQ ID NO: 411993 - DNA, 387 bp, Staphylococcus aureus; identical to SEQ ID NO: 407012

SEQ ID NO: 411994 - DNA, 582 bp, Staphylococcus aureus; identical to SEQ ID NO: 407011

SEQ ID NO: 411995 - DNA, 252 bp, Staphylococcus aureus; identical to SEQ ID NO: 407010

SEQ ID NO: 411996 - DNA, 264 bp, Staphylococcus aureus; identical to SEQ ID NO: 407009

SEQ ID NO: 411997 - DNA, 573 bp, Staphylococcus aureus; identical to SEQ ID NO: 407008

SEQ ID NO: 411998 - DNA, 369 bp, Staphylococcus aureus; identical to SEQ ID NO: 407007

SEQ ID NO: 411999 - DNA, 612 bp, Staphylococcus aureus; identical to SEQ ID NO: 407006

SEQ ID NO: 412000 - DNA, 879 bp, Staphylococcus aureus; identical to SEQ ID NO: 406711

SEQ ID NO: 412001 - DNA, 1287 bp, Staphylococcus aureus; identical to SEQ ID NO: 405556

SEQ ID NO: 412002 - DNA, 1011 bp, Staphylococcus aureus; identical to SEQ ID NO: 405504

SEQ ID NO: 412003 - DNA, 1710 bp, Staphylococcus aureus
atggaaacaggtaaaagtgatgtacttgataaaattgaaaaaattaataaaaaagatagtgccttacaagaaattatacccaaaggctatgaaattgaacatcatcaatgcggtgttgccttatatcaacttataccaagtaaaaaagaaggcgaaccagataaaaaggtttttatcacaaatacaatccctcaaattactgaacgctttgaagatattgagagtaacgaagtcagctttaatatgcttttctatgacaataaaacgccagtaaatatagctgtgagtgccgaagaaatttcagatagtcgtcaactcttgaaattggttaataaaaagctagatgtaacatcgtcaacatctactaaacttgttgactatattaatatatctaaacggtataatccaccattaaatgttaaagttgcaacgcgtttggggcatgtgaaaggttattttatttatccttatcaagaagtaatgaaagacagcaatgtcaagttgtttagcaatgataaagggtttcaaaagttaatagactcttttcgaagtaaaggaacactacaaggttactctaaaaaggtgtttgctcaaataaaagatttaccaatggtaatggttatgttgtatgcatctttaggctcagttttattaagagaatttggattacaaccctttattgtagaaatatcaggtagtacatccacaggtaaaacattcacactcaacttagtatcaagtgtttggggaaccagtgaccttattacgacatggagttctactcaaaatagtattgaatcaatggcgtcatttttgaactcatttccaatgtttaaagatgatacgcgtaacacacatcctaagtttgttgccagtgccacatataacttttctagtggtgaaagtaaatcgagaagtaatattaatttaacgctaaatgctaaaaaagaatggcgaaatattttaatttctactggtgaatcatctatcgcaaatatggctgatgaaaaagcgggtgtatcagcacgtgtagttacactacaagatccaccatatccagataattttgattttaccacattagacaaatcgtttagggagaactatggaacgttagggttggcatttattaaacaatatgagtctaaaaaagacgtgtataagaacgcttttgagagctatcaacggtattttaatcaaaaaggtagtaatgaaatcatgcaacgtttaggacgtgcctttgcgttactacaagttaccggtgaggttttgaatgatattgatgggtttgaacatgaccattttaaaattatcgaacaagcctatgacagcatggttaaaaacaataagacgattgataaacctaagcaactgttagaggaactattacaatatttagatgcaaatagaaataatatcgctggtgatggctatagttcagtcaaaaatggtgacatcaaagctatatataaacgtgattatttatgtatattaggtcaaactgtacacgataaattaggtcatgaaatgcagactataacaggtcaatggggcaaaaaaggatatttaattaaaggtgaaaaagatcgcttgcaaaaaaaggtgagtcacaaaaacattaagtatagaggatttgctataaacaaagaaatgcttgaagaattaggatttgatttctcgaattctcataatccttattcagattattaa

SEQ ID NO: 412004 - DNA, 156 bp, Staphylococcus aureus; identical to SEQ ID NO: 408440

SEQ ID NO: 412005 - DNA, 3222 bp, Staphylococcus aureus
atgaatcaagcgaaagatgcattaaacggtgatgaaaaattagcacaagcgaaacaagaagctttagcaaatcttgatacgttacgcgatttaaatcaaccacaacgtgatgcattacgtaaccaaatcaatcaagcacaagcgttagctacagttgaacaaactaaacaaaatgcacaaaatgtgaatacagcaatgagtaacttgaaacaaggtattgcaaacaaagatactgtcaaagcaagtgagaactatcatgatgctgatgccgataagcaaacagcatatacaaatgcagtgtctcaagcggaaggtattatcaatcaaacgacaaatccaacgcttaacccagatgaaataacacgtgcattaactcaagtgactgatgctaaaaatggcttaaacggtgaagctaaattggcaactgaaaagcaaaatgctaaagatgccgtaagtgggatgacgcatttaaacgatgctcaaaaacaagcattaaaaggtcaaatcgatcaatcgcctgaaattgctacagtgaaccaagttaaacaaacagcaacgagcctagatcaagcaatggatcaattatcacaagctattaatgataaagctcaaacattagcggacggtaattacttaaatgcagatcctgacaaacaaaatgcgtataaacaggcagtagcaaaagctgaagcattattgaataaacaaagtggtactaatgaagtacaagcacaagttgaaagcatcactaatgaagtgaacgcagcgaaacaagcattaaatggtaatgacaatttggcaaatgcaaaacaacaagcaaaacaacaattggcgaacttaacacacttaaatgatgcacaaaaacaatcatttgaaagtcaaattacacaagcgccacttgttacagatgtcactacgattaatcaaaaagcacaaacgttagatcatgcgatggaattattaagaaatagtgttgcggataatcaaacgacattagcgtctgaagattatcatgatgcaactgcgcaaagacaaaatgactataaccaagctgtaacagctgctaataatatcattaatcaaactacatcgcctacgatgaatccagatgatgttaatggtgcaacgacacaagtgaataatacgaaagttgcattagatggtgatgaaaaccttgcagcagctaaacaacaagcaaacaacagacttgatcaattagatcatttgaataatgcgcaaaagcaacagttacaatcacaaattacgcaatcatctgatattgctgcagttaatggtcacaaacaaacagcagaatctttaaatactgcgatgggtaacttaattaatgcgattgcagatcatcaagccgttgaacaacgtggtaacttcatcaatgctgatactgataaacaaactgcttataatacagcggtaaatgaagcagcagcaatgattaacaaacaaactggtcaaaatgcgaaccaaacagaagtagaacaagctattactaaagttcaaacaacacttcaagcgttaaatggagaccataatttacaagttgctaaaacaaatgcgacgcaagcaattgatgctttaacaagcttaaatgatcctcaaaaaacagcattaaaagaccaagttacagctgcaactttagtaactgcagttcatcaaattgaacaaaatgcgaatacgcttaaccaagcaatgcatggtttaagacagagcattcaagataacgcagcaactaaagcaaatagcaaatatatcaacgaagatcaaccagagcaacaaaactatgatcaagctgttcaagccgcaaataatattatcaatgaacaaacagcaacattagataataatgcaattaatcaagcagcgacaactgtgaatacaacgaaagcagcattacatggtgatgtgaagttacaaaatgataaagatcatgcgaaacaaacagttagtcaattaacacatttaaacaatgctcaaaaacatatggaagatacgttgattgatagtgaaacaactagaacagccgttaaccatgatttgactgaagcacaagcattagatcaacttatggatgcattacaacaaagtattgctgacaaagatgcaacacgtgcgagcagtgcatatgtcaatgcagaaccgaataaaaaacaatcatatgatgaagcagttcaaaatgctgagtctatcattgcaggattaaataatccaactatcaataaaggtaatgtatcaagtgcgacacaagctgtaacatcatctaaaaatgcattagacggtgttgaacgattagcgcaagataagcaaactgctggaaattctctaaatcatttagaccaattaacaccagcacaacaacaagcactagaaaatcaaattaataatgcaacaactcgtgataaagtggctgaaattattgcacaagcgcaagcattaaatgaagcgatgaaagcattaaaagaaagtattaaagatcaaccacaaactgaagcaagtagtaaatttattaatgaagatcaagcacaaaaagatgcttatacgcaagctgtacaacacgcgaaagatttgattaacaaaacaactgatcctacattagctaaatcaatcattgatcaagcgacacaggcagtgactgatgctaaaaacaatttacatggtgatcaaaaactagatcaagataagcaacgtgcaacagaaacgttaaataacttgtctaacttgaatacaccacaacgtcaagcacttgaaaatcaaattaataatgcaacaactcgtggcgaagtagcacaaaaattaactgaagcagaagcacttaaccaagcaatggaagctttacgtaatagcattcaagatcaacagcaaacggaagcgggtagcaagtttatcaatgaagataaaccacaaaaagatgcttaccaagcagcagttcaaaatgcaaaagatttaattaatcaaactaacaatccaacgcttgataaagcacaagttgaacaattgacacaagctgttaaccaagctaaagataacctacacggtgatcaaaaacttgcagacgataaacaacatgcggttactgatttaaatcaattaaatggtttgaataatccgcaacgtcaagcacttgaaagccaaataaacaacgcagcaactcgtggcgaagtagcacaaaaattagctgaagcaaaagcgcttgatcaagcaatgtaa

SEQ ID NO: 412006 - DNA, 900 bp, Staphylococcus aureus; identical to SEQ ID NO: 408241

SEQ ID NO: 412007 - DNA, 918 bp, Staphylococcus aureus
atgttaagcatctttcaaatttatgtagttgcaatcatttcaggtattggattagtatttcacagtatttctgaggtttcgataatcccaagtattgtaaaagaagaagatttggcgagcgcaaacagttatatatacgctactcaaaatgtttcggaatttttgggccctataattggaggtttactttatacatatatgggatattcaatattgatttttatagattctatgacttttttactctcatttttcagtttgatattaattaaaattgaaacaaagagtatattcaatcaagaaaagttgagtggaaaaaattttttgagcgatgttaaagttggatttgattatctattatctaattcaactattagagtaatggctgttgttgtaagtttatccaatctaattatctcaccttattatatttatatagtaatgtttgtaaaggaagacatgaatcaatcatctcaagcattggggttagttttaggtatctcatcattaggtgcgctaatcggttcattatctgcaagttttctcttgaaattatttaatttcggaaaactaattgtaattatattatttttagatacaatttttagattaatgttaccatttagtacttatatttttatactcatcccacttttagggttgacatatatgacacaatccattttaaatatagcgataatcacactgaggcaaaagaaatgttcagaacatatgttaggacgtgttaatagtgtttttaaaacaatggtttttgcattcagagctataggcctttttttaggcggcatattacttgaaaataaaggtggattttatgcacttacgatcagcgctgtgttatttataccattagtgttatatatactgaaaaatagattttataaagtagaagaatag

SEQ ID NO: 412008 - DNA, 819 bp, Staphylococcus aureus
atgaataactttaataatgaaatcaaattgatattacaacaatatttagaaaagtttgaagcgcattacgagcgtgtattacaagacgatcaatatatcgaagcattagaaacattgatggatgactatagtgaatttattttaaatcctatttatgaacaacaatttaatgcttggcgtgacgttgaagaaaaagcacaattaataaaatcactgcaatatattacagcgcagtgtgttaaacaagtggaagtcattagagcgagacgtctattagacggacaggcgtctaccacaggttactttgacaatatagaacattgtattgatgaagagtttggacaatgtagtatagctagcaatgacaaattattgttagttggttcaggtgcatatccaatgacgttaattcaagtagcaaaagaaacaggtgcttcagttatcggtattgatattgatccacaagccgttgacctagggcgcagaatcgttaacgtcttagcaccaaatgaagatataacaattacggatcaaaaggtatctgaacttaaagatatcaaagatgtgacgcatatcatattcagctcgacaattcctttaaagtacagcattttagaagaattatatgatttaacaaatgaaaatgtcgtagttgcaatgcgctttggtgatggcatcaaagcaatatttaattatccgtcacaagaaacagcggaagataagtggcaatgtgtgaataaacatatgagaccacagcaaattttttatatagcactttataaaaaagcagctataaaggtaggtattacggatgtctaa

SEQ ID NO: 412009 - DNA, 687 bp, Staphylococcus aureus; identical to SEQ ID NO: 407217

SEQ ID NO: 412010 - DNA, 180 bp, Staphylococcus aureus
atgaaaaactctatactttggcgaaagtcgtttattcctgtctattttatagttgcttttgtaatgttcttactttttaagttttatattagaactgataatttttcagtttatgttttgatagcttttatagtcattttaggttttgcttctattatatataactataatagacattaa

SEQ ID NO: 412011 - DNA, 1008 bp, Staphylococcus aureus; identical to SEQ ID NO: 409146

SEQ ID NO: 412012 - DNA, 414 bp, Staphylococcus aureus
atgagtatggaacttggcgcagatgattatatgcaaaagcctttttatacaaatgtattaattgctaaattacaagcgatttatcgacgagtgtatgaatttactgctgaagaaaaacgcacgttaacatggcaagatgctgtcattgatctatcaaaagatagtatacaaaaaggtgatcagacgatttttctatccaaaacagaaatgattattttagaaattcttattactaaaaaaaatcaaatcgtttctagggatacaattattactgcgctatgggatgatgaagcatttgtcagtgataacacattaacagttaatgtgaaccgattacgtaagaaactatctgaaatagggatggacagcgcaattgaaacaaaagtaggaaaaggatatatggcacatgaataa

SEQ ID NO: 412013 - DNA, 1041 bp, Staphylococcus aureus
atgaataatttgaaatgggtagtttattttctgaaatcaagaaagaattggatattttggatactgtttttaaatattcttatgttaggcattagtcttattgactatgactttccaatcgatagtttgttttatattgtttctttaaatttaagcttaacactgatttttcttatattgactttttttaaagaagtaaaattatatagacattttgaaaaagataaagaaatcgaagaaataaaacataaagatttagcggaaaccccattccaacgtcatacagttgattatttatatcgtcaaattttagcgcataaagataaagtggtcgaccaacagttgcaattaaacatgcatgaacaaaccatcacagaatttgtgcacgacatcaaaacaccagtgactgctatgaaattgttaattgaccaagaagagaatcaagaaagaaaacaagcgctattatttgaatggtcacgtattaactcgatgttagatacgcaattgtatattacgagattagagtcgcaacgtaaagatatgttttttgattatgtctcattgaagcgcatggttattgatgaaattcaattaacaaggcatataagtcaagttaaaggtatcggatttgatattgattttaaagtggataatcatgtgtacacggatataaaatggtgtcgtatgattattagacagattttatcaaatgctttgaaatatagtgagaattataatgttgatatttcaacggaattaattgatcaacatgttgcgttaatcatcaaggatcatggaagaggtattagtaaaaaagatatgcctcgaatatttgaacgtgggtttacgtcaacggctaacagaaatgaaacgacatcatccggcatgggtctatacttagtggatagtgtgaaagatcaattaggaatacaattacaagttacttcgactattggaaaaggaacaacggttaaattgatcttcccattacaaaatgaaattgttgagcgcatgtcagaagtgacaaatctgtcattttaa

SEQ ID NO: 412014 - DNA, 762 bp, Staphylococcus aureus
gtgacaatattagaagtaaaacaattaacaaaaatatatggcaacaagaaaatggcacaagaagttctgcgagatatcaatatgtctgttgaagaaggtgaatttattgccattatgggaccttcaggatctggtaaaacgaccttattaaatgttttgagttcaattgattatatttcgcaaggttctatcacactaaaaggacacaaacttgaaaagctttcaaacaaagcattatctgatattcgaaagcatgatattggttttatttttcaagaatataatttacttcatacattaactgttaaagaaaatatcatgttaccattaacggttcagaaattagataaggacacaatgttagatcgttatgaaaaagtggcagaagcattaaatatattagacatcagtgataaatatccatccgaattgtctggtggtcaaagacaacgaacatcagctgccagagcatttataacattgccttctattatatttgccgatgaacctacaggtgcactcgattcgaaaagtacacaagatttattaaagcgattaatgaaaatgaatgaagagattaagacgacaattattatggtgacacatgatccggttgcagctagctatgcaaatcgagtagtgatgcttaaagatgggcaaatattcacggagttatatcaaggtgatgatgacaaacatactttctttaaagaaatcatacgtgtacaaagtgttttaggtggcattaattatgagttttaa

SEQ ID NO: 412015 - DNA, 1890 bp, Staphylococcus aureus; identical to SEQ ID NO: 410843

SEQ ID NO: 412016 - DNA, 366 bp, Staphylococcus aureus
atgccagaaggtggtagcattgttgcaacaacatatttaggtggcgaattcgcagttcaaaactataatgtgatgggtgttgctaaagcgagcttagaagcaaatgttaaatatttagcattagacttaggtccagataatattcgcgttaatgcaatttcagctggtccaatccgtacattaagtgcaaaaggtgtgggtggtttcaatacaattcttaaagaaatcgaagagcgtgcacctttaaaacgtaatgttgatcaagtagaagtaggtaaaactgcggcttacttattaagtgatttatcaagtggcgttacaggtgaaaatattcatgtagatagcggattccacgcaattaaataa

SEQ ID NO: 412017 - DNA, 1086 bp, Staphylococcus aureus; identical to SEQ ID NO: 405374

SEQ ID NO: 412018 - DNA, 315 bp, Staphylococcus aureus
ttgaagactatcgaagaaagaatgaacgaatatttcaactggttaaaacaaaattatatcttcaaagaattagatagttctacagaaattactactccctttaagaaccatttgaatgattttattagaatatatgctgatacactacctaataatgaaatttgtctatcagataacggattgacgattaatgaattagaaatgttgggtattgatataaacacaaaaacgagaactaaacttatacagaatattttaaatcaatttaatttaaaattagttgataaagaaattacagctgatgttaaaaattag

SEQ ID NO: 412019 - DNA, 783 bp, Staphylococcus aureus; identical to SEQ ID NO: 406469

SEQ ID NO: 412020 - DNA, 396 bp, Staphylococcus aureus
atggctaaagttgaattaacaacccggagacgaaacttcatagttgctgttatgttgattagtgcgtttgtagctattttaaatcaaacattattaaatacagcgttacctagtataatgagagaattaaatattaatgaaagtacatcgcaatggctagttactgggtttatgcttgttaatggcgtcatgatacctctaacagcatacttaatggacaggattaaaactagacctttatacttagcagcgatggggacatttttagtaggatcaattgttgcagccatggcacccaattttggagttttaatgttagcacgtgtcatccaagctatggggggcaggcgtactcatgcctttaatgcaattcacattgtttacgttattcagtaa

SEQ ID NO: 412021 - DNA, 279 bp, Staphylococcus aureus
atgaaaataaaatctaatataaagtttgggtataaccatgcactaatcgcaaatattggtatcagtattaataaaataagcaatgatatcaaaaaactgatttgtgaaagtatattagcactacggtcatttttagtattcacaatcaacaaatcgtatcttgcatttattattggtattaaaatcattgcgatatttgaaaaaattgtaaactcaccaaattctgtaggtgaatatagtcttgtaataattggggtagtgatgattaatatgacttga

SEQ ID NO: 412022 - DNA, 192 bp, Staphylococcus aureus
atgaaatttagagaattagtaaaacaatcatacgaggatttaaaaaacttgactgtaacttggtataacgttattgctttagcaattattgttattgtcttaagcaccgttacaacaccaattataggtattccagctggtttattaggtggcgcttattatttaaaacgccgcgaagaaaaaggtaaataa

SEQ ID NO: 412023 - DNA, 750 bp, Staphylococcus aureus; identical to SEQ ID NO: 408399

SEQ ID NO: 412024 - DNA, 1104 bp, Staphylococcus aureus; identical to SEQ ID NO: 405247

SEQ ID NO: 412025 - DNA, 480 bp, Staphylococcus aureus
atgaaaatcaccattttagctgtagggaaactaaaagagaaatattggaagcaagccatagcagaatatgaaaaacgtttaggcccatacaccaagatagacatcatagaagttccagacgaaaaagcaccagaaaatatgagtgacaaagaaattgagcaagtaaaagaaaaagaaggccaacgaatactagccaaaatcaaaccacaatcaacagtcattacattagaaatacaaggaaagatgctatcttccgaaggattggcccaagaattgaaccaacgcatgacccaagggcaaagcgactttgtattcgtcattggcggatcaaacggcctgcacaaggacgtcttacaacgcagtaactacgcactatcattcagcaaaatgacattcccacatcaaatgatgcgggttgtgttaattgaacaagtgtacagagcatttaagattatgcgtggagaggcgtatcacaaataa

SEQ ID NO: 412026 - DNA, 693 bp, Staphylococcus aureus
atgaattattcgccgaagcaaggtgtaaggagtcatggcttaccacacgatccatttaaaagtagtacagtaccacgtccaatagggtggatctctactgtatcgaaagatgggaaagataatttagcaccttatagtcagtatcaaaacttaacatgggatccgcctatggttatgttcgcagcaaatcaatctgttcttggtgatcatgagcgtaaagatacagtaaaaaatgcagaagagacagggtggtttgtatggaacatggccacgtatgatttaagagaagctgttaatttatcgtcgaaggcactaccacctgaagaggatgaatttgaatatgcaggtgtgacgaaagaagcatgtatagaagcaccaggttatcgagtcaaagaatcgccagtacattttgaatgtgagtacgttcaaacgattcgtattccgacaggagacactgtatcaaccgttgatattgttataggaagagttgctcaggttcatattgacgataagttcattcttgataatggtaaattagacattaagtcgattaaacctattgctaggttaggatattatgattacacggttgtgaatgaaatatttgaaatgaaagcaccatcagcttctaaagaagagcttgcaggtttagaaggaagaaattttgataatcaatcagataacaaggaatag

SEQ ID NO: 412027 - DNA, 402 bp, Staphylococcus aureus; identical to SEQ ID NO: 406442

SEQ ID NO: 412028 - DNA, 2529 bp, Staphylococcus aureus
atgactaaagaagaaattgaacaagccaaagcacaacttggacaagcgttacaagacattaaagatttagtgaaagctaaagaaagcgtgaaacaagatattgataagcaagttcaagcattaattgacgaaattgatcgaaatccaattctaacagataaggaaaaacaagcgcttaaagatcgaataaatcaaatcctgcaacaaggtcataacggcattaacaatgcgatgactaaagaagaaattgaacaagccaaagcacaacttggacaagcgttacaagacattaaagatttagtgaaagctaaagaaagcgcgaaacaagatattgataagcaagttcaagcattaattgacgaaattgatcgaaatccaaatctaacagataaggaaaaacaagcgcttaaagatcgaataaatcaaatcttgcaacaaggtcataacggcattaacaatgcgatgactaaagaagaaattgagcatgccaaagcgcagcttgcacaagcattacaagacattaaagatttagtgaaagctaaagaagatgcgaaaaatgcaattaaagcattagcaaatgcgaagcgtgatcaaatcaattcaaaccctgatttaacacttgaacaaaaagcaaaagcgctcaaagaaattgacgaagctgaaaaacgagcactagaaaacattgaaaatgctcaaactaaagatcaattaaatcaaggattaaatttaggattagatgatattagaaatacacatgtatgggaagttgatgcacaacctgctgtaaatgaaatttttgacgcaactcctgaacaaatccttgtaaatggcgaactcattgtccatcgtgatgacatcattacagaacaagatattcttgcacacatcaacttaattgatcaacttacagcggaaattattgatacaccgtcaactgcaacaatttctgatagtttaacagcaaaagttgaagtaacattgcttgatggatcaaaagtgattgttaatgttcctgtgaaagtagtagaaaaagaattgacagtagttaaacagcaggcgattgaatcaattgaaaatgcggcacaacaaaagattaatgaaatcaataatcacgcaacattaacacctgaacaaaaagaagctgcgattgcggaagttaataagcttaaacaacaagctattgagcaaattaacaacgcagcagatgttcatacggtggaagaagttcaacaccaagaacaggcgcatattgaacaattcaatccagatcaatttacaattgaccaagccaaatcaaatgccattaaatcaatttctgatgctatccaacatatgattgatgaaattaatgctagtaaggatttaactgataaagagaagcaagaagctatatctaaattaaatcagttaaaagatcaatcaattcaggcgattcaacgtgcgcaaagcatcgatgaaattgcgcaacaattagagcaatttaaagcgcaactaaaagcggccaatccatttgctaaagaattggaaaaccgtaaaaaagctgcgatttcaaaaattaaagatatttctacagataaaattgatcgcattagaaatagcacaattggaactgctgaagaaagacaagcagcaatgaatcgaattaacgaaattgtgcttgaaacaatcaaagatattaataatgcgcaaacgccacaacaagttgaggctgcattgaataatggtatcgcacgaattttagcagtacaaattgtaacatcagatcatagcaaaccttcatcaaattcagatggtcaatctaatagtcatttacacgttggttatggcactgtaaatcatccattcaatagttcgcctattggacataagaagaaattggatcaagatgatgaaatcgatccacttcatatgcgtcatttcggtgaccgaattggtaatgttatcaaaaacgcacttggcgttgttggtatttctggattacttgctagcttctggttcttcattgcgaaacgtcgtcgtaaagaggatgaagaggaagaattggaaattagagataatagcaaagacaagaagaaaggttcaatagaaggtactaaacatttaccacttttatttgcgaaacgtcgcagaaaagaagatgaagaagatgttactgttgaagaaaaagattcgctaaacaatgacgagtcactcgataaagttaaacatacgccgttcttcttacctaaacgtcgcagaaaagaagatgaagaagatgtggaagttacaaatgaaaacacagatgaaaaagtgttgcaagataacgaacattcaccggtcttaatcgcaaaacgactcaaagataaagatggaaatgttgaaacaacaactagtattgaatctaaagatgaagacgttcctttattattggctaaaaagaaaaatcaaaaagataaccaatccaaagggaaaaagtcggcatcaaaaaaaccttctaaaaaggtagcagctaaaaagaagaaaaagaaagctaagaaaaataaaaaataa

SEQ ID NO: 412029 - DNA, 309 bp, Staphylococcus aureus
gtgaagaaccatacaaatataattaatatcttattagttatagtcaactcattaactcattttctaactctaaacacctcattttttaataattcagcatcggatttctgttttatcataggggctatatttttcttaatcggaatttttgttgcaatatacggtatgaagcgagcaacatattggttaaacttattgattttatttaccaatattttttattttctacacttctgtgtgttacttttgttaaaatatataggatttaaattatttatttatgaagggtgtgtattgttatttacctaa

SEQ ID NO: 412030 - DNA, 528 bp, Staphylococcus aureus; identical to SEQ ID NO: 405641

SEQ ID NO: 412031 - DNA, 696 bp, Staphylococcus aureus; identical to SEQ ID NO: 406524

SEQ ID NO: 412032 - DNA, 396 bp, Staphylococcus aureus; identical to SEQ ID NO: 406523

SEQ ID NO: 412033 - DNA, 441 bp, Staphylococcus aureus; identical to SEQ ID NO: 406522

SEQ ID NO: 412034 - DNA, 441 bp, Staphylococcus aureus; identical to SEQ ID NO: 406521

SEQ ID NO: 412035 - DNA, 261 bp, Staphylococcus aureus
atgcatgttgcagagttcaaacgtatgaatgctaatatcaatgtagaaggtcgtagtgctaaacttgaaggtaaaagtcaattgcaaggtgcacaagttaaagcgactgatttaagagcagcagccgccttaattttagctggattagttgctgatggtaaaacaagcgttactgaattaacgcacctagatagaggctatgttgacttacacggtaaattgaagcaattaggtgcagacattgaacgtattaacgattaa

SEQ ID NO: 412036 - DNA, 330 bp, Staphylococcus aureus
ttgccaccattgattagtgtgaagcccggcaagttattaacaacgtttactgttggcacagaacggttggtacttggtctaataccattgtcatcaaatgacagcacttcgttaggtgcattttgtcctgcattattggcattaggatcagttgttggcgtatatggcgctgtaattgcaactggtgcaccaccgtttcctaccgctgcagccgctggatctgctggagttgcattaggatctgccggtgccgcacgtctacttctctttttcggtctattagatgctggttcagcaattgcaactagctctggtttatttgaagaatga

SEQ ID NO: 412037 - DNA, 285 bp, Staphylococcus aureus
atgaaatcttgtgtatatgttttatacgttaatgtctcgttaaatgttactgttcttggtgtcggcacattatttacacgtaatttatatcttaaatcgagtattttatcaggcataagtcgtgccggagagtttgctgtacctcctccagtacttttaattgttatcacacgatttgctgcatcatatgtaacattcatatcattaacatcaacgcctgaattgttacttggaaaatctttagtcaatgaattgttcacatattcaacaccttcaggtaattga

SEQ ID NO: 412038 - DNA, 225 bp, Staphylococcus aureus
ttgaataatgatgattataatgtccaacagttaagaaaaagatatgatattccaaccaaacaagcgccgaaactattattgaaaggcgatggagatttaaaaggttcatccgtaggttctagaagtcttgaatttacctttgtcgaaaataaagaagaaaacatttattttacagattctgtacaatatactccaagtgaggatacaaggtatgagtcaaactga

SEQ ID NO: 412039 - DNA, 1539 bp, Staphylococcus aureus
atgacatcaaaacatcaacaaaaggggtctatcgtcaatcgtttcttgaatagtgttgaaaaaatcggaaataaattgccagatcctagcgtcttattctttttaatgtgtgtgggcttagccattatgacatgggttatctcattatttaatgtatctgttaagcatccaggtacgcatcaaaccatttatattaaaaatataattagccatgatggatttacgatgataatgaatgatacgattaaaaatttctcagagttcccagcattaggcttagtactagcagtgatgattggtattggtgttgcagagaaaacaggatacttcgataagttaatgatttctgttgtgaatcgcgcaccacgtttcttaattttaccgactattatattaattggtattttaggtagtacagccggcgatgctgcgacaattatcttgccgccgcttgcagcaatgctttttattaaaattggctatcaccctatcgctggactaacgatggcatatgcttccgctgttggaggatttgcagcaaatatagttgttggtatgcaagatgctttggtctattcatttacagaaccggcaacacgtatcgtttcagattctattaaaacaaacgttgctatgaactggtactttatcgcagcgagtgtcgttgtattacttcctacgatattgctagttacaactaagctcattattcctagattaggaaaatatgatgacagtttaatgcatgatgaccatgaagaaacatcttcacatattactgacaaagaagcacatgctttaaaatgggcaaatatcagtttcatagtcacaattattttattaattattacagccattcctgaacatagctttttaagaaatgctaaaacaggcagcttactagacgatgcgccattaattaacggtgtcggattaattattcttgtcgtatttttagtacctggattagtttatgggattttaagcaaagaaattaaaaatacaaaagacttaggtaaaatgttcggcgatgctgtaggatcaatgggaacatttatcgttattgtgttttttgcagcacagctacttgcgtatttaaagtggagtaatttaggaattatcgctgctgttaaaggtgccaaattattagaacatcaaaacggtattgtattgatactaggtattattgtactgagtgcaatggtcaacatgttaatcggaagcgcatcggctaaatggggtattctaggaccgatattcgtaccaatgttaatccttatcggctttcatcccgcattcacacaagtcatttaccgtgtaggcgattcaattaccaatccaattacaccgatgatgccgtacttacctttattattaacttatgcacaaaaatacgataaacgcatgaaactcggagccttactttctagtttaatgccgtattcaatcgcgctaagtattgtatggacagtatttgtcatcatttggttcctattaggtatccctgttggaccaggtggaccgatattcgttaaataa

SEQ ID NO: 412040 - DNA, 1167 bp, Staphylococcus aureus; identical to SEQ ID NO: 404856

SEQ ID NO: 412041 - DNA, 150 bp, Staphylococcus aureus; identical to SEQ ID NO: 407171

SEQ ID NO: 412042 - DNA, 207 bp, Staphylococcus aureus; identical to SEQ ID NO: 407172

SEQ ID NO: 412043 - DNA, 1536 bp, Staphylococcus aureus; identical to SEQ ID NO: 405476

SEQ ID NO: 412044 - DNA, 309 bp, Staphylococcus aureus
ttggcgagtaaaaagtataaaaattgggattggaattatgggaagtcacctaaatatgaatataatcgaagtgaaagattatcatcaggtactgtagatattaccatttctgttgaacaaaatcgtattgcagattgtagaatttttggtgatttctttggacaaggtgatataaaagatgtggaagaagcattacaaggaacaaaaatgacaagagaagatttaacgcatcagttaaagcaattagacatcgtttattattttggcaatgttacggtagaagcattagtggatatgattttaagttaa

SEQ ID NO: 412045 - DNA, 444 bp, Staphylococcus aureus
atggttgttgcgcaacaagatatgcttataccttgggagatgattccaagatgtccaaaatgtgatgccccaatggaagtgaataaacgtaaagcggaagttgggatggttgaagatgctgaatttcatgcgcaactacatcgttataatgcttttctagagcaacatcaagatgataaagtgttgtatttggaaattggaattggttatactacaccacaatttgtgaagcatccttttcagcgtatgacacgtaaaaatgaaaatgccctttatatgacgatgaataaaaaggcatatcgcattccgaattcaattcaagaacgtaccatacatttaactgaggatatctcaacattgattacagcagcactccggaacgacagcacaacgaaaaataacaacattggagagacagaagatgtacttaatagaaccgattag

SEQ ID NO: 412046 - DNA, 1020 bp, Staphylococcus aureus
atgattaaacaagtatgtaaaaatattacaatctgtagtttagcgctatcaacagctttaactgtatttccagcatcttcttatgcagaaattaaatctaaaattactacagtttccgagaagaaccttgatggtgatacgaagatgtatacacgtacggctacaacgagtgatacagagaaaaaaatctcacaaagcttacaatttaattttcttactgagccaaattatgataaagagacagtatttattaaggcgaaaggtacaattggcagtggattgaaaattttaaatccaaatggttattggaatagtacattaagatggcctggttcttattcagtctcgattcaaaacgttgatgataacaacaacagtacaaatgtgactgattttgcgcctaaaaatcaagatgaatcaagagaagttaaatatacgtatggctataaaacaggtggagatttttcaattaatcgtggtggtttaactggaaatattacaaaagagaaaaattattcagagacaattagttatcaacaaccatcttaccgcacacttattgatcaacctacaacaaataaaggtgtagcttggaaagtagaagcacattctatcaataatatgggacatgatcatacgagacaactaactaatgacagtgatgatagagtgaaaagtgaaatcttttcattaactcgaaacggaaacctatgggcgaaagataatttcacgcctaaaaataaaatgcctgtaactgtgtcagaaggatttaatccagaatttttagctgtaatgtcacacgataaaaatgataaaggtaaatcaagatttatcgttcattataaacgatcaatggatgactttaaattagattggaacaaacatggtttctggggctattggtctggtgaaaaccatgtagatcaaaaagaagaaaaattatcagcattatatgaagttgattggaagacacatgatgtaaaattaattaaaacaattaatgataaagaacagaaataa

SEQ ID NO: 412047 - DNA, 1437 bp, Staphylococcus aureus; identical to SEQ ID NO: 408452

SEQ ID NO: 412048 - DNA, 720 bp, Staphylococcus aureus
atgaataaaaatttagtcattaaaagcatggcagcattagccattttaacatcagtaactggaataagtgctgcagtcgttgaagagacacaacaaatagcaaaagcagagaagcatgttacgcaagttaaagatacaaatgtttttccgtatcatggcgtcgttgcatttaaagatgcgacaggctttgtaatcggtaaaaatacaattatcactaataaacatgtatcaaaggattataaagttggcgatagaattactgctcatccaaatggtgacaaaggaaatggtggtatttataaaattaaaagtatttccgattatccaggcaatgaagatatttccgtcatgaatatagaagaacaagcggttgaacgtggatccaatggctttaattttaatgataatgttcaagcatttaaatttgcaaaagatgctaaagttgatgacaaaattaaagttatcggttacccgttacctgcacaaaacagttttaaacaatttgaatctacaggaactataaaacgaattaaagacaatattttaaattttgatgcatatatcgaaccaggtaattcaggatcacccgttctaaattctaacaatgaagtcataggtgttgtatatggcggcattggaaaagttggttctgaatacaatggtgctgtatattttacgcctcaaattaaagattttattcaaaagcacattgaacaataa

SEQ ID NO: 412049 - DNA, 165 bp, Staphylococcus aureus
atgatagggagaattgtgacatgcatacacaacctaaatagcaacaacgaactagtaggtattcattttgcttcagatgtgaaagatgatgacaatagaaatgcttatggcgtctacttcacaccagagattaaaaaattcattgcagaaaatatagataaataa

SEQ ID NO: 412050 - DNA, 759 bp, Staphylococcus aureus; identical to SEQ ID NO: 405580

SEQ ID NO: 412051 - DNA, 204 bp, Staphylococcus aureus
ttgaagaaaagacaacaaaataagaaagcatcaaagctagattcatttaaagaaattaataataaaaaaattgaattaggatatacagctatggccatttttaaatatatggagaaaaagggttatgaaggtaaatataatattctagaagaatactgtaaaaataaaatacaaaatgagactaaaaaaataacatttttttga

SEQ ID NO: 412052 - DNA, 201 bp, Staphylococcus aureus; identical to SEQ ID NO: 406020

SEQ ID NO: 412053 - DNA, 1488 bp, Staphylococcus aureus; identical to SEQ ID NO: 408360

SEQ ID NO: 412054 - DNA, 411 bp, Staphylococcus aureus
atgaccaaaaaacatgtttttataattattggtgttattttatgtatatgtatagttgctacagtcatttatttaaaagtgaaatatgacgaaaaagaaaagcaaaaatcaatttattataaagaacaacaagagcgtattacactctatctcaagcataacactaaagaaccgaacacgatcaaatctgtacatttcacaagtttaaagacaggacctatgggcgatgccgtaattgaaggttacatcaatgaaaacaaaaaagctgattttgttgcatatgggtctccagaacatcattatcaatttggtggaagtttgatcaaaagtaaaaatttaagcacgttattaaaaccagcacatcaaaccaaatcacctgatgagataaaaaaagaactaaataaaaagtag

SEQ ID NO: 412055 - DNA, 345 bp, Staphylococcus aureus
atgaatttaattttattactagttataggatttttagtatttatagggacatatatgatattatctataaatttaattcgtattgtcataggtatttcaatttatacacatgctggtaaccttattatcatgagtatgggcacttacggctctaataaatcagaaccgctgattacaggtggaaatcaattgtttgtcgacccactgttgcaagctattgtattaactgcaatagttataggttttgggatgactgcgtttttacttgtcctcgtttatagaacttataaagtaactaaagaagacgaaattgaaggcttaaggggggaagatgatgctaagtaa

SEQ ID NO: 412056 - DNA, 426 bp, Staphylococcus aureus
atgaaagagaatgatgtcgttttaagaacggtcacgaaactcgttgtatttattttattgactttcggattctacgtcttcttcgctggccacaataacccaggtggtggctttataggtggtttaatatttagttccgcgtttattttaatgtttctagcttttaatgtcgaagaagtattagaaagcttaccgatagattttagaattttaatgattattggtgcattagtttcatctattactgcgataatgccaacattttttggaaaaccttttttgtcgcaatatgaaacaacattgacactaccaattttagggcacattcatgtaacgacaataacactgtttgaattgggcattttgttctcggttgtcggggttattgtaacggtgatgctgtctcttagtggaggtcgatcatga

SEQ ID NO: 412057 - DNA, 1365 bp, Staphylococcus aureus
atgaatcatgcaattttcaagtgtgcgcttttcatgggtgtagggattttagatcatgaagcaggttcaagggacatacgaattttaagtggcatgcgtcaattatttccaaaaatgaatcttgttatgatgattgcggcgctatctatggctggtgttccatttttaaatggatttttaagtaaagaaatgttcttagatgctttaacacaaactggacaattgtcccaatttagtttgatttcaatgattatcatcgtatgtatgggtgttattgctagtatttttacattcacatatgcactttacatggttaaagaagtattttggactaaatatgattctaaagtgtttactaaaaaaaatatccacgaaccatggttgtttagtttaccctctcttatattaatggtgctagtacctgtaatcttttttgtgccaaatatatttgggaaggggattatcgttccagcattaagaggtgtatcaggtggtaatcatcaaattgatccattggtaccacatgtttcgcaatggcatggatttaacataccgcttcttttaaccatcatcattattttattgggtagtgtactagcaatcaaagtagattggaaaaaagtgttcacaggtaaaattagacaaatttcagtttcaaaagggtacgaaatggtttaccgacaatttgaaaagtttactacgaagcgatttaaacgtgttatgcaagatcgtttaaatcaatacattattatgacactgggcatatttatggtaatcatcggatacggttatattcgtataggactaccaaaagttcatcagttacatgtttccgaatttggaccgttagaagttatattagcaattgttacagttatcattggtttgtcattaatatttatacgtcaacgactaaccatggtcattttaaatggggtcatcggttttgttgtaactttattctttatagcaatgaaagcacctgatttagcattgacacaacttgtagttgaaacgattacgacaattttatttattgttagcttttcaagattacccaacgtaccaaggtctaaagttaataaaaaacgagaaataattaaaatttcagtatctcttatgatggcgctgattgttgtgtcacttattttcatcgcgcaacaagcagatggattggcatcgatttctaatttttatcttagagcggataaattaacaggtggcaaaaacattgtgaatgcgatattaggagactttagagcattagatacattgtttgaaggtttagtattaattattactggattaggtatttacacattattaaattaccaagataggaggggacaagatgaaagagaatga

SEQ ID NO: 412058 - DNA, 1407 bp, Staphylococcus aureus
atgatgcgtatttataaagacgtagatacatttgttgttatatcacatttaggaattgatccttcaacacaagaaacatggcgtggtgattacttagtgaaacaattaagtcaaaatccacaattgaagaaacgtattacagttattgatggtcattcacatacagtacttcaaaatggtcaaatttataacaatgatgcattggcacaaacaggtacagcacttgcgaatatcggtaagattacatttaattatcgcaatggagaggtatcgaatattaaaccgtcattgattaatgttaaagacgttgaaaatgtaacaccgaacaaagcattagctgaacaaattaatcaagctgatcaaacatttagagcacaaactgcagaggtaattattccaaacaataccattgatttcaaaggagaaagagatgacgttagaacgcgtgaaacaaatttaggaaacgcgattgcagatgctatggaagcgtatggcgttaagaatttctctaaaaagactgactttgccgtgacaaatggtggaggtattcgtgcctctatcgcaaaaggtaaggtgacacgctatgatttaatctcagtattaccatttggaaatacgattgcgcaaattgatgtaaaaggttcagacgtctggacggctttcgaacatagtttaggcgcaccaacaacacaaaaggacggtaagacagtgttaacagcgaatggcggtttactacatatctctgattcaatccgtgtttactatgatataaataaaccgtctggcaaacgaattaatgctattcaaattttaaataaagagacaggtaagtttgaaaatattgatttaaaacgtgtatatcacgtaacgatgaatgacttcacagcatcaggtggcgacggatatagtatgttcggtggtcctagagaagaaggtatttcattagatcaagtactagcaagttatttaaaaacagctaacttagctaagtatgatacgacagaaccacaacgtatgttattaggtaaaccagcagtaagtgaacaaccagctaaaggacaacaaggtagcaaaggtagtaagtctggtaaagatacacaaccaattggtgacgacaaagtgatggatccagcgaaaaaaccagctccaggtaaagttgtattgttgctagcgcatagaggaactgttagtagcggtacagaaggttctggtcgcacaatagaaggagctactgtatcaagcaagagtgggaaacaattggctagaatgtcagtgcctaaaggtagcgcgcatgagaaacagttaccaaaaactggaactaatcaaagttcaagcccagaagcgatgtttgtattattagcaggtataggtttaatcgcgactgtacgacgtagaaaagctagctaa

SEQ ID NO: 412059 - DNA, 1215 bp, Staphylococcus aureus
atgtgggttcgtgaaatcaccaaaaacaatagtacggcctatcgctatttagagcgctatacagaccctttaactggcaagtataaaacagtatcagttacacgtaacaagaataatgtacgtagccaaaaggacgctcaattagaattaaataaaataattgagcaacgtttgaaacattacagtacgaaacaacttgaaaacttaacgttccatgatgcgtgcgatgaatggttagagcattacaagacacattcaggctcgaaaccaaccactattaaagaaaagaaaagtaatactaatacagttaaaaatgctattgatagcaaagtactcatcagcaagattacgcacacctacttacaaaacatcattaatgaatgggctaaatcacatagtattggccatgttcaatctcttgttattgttattcgttccgttttcaaatatgcgtttaaatattatgatctgcacgatattagtgtgttagataaaatagatatacctaagaaagcccaaaccagaaacgagtttcaagctaaacgtaataactatttagaagatagcgaagtaaaggagttactagagtgcttcgactatctaattaaacataagcgtcatgctacgcgtaaacgtaactatgaaatggtaaaagcattagtagaatttcaaattaacaatggaatgcgcattggcgaactcctagcaatcaagacagacaatgtagacgtggagaataaaacactagagattgatggcacaattaactgggttacagatgtagtaactggagcatttggagtgaaagaaacgactaagacgagtaagagttatcgaacaataggcctcacagctcaaagtattaatttacttaaaaaactcatgctagaaaataaaaaagagaatcagtggaatgataaattcatagatagaggttatatatttactaacactgctggtagccctattgacttaaataaggtgaataatattattaaagaagctactgatataagttcaattaacaagcgtgtgacaacgcacacattacgtcacacacacatatctacacttgcgcaattaggaattaacctaaaagcgatacaagagcgtgtaggtcactcggactataaaaccaccttagagatatacacacatgttactgataagatggcaaaagatatgatgaataaattagaggggatagggagttag

SEQ ID NO: 412060 - DNA, 378 bp, Staphylococcus aureus
atgcgtgatgcaataaccggatgtgcttcagctgtattcgtaccaatcaatacagacattgctgctttttctaaatcttcaatactacctgagtcaccgccgtgtccaaccgttctaaataagccttttgttgcaggtgcttggcaatatcttgaacagttatcaacgttatttgtgccaataacttgtcttgctaatttttgcattaaatacgattcttcattcgtcgctttagaagaagaaatgaatgataatgcatctggaccatgcttttctttaatagatgtaaaattatctgcaatgacatttaatgcttcatcccattctacttcatggaactcaccatttttccttactaatggtttcgttaagcgttga

SEQ ID NO: 412061 - DNA, 1635 bp, Staphylococcus aureus
atgaaaggcattgaattacttaacaatccatttttaaacaaaggtacagcttttactaacgaagaaagaaaacagttagggcttgaaggattattacctgcgaatgttcgaactttagaacaacaagcagaacaatgttatgaacaattcaaggcgaaacaaaccgattttgagaaacgtttatttttaatggcaatttttaatcgtaatcgtacattgttttacaaattgacttctgagcatttagttgaatttatgccaattatttatgaccctgttattgcacaatcgattgaacaatataatgagaatttcagtagaccccaagatgcagtatttttatctgttgatagacaagaccaaattgaacaagaattgcgcaacgttgcaaatggcagagatattcgattaatcgtagtaacagatgcggaaggtatattaggtatcggcgattggggcgttgatggtgtagatattgcgataggaaaattaatagtatatacagcggcagctggaataaatcccgcacaagtattacctgtatctttagatgtaggtactaataatgaacaattactgaatgatgaactttatttaggaaatcgtcataaacgtgtcgatgatgagacatattacacatttgtagataaatttgtgagtgcagtgcgtaaagaatatcctaatgcactattacattgggaagattttggtagagggcatgctaaaaatattttagataaatatgaagatactttaccaacatttaatgatgatattcaaggtacaggtatagttacattagccggcgtactaggtgcattaaatatttctaaagtagactatacgaatcagacgttcttagtttatggtggtggtacagctggtatgggtattaccaatattttaaaagatgaactaattaaacaggatgtttcagaagataaagcaaatcagcatttctatattatggataaacaaggattgttgtttgatgatatggatgacttaactgaagctcaacaagtatttgctaaaaataggaatgaattttcaaatacagtaaactggaaaaatttaaaagaagtaattgaaaatattaagcctactgttttaatcggtacatcaactcaaacaggtgcatttacagaagatgcagtaaaagagatgttaaaacatacagaacgtccaatgattttcccattgtctaatcctacaaaattagcagaagcaactgcacaagatttattaaaatggactaatggaaaagcattaattggaactggtatcccatataatgacattgaatacaatggtgtgaattacagtattggtcaagcaaataatgcattgatgtatcctggtttaggtttgggtcttattgcgtcaaaagcgaagaaagtaaatcaacagattctatcagctgcgagtcatgcacttggtggcatggtcaatccagatgaaccaggagctgcagtcttaccacctgttgagaaaatacatcaatgttctcgtgccatagccaaagcggttgcacaaagtgtcattgatcaaggattaaacgctgaaactattgatgatattgatgaagcaattgaagctgaaatttggtatcctgaatacaaatcatacatttaa

SEQ ID NO: 412062 - DNA, 153 bp, Staphylococcus aureus; identical to SEQ ID NO: 407029

SEQ ID NO: 412063 - DNA, 360 bp, Staphylococcus aureus; identical to SEQ ID NO: 407030

SEQ ID NO: 412064 - DNA, 498 bp, Staphylococcus aureus
atgagtccttattttggttatgcagcacgtctattggcaacaagtggcattgactatacgtatgtaagaatggcaatgtacatggatccacttaaaccatatttaccagaattgatgaatatgcataaactgatttatccagctggcgatggtcgtattaattatattactagaaatgatattgctagaggtgtcattgctattattaaaaatccagatacttggggcaaacgctacttattatcaggctacagttatgatatgaaagaacttgctgcaattttatctgaggcatcaggcacagaaattaaatatgagcccgtttcattagagacatttgcagaaatgtatgatgaacctaaaggctttggtgcattattggcatcaatgtacgacgcaggagcaagaggactattagaccaagaatccaatgatttccaacaattagtcaatgatcaaccacagacactgcaatcatttttacaagaaaatatttaa

SEQ ID NO: 412065 - DNA, 345 bp, Staphylococcus aureus
ttgattggtacaattgaagtgcctatgacattggcaatcgttggcggtggtacaaaagtattaccaattgctaaagcttcattagagctactaaatgtagagtcagcacaagaattaggtcatgtagttgctgccgttggtttagcgcaaaactttgcagcatgtcgcgcgcttgtgtcagaaggtattcaacaaggtcatatgagtttacaatataaatcattagctatcgttgtaggggcaaaaggtgatgaaattgctaaagtagctgaagctttgaaaaaagaaccccgtgcaaatacacaagcagcggaacatattttacaagaaattagacaacaatag

SEQ ID NO: 412066 - DNA, 1332 bp, Staphylococcus aureus
ttgtactcgcaaagaaaattagctaagtactataatgtaaataaatccacagttatacaagctttagatattctaaaaagctatggcatcttagatacaattgaaaaaaaaggtatttatgtatcccagtataaatggaattcttatattaccaataatattcattggcaagattatataggcaacagcttttctaaaaataaccagtattatattcaaaaaattaatgaaatagaatttaatactgatatcgtccgattaggtactggagaactatcaccaaaactaattccaaaccatatatttaaaaaaatattaactaatgatattgaagaatctttacaaactaactatgaagaacctaaaggaaatctaaagttaaggatagaaatagtaaagtatatgaagcgaagaggagttgattgtaatatcaataatatatgtattacatccggtgctgtacaaggtttaaaactaattgcagacggactgttaattccacaatctaaaattataattgaaacaccatcatacattaattccatacgtacttggcataatatcagagcgaaaattattcctttgtccatcaattacatcaaacagaatattaacaatatctttaaattaaatagtgattataggcacagtattttttactgtatacctacgctgcataaccctactcaaaatacttatagtaaagaagagaagcaaaaaattatagatcaatgtcataaagaaggtattccaattgtggaagatagtatatactctgatttatggttcagccctaaccaacaaatttctatgaaagctttaaaaaatagtgataatgttttatatttaggtagtttatctaaaactgtaagtcccggtttacgtattggttggattatagcagatgaaaaagtaattcatcatttagccgatttaaaaatgcaaaatgattatggtgcaagttctatatcacagtatattgccacaacgtggttaagtaattatcatgaagatcatttatataaattaaaaatcgaactaaaattacgaaaatctatttttataaagtcattaaagaaacatctatctaagtttggatattggaatgaaccccaaggctcattttatatctggtttaagctatctgttccagtaaatataaagctcttatttaacgaagcaataaaagaaaatatactaatacacccaggagaaatatatgacattaactctaaaagctatatccgcttttcatactcatatatcgacaaggaagaaattgaccaaagcttaaaaaaattaagtgaaattataaatagaatacgaacttag

SEQ ID NO: 412067 - DNA, 204 bp, Staphylococcus aureus
atggcgtcaaaatatggaataaatgatatagtagaaatgaaaaaacaacatgcgtgtggaaccaatcgttttaaaattattagaatgggtgctgacattagaattaagtgtgaaaattgtcaacgaagcattatgattccacgtcaaacgtttgataaaaaactaaaaaaaatcatcgtatctcaggatgatacacaaagatag

SEQ ID NO: 412068 - DNA, 882 bp, Staphylococcus aureus
atggatcaagttatgagtattatttcatcgctattcgaaccattaactaaaattgaaacatatgaaagtgtcgctactaaattagcgatgataattatatatattatcgttgcattaatcgtaattaaaatacttgataaaatgattgcccaaggatttaaaatacaaaacaagagtaaaaagggtaataaaaaacgttcgaaaacattaatatcattggtgcaaaatgttgttaaatatattgtgtggtttatagttgtaactaccattttaagtaaatttggcattagtgttgaaggagtaattgcaagtgctggtgtcgtaggcctagcagtaggttttggtgctcaaactatagttaaagacgtaattacaggattctttattatatttgaaaaccagtttgatgtaggtgattatgttaagataaacaacggtggtacaactgtagcagagggaacagttaaatcaattggactccgttcaacacgcattaatacaatatctggggaacttacaatcttgccaaatagtagtatgggtgaaataacgaattactcaattacaaatggaacagcaattgttaaaattccagtatctgtagatgaaaatattgataatgttgagaagaaattaaacaaattatttacatctctgcgtagtaaatattatttatttgtaagtgatcctgttgtgattggtattgatgcctttgaagatactagagtaatattaagggtttcagcagaaactataccaggtgaaggtttctctggtgcgcgtattattcgtaaagaagtacaaaaaatgtttttacaagaaggtattaagacaccacaaccaataatgacaccttttaatcatagtgaaaacggtgtttag

SEQ ID NO: 412069 - DNA, 801 bp, Staphylococcus aureus; identical to SEQ ID NO: 406803

SEQ ID NO: 412070 - DNA, 342 bp, Staphylococcus aureus; identical to SEQ ID NO: 408510

SEQ ID NO: 412071 - DNA, 801 bp, Staphylococcus aureus; identical to SEQ ID NO: 406803

SEQ ID NO: 412072 - DNA, 237 bp, Staphylococcus aureus; identical to SEQ ID NO: 410422

SEQ ID NO: 412073 - DNA, 237 bp, Staphylococcus aureus
ttgtattcagctatggtatcacaaccaaaaggcgagagtttaaaatcacgaggaatgatattaaagttagatagaaataagagaactgctaaaggaagttatattataagagaattgaaagaagataaaaatcatgatgttcaaaaaaacgaaaaaaagtatccagttaaattggtgaataataaaataattccaactgaagatgtaaaaaacgaagatttaaaaagagaaatttaa

SEQ ID NO: 412074 - DNA, 1038 bp, Staphylococcus aureus
atgaaaacacgttgttacgatggtaaaaaatggcaatatgaatttaagcatgaaggaaaaagataccgtaagaaaggttttagaacaaagcgtgaagctaattctgctggactagacaagttaaatgagttaagaagtggttttaatatagataactatataactcttgaagaatacttcgaaaattggattaaaacatataaacaacctgttgttaaagaaaatacctaccgtcattatagaaatgcattacaacatatacaaaaacataaaataggtaaaatggagttatcaaagataaatagacaagtttatcagaaattcataaacgactattcaaaagaacacgcaaaagaaactataagaaaaacaaacggtgctattcggtcagctttagatgacgcattatatgatggacttatttttaaaaaccccgcttataaagttaattataaagccggaaaacctacgaagtcagaacaagaaaaattcatctcggtaactgaatatgaaatactaaaagatcacgtcagaaagaagagaactcgttcatcattagcgctattcataatgatttgtacgggttgtcgtgtcagtggtgcaagaaatataaagattgagcatatcaaccaagtgaaaaacactatatttattgacgagcgaaaaaccgatacttcccctagatatatcagtatcgctaaatctgatatgaaacacattatggacgtcataagtacatttgcaattagctatgatggttacattttcaaagaagccggatctataattaaccttcatgctatcaataatgctttgaaatcagcctgtagagtcaataatataccaattattacatcgcacgcattaagacacactcattgttcttatttactagcaaaaggtgtatctatacattacatttctaaaagattaggtcataaaaatatagcaataactacatccgtgtattctcatttgttagaagaaaaatttaatgaagaggacaaaaaaacaactaaaattttagaaagtatgtaa

SEQ ID NO: 412075 - DNA, 693 bp, Staphylococcus aureus; identical to SEQ ID NO: 405624

SEQ ID NO: 412076 - DNA, 1761 bp, Staphylococcus aureus
gtgcgagcgaaaattaatgatattttcaaagacaagttatcaacgaaagaacttaacgatttgactgctcttgtttactatccagaagacaaattgcaacttattaaatgtgattttcaaaattatggacaattaaatgtttggtatattacgacgattgaacacctcattcagctaattaaatattgttcttcaaaatatacgcgttcaaaacttcgacgtgccttgccggagcaatacgttttcatcgtagaagagttattatataagaacaacgaatttaaaaataaaaaatcttactacgaaacacttgtaaaccaagtgattgagcttaagcaagcggatgatttaattatagggcttgcgtattctgtacaacgcttagtcgtcgatcatttacacgttgtcggcgatatttatgatcgtggcccgcaaccagataaaatcatggacacgctgattaattatcattctctggatattcaatggggtaatcatgatgtgctgtgggttggtgcgtatgcagggtctaaagtatgtttagctaatttactacgtatttgtgcacgttatgacaatctagatatcgttgaagatgcatacggtattaatttaagacctttgctaacattagccgaaaaatactatgatgcagataatcctgcttttaaacctaaaaaaaggcctgacaaacatgaacgtttaactcaacgcgaagaaagtcagattactaaaattcatcaagcaattgcgatgattcaattcaaactggaaataccggttattaagcgacgtccaaactttgaaatggacgaacgacttgtacttgaaaaagttaattatgatactaatgaaataacagtatacggaaaaacatatccattaaaagatacatgcttccaaactgttaaccgtgataacccagcaaagttactacctgaagaagaagaagtcatgaacaaactattattgtcattccagcaatctgaaaaattacgtcgtcatatgtctttcttgatgcgtaaaggctcactttacttaccttgtaatggcaatttactcattcatggttgtattccagttgatgaaaatggtgagatggaatcattcgaaattgatggtcagacatacagtggccaagagttattagatgtgtttgaatatcatgtccgtaaatcatttgatgaaaaagaaaatactgatgacttatccactgatttagtttggtatttatggactgggaaatactcttcactatttggtaaacgtgcgatgactacgtttgaacgatactttattgcagataaagcttctcataaagaagaaaagaatccgtactatcatcttcgtgaagatgtgaatatggttcgtaaaatgctcagtgatttcggattaaatccagatgaaggacgcattattaatggtcacacaccagtgaaagaaattaatggcgaagatcctatcaaagctgatggaaagatgcttgtcattgatggcggcttttcaaaagcttatcagtcaacaactggcattgcaggctatacattgttgtataattcattcggaatgcaactcgttgcacatcaacaatttaacgcaaaagaaaaaattctttccgaaggtatcgacgaactgtcaattaaacggattgttgataaagaattacaacgtaaaaaaatccgcaatacaaataaaggtaaagagcttcaggctcaaatagatattttgaaaatgttaatgcatgatcgttacttagactaa

SEQ ID NO: 412077 - DNA, 264 bp, Staphylococcus aureus
gtgttgataatctatttgttgaagtataaagtaacgaattataaaccttctcctgatggaattatatatatattacaaaaatatgacttacataacaaagacactatatatgttggagatgctgtttttgatattaaaatggctaaaaatgccaatattgattcttgtgctgtaacttggggaagtcatagtattgaagtattaaacactgaaaatccaaattttataattaataatgttaaagaacttaattttgaggagtaa

SEQ ID NO: 412078 - DNA, 264 bp, Staphylococcus aureus; identical to SEQ ID NO: 408406

SEQ ID NO: 412079 - DNA, 768 bp, Staphylococcus aureus; identical to SEQ ID NO: 408258

SEQ ID NO: 412080 - DNA, 639 bp, Staphylococcus aureus
gtggatattgcaagcgaacaacaaattgacaattttgcatcagaaattagagaacagattgggcatgttgatgtgttatttaataatgccggtgtggataatgcggctggtagaattcatgagtatccaacagatgtatatgacaagattatgaatgtagatatgcgtggaacatttttgatgacgaaaatgatgttacctttaatgatgactaaaggtggctctattgttaacacatcttcattttcaggacaggcagcagatttgtatcgctcaggatataatgctgcgaaaggggcagtgattaattttactaaatccattgcaatcgaatatggtagagatggcattcgagctaatgcaattgcaccaggtacaattgaaaccccgttagtagataaactgacaggtactagcgaagataaggaaggcaaagcgtttagagaaaatcagaaatggatgacaccgctgggacgtttaggcaaaccagaagaagtaggcaagctcgttgtctttttagcatctgatgagagttcatttattactggtgaaacaattcgcattgacggtggtgttatggcttacacatggcctggtgagatgttgagtgatgattcgtggaagcggacattggaataa

SEQ ID NO: 412081 - DNA, 222 bp, Staphylococcus aureus
atgcaatattatcgcgaaacaggtatatatgctgaaagaacagcgccatggttaagaagacttggatttgaaaatgtaaaagaagtcttacttgacccagaaagacaaaatgaactatttgaacgcattatggatgctaaaaaagcagtcgaagctgaaccttgggaagcaataactagcaatgcgcaagcacgtagaatttttgaagtggagaaggtgtaa

SEQ ID NO: 412082 - DNA, 801 bp, Staphylococcus aureus
atgaatattgcaaagttagaagattatctacaaattgaaccaactcgttataatcaaccgagtattgaagcattaaattattatgcgactcgctttatgttaacggtgcctttcgaaaatattgatgttcaaaatggtaaaccaatatctgtagatatcgatgcacttttcaataaaattgttcatgataaacgcggtggtttttgttatgagttaaacacatttttcaaagcatatttacaacaaaaaggatttaacccagaattaatgtcggctaccattcatacacccggtggcggtcgtagtcaaaacggttcacatgcatcacttgttgtttctattaataatgtcttttatgtaaccgatgtcggctttggagacttacctctaaatgccataccgattactttaccagatgatacacagcagatcactgatatcagtgggacattccgcgctattttcaacagtgaggataaggacattttctatgttcaaaaatatgaaaataatcattggcatacaaaatacgaagctgaattcaaggctagagaaatagaagaattcgatcaaaacattgaatataatcaaacacatcctgattcagtatttgtaaaacatttattaattacaatgccacaatcatttggacgtgctacaatgtttgaaaaccatttaactttaacaaaagatggaacgccagaaaagttagctatcacaaaagataactataaacaatttttaacaaaatattttggattaaatgtaacaattagtcgacttgaaaacagcgacaattaa

SEQ ID NO: 412083 - DNA, 783 bp, Staphylococcus aureus
ttgaaatctgatgaaactacacaaaattattatctttatcatgatttagaaaatatatcactaaatataaaagatataagtgaaggagagaaaaatctaatagcatttttattcttttattttgaactttttgaggatgagaaacaagaaaccattaaaagtaacattaaaacgttaatcattgatgatcctattaatagcttcgacgaagcaaatagattttacgttttagaattaattaaaaaagtacttaaaagcaaatttaatcaaatatttatatttacccattcttggaatgacttttgtgatataacttatagattaaaaggggaagatcataatttttatgaagtgtacaaagatcatcagggaactagttttttagaaaaatttaagaaagtaaagacgccttataaaaagttatttcaagagatttacgagttatcgagaaaaagtcaaaaggacatagttgaggaagattgttattactatcattcaataaatagcattagaagagtgtttgaagaatttttaagttttaagttaaaaaatagtgacctagctcagaaatcaaaccaaccagaaattgaagaagtttatagaaaaatgacaggcaatgaaatgagtaataacaaaaaaataaagttaggatcatttttaacaattataaatgtattgtcacataaaccatacagagcaatagatgtaattggttcagcaaaatttttgatgaggtatattgaagatgtagataaagctcattatgatgctatgaaggattga

SEQ ID NO: 412084 - DNA, 228 bp, Staphylococcus aureus
atgtcaatatttgaaaaatgtactttatcattaacatttgttccttgttgtggagctgcaacagtattcactgccatgcgatttaaagttcttggtttaatagtcgttgttttaggtgtagttgaaacatcttttgcttgtgttaaattacttttatcagtttcattactatatgtagttgatgatttatcatttgttgttacattgctagtttttgtagtagattga

SEQ ID NO: 412085 - DNA, 1056 bp, Staphylococcus aureus
ttgagaaagcaaggctataatgtacatcaagcaagtgtaagtgcatttggtagtaactatgatcgcgctgtagaactttattattacattaaaggtggtcgcgtagattatggcgcagcacatgcagctaaatacggacatgagcgctatggtaagacttataaaggaatcatgcctaattgggaacctggtaaaaaggtacatcttgtagggcatagtatgggtggtcaaacaattcgtttaatggaagagtttttaagaaatggtaacaaagaagaaattgcctatcataaagcgcatggtggagaaatatcaccattattcactggtggtcataacaatatggttgcatcaatcacaacattagcaacaccacataatggttcacaagcagctgataagtttggaaatacagaagctgttagaaaaatcatgttcgctttaaatcgatttatgggtaacaagtattcgaatatcgatttaggattaacgcaatggggctttaaacaattaccaaatgagagttacattgactatataaaacgcgttagtaaaagcaaaatttggacatcagacgacaatgctgcctatgatttaacgttagatggctctgcaaaattgaacaacatgacaagtatgaatcctaatattacgtatacgacttatacaggtgtatcatctcatactggtccattaggttatgaaaatcctgatttaggtacatttttcttaatggctacaacgagtagaattattggtcatgatgcaagagaagaatggcgtaaaaatgatggtgtcgtaccagtgatttcgtcattacatccgtccaatcaaccatttgttaatgttacgaatgatgaacctgccacacgcagaggtatctggcaagttaaaccaatcatacaaggatgggatcatgtcgattttatcggtgtggacttcctggatttcaaacgtaaaggtgcagaacttgccaacttctatacaggtattataaatgacttgttgcgtgttgaagcgactgaaagtaaaggaacacaattgaaagcaagttaa

SEQ ID NO: 412086 - DNA, 1290 bp, Staphylococcus aureus
atggaagacttttataaaatgaaggaagaagaatttttcttaaaatctaagctacctttatatttatattccttcaactatgtagatgaatatacaatgaaattacttgatagaggaagaatatctatattaaatacgaaaacaaataaagattgtatatttgacatttcaaagtatatacatgagaatattatattcagaagagatatatttgaattaaatgatataagagatgatgatttgaagtataaaattaatggttacaatattgaggtatacttaagtggtgaattggagaaaattgtaaaacatttattcgaaaacaagtttgatgtagagtatggtttttatattttatttattaaaccaatatttgaaattgttttttcttctaactatgttaaagaagaattcaatacaaaaatcgaatcatcagaatatagagagagcttagatagttttaatgaaattttaatgaaatatctagaaaatgaaataaatttcaaagaagtatggaaaaaatatattgatgaattatttaaaaaattaaatgttcaaaaattgttaattcataaaaaaatagaaagtttaatatcctcgtatgataaaaaaatatctgatgattgtagtatgtactcaaaagtatttgaacaatataaaaaaaacgttgtattggataaaatatattactctgaagtttataaatatagtgataatttgataaaagtattctctgaagacgtttggaacataatggggtataaaaaatataatgaatattttacaaacagagatgatactacattaaaaattactaatttatatattgggcaatcttttggtacagagggtaatagaaatgtcattgatagaatagggaaaggtcatgaaaaattacaagaaattatgacttatcagccagaaaatagaaagactgtcttaatattttacaagatacagcctgacaatatttatattacaaaccaatatggtaaagaggctgtgtctcgattaaaaagaattttagagcaaagtatacctaataaagaatatattgatttatcagagatatcattaattacattttttaaaccagaatataataaacaacatgtgaatgaggagtttaattctttatcttcttcgaaaataaagaatttagccaaagaaaatgatggtattattatttatttaaattttaaggatgttaattatcaactgataagtgaaggcaatactttttttctgcaaaaccatatttgcattgtgtgttcaataaagatattttaa

SEQ ID NO: 412087 - DNA, 528 bp, Staphylococcus aureus
atgaatcaaacaactaaactttgtgcagcaacgacattagcattaggtactttaattggcgcaacagttgtagggactgcatcaccaatacatcaagaagcacaggcggcaacaacaccttactatacttatcatggatatatcggtcataacgctaattttataatggataagcattttattaacgctattaaatatgacaacgtgacatttaatggtattaaattagcgaagacaaatgcgacaaaaaaagtagagaaatacgatcaaacttttaaaggtgtaactgcaaaaggaaatgaagcgaatcaattacaatttatcgttaaaaataatatatcactaaaagatattcaaaaagcttatggtaaagatttgaaaaaagagaataataaaacgaaagaatctgatagcggtattttttattatcaacattctaaaaagtcattaggcatttggtttgttgttgatcataatagagtggttgaagttacagtgggacatacgccatacaaaacgagtaaataa

SEQ ID NO: 412088 - DNA, 345 bp, Staphylococcus aureus
gtgaaatatgacgaaaaagaaaaacaaaaagcaatatactataaagaacaacaggagcgtattacactctatcttaagcataatactaaagaacccaataccatcaaaactgtacatttcacaagtttaaaaagaggacctatgggcgatgcagtaattgaaggttacataaatgaaaataaagaagatgattttgttgcatatgggtctccagaacataattatcaatttggtggaagtttaatcaaaagtaaaaatttaagcacgttattaaaaccagtacatcaaaccaaatcacctgatgagataaaaaaggaattagagtctaaaaagaacgaccgctaa

SEQ ID NO: 412089 - DNA, 420 bp, Staphylococcus aureus; identical to SEQ ID NO: 404925

SEQ ID NO: 412090 - DNA, 825 bp, Staphylococcus aureus; identical to SEQ ID NO: 404996

SEQ ID NO: 412091 - DNA, 477 bp, Staphylococcus aureus
gtggaagtcaaacgtacatcaggtaatgtgtttatagaaaatggtagtaaatttgaaaaaggcggaaaatacctaggcaaaggtgttgcaggtgtaggatttggtataggtatgtatgatgatatggcaaacgatgataaaacagttggagaggcattgtcgcataatgctttaactacaggaataggtattggcgcaggtgcgggtatgactgctactatcgcgttatttgcaagtaatccagtaggatgggctgttataggtggctttgtgtttggttcggtttcgacaatgcttgtagattgggcttatcaaaataataaggctggtataaaagataaagcagactgggtaggacataaactagacgatggtatcgatgttgttaaaaaatctacagaaaaagccgtagatagtgttggtgaagctacaaaaagtatttctaatcatttaaaccctatgaaatggagctggtaa

SEQ ID NO: 412092 - DNA, 315 bp, Staphylococcus aureus
atggaaacgaaagagaaaatcaaagtgacaactttagatgaattgacacccttaattggtaaaaaggttattgtcaaaggcaaagaaataggattgtttttaactgaaagtggtacaattcacgcgattcacaatatttgtccgcataaacaagggccattgtcagagggaacagtgagtggtgaatatgtattctgtccactccatgatcaaaagattgatttaaatactgggattgtacaagaacctgatgaaggttgtgtagatgtatatgaggtagaagttacagacgggaacgtatatatatgtctgtaa

SEQ ID NO: 412093 - DNA, 222 bp, Staphylococcus aureus
atgcaatattatcgcgagacaggtatttatgctgaaagaacagcaccgtggttaagaagactagggtttgaaaatgttaaagaagtgttgcttgatccagaaaggcagaatgaattatttgaacgtattatggatgctaaaaaagcagtcgaagctgaaccttgggaagcaatcactagtaatgcgcaagctcgaaaaatctttgaagtggagaaggtgtaa

SEQ ID NO: 412094 - DNA, 309 bp, Staphylococcus aureus
ttgctagttttatcattgggagcattatgtgtatcacaaatttgggaaagcaatcgtgcgagtgcagtggtttctggggaggagaatccatataaatctgagtcattgaaattaaatgggaaaagaagtactacaataactagtgataaatatgaagaaaatttagatatgttaatatcgtcattatcatttgcagattatgaaaaatatgaggaaccagaatacaaagaagcagttaaaaagtatcaacaaaaatttatggctgaagatgatgcattaaaaaattttttagtgaagagaaaaaaataa

SEQ ID NO: 412095 - DNA, 537 bp, Staphylococcus aureus; identical to SEQ ID NO: 410845

SEQ ID NO: 412096 - DNA, 234 bp, Staphylococcus aureus
atgtcgattcgaagtgtcgcccctaaaacagaagcatataatctttcgactatatatggatcattgttattttcaaataattttaataaaccaataattttagttggaaatgttttgaataattttactaaagatttagtaccgagatctcttaatttattattagttgcagaaaatatccacgttaaaaaaatcatatatttttccgcagtttcttcatctaatttcttatag

SEQ ID NO: 412097 - DNA, 1200 bp, Staphylococcus aureus
atgtttatgcgaggtttaggagaaatcattatacagaatactgaatttaaatctttcgcagatgtaaccaatacatatattgggccttttgcaggatttgttaccggatggacatactggttctgttggattattacaggtatggctgaagtaacggctgtggcaaaatatgttagcttttggttcccagaaattccaaactggataagtgcactattttgtgtactgttattaatgtcattcaacctacttagcgcaagacttttcggagaattagaattttggttctctatcattaaaatagcgacaattattggtttaatagtagttggtttcgtcatgattctatttgcatttaaaactcaattcgggcatgccagtttcacaaatctatatgaacacggcatattcgctaaaggtgcttctggattctttatgtctttccaaatggcactattctcatttgtaggaattgaaatgattggtgttacagctggggaaacaaaagatccagttaaaacaattccaaaagcaattaacagtgtacccattagaattttaatattttacgttggggcgttagcggttatcatgtctattatcccttggcagcaagttgatcctgataacagtccattcgtaaaattattcgcattgatcggaattccgtttgctgcgggcttgattaattttgtagtattaaccgctgctgcttcatcatgtaacagtggtatattctcaaatagccgtatgcttttcggtttatcaagtcaacaacaagcacctccgaacttttctaagacgaataaatatggcgttccacatgttgcaatctttgcttcatcagcattattacttgtggcagcattactaaactatattttcccagatgcgacaaaagtatttacgtatgtgactaccatctctacagtgttatttttagttgtatggggtctgattatcattgcatatatcaattatagtcgtaaaaacccagatctacataaaaatgctacgtacaaactattaggtggcaaatatatgggctacttaatatttgtattcttcatttttgtgttcgggttattatttattaatgttgatacaagacgtgcaatttattttattccgatttggtttatacttttagcatttatgtacttaagatataaacgtatcgctgctaaatcaaataaataa

SEQ ID NO: 412098 - DNA, 567 bp, Staphylococcus aureus
atgattttagttgtagataattatgattcctttacgtataacctagtggatattgtggcacaacacactgatgtcattattcaataccctgatgatgataatgtgctgaatcaatctgttgatgctgtcattatttcaccaggccctgggcatccattagacgaccaacatttaatgaaaattatctcatcctatcaagataaacccattttaggtatttgcctaggtgctcaagcactgacttgttattacggtggagaagtcattaaaggcgacaaagttatgcacggaaaagttgatacgcttaaggttatatcgcatcatcaacatctgttatatcaagatgtaccagaacaattttctattatgagataccattcattaataagtaatcctgataattttccagaagaattgaaaattactggacgtactgatgattgtatacaatcattcgagcataaagaaagaccgcattatggtattcagtaccatcctgaatcatttgctacagactatggtgtcaaaataattacaaattttattaattacgtgaagaaaggatga

SEQ ID NO: 412099 - DNA, 243 bp, Staphylococcus aureus; identical to SEQ ID NO: 408420

SEQ ID NO: 412100 - DNA, 1119 bp, Staphylococcus aureus
gtgtctttagtcttaggaacacctaaagaaagaaatgatgcattaaacacagaggctgatatctatgtaaccaataaagaaaatactaaatggttatgcgatcaatataaaaaagaatggccatttgatatggttgtaattgatgaactgtctacatttaaaagtcctaagagtcaaaggtttaaatctattaaaaagaaattaccactcattaatagatttataggattaacaggaacacctagcccaaatagtttacaggatttatgggctcaagtttatttgatagacagaggcgaaagacttgagtcttcattcagtcgttatcgagaaaggtactttaaaccaacacatcaagttagcgaacatgtttttaactgggagctaagagacggatctgaagaaaagatatatgaacgaatagaagatatatgtttaagcatgaaagcgaaagattatctagatatgcctgacagagttgatactaaacaaacagtagtcttatctgaaaaagaaagaaaagtatatgcagaattagaaaaaaactatattttagaatcggaagaagaaggaacagttgtagctcagaatggggcatcattaagtcaaaaactacttcaactatctaacggtgcagtttatacagatgatgaagatgtaagacttatacatgataagaagttagataagttagaggaaattatagaggagtctcaaggccaaccaatattattgttttataacttcaaacatgataaagaaagaatacttcaaaggtttaaggaagcaaccacattagaggattcaaactataaagaacgttggaatagtggagacattaagctgcttatagcacatccagcaagtgcagggcatggattaaacttacaacaaggtgggcacattattgtttggtttggacttacatggtcattggaattataccaacaagcaaatgcaagattatatagacaaggacaaaatcatacgactattattcatcacattatgaccgataacacaatagatcaaagagtatataaagctttacaaaataaagaactaacgcaagaagaattgatgaaagctattaaagcaagaatagctaagcataagtaa

SEQ ID NO: 412101 - DNA, 963 bp, Staphylococcus aureus
gtgttttcgctcttatctcctgtttctggtaaagcatcagtttggtgttgttttgatgccttattagaatggtttacttcacctttaggatttgatggtgctttttgttcattatttggtggtgtaactcttgaatcggagtcgctatctgagtccgaatcgctgtctgaatctgactcactgtctgaatctgactcactgtctgagtctgaatcgctgtctgagtctgaatcgctgtctgaatctgactcactgtctgggtctgagtcactgtctgattctgaatcgctatctgaatctgactcactgtctgattctgaatcgctatctgaatcggagtcactgtctgagtccgaatcgctgtctgaatccgagtcgctatctgaatccgagtcactgtctgaatccgaatcgctgtctgattctgaatcgctgtctgaatctgaatcgctatctgaatccgaatcgctgtctgaatctgagtcactatctgagtttgagtcactatctgagtccgagtcactatctgagtccgagtcactgtctgagtccgaatcgctgtttgaatccgagtcgctatctgaatctgactcactgtctgagtccgaatcgctgtctgaatctgaatcgctatctgaatctgagtcactatctgagtccgagtcactgtctgaatctgactcactgtctgagtttgagtcactatctgagtctgagtcactatctgaatccgaatcgctatctgaacctgagtcgctgtctgagcctgagtcactatctgaatccgaatccggatctggttctggacttggctctggatctggcgttggttccggttctggctctggacttggctctggatccggcgttggatccggttctggctctgggtcaactggtggtcccggtgttggatcaactggatttactgctgaatcaccatcagcacttccgcctccataa

SEQ ID NO: 412102 - DNA, 597 bp, Staphylococcus aureus
atgatgggtattgatgaaaagcctggaattaaagggaaggaagtaattccagttgaacgtcatggcgttaaagttatatcaatggccttttttgtggaagaaaatgcgccagttatatggagagggccaatgttaggtaaaatgttgacgaatttctttacagaagttaaatggggagacattgaatatttaatactcgatcttccacctggaacaggagatgtagctttagatgttcatacgatgttaacttcaagtaaggaaattattgtaacgacacctcatcctacagcagcatttgttgcagctcgcgcaggtgcgatggcaaaacatacggatcattctattcttggcgtaattgaaaacatgagttattttgaaagtaaagagacgggtaataaagaatatgtctttggcaaaggtggcggtactaagttagctgatgaacttaatactcaattacttggggaattacctttagagcaaccatcttggaatccaaaagattttgcaccgtcaatatatcaatcagatgatcgtctaggtaaaatttatagctcgattgcacaaaaagttatagctgctacaaataaatag

SEQ ID NO: 412103 - DNA, 273 bp, Staphylococcus aureus; identical to SEQ ID NO: 408352

SEQ ID NO: 412104 - DNA, 156 bp, Staphylococcus aureus
gtggcggatgatacaaactatcaaactaataatgaaaaggtatttgctgctggagatgctagacgtggtcaaagtttagttgtatgggcaattaaagaaggtagaggcgtagcgaaagcagtagatcagtatttagctagtaaagtttgtgtataa

SEQ ID NO: 412105 - DNA, 285 bp, Staphylococcus aureus
ttgattattttaagaaaaggtcgtggattagctggaactgttatgaaaacaggaaagcgtatggtaatagccaatgttggtttagctttagggcctgaagaaaagattgactatccaattttattgagcgaatcattaacagcagttttagcagtgccgctttggtataagaatcaagtgtatggcgtactattatttggtcaaagagatggtcgtcctttaccaaaaatatttgataatgatgatattcaacgtaagtttggtattttcaatgatgataaataa

SEQ ID NO: 412106 - DNA, 243 bp, Staphylococcus aureus
atgaaaacagggaagcgtatgattatagctaatgtcggtttagcattgggaccagaagaaaagattgactatccaattttattaagcgaatcattaacagcagtcttagctgtaccgctttggtacaaaaatcaagtgtatggtgtactattatttggtcaaagagatggacgttctttaccaaaaatatttgataacgatgatattcaacgcaaatttggaattttcaatgatgataaataa

SEQ ID NO: 412107 - DNA, 1062 bp, Staphylococcus aureus
atgtttaagcgtcaaggcggttacggacgtggacgtcgtatgcaaattgaaaaagatacagtggagattgtttcgggtgtaagaaatggttatacattaggtagccctattacaatggttgttactaatgatgattttacacattggcgaaaaattatgggcgctgcgccaataagcgatgaagaacgagaaaatatgaaacgtacaattacgaagccaagaccgggacatgcagatttagttggcggtatgaaatataatcatcgtgacttacgaaatgtattagaacgttcatctgccagagaaacagcagcacgtgtagcggtcggtgcactatgcaaagttttattagaacaattagatatcgaaatatacagtcgtgttgttgagataggtggcattaaagataaagatttttatgattcagaaacatttaaagcaaaccttgatcgaaatgacgtccgtgtaattgatgatggcatcgcacaagcaatgcgcgataaaattgatgaagcgaaaaacgatggtgattcaatagggggcgtagttcaagttgtagttgaaaatatgcctgttggtgtaggtagttatgtacattatgatcgtaaattagatggaagaatagcacagggtgttgttagtattaatgcatttaaaggtgtaagttttggagaaggatttaaagcagctgaaaagcctggtagcgaaattcaagacgaaattctctacaatactgaattgggctattatcgtgggtcaaatcacttaggtggtttagaaggcggtatgtcaaatggaatgccaattattgtaaatggtgtaatgaaacctattcctacgttatataaaccattaaattcagttgatataaatactaaagaagactttaaggcaacaattgaacgttctgatagttgtgctgtacctgcagcaagtatagtgtgtgaacacgttgttgcatttgaaatagcgaaagcattacttgaagagtttcaatcaaaccatattgaacaacttcaacaacaaattgctgaccgcagacaattaaatgttgagttttaa

SEQ ID NO: 412108 - DNA, 582 bp, Staphylococcus aureus
ttgattggtacaggtattacatctggtgttacatttatattccaacatgcaggatggcttggcggagcaatatatggattgttatatgcaccacttgtaattacaggactacaccatatgtttttagcagtagatttccaattgatgggtagcagcttaggcggtacgtatttatggccaattgttgcgatttccaatatttgtcagggctctgcagcatttggagcatggtttgtctataaacgtcgtaaaatggttaaagaagaaggcttggcattaacatcttgtatttctggtatgttaggtgttactgaaccagccatgttcggtgtgaacttacctctgaaatatccatttatcgctgcgatatcaacgtcttgtgtattgggggcaatcgttggtatgaataacgtacttggaaaagttggtgttggtggcgtgccagcattcatttcaattcaaaaagaattttggccagtatatcttattgtgacagctattgctattgttgtaccatgtatactaacaattgtgatgtctcattttagtaaacaaaaagcgaaagaaattgttgaagattaa

SEQ ID NO: 412109 - DNA, 375 bp, Staphylococcus aureus
atgttaaaagattctggtgcaaataaagtgcatgtgcgtatagcatcaccggaatttatgtttccaagtttttacggaatcgatgtttcaactacggcagaattaatttctgcaagcaaatcacctgaagaaattaaagattatattggcgctgattcattagcatatctatctgtagatgggttaattgaatcaattggtttagattatgacgcgccatatagtggcttatgtgtagaaagtttcactggagattatcctgcagggttatatgattatgaagcaaattataaagcgcatttaagtcatcgacaaaagcaatatatttctaaaaacaaacacttttttgatagcgagggaaatttaaatgtctaa

SEQ ID NO: 412110 - DNA, 249 bp, Staphylococcus aureus
atgttatacgatgatcttggaatcactgaagatgtgttaaactatgttaaatataatggaaataaagcactttcaaatttaggttttgaaccttattttgaggaacgtgaatttaacccaattattgagaatgccttagatacaacaactaaaaaccatgacttcttctctgtaaaaggtgatggttatgtattagcattaaatgtagaagcattacaagatgatgactttgtatttgacaacaaataa

SEQ ID NO: 412111 - DNA, 687 bp, Staphylococcus aureus
atgcctttggtagtagatggaaattatgtgctcttaaaaatttatcaagaaaaagacgctttaattaaacttcattatcaggaagtattaaactctaatcgaaaaagtgtaatacaagaaagtgatatagttagaatttcacgaagcatacttaatgaagctcttgatatcaatagtaatataaaatataaatctgatacttttggattaactattatatccgatgcagataattacacaacattaatacggactatacttgctcagcaagtgagcatagaacaagccaataaactatttttattatttattaatacttatggtgaaatttttgaactaaataataaagaatacacttttttaaattgggataaaatattcagtcgaatatataaagaacaaaaagttttagtaggtacgactaataatagaaagcaggctatcataactcttgctgaattacatataaaaaacggcttaagagaaaatgttttacaagttatttcaagtataaaaggtataggttcttggacagtgcaaatgtttatgctatttcaatttcctcacgtagcttttgaaaatattcctgtagcagacataggattgcacagggccatagaaaaaatcatgatcttccacataaatcgattgataaaagtaagggagaatcttacttccaaaacatga

SEQ ID NO: 412112 - DNA, 1104 bp, Staphylococcus aureus
ttgtataaagaattaatccaaacttttgaaatattatatgatgatacttcaaccacgaattattatagaggtcaagcaaatgattggccaatgaaagcaggattattaagaaatgatataatagatgatttaaaaaaagagtttgagaatatatacgaagatatggcttataagtacccagatttaatagagtatacgtgcttaaataaaaaagaatataaagcagaagattttaaaaaaagagaaaacaatatggcttatttacaacattatgggctaagaactacattaattgatattactgaaaacccctttatagcgctcctatttttaacttctaactcacaagtgtttaacaatgcaaccttagacatgtataatatcaatcctaaaatacacagcgaacaaaatttgttttcaagagtaaaaatgattagtaaaaacaaaagaataatagctcaaaagggtgcgttttttaacttcgaaaagctattgatttttcagaatgaacaaaatgtaaatagagataaaattaataaaatacctctagttcgtttaaagttaaatttttcatatgactataaagaaaaattaaaaagggagttaaatcaaacgcaatctgcttttcaaaaactaaaaataactagagaagagaaattgaaaaatcataagagtagaattaaagaagacctcaaaagaatacgcaatttaactatgaaaactgaacatgacatggatagtgaaaaatctaatgattacaaagaggaattggaatatttaattaaacgaatcttaaaagatgaaagcgttattaaaatagataaagaaatggaagacttaaaaaagaaaaaactatatttagatgcaaggttgaaaaaagaggaaatcttgactagtgaatatttaaggcctgagatttgtaaagaattaagggagaaattaaaacagtatcattatgttgaaagtgaattattccctgacgtatacagacatataggttatattcaatctaattttctatcaaatcaaacaaataatcgtactattaataaaaataatatatcagaaaatctagtcgatttattaaaactaaaagaaaactaa

SEQ ID NO: 412113 - DNA, 147 bp, Staphylococcus aureus
atgtcttgttgtgtaatacccattgcccaacaaattacaacagattcagctttagcacattcttcagcaaatttaatcaattctgattcaggaatacctgttgcttcttcagcaaaagccattgtaaatgtttctaatgatttgtaa

SEQ ID NO: 412114 - DNA, 702 bp, Staphylococcus aureus
gtgccaacgactatactagcgcatgattctagtgttggcggtaaagtgggtattaactcaaagcaaggtaaaaaccttatcggtgcattttatcgtccaactgctgtgatttatgatttagactttttaaagacgttaccatttgagcaaatattaagtggctatgcagaagtttataagcatgcgttattgaatggtgaatcagcgacgcaagatatcgaacagcactttaaagatagagagatattacagtcattaaatggtatggataaatatattgctaaaggtattgaaacgaagctggatattgttattgcagatgaaaaagaacaaggtgtacgtaaatttttaaatttaggtcatacatttggtcatgctgttgaatactatcataaaatacctcatggtcatgcagtgatggttggcattatctatcaatttatagttgcgaatgctttgtttgattctaagcatgatattaatcattatattcaatatttaatacaactcggctatcctttagacatgataactgacttggattttgaaacgttataccaatatatgctaagtgataaaaagaatgataagcaaggtgtacaaatggtcttgattagacaatttggagatatcgttgtacaacatgttgatcaactaacattacaacatgcatgtgaacaattaaaaacatattttaagtag

SEQ ID NO: 412115 - DNA, 771 bp, Staphylococcus aureus; identical to SEQ ID NO: 407229

SEQ ID NO: 412116 - DNA, 663 bp, Staphylococcus aureus
atgatttcacacttgataacggatacttcgaagaagatacatcagacagcgactcagactcagacagtgattccgattcagaaagcgactcagactcagatagtgaatcagactcagacagtgattcagactcagacagtgactcagactcagacagtgactcagactcagatagcgattcagattcagaaagcgactcagactcagacagtgactcagattcagatagcgattcagactcagatagtgattcagattcagaaagcgactcagattcagaaagcgattcagactcagatagcgattcagactcggatagcgactcagactcagatagcgactcagattcagactcagacagtgactcagacagtgattcagactcagatagcgattcagattcagacagtgactcagactcagacagtgactcagattcagatagcgactcagattcagatagcgactcagactcagatagcgactcagactcagatagtgactcagactcagacagtgactcagattcagacagcgattcagactcagatagcgactcagattcagacagtgactcagactcagatagcgattcagattcagacagtgactcagactcagatagcgattcagattcagatgcaggaaaacatacacctgtga

SEQ ID NO: 412117 - DNA, 741 bp, Staphylococcus aureus
atgaacaagattttaaaaactacaatgaaatgtttaataaaaacagatatttctagaaagaataagataaagctccgaaagttattagttcattttaataatgttgatactttagattatagaaatattcaatggtatcattcgtttgatcgaaataatcagacgtataaaatgttaatatctatatgctatttaatttttcaaggagtaatacaaactgaaagcaagggacaaaatgatcttatggtatttgtagacgaacaacaaatatctcggctatatgaaaaatttattctagagtactataaaaaagaatttccagagcttgttgtaacatcatcaaatattcaatggtcattagataatgatgataacgtgaatatgcttcctgtaatgagaagtgatattatgttgagatataaagataaatgtctaattatcgatgcaaaattttataaaaatacattacacaattattatgatactaaaaagatccattcaactaacctgtatcaaatatttacttacgtgaaaaaccaacaattaaatttaaaaaagaaagcaatacaggtctcaggaatgttgttatatgctaaaacagacgaaaatattgttttgaacgataaatttcatatgagtggtagtcaaatcattattaagacattagatttgaactgtaattttactattattaaaaaacagttgaatgggatagttaatgatatatttttactaaaataa

SEQ ID NO: 412118 - DNA, 189 bp, Staphylococcus aureus; identical to SEQ ID NO: 410785

SEQ ID NO: 412119 - DNA, 714 bp, Staphylococcus aureus; identical to SEQ ID NO: 406753

SEQ ID NO: 412120 - DNA, 726 bp, Staphylococcus aureus
gtgaataataagcttatatatacctcttatgatggtgataacatactattgatagatagttttattaaacttgttattgattttaaatatattccaataaatccaactaaatcattaggatattatatatctacatcgattcatgacaatgacaaaggtgagtgtttaagagactgcttgtctttggaaatgatttgtgatgaactttgggtattcatagacaataataaatatattccagaaggagttcggttagaaatagcctcatggttaaaatataaatcctctccagttaagtatataagcataccttctttattagagaattcgagtataaatgacgatttatttttagactttgatgattcaaatatacttaaagaaaaggaaatttccgaaccagtaccgaaaaaaagtgagttaagacctgtaaattgtattaatatactaccggaacaccataaatatatagactggataaagtatcatttattttataacaaattcgtaccattggattatttaagtataaagccatatatttattttgataatatagaacattataaaagtgagttatcgctattgaatgaacgatgtaataacatttctgttatgccatattatgtgagtgaagataattttaatttatctttttcagaatgcaaaatacctaaatatattaagaaagattgggctataacaacaatggagaataaaaattaa

SEQ ID NO: 412121 - DNA, 315 bp, Staphylococcus aureus
atgacgagacataacaacacctataagaatggccgaaagtcctatgaatacgattggttctatcattcaaaaacatggaaggctatcagactagtcgctttagatagagataatcatttatgtcaaatgtgcttggagcaggggaagataacggacgctaagattgtgcaccatatagtttatctagacaatgactttaataaagcattagatttgaataacttgatgtctgtttgtcatgcttgtcacaataaaattcacgcaaacgacaacaaaaaagcagttaaaacgaaaataaaatttgttaaaatttaa

SEQ ID NO: 412122 - DNA, 336 bp, Staphylococcus aureus
atggagatacttaacccaacgaaagaactagacaccaacattgtgtatggaccgttacaaaaaggagagccaattagaacaactgagttaatggcgacaaggttattgactaataagatgttacgtaatttagaagagatggttgaagcagttgaaagtgaatacttaaagttacctgaagatcataagaaagtaataaggttaaagtattggaataaagataagaagctaaagatagaacaaataggggatgcatgtcacatgcatcgcaatacagttactacaatacgaaagaactttgttaaagctgtagcatatcatgcgggcatcaaataa

SEQ ID NO: 412123 - DNA, 159 bp, Staphylococcus aureus
atgattgatttttctgaagtactaaaaaagaaaaagaatattcctcatgatttgaatgtttctcttcaaattactgataaatatataaattcagcaagacctagttacagtaagaaagattcaatagaagtaggagtatttaatcatgaaaaaaattaa

SEQ ID NO: 412124 - DNA, 351 bp, Staphylococcus aureus
gtgccagataatcatcataaattagcgcaagaagaaatatttggaccagttttaacagtgattaaagtgaaggatgatcaagaagcaattgatatagctaatgattcagagtatggtttagctggcggcgtattttctcaaaatatcacacgtgcattaaatattgctaaagctgttcgtacaggacgtatttggattaacacttacaaccaagtaccagaaggcgcaccatttggtggttataaaaaatcaggtatcggtcgagaaacttataaaggtgcgttaagtaactatcaacaagttaaaaatatttatattgatacaagcaatgctttaaaaggtttgtactag

SEQ ID NO: 412125 - DNA, 522 bp, Staphylococcus aureus
gtgtttgcaagtttatcattaaaatcagaattagcttataaaattattgattctgatactgaaaatgcaaaagctgaattgttagcgattaataagttgtcgcgggaatcattgaacaaagtacgcgaaatcatcgatgatataagattaccatcatttattgaagaaattgagagtatctgtaaaattttaaaagatgctgacattcagtttacgtttgaaaataaagaactggcacaattattgagtcctacaaaacaatccattttagtaatgattgctcgtgaagcgataaacaatgtgattaagcatgcaaatgcttcaaaagttcatggtcaattacgagctatgaatgaacataaattacagttcattatacaggataatggagaaggtattgacagcggctgtgaaataaagagtatttcacaacgagtaaaacatttaaatggaacattagaagttgaatcgaataaaggtactaaattaatcatcgaaatgcctacagggggaatagcatga

SEQ ID NO: 412126 - DNA, 351 bp, Staphylococcus aureus
gtgccagacaatcatcacaaattagcacaagaagaaatatttggaccagtgttaacagtgattaaagtgaaggacgatcaagaagcaattgatatagctaatgattctgagtatggtttagcaggcggtgtattttctcaaaatatcacacgtgcattaaatattgctaaagctgtacgtacaggacgtatttggattaacacttacaaccaagtaccagaaggcgcaccatttggtggttataaaaaatcaggtatcggtcgagaaacttataaaggtgcgttaagtaactatcaacaagttaaaaatatttatattgatacaagcaatgctttaaaaggtttgtactag

SEQ ID NO: 412127 - DNA, 489 bp, Staphylococcus aureus; identical to SEQ ID NO: 404834

SEQ ID NO: 412128 - DNA, 558 bp, Staphylococcus aureus
atgattaattttgataaaaccgctttagtgttaatcgacctgcaacaaggtattcttaaaatggattatgcgccacatacagctgaaaatgttgttcaaaatgctaacaaattaattgaagcttttagaaaaaacaatggctttatcgcctttgttcgcgtgaatttctatgatggtaaagatgcattgcaaccaaatgcaatgatctcattaccaccaaaagaaggcgatgactacagccatttccattatttactagacaaaagagatgacgattttgtcatagataaacgacaatttagtgcatttgtaggaacggatttagacttacagttgagacgtcgaggaattgatacaattgttcttggcggtgtagcaacacatgttggtgtagatacgacagcacgagacgcctatcaattaaactacgatcagtattttgttacagatatgatgagtgcacaaaacgaaacgctacatcaattcccaatagataatgtattcccattgatgggacaaaccataaccacaaacgacttgctaaatatattgaactaa

SEQ ID NO: 412129 - DNA, 558 bp, Staphylococcus aureus; identical to SEQ ID NO: 405080

SEQ ID NO: 412130 - DNA, 141 bp, Staphylococcus aureus
atgacaatcggtgttacgctgcgatacatgcattctaatgtttcagtgctcaatgtagatgattatgaaaattctatccgtcttgttactgaaattgtccgttcattgaatgatgaaagttataaaaatatcatgtggtaa

SEQ ID NO: 412131 - DNA, 282 bp, Staphylococcus aureus
atgccacctaatggatggataaaagcaaataataaaataattgctaataatactaagaataccggatttaaaaatttaccgatatattctaaaattcttgatggctttctcgcaaaaaaccatgcaatcacaaagaagacgaagctaaaaataaataaatataaagtgatttgctttggtgataaaaatggcgaaaatgcaatttcaaatgatgtcgttgccagtctaggtaaggcgaaaaatggtccgataactagatataaggcaatcgtgaaaatgtaa

SEQ ID NO: 412132 - DNA, 183 bp, Staphylococcus aureus
atgatccccatcataatgatactgatagtaccagacttaattgtttctttagcgatatcagttggattttcgatacctaactttttaatcgttgcaacaatgataataccaaatgccaatgacgctagcgcatctaaggtattgtatccatctaaaaagccgttaaataaggcatgtgattga

SEQ ID NO: 412133 - DNA, 267 bp, Staphylococcus aureus; identical to SEQ ID NO: 404911

SEQ ID NO: 412134 - DNA, 696 bp, Staphylococcus aureus
atgatttcacacttgataacggatacttcgaagaagatacatcagacagcgattcagactcagatagtgactcagacagcgactcagactcagacagcgactcagactcagacagtgattcagactcagacagtgactcagactcagacagtgattcagattcagacagcgattcagattcagatagcgactcagattcagacagcgattcagattcagacagtgattcagactcagacagcgactcagattcagacagtgattcagactcagacagcgactcagactcagacagtgactcagactcagatagcgactcagattcggacagcgattcagactcagatagcgactcagattcagatagcgattcagactcagacagcgactcagattcagatagcgactcagactcagatagcgattcagattcagatagcgactcagactcagacagcgactcagattcagatagcgattcggactcagatagcgactcagattcagacagcgattcagactcagatagcgactcagactcagacagtgattcagattcagacagcgactcagactcagatagcgactcagattcggacagcgactcagactctgatagcgactcagactcagacagtgattcagacagcgattcagactcggatgcaggaaaacatacacctgttaaaccaatga

SEQ ID NO: 412135 - DNA, 804 bp, Staphylococcus aureus
atggatgagaaacatgaggctttcaagcagtcagtgaatagcggcggtttagtcacaagtggttcaacttcaaattggcaaaaatctaagattactaaagacgacggtaaaataacacagattactggatttgattttaataatccagaacaaagagtaggagattcaacccaatttatttacgtctcacaagccataaattatccaagaggcgtaagcactaatggtattgtcgaatatttagtagtaacttccgactacaaacgtatgacatatcgtccaaatggtacaaataaagtatttgttaagagaaaagaagcaggttcttggtctgattggtcagaattagcccttaatgattacaatacgccttttgaaactgttcaaaacgcgcaatcaaaagctaatacggctgaaagcaacgccaaactatacacagatgacaagtttaataaaagatattcagttatttttgatgggacggcaaatggcgttggctcaacattatatcttaatgaaagtttagatcaatttattttgttaattttttatggaacttttccagggggagattttactgagtttggcaacccctttggtggcggaaaaatttcattgaacccatcaaatttaccggataatgatggtaacggtggaggcgtttatgagtttggattaactaaatctagtcgtacatctttaactatatcgaacgatgtttattttgatttaggaagtcaaagaggttctggtgccaatgcaaatagaggaacaatcaacaaaattataggagtgagaaaataa

SEQ ID NO: 412136 - DNA, 819 bp, Staphylococcus aureus
gtgtatcgttattttggacaagaacgtaacaataccacatacaacttagcgcgcatgaacatgttgttacatgatgtgcgatatgaaaatttcgatatccgtaatgatgatacgttggaaaatccagcctttttaggacatacatttgatgcggttattgcgaacccaccatatagcgcgaaatggacagcagactcaaaatttgaaaatgacgaacgcttcagcggatacggcaagcttgcgccaaagtctaaagcagactttgcctttattcaacacatggtacattacctagatgatgaaggtaccatggccgttgtactcccacatggtgtcttattccgtggtgccgcagaaggtatcattcgtcgttatttaattgaagaaaagaactacttagaagccgtgattggtttgccagcgaacattttctatgggacaagtattccaacatgtatcttagtatttaaaaaatgtcgccaacaagacgacaacgtattatttatcgatgcatccaatgattttgaaaaaggaaaaaaccaaaaccatttaagcgatgcccaagtcgaacgaattatagacacatataagcgtaaggaaacaattgataagtatagctacagcgcgacattacaagagatcgccgataacgattacaacttaaacataccgagatatgtcgatacattcgaagaagaagcgccaattgatttagatcaagtccaacaagatttgaaaaatatcgacaaagaaatcgcagaaattgaacaagaaatcaatgcatacctgaaagaacttggggtgttgaaagatgagtaa

SEQ ID NO: 412137 - DNA, 408 bp, Staphylococcus aureus
ttgagaccaataggtggtatactaggtgataaatttaatgcagttaaagtactgatgattgattttgttattatgattatcggtgccgttattttaggtatttcagaccatatcgcattatttactgtaggttgtttaacaataagtatttgtgcaggtattggtaacggcttaatttttaaattagtaccatcatacttctcaaatgaagcaggatcagcaaatggtatcgtatcaatgatgggtggtttaggaggattcttcccaccgttggtcatcacatacgtagctaatttaacaggttcaagccatttagcatttattttcttagcggtattcggatgcattgcattatttacaatgcgccatttatatcaaaaagaatatggttcattgaaacacagttga

SEQ ID NO: 412138 - DNA, 354 bp, Staphylococcus aureus
atgattgattttgttgttatgattatcggtgccattattttaggtatttcagaccatatcgcattattcactgtaggctgtttaacaataagtatttgtgcaggtattggtaacggcttaatcttcaaattagtaccatcatacttcttaaatgaagcgggatccgcaaatggtatcgtatcaatgatgggtggtttaggaggattcttcccaccactagtaatcacgtacgtagctaatttaacaggatcaagtcatttagcatttattttcttagcggtatttggatgtattgcattatttaccatgcgtcatttataccaaaaagaatatggctcattgaaaaacggttga

SEQ ID NO: 412139 - DNA, 879 bp, Staphylococcus aureus
gtgtatgacccaacatgtggttcaggttcattactgttgcgtgttggtaaagagacacaagtatatcgttatttcggacaagaacgtaacaataccacatacaacttagcacgcatgaacatgttgttacatgatgtacgttatgagaactttgatatccgtaatgatgatacgttggaaaatccagcctttttaggcaatacatttgatgcggttattgcgaacccaccatacagtgcgaaatggacagcagattcaaaatttgaaaatgatgaacgttttagtggttacggcaaacttgcgccaaaatccaaagcagactttgcctttattcaacacatggtacattacttagacgatgaaggtaccatggccgttgtactcccacatggtgtcttattccgtggtgccgcagaaggtatcattcgtcgttatttaattgaagaaaagaactacttagaagccgtgattggtttgccagcgaatattttctatgggacaagtattccaacatgtattttagtatttaaaaaatgtcgccaacaagacgacaacgtattatttatcgatgcatccaatgattttgaaaaaggaaaaaatcaaaaccatttaagcgatgcccaagtcgaacgtattatagacacatataagcgtaaaaaaacgattgataaatatagctacagcgcgacattacaagagattgccgataacgattacaacttaaacataccgcgatatgtcgatacattcgaagaagaagcgccaattgatttagatcaagtccaacaagatttgaaaaatatcgataaagaaatcgcagaaattgaacaagaaatcaatgcatacctgaaagaacttggggtgttgaaagatgagtaa

SEQ ID NO: 412140 - DNA, 255 bp, Staphylococcus aureus
atgttaccaacaggaaatgtagattacgttaaaagaaataaagtctgtgcgcttgaagtgtttgttgaatgttttggtaaagataagggagatagtagaggatctatggaaattagaaagatttcaaacatcttaagacaattagacaattggtctgtatatgatggtaataaaagtgggaaaattcgatttggaaaagattatggtgtacagatagcttatgtaagagatgaaagtttagaggatttaatataa

SEQ ID NO: 412141 - DNA, 156 bp, Staphylococcus aureus
atggatgtcactcatgccattaaaagatcaacacattatggcaacagttatttagatggtcacagagtccataatgcatttaaaaatagaaactacactgtgaaatatgaagtcaattggaagactcacgaaatcaaagtgaaaggacagaattga

SEQ ID NO: 412142 - DNA, 273 bp, Staphylococcus aureus
atgcccattaaaattactgcaacaggtgttggtattgaaaacaacaatatgactgaaagtactaacacacctaaaatagtacctaaacctcgtgccatacctctctcgattgcatgtatagttgatgttcctagtaatattgtatgtgcagataacggtatccagtatgctttttcaaaatcaaacattaacgcaataaatatcgctatcatcataatcgctgtatatctcaatgtatttctaaaaacaatagagtctaatgttaaattttga

SEQ ID NO: 412143 - DNA, 501 bp, Staphylococcus aureus; identical to SEQ ID NO: 405189

SEQ ID NO: 412144 - DNA, 174 bp, Staphylococcus aureus; identical to SEQ ID NO: 410982

SEQ ID NO: 412145 - DNA, 282 bp, Staphylococcus aureus
atgattgttgctattttaatgatagagaaccaaaattctaactctccaaatagtctcgcactcaataagttaaaagacattaataacaatacgcaaaaaagtgcactaatccagtttggaatttctgggaaccagaagcttacatactttgctacagctgttacttcagccatacctgtaataatccaacagaaccagtatgtccaaccggttacgaatcctgcaaaaggcccaatgtatgtattggttacatctgcgaaagatttaaattcagtattttga

SEQ ID NO: 412146 - DNA, 282 bp, Staphylococcus aureus; identical to SEQ ID NO: 404922

SEQ ID NO: 412147 - DNA, 177 bp, Staphylococcus aureus
atgaaaatcgatacattaagacaagctataatatattattttgttgcacttgtgttatcagctttaatgatctatttatttttaacaaacattgagagagttattttgtatagttgtgtattcacagtcgtttattgggcaatatatgcctttgatgtatatagaaagagaaattaa

SEQ ID NO: 412148 - DNA, 489 bp, Staphylococcus aureus
atggtatttcaaagctataatctttttccgcataagacggcattagaaaatgtaatggaaggtcttattacagttaaaaagttgaaaaaggctgaagctcgtgagaaatctctagaattacttgagaaagttggtttgacacatgtcaaagatcaacgacctcatgcattatcaggtggtcaacagcaacgtgttgccattgcgagagcattagctatgaatcctaaagtgatgttgtttgatgaaccaacatcagcgcttgatcctgaactcgtgaatgatgtgttaaaggtgattaaagatttagcgaatgagggcatgacaatggtcattgtgacacatgaaatgcgttttgctagagaagtatctaataacattgtattcattcatgaaggtgtaattggagaacaaggggcacctgaagagatttttaacaatccaaaaactgaagaactaaaacgctttttaaatgttattaatgaagaataa

SEQ ID NO: 412149 - DNA, 489 bp, Staphylococcus aureus
atggtatttcaaagttataacctttttccgcataagacggcattagaaaatgtaatggaaggtcttatcacagttaaaaagttgaaaaaggatgaggcacgtgggaaatcacttgagttacttgagaaagttggtttaacacatgtcaaagatcaacgtccacatgcattatcaggtggtcaacaacaacgtgttgctattgcaagagcactagcaatgaaccctaaagtgatgttgtttgatgaaccaacatctgcacttgatcctgaacttgtgaatgatgttttaaaggttattaaagatttggctaatgaaggcatgacaatggtcattgtgacacatgaaatgcgttttgctaaagaagtatctaataacattgtatttattcatgaaggcatgatcggagaacaaggggctccagaagagatgttcaatcgtccgaaaacagaagaattaagacgtttcttaaatgttataaatgaagaataa

SEQ ID NO: 412150 - DNA, 525 bp, Staphylococcus aureus
atgctatttgaaatactgatagagtccgaggtgctagctgactcgctcaatgatgttgatgtactaattgcattcgatgtactgtcacttaatgatgctgatgtactagacgaccctgatatactcgttgataagctttgtgacttagacaagcttcctgatgtactcatacttaatgagtcactgagtgatgttgatgtacgcaatgaatcagatgtacttgttgatagactttcggatttttcagtactgctagagtttgaaatagaatcgcttaatgatgttgatttactagctgaatccgacatgcttgatgatacactttgtgaattcactaaacttgtgcttgttgagcttgatacactattactttcagatgtgcttaatgacttagatgcactcacagaatcagataggcttacacttgtcgatttcgaggtactagctgatgtagataccacaatcgatcctgatgtactcgttgatgcactttgtgagtcagctttacttgttgacacactttga

SEQ ID NO: 412151 - DNA, 231 bp, Staphylococcus aureus
gtgttttggagtgggtggaacaaaattacaatgtttgcgttgattgaattagttaaaagtgaacaacttgatttagtgtatagaggtagttttgtaatgcgttatttgttggatggtagagttcctaacttaccattagcaatttgttatccagaagatggacaacaaacggacgtgccctcatgggtgcctatggtattaagaataaataaagaggagaaaatcaaatga

SEQ ID NO: 412152 - DNA, 555 bp, Staphylococcus aureus
ttggttacttctgaaaagcctggtgcaggtaaaagtacagtcgtatccaatgtagcgattacttatgcacaagcaggttataaatcgttaattatcgatggggatatgcgtaagccaacacaaaactatatttttaatgaacaaaataataatggattatcgaatttaatcattggtagaacgactatgtcagaagctattacgacgacagaaattgataatttagatttactaacagctggtcctgtacctcctaatccaacagaattaattggttctgaaagatttaaagagttagttaatcttttcaatgagcgttatgacatcattattgtcgatacaccgccagttaataccgtgactgatgcacaactatatgcacgtgctattaaagatagtctgttagtcattgatagtgaaaaaaatgataaaaatgaagttaaaaaagctaaaacacttatggaaaaagcaggcagtaatattctaggcgtcattttaaataaggcaaaagtagataagtcttctagttattatcactattatggagatgaatag

SEQ ID NO: 412153 - DNA, 465 bp, Staphylococcus aureus; identical to SEQ ID NO: 407758

SEQ ID NO: 412154 - DNA, 189 bp, Staphylococcus aureus
gtgccgcctaattcacctaaaagtggtactaatgcttcaaataaaaatgaggctaaagaaagtaaagaaccattaccagatacaggttctgaagatgaagctaatacgtcactaatttggggattattagcatcattaggttcattactacttttcagaagaaaaaaagaaaataaagataagaaataa

SEQ ID NO: 412155 - DNA, 576 bp, Staphylococcus aureus; identical to SEQ ID NO: 405004

SEQ ID NO: 412156 - DNA, 207 bp, Staphylococcus aureus; identical to SEQ ID NO: 409421

SEQ ID NO: 412157 - DNA, 255 bp, Staphylococcus aureus
atgtcagaaaaagacaaagaagaatttgaagcatttaaaaagagaagccctaaatacaatccaggtatgaacaatcatgatgaaacagatggtgagtcagaagacattcaacatcatgacattgataataacaaagcaattcaaaatgacataccagatcaaaaagtcgacgataaaaatgataaaaatgctgttaataaagaagaaaaacatgataatggggcaaataattctgaagaaactaaagttaaataa

SEQ ID NO: 412158 - DNA, 255 bp, Staphylococcus aureus
atgtcagaaaaagataaagaagaatttgaagcatttaaaaagagaagccctaaatacaacccaggtatgaatgatcaagctgaaatggataatgagtcggaagacattcaacatcatgatattgacaataacaaagccattcaaaatgacttaccagatcaaaaagtcgatgataaaaacgataaaaatgctgttaataaagaagaaaaacacgataaccgtgaaaataattcagcagaaactaaagttaaataa

SEQ ID NO: 412159 - DNA, 249 bp, Staphylococcus aureus
ttgtcttgtgacattgaaacacttgttgaatcggattcactcattgatgttgagtcagatacgctcgttgaatctgaaccagacatacttagcgattcagatgtgcttgttgatgttgaaccacttgttgagccagatgtacttgttgagacactttgtgatattgattcactcgatgcagttgatgctgatttgctatcacttgttgaatcactaaacgacgttgatatgcttgttgaatcgaattga

SEQ ID NO: 412160 - DNA, 534 bp, Staphylococcus aureus
gtgaaggtagtgccaacagatgtaacgaataaagaagaagtcgatgaattgataaaaattgcacaacaaacattcggtggtttggatattgttatcaatagtgcggggcaaatgttgtcgtctaagattactgattatcaagtagatgagtgggatagtatgattgatgtgaatatcaaaggcactttatatacggcacaggctgcattaccaactatgttagaacaatcaagtggccatcttattaacattgcatctatttctggctttgaagtaacgaaaagtagtacgatttatagtgcgacgaaagcagcagttcacactattactcaaggattagaaaaagagttggcaaagacaggcgttaaagtaacaagcatttctccaggaatggtagatacagccataactgccgcatacaatccaacagatcgtaaaaaacttgaaccacaagatattgcagaagcagtattatatgcattaacacaaccaaagcacgttaacgtgaatgaaattacagtgcgtcctgtataa

SEQ ID NO: 412161 - DNA, 207 bp, Staphylococcus aureus
ttgtttagtgagacgcaaggccgatatgttgtttctgttaaatcaggtaaaactttaaatattgataatgcaatagaaattggacttttaacagatagtgataatttcaaggtaacaacaccatatacagagattagtgaaaatgtttcagatattaaacaaatatgggaaggggcaattgctcaatgtttaactactcaggattaa

SEQ ID NO: 412162 - DNA, 318 bp, Staphylococcus aureus
atgcctagaatcggactaccaccaaatacacgcatactactccaaccaattaatgctggtaagaaaataaatgccgtactcgcaatcacattaatgatgtttgaaatatcagcaatttgtggatacatctcaataagtgcttttggaccaaataaacctttcattgtaagtaaattattgattcccattaacaaaccagctgtcacaatcgcaggtaatattggtataaaaatatcccccaacaatttgatcaaacgttgtactggattccctttttgtgcagctgcttgtttcgcttcatctttcgaagcttcttga

SEQ ID NO: 412163 - DNA, 369 bp, Staphylococcus aureus
atgacaattgatgatgaaattatatctacgattacggttagatatccttggggaagtgtgaaaagtatttcgggttatccttttgtctggtggtttgcgacaaatcctgagtatgaagggaaaggctatggtagccaattacttacttatgttgaagaagcatttttgcgagatacgttaaagtcagcggcagttactttaggtacatctgcaagattgcatccgtggttacttaaaatttatgaaaaaagaggttatgaaatatacagcgaacatgaaaatgatgatggcgatttaggtgtgatcatgcgcaaagtattgatacccgagcgctttgacgaaacaatattaggccaaccaccattttaa

SEQ ID NO: 412164 - DNA, 378 bp, Staphylococcus aureus
gtgacaggtaatcaagctattacacaagttcatgttcaaaaggttaagcaaaacaataataaagaactttatgaaatggctaaatattccggtaaagatagcgattatctcgttaatcaaaaagtattcgacgcattttataaagcattaaaaggcaaacaggtacttgtctattctggattgtttaaagatgcacgcaaaaagctaaaaaatggcgagttggattatctcaaagaaagtgatccgacagaatatatttaccaaatcttttatgtgtggaatcaaaaagagtatctagcaagtgagatttacgacttaaccgaagaagaaaaacgagaagtaaacaaccaaatgattaacgaaattgaagaagagtaa

SEQ ID NO: 412165 - DNA, 210 bp, Staphylococcus aureus
atgatttatttagattcttttcttttgaaaagtaataaagataatgaacctaaaagggcaagtgttgcgaaggcaactgtgctaataaagttatcaactgaagttaaaccagtttttggtaattctttagctttagatgcttgtttaggcgtttcgttatgttttgtaactttgttagtttgttgtgatttattatcacttacagcttga

SEQ ID NO: 412166 - DNA, 444 bp, Staphylococcus aureus
atgtgggaaagtaaaggaaaaataacgtacttaaaaggtgaagcaatgcaatatgatttaagtacaactggtggtaactcaggttcacctgtatttaatgaaaaaaatgaagtcattggcattcattggggtggcgttccaaatcaatttaacggtgcagtatttattaatgaaaatgtacgcaacttcttaaaacaaaatattgaagatatcaatttcgcaaatgatgaccaccctaacaaccctgataatccagacaatccaaataatccggacaatcctaacaaccctgataaccctaacaaccctgataatccagacaatcctaataatcctgataaccctaacaacccggacaatccaaataaccctgaccaacctaacaacccaaataacccggacaatggcgataacaataattcagacaaccctgacgctgcataa

SEQ ID NO: 412167 - DNA, 261 bp, Staphylococcus aureus
atgataaatttcataagtggtgctaaaattttaaatcctgcaattgtcatgataaatcctaaaataccagctgaaaaattattaaatagcatttcaaaaccttgtggtgttctaggttggatcaattggtcagtctttttcattaaccaaccaactaaaggacccataatcatagctccaagtaacattggtgtatcaggtaatgcaacgatgacccccatagttgccgttgcagcgataataccaccacgtaaatcataa

SEQ ID NO: 412168 - DNA, 336 bp, Staphylococcus aureus
atgactcaattattggcatcacaatatgtcattgcagttatcattggtttcgtcatatgtgcgataggtaatggtttagtcgcaacacctggacttacgattgcaattttcagtatgcctaatgaaaaagttggtttagctacaggattatataaaatgagtggtacattaggtggcgcctttggtatagcactaagtactacagttttcagtatgttacaactaaactatgcaccaagtgtagctgcaaccgtaacatttatagtcagcattgtattgatgatccttggctcattgtctgcatacatgatcattccaaaaacagttaaatcttaa

SEQ ID NO: 412169 - DNA, 303 bp, Staphylococcus aureus; identical to SEQ ID NO: 407383

SEQ ID NO: 412170 - DNA, 213 bp, Staphylococcus aureus
atgaccttcattttattaattgcgctacctgatgttaaagctctagttgtcatagaactttttgtaatcatttcttttctaaatgaattagtaaaaaagacatatcttttaaaattattatttattaaatcaattcctgatttaggccgccctcttaatacaaatccactaaacacagtattttcagggtcatttaaaattacagacggataa

SEQ ID NO: 412171 - DNA, 606 bp, Staphylococcus aureus; identical to SEQ ID NO: 405234

SEQ ID NO: 412172 - DNA, 372 bp, Staphylococcus aureus
gtgaagactgttcctaaaataggcactttagttgataaaaaactaatcaatccgccagcctttacaatactagctaataatggagctaatacagttactgcgttgccaattgtgcttatgaatgcacctaatccaaaaactacaggaccaattgcagcagcaataccaccgaatataacaatcgaccttttagatccatcacttaaacttgaaaaccaatcaactgctacagatagctttttgattaattcttccatgactggagcaaacgcactttcaatagaagcccatacatcagcacctactaatttaagtttattcattgctactttaaatctttcggagccactttcagaatctttaaatgtctga

SEQ ID NO: 412173 - DNA, 231 bp, Staphylococcus aureus
gtgctaatcaacgatgttgttatacctcaactacccttagccgatattaatcagtatattgagcatggtgatatttatggaggtatgattcccaaagtgcttgatgctaaaaatgctattaaaaatggctgtcctaaagttatcattgcatcaggaaacaagccaaatattatcgaagctatttacaataatgattttgttgggacaacgatactaaaatcatcagtatga

SEQ ID NO: 412174 - DNA, 195 bp, Staphylococcus aureus
ttgccattagtcgatattcatcaatatattgaacatggtgatatttatggaggtatgattcccaaagtgctagatgccaaaaatgcgattgaaaatggctgtcctaaagttatcattgcatcaggaaacaagccaaatatcattgaatctatttacaataatgattttgttggcacaacaatccttaattcataa

SEQ ID NO: 412175 - DNA, 552 bp, Staphylococcus aureus
atgtggacgatatacacagatttcgctaaaagtaataaaccgggtgaattggatgatgaaggtatggttttaaatctggataggaatactagaaccgctaaaggccattattttgttactacattttaccggaatggtaaactgccagatgaaaagaattataaaattgaaatgaaaaataataagattattttattagatgaagtaaaagatgataagctcaagcagaaaatagaaaattttaaatttttcggtcaatatgcaaatcttaaagaattgaaaaaatataataatggtgatgtttcaattaatgaaaatgttcctagttatgatgttgaatacaaaatgagcaataaagatgaaatagttaaggaattaagaagtcgttataatatttcgactgaaaaatcacctatattaaaaatgcatattgatggtgacctgaaaggcagttccgtaggttatagaaagttagaaattgacttttcaaaacgtgaaaacagcaaattatcagtcattgaatttttaagttataaaccagcgaaaaaatag

SEQ ID NO: 412176 - DNA, 546 bp, Staphylococcus aureus
atgaaaccaatcgacaacttagacaatttattagaccgtgcaaacgaacgtcacatttttggtacaaaaatgcgttctaacattttagaattaaatgagcaaggtatcaaagacgttgttgaacaacaatttgaagttgctaaacaaattattgctaaaggtttagttccaattatcgaaccagaagttaatattaatgcaaaagacaaagctgaaattgaaaaagtattaaaagctgaacttaaaaaaggtttagatagcttaaatgctgatcaattagtaatgttgaaattaacaattcctactgaaccaaacttatacaaagagttagctgaacatcctaatgttgttcgtgtcgttgtattatcaggtggttacagcagagaaaaagcaaatgaattacttaaagataacgctgaacttatcgcaagtttctcacgtgcattagctagtgatttaagagctgatcaatctaaagaagaattcgataaagctttaggtgatgctgtagaatcaatctacgacgcatctgtaaacaaaaactaa

SEQ ID NO: 412177 - DNA, 546 bp, Staphylococcus aureus
atgaaaccaatcgacaacttagatagcttattagatcgtgcaaacgagcgtcacatttttggtacaaaaatgcgttctaatattttagaattaaatgaacaaggtatcaaagacgttgttgaacaacaatttgaagtcgctaaacaaattattgctaaagggttagtgccaattatcgaaccagaagttaatattaacgcaaaagataaagctgaaattgaaaaagtattaaaagctgagcttaaaaaaggtttagacagcttaaatgctgatcaattagttatgttaaaattaacaattcctactgaagctaacttatacaaagacttagctgagcatccaaacgttgttcgtatcgttgtattatcaggtggttacagcagagaaaaagctaatgaattacttaaagataacgctgaacttatcgcaagcttctcacgcgcattagctagtgatttaagagctggacaatctaaagaagaattcgataaagcattaggtgacgctgtagaatcaatctacgacgcatctgtaaacaaaaactaa

SEQ ID NO: 412178 - DNA, 498 bp, Staphylococcus aureus
atgcccgaacgaaatcataagacggatgcaggttatgacatattctcagctgaaactgtcgtactcgaaccacaagaaaaagcagtgatcaaaacagatgtagctgtgagtataccagagggctatgtcggactattaactagtcgtagtggtgtaagtagtaaaacgtatttagtgattgaaacaggcaagatagacgcgggatatcatggcaatttagggattaatatcaagaatgatgaagaacgtgatggaataccctttttatatgatgatatagacgctgaattagaagatggattaataagcattttagatataaaaggtaactatgtacaagatggaagaggcataagaagagtttaccaaatcaacaaaggcgataaactagctcaattggttatcgtgcctatatggacaccggaactaaagcaagtggaggaattcgaaagtgtttcagaacgtggagcaaaaggcttcggaagtagcggagtgtaa

SEQ ID NO: 412179 - DNA, 267 bp, Staphylococcus aureus
atgcatgtaccaagtttccaaaataacacaacagcaacacatcaaaatgctaaagtaaataaagcatatgactataaatacttctattcttataaagtagttaaaggtgtgaagaaatatttctcattttcacaatcaaatggttataaaattgggaaaccatcattaaatatcaaaaatgtaaattatcaatatgctgttccaagttatagccctacacactacgttcctgaatttaagggtagcttaccagcaccacgagtataa

SEQ ID NO: 412180 - DNA, 546 bp, Staphylococcus aureus
atggaagcgggattaggtatcgttgcggtcatattaatgtttatcgttggtgtttggatgcacaaacgttcaaatgcaaaacgttggaatgacatgattaaaaatatgtatgctaatgcgattagtaatggtaatttggtattgttagcgacgattggtttaatatctgtgttgcgtgaaggtgtcgaggttatcattttctatatggggatgataggtgagctagcgaccaaagattttattattggtattgctttagctatcgttattttaatcatctttgcattattatttagatttatagttaaattaatacctattttctatatatttagagtgttgtcgatctttatttttattatgggattcaaaatgcttggcgtaagtattcaaaagttacaattattaggtgcgatgccaagacatgttattgaaggattcccaacgattaactggttgggcttttatccaagttatgaaccattgatagcacaaggtgcttatattatggtagttgctatcttaatctttaaatttaaaaaataa

SEQ ID NO: 412181 - DNA, 363 bp, Staphylococcus aureus
atgattccatgtaagccagatcatccattagtatattgggcgacattttcaaatgcctctgacttattatcaagtggtgttaaaatttatacgtatgaaaatggatttatacattctaaaatgtgcttaattgatgatgaaatcgtatcagtgggcacagcaaatatggactttagaagttttgaattaaattttgaagtaaatgcctttgtatatgatgaaaatcttgctaaagatttaagggtggcttatgaacatgatattacaaaatcaaaacaactaaccaaagaatcatatgccaatagaccgctgtctgttaaattcaaagaatcgttagcaaaattagtttcgccaattttataa

SEQ ID NO: 412182 - DNA, 294 bp, Staphylococcus aureus; identical to SEQ ID NO: 408498

SEQ ID NO: 412183 - DNA, 453 bp, Staphylococcus aureus
atgagtaaagtagatgcacattgggaattaatcgaagctattaaaaatttacgtgacgaaattgcaccaaacacattgttaacaattaacggtgatattcccgatagaaaaacaggacttgaacttgcagaaaaatatggcattgatggcgtcatgattggtagaggcattttccacaatccattcgcttttgaaaaagaaccacgcgaacacacaagcaaagaactattagatttgttgagattgcatctatcattgtttaacaaatatgagaaagatgaaatacgacaattcaagagtttgcgtagattctttaaaatctatgtgcgtggcataagaggcgctagcgaacttcgccatcaattgatgaacacacaatcaattgcagaagcacgagcactactagatgaatttgaagcccaaatggacgaagacgttaaactagaattatag

SEQ ID NO: 412184 - DNA, 360 bp, Staphylococcus aureus
ttgtatcctggtttatcaaaaagtgattttaaatcgaagaataataatgtaagtattgttaaacaagatgaagattttcatgtgataaaagataatgatggcgtatttgctggggttaattatagtgataatactaaatcttttgatataaacggaattactgttgaattaaaagaaaaaggcatgtttgtaattaaaaagaaagatgataaagcatataaatgtagcttctataatcctgaaactacaaataccgcttcaaatatagaatcaaaaatttttattaaaggttacaccataactaataaaagtgtcataaactctaatgatgctggtgtaaactttgaattaactaaataa

SEQ ID NO: 412185 - DNA, 168 bp, Staphylococcus aureus
atgatgaatgctgaaaagcatatgcaaatgatgcaaatgttacaaaattgtgtgattgataagtatgtatcacacgacgaatacgaagagttaattgccatagataagcatggtaataaaatgtttattaaattttatccgaatacggaggatgacactaatgaataa

SEQ ID NO: 412186 - DNA, 270 bp, Staphylococcus aureus
ttgctatcagcagatgatgctgcacctgtgctcgcatttgttgttggaaccgttgctgttgatcctgttggtgcgttctcgtttgttgcagttgtactattgttatttcttgcgctttctgctggcgttgcattatctgtttctgttgcagatttatcagttgtgccgttattagttgattctacttctgatttatcacttgtaccattacccgttgccgaattgtctgttgatgttgctgttgttccaccagttgccgcatcattatga

SEQ ID NO: 412187 - DNA, 405 bp, Staphylococcus aureus
ttgaatgattctaatctaagacaaagcattattgggatcaatccgaactggttgactaaacctgtgctaggagagatttttaaggatgtcgtaaatatttcaagaagtgcaagggcatatggtagtgcagcgcttgaaattgtttctgtcgctaccggtaatttagaagcatatatgacacctagactccaaccgtgggattttgctggaggactagtcattttaaatgaggtggacggtctagcttctaatttactaggagaaccattaacaattagtggtccaaattcaatcttagttggtaatcgtggtgttcatagagagatcctcggtgtatatttagagccacatcgcgatgcgttaatacaattacatgaacaacgatttaaaagaaaatcaaaataa

SEQ ID NO: 412188 - DNA, 405 bp, Staphylococcus aureus
ttgaatgattctaatctaagacaaagcattattgggatcaatccgaactggttaactaaaccaattttaggagaaatctttaaagaaattgttaatgattctagaagtgcaagggcatatggtagtgcagcgcttgaaatcgtttcagttgctacaggtaatttagaagcatatatgacgccaagacttcaaccatgggattttgctggcggattggttattttatatgaagtaaatggacaagcttccaatttactaggagaaccattaacaattagtggtccaaattcaatcttagttggaaatcgtggtctccatcaagaaattagcaatgattatttagagccccaccatgatgcgttaatacaattacatgaacaacgatttaaaagaaaatcaaaataa

SEQ ID NO: 412189 - DNA, 342 bp, Staphylococcus aureus
gtggtttgtgtcattagtggtggtaataatgatattaatcgaatgaaagaaattgaagaacgttcattactatacgaagaaatgaagcattactttatcttaaatttccctcaacgtccaggtgcattgagagaatttgtaaatgacgtattaggacctcaagacgatattactaaatttgaatacttaaaaaaatcttctcaaaatacaggtactgtcattattggtattcaacttaaagatcatgatgatttaatacaactcaaacaacgtgtaaatcatttcgatccttccaatatttatattaatgaaaataagatgttatattcattgttaatttaa

SEQ ID NO: 412190 - DNA, 249 bp, Staphylococcus aureus
ttggcaccgtcgttttgcgtagctttattgtttgcagctgaaccaactgatttttgcgtatcattagtatctgctgttgccgtatcatctttttggctaacattagttgaagtcattttttcttttgcttcagaagatgcagatgttgatggtttattcgaaacttcagtatcagctttgcttggcgatttatctgcttcgttagatgcaacgttagtttcagacttaagttgtcctgcatcagtttga

SEQ ID NO: 412191 - DNA, 297 bp, Staphylococcus aureus
atggggattgtagatattctatttggtctattagttatttttaatgttggcgcaagttcagcattctttatttatatgtttgctttttggtttatttttagttctatctctggattatttacgttttcgggtagtggtagcttaaaactaatttcagtgatttttaatttattaggtattgttttcggtgtcattttattatttaatccattaatgggtatcgtctttatttcgacgatgattgctattgcatttgtattcgtaggtgtcatttatgttgtagatgcacttgcttaa

SEQ ID NO: 412192 - DNA, 330 bp, Staphylococcus aureus
atgtatggtgtaacttgcaccttagaatataacgatgattatccagcattatataatgatccagagtttactgagtacgtggctaagacgttgaaagaagcaaaccttgattttggtgttgaaatgtgtgaaccacaaccaccttcagaagactttgcatattatgctaaagaacgcccaagtgcctttatttatacaggtgcagcggtggaaaatggtgaaatttacccacatcatcatcctaaatttaacatttcagaaaaatcattacttatttctgcagaagcagtagggacagttgttttagattaccttaaaggagataactaa

SEQ ID NO: 412193 - DNA, 330 bp, Staphylococcus aureus
ttgtatggtgtaacttgcacattagaatataacgatgattatcctgcattatataatgatccagagtttactgagtacgtggctaagacgctaaaagaagcagaccttgaatttggtgtcgaaatatgtgaaccacaaccaccttcagaagactttgcatactatgctaaggaacgaccaagtgcctttatttatacaggtgcagctgtggaagatggtgaaatttacccacatcatcatcctaaatttaagatttcagaaaaatcattacttatttcggcagaagctgtagggacagttgttttagattaccttaaaggagataactaa

SEQ ID NO: 412194 - DNA, 123 bp, Staphylococcus aureus
atggaagatgaaccttatgaaacattaggagaagggttatccttaccaccatttttagaaaataaaagagaatatatagaatcggaagttagaccttttaatacgaagcgtcaacatgattaa

SEQ ID NO: 412195 - DNA, 180 bp, Staphylococcus aureus
atgagtggtacattaggtggcgcctttggtatagcactaagtactacagttttcagtatgttacaactaaactatgcaccaagtgtagctgcaaccgtaacatttatagtcagcattgtattgatgatccttggctcattgtctgcatacatgatcattccaaaaacagttaaatcttaa

SEQ ID NO: 412196 - DNA, 237 bp, Staphylococcus aureus
atgagttttgatccagagatggtaaaagaagcaattcaagaatactatcccaattttacattagattacgatgttgatcctattagacaaggtatcgctaatagttggccggattctattgatacaagctgttcacgtggcgaatggggatttgatcctaaatatgatttagcgagcatgactaaattaatgttagaagctattgaacaaaaagatactgttaaaaataataactaa

SEQ ID NO: 412197 - DNA, 156 bp, Staphylococcus aureus
gtggctgatgatacaaactatcaaactaataatgaaaaagtatttgctgctggagatgctagacgtggtcaaagtttagttgtatgggcgattaaagaaggtagaggcgtagcgaaagcagtagatcagtatttagcgagtaaagtttgtgtataa

SEQ ID NO: 412198 - DNA, 252 bp, Staphylococcus aureus
atgaactttggtcgtgtaatggctggctcattaggaacagcattaatggttactttgatgagttttggcgcaaaaatattctcatctacatcgccatcgcatttaactgcaactgaaattaaacagcaatcaattgctataggggtggatatctcatttgcttttgtagctgtgcttgttatggcagcttatgtgatagcgctttttataagagaacctaaagaaatagaaagtaatagaaggaaattttaa

SEQ ID NO: 412199 - DNA, 231 bp, Staphylococcus aureus
atgccaagtgaggattattacagaacagcgatgattcagcatattggggaaatgctaggtatcaaaacgccaatgattaatcagttcctaactcgctatgaagcaagttgtaagacgtacaaggatatgcatcaagatcaacaactatcttctcaatttaatacaaatctatttgaaggagataaggcactcgtcacaaaatttttggaaatcaatagaacgctttcataa

SEQ ID NO: 412200 - DNA, 231 bp, Staphylococcus aureus
atgccaagtgaagattattacagaacggcgatgattcagcatattgggaaaatgctaggtatcaaaacgccaatgattgatcagttcctaactcgctatgaagcaagttgccaggcgtacaaggatatgcatcaagatcaacacgtatcttctcaatttaatacaaatctatttgaaggagataaagcactcgtcacaaaatttttggaaatcaatagaacgctttcataa

SEQ ID NO: 412201 - DNA, 801 bp, Staphylococcus aureus
atgaaaaaatcaacactcattgataaatttttagacttactttcttcaagaagctcactcagagaaattcaaaataattttattgatgcagatattatgagagatagctctataaatcaaaaatatagtgggcaacgtaaaacattagcgtgggaatatattagtactttaaatttagaagatgaatctgaattttctaaattacttaatgttatggaagcgtatttggttcaatggaatatgtatagtaatgaaattgatgaagacgaagaaattaatagattaataaaaataattaatgcattaggatatgcatataataaagaggaaggaagaataactaaaaatggaagtaaagttaacttaagtactgttaaatctttggcagaaaaatttgatattgagtatgtattaaaagaatgtaatagaattgaaaaagaggcgctaacagatccagaggacgcaattacatctgcaaaatcaatggttgagagtactttgaagcatattctagattctgaaggagaaaaattcaataataatgaaactgtgagagttttatatagaaaagtaagtagtattatgaatctttctcctggtgcacataatgaaaatacttttaaaacaattttgagtggaatgataaatgtaattaatggtctggacgaagtaaggaatgaatatggggatgcacatggtaaatcaaagaaaaattatagacctgaaactagacatgctcttctagcaatcaatgcggcacgtacaataaccgaatttcttttatcttcatacaaaaagtaa

SEQ ID NO: 412202 - DNA, 132 bp, Staphylococcus aureus
atgggaccccaacatagagaatttcgaaaagaaattctacaggtaatgcaagttggggtggggccccaacatagagaaattggattgccaatttctacagacaatgcaagttggggtgggacgacgaaataa

SEQ ID NO: 412203 - DNA, 786 bp, Staphylococcus aureus
atgactaataagtatttaagttttatcactgatgaggatctattcgaatgtattgaatttttgtatacagagtatgaaaaagcgcttgaaggaattgattttgataaattttttaaaaatagaattgatacatttaagatgacttttgatatgggtattaataatttgagtgagcaagattggttagcggcagagttgcaaagacaagttgagaagactattactaatcatgtaggaacatttcatgaaaagttaattggaaaaatagagggctatactaattatccagttggttatgattatgatgttgctaaggatgataatacactttttgcagaaattaaaaataagcataatactttgaccggtactcatactaaaagtctgtttcaaaaaatatgtggctatgcagaaaaatatccagacgccatttgctattatgttagaataatagacactaaaagtcgaaatgatatttgggaatttagaagtggaagtattgatgaaaacacaagagaaaaaccaagattttctcacccaagagtaagaattgcttctggagatcaattttataaaattgttactggagaagaagatgctttcaagcaactagcttataacattcctatagcattagatgattggatagaaacgaaaagggctaaaaaaggatcaagcttaggactatttgcagaactttatcaacaagcaaaggcaaataaccgaacattatcagaagaaataatttctattaattatcctaaatctaattacattagtttctag

SEQ ID NO: 412204 - DNA, 1314 bp, Staphylococcus aureus
atgtgtataggaggtagtttagtgagattgaacaaaggaagtataattgaaaaaatgaaaaatcaaaatattaaaacacaaactgaattagctgaaaaaattgatatatctaaaagccaactatcattcatgttttcagatgaatatgagcctcttaaaaagaatgttattaagttggcagatgttttaaaagtatctcctaatgacattatattagacgaagaagaccaaatgccaattaactctgattttaatagatatgattataaattagatgaattcatagatgtaagcaatgtaagaaagaataaagattataatgtattcgaaacctttgccggggctggtggactagcactaggcttagaaagcgctggcttgtcaacttatggagcagttgaaattgataaaaatgccgcagaaactttgagaattaataggccaaaatggaaagttattgagaacgatattgaattcattgctgataatttggatgaatttatagatgaagagatagatatattgagtggggggtatccttgccaaacatttagttatgcaggaaaaagaaatggatttgcggatacaagaggaacactgttctatccatatagtaaaattttaagtaaattaaagcctaaagcttttatagcagaaaatgttagaggattagtcaatcacgacgatggcaaaacattagaagtaatgttaaaagtttttattaaggaaggttatgaggtttactggaatattttgaactcgtggaattatgatgtagcgcaaaaaagagaaagaatagtaattataggtatcagagaagatttagtaaaagaacagaaatatccatttagatttcctttagctcaagtatacaaacctgtattgaaagatgtactgaaagatgttccaaagagtaaagttacagcatacagtgacaaaaaaagagaagtaatgaaattagttccaccaggaggctgttgggtagatttacctgaacaaatagctaaagattatatggggaaaagttggtattcaggtggtggtaaaagaggaatggctagaaggataagttgggacgagccttgtttgacgttaacaacatctcctagtcaaaaacaaacagagagatgtcatcctgatgaaactcgaccatttagtatcagagagtatgctagaattcaatcgttccctgatgaatgggaattttctggaggagtaggtgcacaatacagacaaataggtaacgctgtacctgtaaatctagctaaatatataggtaaatctttagtacattatttaaatcaatttaattga

SEQ ID NO: 412205 - DNA, 1065 bp, Staphylococcus aureus
gtgatacatacaaatagaataatacgtatggactttggtgaacctaagggactgagtataagtagaaatacactatcttgtgcagcacattatttattagaggggaaaaatgaatattctcctttaaaaggtgaaggctacttacttgagaaaattaacagtttcattaatgaatattattcgataaacacaaataaagaagaagtgttagtaactaatggaggattatttggaattcaattagtcgttgaatatttaaggaataaaggtatttcaaaaatatatataccaaaccctggatttcccccatatcaacatttaaatgttgatcaattaaatataataccatatcaagcaactagttcagatattatgtttaaagagataaaccgtattaataatagtgaagatggtattgttataattatcacctctcctaataatcctaatggggtaatgttgaatccagtaagtttcaacaaaattgatttatctaaaaagaacaacttctttattttagataattcatttcataattatagttataagtatcaacctagaattattcatgacgataatgtatttaatgttttcagcttttctaaatctcatgctttagcagcatatagaattggtttcattttaaataaaaatgttaatcatattaatgatttagctaaaatacagtggaataaaactcttagcgtatcgggaatttcacaaatgatggcttatggagcattagatagtaaaaatgacttgattgaaaataacgaaaaagtaaaatctcagattaaatatgctgaaaaatttttgaattcaaaagggattgttactaacaatcctgatggaggattttttttatggttgaatacaaatgatattgatacacgacaattaagtgaaatagcttatgaaaaatatgggatatcgataatggaaggaaggcactttggaagcgaaggggtaaattatattagaattaattgcgctttggataaagagagtttagaagaaggtctaaaaaggctggtggatgcattcaattatttttatgagaggtga

SEQ ID NO: 412206 - DNA, 669 bp, Staphylococcus aureus
atggataggaatattgatgttgcaatattgaaaatttataataaattatttgaaaatgggtttgttgagaaaaaaatcgttgatatgttcaacttttatcaatatgaaaagaaattagaacatcattatttcatacctgacacaagtattacgaaagttatgtctagaattctatatttattaggacaaaattttacaaataaatttatattaggagctgggatttatgctggcaacgctatttcttggctttcttatgatgttttagaaaataaaaatgggtttatgttaggtgttgatatttcagaagaagctataactttagcgagaaaaaatttgtccatttttaaccaggaaaattttgaggtgaaagtagaaaacatattctttactatagaagctttagcaaaagagtctatagatattttttatctagatatagactcgaaagagaaagggaaatctgaatataaagatattgtagaaaggatttatccgaagataaaagagaaagggttaatattagctcatgatataaatgaaaaaaagtttgaagaggatatgagtggatttgaaaaatttataataaatagtagcctttataaaggaattaatattgacattgataattgtggattattattaattagaaaggaggagagcatgtga

SEQ ID NO: 412207 - DNA, 1575 bp, Staphylococcus aureus
atgcaggaattcattgttaatacagataaatcatgtaaaaattattctctattaaataatttatatgaaattatatttgaaaacattgatgataatcaaaataataatattactagtaagtaccctgaggaaattttagaatttttattgaaaactccggaattctattctgaaatttataatactaaggagtctgtaattgaattaaaagccataagtttgcgtttgagcagacaccatatgaagagagcgaactttatagaacaagttgctcgattagttgcggaaatgatgtatatgtctgatattaaaataactataagacactttgaatatgctgatagaccatcaattatggttattaatagagttattcaaattttgcaaattaagtatcaattaaagaaatgtttgtatattgaaatgaatgatttttcaagtcatgatgagctacttttaaattttagaaataatttatttaaaaaccttcataaaaagaatgtattctttaaagaaaatgtaagtattattaataaaaagaaggaattattatttgaaattgatgaaagctatgaatctcttgatgctgctctattagagcaaaattatgaattggcatatttgattttaaaaaaagagtatactgataaaaacatgactaagcagatgtattatagatggttaggagtaatatcggcaaatttgtcaatttcaaatgaggctaacaatttgttattaaaggctgttcaaaattcagaaaatataatagataaagcacgtaatacatatatttatacgttgcatttaacgaaaagattaaataagcctgaagaatcaataataataattaaaaaaatgttagaagaattagaaatgaataaggatattgaagatatagaaaactacttgcatgaaaaagcgtggttaaaaaacggtttatctttagctcaaacgataaactcaaaaaacattcatagagatgcagtagaaataataaaaaatgaaatggattcttataaatcaatagctgagtctaacaactttaaatttgtttatttaaagtataatctattggcgaacatagcatttttactagagattttaaatgagtataaaaaagctgaaaatttttgggaaatggcttttggtaaattgtttctagatgagaataataatctagatggtgtcaaatctttgagttacagacttggtgtgttgaatataaaaatggataattttaataaggctaaatattatttgaaaaaggctgaaaaattagcttataaacataaaaatgattttcatgtactgaatataaactatgctcttagttatatagactacctagaaggaaatgtagataaagataagataaaacaaaatattaaattagcagtttttttgaatgatgatttttataaagtctcatttgaagatatcttaaatggtttagatcctcgaccgccaaaacttaagttaatatcatatgtaccaaatatagacttgtcttttgtaccaaaagtagatatgaatgaaaaattagatacttttaattggaggggtaaacatggatag

SEQ ID NO: 412208 - DNA, 825 bp, Staphylococcus aureus
atgaaaatttataacacaactgtttttgcgtataaaaatcaaggtggtaatccttgcccggtggtgttagaagctgacgaattatcatatgatgatatgatatatattgccaaaaaactgaaattagaagtaggttttgttcttaatagtaacaatccctcatgtgagtatgaatttaaatattttgttccaaataaagaaatggaaatgtgcgttcatgcgactatagcatgtgtaactattcttaaaaagaataagtaccttgataaaaataaattttcagtagagacattggctggtgttttagagattgagatcataggggacgatacagatttcaaagtcaaagtaaaacagggcaatcctgaaattagtaatcagttaattgataaagttgatattgctaaagcgttgaatgtatctgtaaatcaatttacaggtaatcctgtaaagaacatttctacttctagattcaaaacaattattgaattgaaggatgtagtgacattaaataagttaacacctaattacgattacttatggaaagtgtgtgataaaattggatcgactggattttatccatttgtaaaagatgaaaagaatatatatcatgccagacaattccctaacaacacaggatacatagaagattctgctaccggtgtagcagcttcagcactaggaatttatattaaagatgtaatgaatcagtcttttaatgaattaaaagtatatcaaggttttgctatgagtagtccaagtgaaattgtagttatgaatgattacatatcaaattttgtaattgggaatgcaattatttattaa

SEQ ID NO: 412209 - DNA, 282 bp, Staphylococcus aureus
atgatattttcgcaaaatttatttcgtcgtcccaccccggcaaggttgactagaattgaaaaaatcttgttacaagcgcattttcgttcagtcaactactgccaatataacttcgtagagcacagaacattgatttctgtcccactccccacttactattcgtatttaaagtttgataaaacttctaacattttatcattttgttctttaaaaccaattgtaattctaacaccagttggaaatggtcgcgtaatacaccctacatttaaaagtgcttcataa

SEQ ID NO: 412210 - DNA, 915 bp, Staphylococcus aureus
atgtttaaaagaactaaactaatcttaatagcaacgatactactatcaggatgttcaactaccaataacgaatccaacaatgaaacaaaatcagtaccagaagaaatggaagcttcaaaatatgtaggccaaggcttccaaccacctgcagaaaaagatgcgattgaatttgcgaagaagcatcgtaaagaatttgaaaaagtaggtgaacaattctttaaagacaactttggactgaaggtaaaggctaccaatgttgtaggtaaagatgatggtgtagaagtttatgtgcattgtgatgatcatggcattgtatttaatgctagtctacctttgtacaaagatgccatccatcaaaaagggtcaatgcgtagtaatgacaacggtgataatatgagtatgatggtgggtgcagtgcttagtggatttgaatatcgagcgcaaaaagaaaagtatgataatttatatgaattttttaaagataatgaaaagaaatatcaatatacaggctttactaaagaagcaatcaacaagacgcaaaacgtcgggtatcaaaatgaatacttttatattacatatttatcaagaaatttaaaagaatatcgtaaatattacgaaccattgattcataaaaatgataaagaatttaaagaaggtatgcaacaagctagaaaagagctaaactatactgcaaatagtaatactgtagcaacgttgtttagtacgaatgataaaaaaaacagaaaagaaaagataaataatgtaatagatttatccgagaaaattgaaaggacaaaagatatgccaatcaaaaatactataactactcaattgggaaataaatttattggcacaaaaaaagctcgttttgatgataagaaagtagtgtcgtttggagcgtttgaagatgaataa

SEQ ID NO: 412211 - DNA, 249 bp, Staphylococcus aureus
atgaataaccgtaaacaaatagaacaatcagtgatcagtactagtgcgtataacggtaatgacacagaggggttactaaaagagattgaagacgtgtataagaaagcgcaagcgtttgatgaaatacttgagggtttacctaatgctatgcaagatgcactcaaagaagatattgatcttgatgaagcaataggaattatgacgggtcaagttgtctataaatatgaggaggacaaggaaaatgactaa

SEQ ID NO: 412212 - DNA, 192 bp, Staphylococcus aureus; identical to SEQ ID NO: 410719

SEQ ID NO: 412213 - DNA, 243 bp, Staphylococcus aureus
atgaacgatagcgcacgcaaagaatacttaaaccaatttttcagctctaagagatatctgtatcaggataacgagcgagtggcacatattcatgtagtaaacggcacttattactttcatgggcatatcgtgccaggttggcaaagcgttaaaaagacatttgatactgctgaagagctcgaaatatatataaagcaacatgatttggaatatgaggaacagaagcaaccaactttattttag

SEQ ID NO: 412214 - DNA, 201 bp, Staphylococcus aureus
atggcaactcaaaaacaagttgaatatgtgatgtcattacaggagcaactggaattagaagactgcgaaaaatatacagacgaacaagttaaagcaatgagtcataaagaagttagcaatgtgattgaaaactataagacaagcataaggaacgaagagctatatgatgaatgcatgtcgtttggtctacctaattgttaa

SEQ ID NO: 412215 - DNA, 492 bp, Staphylococcus aureus
atgactttcgaagagaaaataagcaaattatataatgaggttgcgaatgaaattagtgggatgataccagtagagtgggaaaaggtatatacaattgcctacctaaatgatgaaggtggagaggtcgtttttaattatactaaaccaggtagcgatgaattgaattattacacatatatccctagagagtataatgtctctgaaaaagtattttatgatttgtggacggatttatatagattgtttaagaagttaagaaatgcatttaaagaagaaggtcttgaaccatggacatcatgtgaatttgattttacaagagagggtaatttgaaagtatcgtttgattatatagattggattaaattaggttttggtccatcaggaaaggaaaactactatatgtataaaaaatttggaattttaccagaaacggaatatgaaattaataaagttaaagaagtagagaagtgtattaaagagcaagaagaatag

SEQ ID NO: 412216 - DNA, 816 bp, Staphylococcus aureus
atgatggagtatataaaaaaaattgctttgtacatgagtgtattacttttaatcatttttattgggggatgtggaaatatgaaagatgaacagaaaaaagaagtacaaacaaataaaacagattcaaaagaagaacaaatcaaaaagagctttgcgaaaacattagatatgtacccaatcaaaaatcttgaagatttatatgacaaagaaggctatcgtgatggagagtttaaaaaggacgacaaggggacatggacgatatattcagactttgctaaaagtgaaaaagcaggtgaattggatagtgaaggtatggtactacatttgaatagaaatacacggacagctaaaggatattattttgtcagaaaaacttatgatgaagaggataagatgccgcaaaggaaagattatcgtgttgaacttaaagataataaaatagtacttttagataaggtagaagatgaaaaacttaaacataaaatagaaaaatttaaattttttggacaatatgcagattttaaagacttgaaaaattatcgaaatggaaaaatatcgagcaatgaaaatgtgccgttttatgaagcagagtacaaaatgaaaaatagtgatagtaatgtaaaaaaactaagagatgtttatcctattacaaccagtgaatcaccaactttaaaatttcatatagatggggatataaaaggtagctcgataggatataaaaaagtggaatatatcttttcaaagcaaaaagataaccaaatttctgtcagtgactttttaaattataacccttcgaagggtgaaaacaatgagtaa

SEQ ID NO: 412217 - DNA, 672 bp, Staphylococcus aureus
atgcaatacattacaagataccagaaagacaatgacggcacttattccgtcgttgctactggtgttgaacttgaacaaagtcgcattgacttactagaaaacggatatccactaaaagcagaagtagaggttccggataataaaaaactatctatagaacaacgcaaaaaaatattcgcaatgtgtagagatatagaacttcactggggagaaccggtggaatcaattagaaaattattacaaacagaattggaaattatgaaaggttatgaagaaatcagtctgcgcgactgttctatgaaagttgcaagggagttaatagaactgattatagcgtttatgtttcatcatcaaatacctatgagcatagaaacaagcaagttgttaagtgaagataaagcactattgtattgggctacaatcaaccgcaactgtgtaatttgtggaaagcctcacgcagacctagcgcattatgaagcagtcggcagaggaatgaacagaaacaaaatgaatcactacaacaaacatgtattagcgttatgtcgcgaacaccataaccagcaacatgcgattggcgttaagtcgtttgatgataaatatcacttgcatgactcgtggataaaagttgatgagaggctcaataaaatgctgaaaggagagaaaaaggaatga

SEQ ID NO: 412218 - DNA, 171 bp, Staphylococcus aureus
atgaaaaaatttaatgttcaaatcacatatacaggcatgattgaagaggctatcgaggctgaaagtttagaagaagcagaatttgaggctcatgatattgcgagaatggaagtgccatttgattgtgatgaatttgaaattaatgtagaggtggaacaggaaaatgaataa

SEQ ID NO: 412219 - DNA, 153 bp, Staphylococcus aureus
atgttagagtcgcctacctctcagacgtcaacttggcgtagagaggaggtgcgatttatgaatgaaattcttgttcacatcatgacaacagtaattagtggttgtctggtcacgttatttggttattggctccataaacgtgataaaaaataa

SEQ ID NO: 412220 - DNA, 1443 bp, Staphylococcus aureus
atgaaaaacaaggagaagtatctaactaatttttctgaagccaaacgtaaagaagctactcaaaagtacaatataataaaaccttttatcttgggaaatcaatctttatcaagtatttctaaaaataaggacattgcattaagtacactttataggtggaataaattatataaggaagaagggcttactggtctaattcataatacaagagttgataaaggtgatcataaattagaacaaaacataattgacgagattaaacgcctttcactcaagaataaaagaaatagtattgctacaattcataggaaaatcgttaattattgtatagaaaataattttgataaaccaagctacaaacaagtttatagtattattaaagcaatgcctaagtctgttattgatttctctcaccaaggtgaaaaatactatcaaaataagtacgatttaatacaaataagagaatcctcaagacccaatgaaatatggcaagccgaccatactttgctagatatttatatattagatcaaacaggtaatattaatagaccctggctaaccattattatggatgactatagtcgcgcaattgcaggatactttataagttttgaagctcctaatgctcaaaatacagcattaacactacaccaagcaatatggaataagaataataccaattggccagtatgtggtatacccgaaaaattctacacagatcacgggagtgactttacctcgcatcacatggaacaagtcgctattgatttgaaaattaacttgatgttttcaaaagttggtgtccctcgtggtcgcgggaaaatagaacgtttttttcagacagttaaccaaactttcttagagcaacttcctggatatataaacaataatgatactcctagcgatttaatagattttcaaaatttcgaagaaaaattacgatactttttaattgaagattataatcaaaaagagcatagtgttatccagagcactcctatcaatcggtggaacagtaatcattttttccctaatatgccaagcagtttagaacaacttgatttattattattagaaatacctaaatctagaaaaattcattcagatggcattcattttcaaggctttagatacagtaatacaaacctagctgcttatgtaggtgagtatgtattaattcgttacaatcccaatgatatggctgaaatacgtgttttttatagagatgaatttctttgtacagcaatatctcctgatttagctgattattcaattgatataaaagatatacaacacgcacgtagtcagagaagaaaacacttaaaacaaaatattgctagtccaagcaccactgatttaattaaggaagaaaaaaattatggttattcacctcaagaaacgactaaaaacgtcaaaaaattaaagaggtatcgtaatgactaa

SEQ ID NO: 412221 - DNA, 603 bp, Staphylococcus aureus
atgatatatgtacatattcgtcaggcgaataaaaaagcttttatgaattatgagaaagtatgtgtcgcaactgatgcatatgaaactgaagataaagttgataatattttagaacacaaattaggggtatatgagtctgaaatagaaaagattattgattatattataaaaaatattaaatctaaggacttagatgtttcagaaaatatgcaaaacaagatttttcaatatattcatttacaatatttacgtactgacgccggaagaattaattttatgaatttaattgaaaatccgtttacatataaacctagaaaaaaacctattgatctagatgaaatacaaaaacacaaaaatacaataaaaaagtttaatgaaatttttaagcaaggtaacaacctagaaaacttattaaaaagaatgaaaaaaccatctaacatgaattttcatattgcaataagtgaagataatttattaactagtgataatccagtaatcgctactgataattggaaccaaataatgcttccaattactccaaacattcttatagaatttcaagaagataaaattaactcatctaacgatttaagagtaatataa

SEQ ID NO: 412222 - DNA, 219 bp, Staphylococcus aureus
atgactatcaaacagattgtgaatgatttattaaacaaaaaatggtctttagaagatttgttttggttaattttaatgtgtgtaatatttagtacttttacgacaccatttttaggcattccgattggagttattgcttactttttctttttttataaagatgatgattttgatgagatagcagaaaaatatgattatcaagatgagaataagaaatag

SEQ ID NO: 412223 - DNA, 180 bp, Staphylococcus aureus
atgttaagttatggtggattacttaaagaaaagcataaaattttaaaattagacgatgccgaagatggtaatttgattaatacaagtgatgaagataaaacgacagacgaagaagaaaaagcacatccaattaccgcaatttggaatttcgaaaagcaaaattattatttaagacattag

SEQ ID NO: 412224 - DNA, 1155 bp, Staphylococcus aureus
atgaaactttctttaaattctaattctaaatatttaagagcaccaagtattcgccaattttcaaatcgtatgaataatttggatgattgtgttaatttaactattggccaaccagacttcccgatgcctgatgttgtgaaaaaggcatatattgatgctattaacaatgacaagacatcatactctcacaataaagggttattagaaactcgcgaagcaattagtcaatacttcaaaaatcgttatcatttttcctatgatcctgaagaaattattgtgacaaatggagcaagtgaagcaatagacacaacgttacgttctatcatagagcctggagatgaaattataataccgggaccaatttatgcaggctacataccactcatcgaagtactaggtggtaaaccaatttatattgatacaacagcaacacaatttaaaattacacctgatgcattagaaagtcatatttctccaaagacaaaagctgtcttgttaaattatccgactaatccaactggcgtagttttaaaaagaaatgaagttttaaatatcgtaaatgtattaaaaaaatatccgatatttattattagcgatgagatttatgctgaaaatacatttagtggtaaacatgtatccttcgctgaatttgaagacattcgtgatcaattaatattaattggtggtttaagtaaatcacactcagcaaccggaataagaattggttttctattaggacctcaatatttgattgataaattaacatttatgcacgcctataattgtatttgtgccaatgttccagctcaaatagcatgtataacagcacttaacgaaggattagaagctcctaaatatatgaacgaagcttatgtagaacgaagaaattatttagtatctgaattaactaaattaggttttgagattaccgctcaacctgaaggcgcgttttatattttcccaagtattaaacatatcaccgatgacgatttcgaattttgtgtcgatttacttgaatcaacacatttagcaatcgttccaggctcatcctttacagaattcggtaaaggatttgtaaggatttcctatgcttatgaaatggatgttttaaaagaaggtatgaagagacttgctaaatatttaaatactaaataa

SEQ ID NO: 412225 - DNA, 489 bp, Staphylococcus aureus
atgactttcgaagaaaaactaagtcaaatgtacaatgaaattgcgaatgagatcagtgggatgataccagtagagtgggaaaaggtatatacaattgcctacctagatgatgaaggtggagaagtcgtttttaattatactaaaccaggtagcgatgaattgaattattacacggatatatctagagattataatatttcagaagaaatatttgatgatttatggatgaatctttattacttgtttatgaatttaagggatttatttaaaaaagaagatttagaaccatggacatcatgtgaatttgactttacaagagaggggaatttgaaagtatcttttgattatattgattggattaaattaggttttggaccatcaggaaaggaaaactattatatgtacaaaaagtttggtgttttaccagaaacggaatatgaaattaataaagttaaagaagtagagaagtatgttaaagagcaagagtag

SEQ ID NO: 412226 - DNA, 507 bp, Staphylococcus aureus
atgataattaaaattttaacaattctattactactttgtatattgagctatttggttacaaatagaaagaagccttttctgttcttaaaaacactctttatgggtgtggtatttatctttataggatatatttcactggcaatatctgccgtaattatttatggtattattcaatttatcacaattgattttggtagttttttcttaatgggtattatattgatcttgatttcaagtatattccaattatttatagttagattactttttagaaaaaagaatgtcgatttgacagaggttgtcgttttagagcatttaattcaatggttcttagtttactttgcaatctatcaagcagtaaatgaaaaaatggacattaatgatattaatatcgacaatttccaatctgtcttttttgacgtgtctaatttgaatttagtaattctaccaacgttaatcattagctgggtcacaatatttaactatagaatgagaagttacaaataa

SEQ ID NO: 412227 - DNA, 1035 bp, Staphylococcus aureus
atgattaatattaaaaatatttattatatgttatcttatgcatttacagtacttaacaaaaaaggatatcagaagttagcaacagaacaatttgaaaatatatttgatttatattcagctattcttataaaaggtatatcaagtcagttaaatagtggacttcatcatgaatatatagaacagacagattctctaaaagttattaggggaaaagttgatgttaagaattctatacaaggcttaggagttttaagtcaacgtattaattgtatttatgatgaattttcattaaatacatacatgaacaagattttaaaaactacaatgagatgtttaataaaaacagatatttctaggaagaataagataaagatccgaaagttattaattcattttaataatgttgatactttagattatagaaatattcaatggcatcatttgtttgatcgaaataatcagatgtataaaatgttgatatctatatgctctttaatttttcaaggagtaatacaaactgaaaacaggggacaaaataatcttatggcgtttgtagacgaacaacaaatatctcgactatatgaaaaatttgttctagagtactataaaaaagaatttccagagcttgttgttacatcatcaaatattcaatggtcattagataattatgacaacgtgaatatgcttcctataatgagaagtgatattatgttgagatataaaaataaatgtctaattatcgatgcaaaattttataaaaatacattaaacaattattatgatactaaaaagatccattcaactaacttgtatcaaatatttacctacgtgaaaaaccaacaattaaatttaaaaaagaaagcaatgcaggtctcaggaatgttgctatatgctaaaacagacgaaaatattgatttgaacaataagtttcatatgagtggtagtcaaatcattattaagacattagatttgaacagtgattttactattattaaaaaacagttgaatgagatagttgatgatatattttactaa

SEQ ID NO: 412228 - DNA, 309 bp, Staphylococcus aureus
ttgaaagagaaagagttaacatcaattataatagtaagactaccatttcccgttcctgatccagtaataaaaagaaagagtaaattattgggtaatattgaaaaggtaatagtttcagagatgattatgaagtttaaacaaggtaccggtagattaatcagaacagcaaaagatagaggattattgactatattggatttaagaatgaatgataaaaattaccgccatagagaattaatattaaattcgataccaataaaaaatgaaattaatgaatccgatgtgataaactttttgacatcattataa

SEQ ID NO: 412229 - DNA, 585 bp, Staphylococcus aureus
ttggaaaatgaagtaattgaagtaatagaaaaatatagaacagatgtggaaatagaaagtaataagttgaccataaaattgaaatttaacccaattagcaaaaaagataaagaactaatcgatgtgctgaattatgtaattaatcaaaaatacattttagaatttggtggtaatgattaccaatgctacaagtttcagtcttattacaaaggcaatgacagattcgaaaggttttataataaatattttaataatacaatagagttgcatgctgtagcattattaaaaaccaatgttgatataaatactaactctgtagatatcaaaaaagcgaatcagataaatatatatgcagaaactattaattcaataaatgcaaagaagttcatatacgaagaagaattaaatgatataagtaacgtggacttaatgattgctgttaataatattcaaaatactcttaataatcaaatggcacccactcatgaagatttatcagttttgaaaagatttgcaaaatcatcttctagtatagctagcttcgcttcggatattattacaattttaggggtgtttttaaagtag

SEQ ID NO: 412230 - DNA, 681 bp, Staphylococcus aureus
atgaaattaaaaaatattgctaaagcaagtttagcactagggattttaacaacagggatgattacaactactgctcagccagtaaaagcaagtacattagaagtcagatcacaagctactcaagatttgagtgaatattataatagaccgtattttgacttaagaaatctaagtggttatagagaaggaaatacagttacatttataaatcattaccagcaaacggatgtgaaattagaaggtaaagataaagacaaaattaaagatggaaataatgaaaatttagatgtgtttgtcgttcgtgaaggatctggtagacaagcagataataattcaattggtggaattacaaagacaaatcggactcaacatatagatactgtgcaaaacgttaatttgttagtttctaagagtacaggccaacatactacttctgtaacttcaacaaactatagcatctataaagaggagatttcattgaaagagcttgattttaaattaagaaagcacttaattgataaacatgatctttataagacagagcctaaagacagtaaaattagagttactatgaaaaatggtgatttttatacttttgaattgaataaaaagttacaaactcatcgtatgggtgatgtgattgatggtagaaatatagagaaaattgaagtgaatttataa

SEQ ID NO: 412231 - DNA, 633 bp, Staphylococcus aureus
gtgctttgtgaatctagacaaatttataaaaatcctaaatatcgagttattaaatataataatgaatatttcatggtcgatttagtaagtacttggattacttattttttccctatgattaattggtttttgcccaaaaagtacgcaaaaattagcgaaaatgaatttgaaaggttaaatattgtcgaacctgttaaaaacaatgttttttggccggttgcaggaagttcagttctattcggaattatattgagaaagtacggtaacttctttaatgttcagtttgaaaaacaactagcaatcactgtattttttatcatgttaatagggatgttaattttttatttctatctaaataaaaaattaatattaaaaatttttaataccaacgtggttaataagaatagagttgtattaataccgactttcaaacaagggttgttaatagtttttgcgttcatttttttaggaagcgcttcaatatttactttaaccattcttttgacgacagagtcacaaaatataataatatttttaacttgggttattatcacgatgtttttctttttagtgaatatggcttcgataggtaatacaaatattcatgttattttaagaataaacgagtattaa

SEQ ID NO: 412232 - DNA, 630 bp, Staphylococcus aureus
atgttgctttgcgatgtcagagtcatttataaaaatccgaaatacaaagtcattcaacataacggtgaatacttattagtcgatttagtaagcacttggttcgtgtacttttttcctttcattaattggttcattccaaaaaagtacgcgataattagcgaagaagaatttgaaaatttaaatgttgttaaaccaaataaaaataatgttttctggtcagttataggaagttcggttttgtttggagttactttaaggaaatacatacatgtttttgatgttcaattagataagctagttgtaatgatattgtgtgctctcgctttaatttgtgttatagttttttattttaacttaaatagaaagcttaagttaaaagtgtttgatacaaatattgaaaaaaataagagagttatattaataccaacgtttaaacttggctgttttttagttttcggatatattttcgctggaagtttttcaatattttcattaattgcccttatgacaatcgaacctcaaaatataataatatttatttattggattatgatgacaatgcttttctttttgttaaatatgacttcgataggtaatgaaaaagttcgcgttataatgaaaaataattga

SEQ ID NO: 412233 - DNA, 783 bp, Staphylococcus aureus
ttgattagtcatgcagaaaataaattattcgcaaatacatatgaagaatctgaaattttaaaaaagagagaaaagtacaatgcagccccttccacattaagtgaggaagttttttcaaaagtttcaaatactatgaaaagcccctataattcagttggaacagtttttattaagggggagactatagcttctggtgtattaattggcaaaaatacaattataacaaactatcatgtatcaaggatggctaaaaaagatccgactaaagttatattcacacctggttcgactaaaacagaagatggagtatataaaactccatatggacaatttgtagcagaagaaattaatgaacacccatatggacaaggaactgatttgtctataattaaactaaaacccaataaagacggaaagtctgcaggtgatttaattccccctgcaaagattgcagattctatagatttgcaacaaggtgacaaaataagcttgctcggatacccttataacttttctactaattctttatatagaagtgaaattgaaatctttaatttaaattctggtcaatattttgggtatactgagtcgggaaattctggatccgggttgtttaatttaaaaggagagttagttggtattcatgttggaaaaggaggaaaatataatttaccgataggtaaattttttaatactgaaattggctcattgtattcagtagataattcattaagcactttaggtagtgatttaaagaaaagagctgaattacagtctcattag

SEQ ID NO: 412234 - DNA, 699 bp, Staphylococcus aureus
gtgaataaattctcaattgttttaattttattaatgctattagttgctaactatcaaatagttagtgcatctagcatatctgataacagatcgctcattactgatatatttaaaactaagaacagcttgaatactgcaaaatatgaaggaaaagatagtcatcattgtactgctgttatgattacaaaagatattggtttgacagcatctcactgtaaagatggtggatttgaagaaggatatatagggactatttatcctggcgaatctggcttagctacaaatgctggaagtgcttatatttcaacatttaatccatttactggactagatatagctattctcaaaacaaataatcaaagtaacgattattcttattatctaagaaatataaacttatctgtcaaaagcgtgaactttcataatcttataggaaaaaaggtatattcaatcggatatccgattgataaaagtggatataagcaatataaaacagaaggtactattactcaaacagtacatgacaacgcaattcgaactacattacaaagtacttctggacaatctggttctggtgtgtttttaaaagaaaacgatcaattaatcggtgttatttcagaaggaagtttggatggtagtttagtcataccaattaatagtcaaattgcagattggattgacagagtaagacactattaa

SEQ ID NO: 412235 - DNA, 744 bp, Staphylococcus aureus
atgaaagatacaattgtaaaatttctatcagcattccttgtgatttcaagtattagtttgatagatacatcttttagctctaaatataataaaatctcaatagctgccgagactaaaaattttacagacttagttgaagctactaaatggggaaactcattaataaagtcagccaagtattcttctaaagataagatggctatttataattatacaaaaaatagttcacccataaatactcctctaagatcagcaaatggtgacgtgaacaaattatccgaaaacattcaagagcaggttagacaattagactcaacgatatctaaatctgtaacaccagattcagtctatgtatatagattattaaatttagactacttatcaagtataactggctttacgcgagaagatttacatatgctacaacaaactaacaatggtcaatataatgaagcgcttgtgtcaaaactaaataatcttatgaatagtagaatttacagagaaaatggctactctagtacacaactagttagtggtgcagcactagcaggtaggccaattgaattaaaattagaattacctaaaggtactaaagcagcatatattgattctaaagagttaacagcatacccaggtcaacaagaagttcttttgcctagagggacagaatatgctgtaggcagtgttaaactttctgataacaaaagaaagataattataactgctgtagtttttaaaaaataa

SEQ ID NO: 412236 - DNA, 264 bp, Staphylococcus aureus
atgtttgaggacaataaaaatgataacgataaaatcatattaatccctacatttaaaaatatttgtttatccctaattgcctatgtgtttttcggtggcttttcaataatgcttttaagtatgttgatgaccttaaatcctcaaaatataataggattcttagctttgtttggtatgattgcagctttctttatagcaaacaggtcttcaattatcgataaaaatgtttacgcaatactaaggtcaaaagaggttgagaagtga

SEQ ID NO: 412237 - DNA, 1443 bp, Staphylococcus aureus
atgtttaaaagttatatggatataacaccgaatgaatatcgtaatttatcaaaatataataaatgtttaatgctaaagccagaaccactagtaggcaaaatggtgcaagaagtaaaagaaatcatattgaattatattgaacattataaaaaccacctaactgatgttatacatattgatgaagacaaatttgaaacacctaaattgtttcaaacggttattcaaataaatacttatacagaaatgaaattagttttcttagaaggaatctttaaaaccttattgaataagaacagtcaagttgtctttttcatcatgccatcgattctaaaaagtaaaaacaccatgtccgaagaagaaaaattcacaatcattaaaacaataattgaaagtgatctaaagatagcatttaatataaatgatattgaaacaacttattttgttgaagaagcttttatgagtgttttcagacaaatatctccaaacgaattaagtaatcataataattacgaagtgcattttgtttttgatttatcattgatggaaattagaacaatttatcgaatgatattaaaattacataacatcatgttgaatgtgaaattaggattgaacattacctgtttatttgaaaaaccttcagtttttaaatcactagtatcacaaataaagcgacttaaattcgattcgttaataatagataatgcaaatttaagtagcccttatttgatgggggaaagtgatgagttactattgaaaaatattttgcattttaaaaatttaaaacaagtaattaatgaattggatattgaacaagaaaagcttatttttctaaatgttgaaaatcataaactgcttaataataaagaacgagatttaagtaatagtgctccattaatttataagacattaagtgcgctgtatcacaactttgatggctttggattaaacatttttgataatcatcatacatttaatgcgatgcatctatatgataaaaatggatttaaaacaacactaggtcttatattggaaaaatttatcgaatatgtctcgaaaccaaaatacgaaaacagttattattctatttttgatatagagaattattattgcctggttatttatgattggcgagtgattgagagcgagacaattatgagcaattttgaggatagtcaagtttatataaatttcaaaaataatgttttaaacgataaatatctaattgtaatagaaacattggacgaaaatagtggcaacattaatcatttgatttctaaagaattaagagataaatatgaatggaaccctagtttactatctaaaattgacaactaccttaaaccagcaatcgagattaaagagcataattttagtgataattccttgaatattaacgttacttttaatgcgttatacataattaaaataggaaaaaaataa

SEQ ID NO: 412238 - DNA, 543 bp, Staphylococcus aureus
atggcgactcaaaataagggagaagctttaaaaattaaaggtatggtcttgtatatgaatagaaataccaaaacaacaaaaggatattattatgtaaatgcaataaagaatgataaagacggaagaccccaagagaatgaaaaaaggtacccagttaaaatggtcgataataaaatcattccaacaaaagaaattaaagataaaagcataaaaaaagaaatcgaaaactttaagttctttgttcaatatggaaactttaaagatttgtcgaagtacaaagatggagatatttcatacaatccagaggtgccaagttattcagcaaaatatcaagtaactaatgatgattataatgtaaaacaattacgtaaaagatatgatataccgacgaataaagctccaaagttattgttgaaaggttcaggtaatttaaaaggttcatcagttggatataaagatattgaatttacttttgtggagaaaaaaggtaaaaatatatattttagtgatagcttagattataaaaaaagcggagatgtataa

SEQ ID NO: 412239 - DNA, 153 bp, Staphylococcus aureus
atggcaaaatcatgcttgcatatacttactaataatgaatatgcgacaacgcgttgccaagatggcatagtcttattttggccaattgacggggaaatcgaactacaaaaatttcgtaaaagtaaaataattgaagatgatatatattattaa

SEQ ID NO: 412240 - DNA, 216 bp, Staphylococcus aureus
atgatttctggtgttaatattccaggatatttttcaacgattgcagctattttattattaggcggcatacagttaatttcaattggtgttgtaggtgaatatattggcaggatatattatgaagttaaggcacgtcctaaatatattattcaagctacaaatctttcaagtattgaaaatgatgagaaggatacccataaaatttactctaaataa

SEQ ID NO: 412241 - DNA, 510 bp, Staphylococcus aureus
atgactaacacattacaagtgaaactattatcaaaagacgctagaatgcccgaacgaaatcataagacagatgcaggttatgacatattctcagccgaaaccgtcgtacttgagccgcaagaaaaggcagtgattaaaacagatgtagctgtaagtataccagagggctatgtcgggctattaactagccgtagtggtgtaagtagtaaaacgtatttagtgattgaaacaggcaagatagacgcgggatatcatggcaatttagggattaatatcaagaatgacgctattgcatcaaatggttatattacaccaggtgtttttgatattaaaggagaaatcgatttgagtgacgccataagacaatatggaacttatcaaatcaacgaaggcgacaaactagctcaattggttatcgtgcctatatggacacctgaactaaagcaagtggaggaattcgaaagtgtttcagaacgtggagaaaaaggtttcggaagtagcggagtgtaa

SEQ ID NO: 412242 - DNA, 216 bp, Staphylococcus aureus
atgaatatcatgcaattcaaaagcttattgaaatcgatgtatgaagagacaaagcaaaatgacccgattgtagcaaatgtctatatagaaactggttgggcagttaacagattgttagacaataacgagttatcgcctttcgatgattacgacagagttgaagagaaaattatgaatgaaatcaattggaagaaaacgcacattaaggagtgttaa

SEQ ID NO: 412243 - DNA, 1242 bp, Staphylococcus aureus
atgaattacggacaattcgaaattgaaagtacaataatcgctacgctacttaaacaaccggacgtattagaaaagataagagttaaagattacatgtttacgaacgaaaagtttaaaacctttttcaattatgtaatggacgtcggaaagatagatcatcaagaaatctatttaaaagcaactaaagataaagaatttttagatgcagatactataactaaactttacaactccgatttcattggatatggcttctttgaacgttatcaacaagaattattggaaagttatcagctcaacaaagctaacgaattggtaactgagttcaaacaacaacctacgaaccaaaactttaacaacttgattgatgaactcaaggatttaaaaacaattactaacaaaaaagaagatggaaccaagaagtttgttgaggagtttgtcgaagagttatacagcgatagccctaagaagcaaattaagacgggttacaagctaatggattacaaaatagggggattagaaccatcacaattaatcgtcatcgcagcgcgtccctcagtgggtaagacaggttttgcattaaacatgatgctgaacatagcacaaaatggatacaaaacatctttctttagtctcgaaacaaccggcacatcggtattgaaacgtatgttatcaacaattactggtattgagttaacaaagataaaagaaatcaggaacttaacgccggatgacttaacaaagttaacgaatgcgatggataaaatcatgaaattaggcattgatatttctgataaaagtaatatcacaccgcaagatgtgcgagcacaagcaatgaggcattcagacggtcaacaagttatttttatagattaccttcaactgatggatactgatgcgaaagttgatagacgtgtagcagtagaaaagatatcacgtgacttaaagataatcgctaatgagacaggcgcaatcatcgtactactttcacaactgaatcgtggtgtcgagtctagacaggataaaagaccaatgctatcggacatgaaagaatcaggcggaatagaagcagatgcgagtttagcaatgttactttaccgcgatgattattataaccgtgacgaagatgacagtatcactggcaaatctattgttgaatgtaacatagccaaaaacaaagacggtgaaaccggaataattgaatttgagtattacaagaagactcagaggtttttcacatga

SEQ ID NO: 412244 - DNA, 357 bp, Staphylococcus aureus
atgccgatgagcaaaacacaagcattagaaattattaaaaaagttaggtacgtatacaacattgattttgataaaccgaagttagaaatgtggattgatgtattaagtcaaaatggagattatcaaccaactgtaaaagcggtagatgtttatatcaacagtaacaacccgtacccgcctaacttaccagcaatcatgcgtaaggaacctaaaaaagtatctatcgagccagtagataacgaaaccgctacacaccaatggaaaatgcagaatgaccccgaatatgtcagacaaagaaaaatagcgctagataagttcatgaataagttggcagaatttgggggcgaaaacgaatga

SEQ ID NO: 412245 - DNA, 804 bp, Staphylococcus aureus
atgggagaagtatcgtggataaaacttaaagttggcatgtttgatgacagcaaaatcaaatatatcgaagctttacccgaaagagatacgatcataactatttgggttaagttactaactttatcaggaaagtacaatgaacaaggttatattatgctatccgaaaacttgccgtacaacgaagaaatgttagcaaatgaatttaatagacctattaactcaataaggttagcaattcaaacttttgagacattgggcatgattgaaaaagttaatggtgtcataaaagtgacaaactgggagaagcatcaaagcttagatagcaaagctaagcataaagaaaaaaataaattgcgacaacaacgctatcgtgagaaacagaaaaagttactagaagcaaaacgtaacgttaccgtaacgttacgtaacgatacagaagaagaagaagaaagagaagaagaaaaagaagaagaatataagaataaagaagaaagagaagccgtcttctcatcttcaataaaatatataattgcaaatttggatgataagttaacacctaatcaaatggaacaattagggtttgctattgatgatataggtacaaacgcttttgaagttgtaaaagtaggtgttgagtacactaaaagcaaaagtgcgcatggtggctatttaattaaagttttaaacaactgggctaaagagaatgtcaaaacaaaagaagatgcagaaaataaaatagcacctagaaaaaatactactgatgatgtcattacacaaatggaaaaagaattgagtgatgactaa

SEQ ID NO: 412246 - DNA, 189 bp, Staphylococcus aureus
atgcaatacattacaagataccagaaagacaatgacggtacttattccgtcgttgctactggtgttgaacttgaacaaagtcacattgacttactagaaaacggatatccactaaaagcagaagtagaggttccggacaataaaaaactatctatagaacaacgcaaaaaaaatattcgcaatgtgtag

SEQ ID NO: 412247 - DNA, 720 bp, Staphylococcus aureus
atggataaaaaagaattagcgaaatttataggcaataaaatcagatactatagaaccaaattgaacttaactcaagatcaacttggagaaaaactcaacactaaaaaggctactatttcaaattatgagacagggtacagaactcctaaacaagatgatttgtttgaaattgctcatattttaaatatcagtatcgatgatttgtttcctacaagaaataataaaaaaaacgacatcacttccatatacagtaaactcacgcctccaagacaaagcaatgtactaaaatatgcgactaatcaattagaagaacaaaataatgacagtgataatctggtagatttcaattcttacattcaagaaaaatccgaagtggatatatatggttgtgcgtcagctggtattggcgaaagattatataacgagcctatttcaaaagaattcgtaagaggttatgtccccgcacatgatatagctttaaaagtaaatggagactcaatggagccgttatttaaaaacggacaaattatattcattgaaaaatctcacactatcaaagatggacaaataggcgtctttattataaatggagatgcttacgtaaagaaagtttatgtagaagataatagattaacgttggtttctttaaataaaaagtataaagatttatatttttatgataacgaaagtgtgaggttagttggaaaagttattttatag

SEQ ID NO: 412248 - DNA, 522 bp, Staphylococcus aureus
atgagtatcggcgttattacaaatgatatatatacaaaagaagacgaaaagatattagtaaattcaggagttctacctgaaagtcgtatcattggtgttgaaactggtggatgtcctcatactgcgattcgtgaagatgcatctatgaactttgcagcaatagacgaattattagaacgtcatgacgatatagaactaattttcatagaatctggtggcgataacttagcagcaacatttagtccagaacttgttgacttttcaatatatattatcgatgttgctcaaggtgaaaagattccacgtaaaggtggtcaaggtatgattaagtcagatttctttataattaacaaaactgatttagctccctatgttggtgcatcattagaacaaatggctgaagatactaaagtatttcgtggtaaacgtccatttacttttactaacttaaaaaccgacgaaggtttggatgaagttatcgattggattgaacgcgacactttactcaaaggattatcataa

SEQ ID NO: 412249 - DNA, 777 bp, Staphylococcus aureus
atgataactgtagctgttatagatacgggtgtagatatctaccataataaattatacaaatatataaatttaaatttatcaaaaagttttgttgatgaatctttgactgataaaaatggtcatggaacggctataactgggattatactttataacgaaaaatttaaggaatcattgaaaaatgtacaacttgtaatttgcaagattactaatcaattaacttttgaagttgaaaaatttattgaagcacttgagtatgctatttccataggcgtccatattataaatttaagtctttctataaaaatatataatgcgactcaaagacaaatggaccagataaaagtacttattcaaaatgcatataataaaaatattatagtagttgtatcaactggtaatcaagatcatgaaaataatatattttacaaactgaaagattttttatatccaataatagctaaagatgttaaaggtaatattgcctcttactccaaatcgttaagtaattcatacgctatgtttggtggagatatagaaagtattggagattctattaatatagaaaagcatttagccttttctacgtttcctatgtacttagaaaatagctattttaactattttggtgtaaaaagaggttattcttatttttggggaactagtattgcgactgcaaagttcacacatattgttataaatgctcttcaaataaataatgatttaccaataagtatatcaagtaaactaaagaaatatattcataaacctgactag

SEQ ID NO: 412250 - DNA, 468 bp, Staphylococcus aureus
atgagtggaactatattagataatatagtatacggacaaaaaaagataacttgttttgacagaatattggatgtaacgcagaaagccgatttaatggagacgattgataataatcctaaaaaatttttatcagcaacgggagaaaatggagcttttttatctggtggtcaaagacaaagaatagcgctatcaagagcaataatgaaagataagaacatttatttattagatgaattttcttccaatttagatagtcagagcgaaaaccgtttaatagataatatttcagaaattatggcaaataaaacatgcttaataattgctcataggatgtcaacaattaaaaatgcagatcgtattttattcatggataatggagtaataactggtttagcctcacataaagaattatacgcatcgcatactttatatagactttttatcgatagtcaaaattgctttaaatag

SEQ ID NO: 412251 - DNA, 1092 bp, Staphylococcus aureus
gtgagatatatgaaaataagaagtttattaaatcttgcagagatttcaaaaaaattatttatattaaatttgataatatcggtattttccactctgttaggcttaacaatgccaatctatttaaaaaatgtaatagataagtttcagaaatcaggtatagagttatcagatattctaataattagtatactctttgctagtagtgttatattaggatctgtttcgttatatctatttaaatatattggaagtcgatctatgtttaaaatacgaagtaatatttgggaaaacatattaaaattagatttaccaactattcaaaaatatgaaagtggagaaataataagccgtcttaaaaatgatatagaggaattaaatctttttttaacaaatactattcccaatgcacttaattacttcttgacctttgtaggtgcactcataatgttgtttattttggattataaaattatgttaataaccatagcagttattccaattatttgtttagtaatatttccaattggtactataacctataacctttcattaaaattgcaagaccaattgtcattgttcacatctaaattaaataatatactcaccaacattaaattagtcaaagcttatacatctgaagcttatgagtatcaaaaaatcaaaaaaatattaaataatatacttgatattgaattaaaagacgcaaaagtaaaggcgttaataacacctataatgtcagtagttacaataggaacaatattatttattgtcggatatgcaataattagaattagcaatggcagtctttcaactggtacttttattgcaatactttattatgtattacaaataataccggctattatatcttttactactttatatacagatgttcaaaaagtaagaggggcaaatgtaaaaattagagatctgttgtccgaaaataatttagaaactccaaacctattattacgcacagcaaaattacctttggaaaaattaacaattaataatataagtttttcttttggtgaaaaacaaattctaaaaaacattaatttaataattaatccggagaaaatattgctatag

SEQ ID NO: 412252 - DNA, 387 bp, Staphylococcus aureus
atgacaaaaacattttatgagtcgtcgttaattacaaaaaataaaatgtaccaatccatatgtaaccaattttttgaaaatattaatattgaatataaaatattgccgtccccttcattatgccatggtaaatctggtgtattactacaattaatgaaaatgaaaaatcactttgactctaaaatattacagaattcatttaataaattaatggaagattatgatgaaaataatgtctataagtttagagattgtgaaatatataagaaaaggagatattatttagacaaaaacaattttttaacagggtctttgggtatttactattcattggatttatatcatggacttgaagatcatgttgatttgttgaatctaattatgtga

SEQ ID NO: 412253 - DNA, 858 bp, Staphylococcus aureus
atggaaaaatttgagaaattaagcaatccttcacaaaatttcgaacaaatttataaaaaaaacataataaataatcccaaaataattatcgatatgtattaccatccggattacttcacattagcaaacggacttttaccttggattataatcatgcgaaatagagaattaaataatttaggaaattatgatatagagatacataacttattaaaaaataaaattaatagaactattatagagcaaattaaagatcccggattgtttaatggtttatcaggtctgacatatatcttagctatatcatcgaaaaatggacgctatgataatctaatagaaggaactttaccttatttggaatatcaaacatacgataagataagcgagtgtattagaaataaaaacaataaaacagttaatgattatgattacgatttaataagtgggctgagtggaatcttaaaatgttatctaaataaacatgtaatcaagtacatacaagataaaaaagtaatagatgatatcgctatatgtttagcagactattttaactttaaggaatacaacaatttacaaagcttacctttttatatcaaaaatcaaaaaaatgaatatataaatagtgaaggtgaaatgatcaacctatcacatagtcatggaattatggggattcttagtgctttaaatcaatattataaaacttatcatcaaaatgatataaaaaaaacaatcgaaaaaatttgtgactttgtcgctcaatattattgtaaaaaaagtagaacatggatcaaaagacattataataaccaaaaaaaatatttggagatccaaactatacatggtgttatggagatttaa

SEQ ID NO: 412254 - DNA, 2859 bp, Staphylococcus aureus
atgatacacgtaagtaattactttatggtgagaaaaccttcctttaatttttcggattattcaattttatcagacgaggaatttgtaaatctaacattaaaagaacaaataaaaacaatatggaaagttcccaaattcaaagaagccatttgtgtagcttctcaagatctatacaaatcttgtttgaatttagataacaaaaaaagtaaagatataaaaagcatacataatagtttaataaagtattatataagaatgtgtactcgtagcacaccctttggtttattttctagtttttttatatcagagttttgtgacgatttggtacaacaggatttaaaaagggagcaaaaaatatattgtttattaagtaatgaatggctggaaaactttatttttgaagtaataaattcaacagatatagttaagaatttgcatttaagagtaaacaaaagtttaagaataagtaaaaataagatatctctttactttattccaggacaaaataatttaactaattcaataagtattaataataacttaaatgctttcattttaaattatctaaatataaatagaagttttaatgatgtgttatgtattcttcaagagaatggcctaaatttaacgccaaatattctattgaattatatcaaagacttagttagtaaaggttttataatcacagagttacaaaaaggtaatttttacaatattgacacacaacaattaaaaaccatattagaaaaatgtagcgcttgtcataagcatcttaaactttttaataagttattatcatttactaagcaatcagtatttgacttaaataactatattgagtgtgtagcagaatcgcaaaaattaattcctggtattatcccatttcaagtggaatcagttttaggagaagagataaatttaaattcaactataaaaaatgatttaaaagaaattgcaaaaatatattattctttaaataaacactggatagaaaatgacgagtatattgaagaatttatggaaaaatatggtattaatatagccgttaatataaaagaattagcttataaagggaaacatctaggtttaggtaatcgaaacatcgtaaaaagagaaaacaattttttatctgaactggcatttaatatttctaaagattataaaaaggaagttgatattagtaatttcatcgatttagaagacatagaatactcatcacccgcaagttttgacctttactttagaattcacgaagataataaaggtcatagaacatattttccatctgggaatattataacaaatgaatctcatagaactttcgggagatttttaaagtattttgacgatttatcagaagaaatatgcatagaaaaacaacagtgtgcaaagaacaacttttcaaatataatcagctacggtatatcttttaaacctatgagttttaaggctttgaatgttatgaaaaccccacaattttttaaagaaaatgttttttttaactcttttgaaaatgatgataaacttaacaacatttatgttttttgtgatgaaaaagggaaaattcacttttatgataattataagaaaaagaaaatacacttatctacaaccaatatgatgaactatgagtctaattcacctgacctttgtcgtttccttctttcccattctgaaaataactatattaaaagttatccaataaataatagtgacttagaaaagtttcatttctttcctaggatagtacataacaatatagtccttagacttaaaaaatggaagttcaagtcacatatatcaacatatgccaaaataatagaactttataaccaaggtcatattgatcgatttgttaacttagtacaattagataattttatattgttagatcttgaaaatatttattcagaaaaaattttaaaaaaggaattgctaaaaaatgaagattatattgaattggaagaagccgaacacttgataaataacagttctatttataaggagtatgaatttgtagtaccaatcaatatacaaagtaagagtcatgaagaacgtataaacaatgtcacactatttaaagattcgaaaaaaagaattttgacgattaatgattcgttgatttatattaaaatctacttctctctaggatatcgcgaagaaatattacaagaattacatatgtatttgactaaagaaaacatatcagattacttttttattcagtacaatgatcctaagccacacatcagattacgtttgttttcttctccagaaaatttaatccatgatttaaaaataatagaatatttacatagttttgaatttgtcaaaaaaattgatattgcagattatgaaagagaaatagaaaggtatggtggagaggaaaaaattgaacttgcagaagaaatatttaaaaaggattcgaaaaacatcttacaattaataaataagaaaaataaagaacatttagctttcgtattagggttgaattttttgaagaccttttacgaaggattaaatgtagaagaattatcaaatttattacaaattaatataaataaatcagatcaaaaattttatagaaaatggattaagtgtaatgaaaatttggaaaatgaaaccgaacaaattaatgatgtttttgaaaaaagtatgatcaaaaaaaatattagagatttcaaacgcgatttcaaaggaatgctacaaactccatactttttaaatattgtatttagtttcatgcatatgtcttataatcgcttaggaattgataacaatacagaagaacaaattaataaaagcatttatctttatttaaaagaggaatattacaaatggaaaaatttgagaaattaa

SEQ ID NO: 412255 - DNA, 195 bp, Staphylococcus aureus
atgaatgaaattaaattaaataatgttaaactagatgattttaaaattaattttgaagaaaaaatgatgactgatgaagaaaaagaaatgttaggagaaatggatactaggcttacaataacaatgaaatttgtcacaaagataacttgtagaggttcttgtacgtgtaattgtacagcaatttgctttgcataa

SEQ ID NO: 412256 - DNA, 195 bp, Staphylococcus aureus
atgtttatgctatttcaatttcctcacgtagcttttgaaaatattcctgtagcagacattggtttgcacagagccatagaaaaaaatcatgatcttccacataaatcgattgataaaagtaatggagaatcttactttcaaaacatgaaatctatagatgtgtttaaatattggtatatatacatggttgaatag

SEQ ID NO: 412257 - DNA, 570 bp, Staphylococcus aureus
ttgaaatacgatttgacaactcaagacagtacaatcaaacgtaacaatgcaataaatgataaagacttcgaaaagttaggaatggatctacaaccattaattattcgacgcatcaaaacatttggatttaatcattatgatttagaagacttatatcaagaaatacttatacggatgtataggtcggtccaaacatttgattttagtggagagcagcctttcacaaattatgttcaatgtttaattacgtctgtaaagtatgattatttgagaaaatatttagctacaaataaaagaatggataatttgattaatgaatatagagttacgtatccatgtgcaataaagcgttttgatgttgaaaacaattatttgaataaattagcaattaaagagttgatttgtcagtttaagtatttgagtgcatttgaaaaagatgtcatgtatttaatgtgtgaacaatataagccgagagaaattgctcaattgatgcatgtaaaagagaaagtgatttataatgccatacaacgatgtaaaaataaaataaaacgttatttcaaaatgatttga

SEQ ID NO: 412258 - DNA, 501 bp, Staphylococcus aureus
atgtctgctatcattgaagctaaaaaacaactagttgatgaaattgctgaggtactatcaaattcagtttcaacagtaatcgttgactatcgtggattaacagtagctgaagttactgacttacgttcacaattacgtgaagctggtgttgagtataaagtatacaaaaacactatggtacgtcgtgcagctgaaaaagctggtatcgaaggcttagatgaattcttaacaggtcctactgctattgcaacttcaagtgaagatgctgtagctgcagcgaaagtaatttctggatttgctaaagatcatgaagcattagaaattaaatcaggcgttatggaaggcaatgttattacagcagaagaagttaaaactgttggttcattaccttcacgcgatggtcttgtatctatgcttttatcagtattacaagctcctgtacgcaacttcgcttatgcggttaaagctattggagaacaaaaagaagaaagcgctgaataa

SEQ ID NO: 412259 - DNA, 2013 bp, Staphylococcus aureus
atgatatatattattaatcatctggatgtatttagtattaagaataataaaaaaacgatcatgttgtatttgagtagcgattggtttgcggaattaggctttactttctttaattaccactatacagcaaagttgattaaatcatcctataatttgaaatgtctactattaaaattgacatatcgataccttgataatcagcctcttaatgacgctgatattagaaaattacaggatattattaaaatcattgcaaaagaagcaagtatggataaaaagattgcacaaaatcaatatcgatatgcttattatggtgatttgcgtgatgagctcgaatatatttatcaaaatgtaaatcaacgattgacattaaaaagtgtcgctgataaattatttgtctcaaagtcaaatttgtcatcacaattccacttacttatgggcatgggttttaaaaaatatattgatactttgaaaattggtaaatcgattgaaattctacttactactgatagtactattagcaacataagtgaacatttaggttttagtagtagctccacttactctaaaatgtttaaaagttatatggatataacaccgaatgaatatcgtaatttatcaaaatataataaatgtttaatgctaaagccagaaccactagtaggcaaaatggtgcaagaagtaaaagaaatcatattgaattatattgaacattataaaaaccacctaactgatgttatacatattgatgaagacaaatttgaaacacctaaattgtttcaaacggttattcaaataaatacttatacagaaatgaaattagttttcttagaaggaatctttaaaaccttattgaataagaacagtcaagttgtctttttcatcatgccatcgattctaaaaagtaaaaacaccatgtccgaagaagaaaaattcacaatcattaaaacaataattgaaagtgatctaaagatagcatttaatataaatgatattgaaacaacttattttgttgaagaagcttttatgagtgttttcagacaaatatctccaaacgaattaagtaatcataataattacgaagtgcattttgtttttgatttatcattgatggaaattagaacaatttatcgaatgatattaaaattacataacatcatgttgaatgtgaaattaggattgaacattacctgtttatttgaaaaaccttcagtttttaaatcactagtatcacaaataaagcgacttaaattcgattcgttaataatagataatgcaaatttaagtagcccttatttgatgggggaaagtgatgagttactattgaaaaatattttgcattttaaaaatttaaaacaagtaattaatgaattggatattgaacaagaaaagcttatttttctaaatgttgaaaatcataaactgcttaataataaagaacgagatttaagtaatagtgctccattaatttataagacattaagtgcgctgtatcacaactttgatggctttggattaaacatttttgataatcatcatacatttaatgcgatgcatctatatgataaaaatggatttaaaacaacactaggtcttatattggaaaaatttatcgaatatgtctcgaaaccaaaatacgaaaacagttattattctatttttgatatagagaattattattgcctggttatttatgattggcgagtgattgagagcgagacaattatgagcaattttgaggatagtcaagtttatataaatttcaaaaataatgttttaaacgataaatatctaattgtaatagaaacattggacgaaaatagtggcaacattaatcatttgatttctaaagaattaagagataaatatgaatggaaccctagtttactatctaaaattgacaactaccttaaaccagcaatcgagattaaagagcataattttagtgataattccttgaatattaacgttacttttaatgcgttatacataattaaaataggaaaaaaataa

SEQ ID NO: 412260 - DNA, 1719 bp, Staphylococcus aureus
ttgggaaagcctctttttaaaaaaggagattcaatgaataattcaatattttatacctatttaaaatttaatcttagatattttatccgtagaaaatttgaaattgtaaaaaggtcgcgacttaatgttactacaaaaatactgtttttaattaaattgattttttcgtcactattattatttatttcaactattatgttagctgactatttcagtgattatattgattttatagaatattatttctatgcgagtatgtttatttacattgtatttataccattaatacctagaactaaattattgatcaatccaatggataaacagctgttatatagatctagtttgagagaagttgacatttttaacttgatatatgcttcagacgttttaaaaaagtttgttggatattttaatttgttgatagttggtatggctattagtttatatcatattagtccttttatatttaacctcaaggttttttgtgcactaatatacttttcaacaatctcttatgtaattcaaattatttttataaatattaaagtcataagcacaaaaaaattattttcttatcactattgtgtttttaattttatgatgggaagcattgtttctgttattggatttgtcgtctcatttcttttagtaaatttattaataaaaccctttttagttttttcgacatatgtaataaaaagtaagaaaacttttgaatggtatagttattttcaggatataaagaacgaagtcattattattaatgaaaaagttatgcaattattagattatatatcacctcacactatttttatgagattaaactttgtgaatatatcatttgtgattattacaatagctttatttatagcgttatattattttaataaaatagggttttggtatagaaaagaagatatctatctatcttcaacaaatattaatttttcgttgccaatttcaataaaagctataacaacaatacagctaaaacactggataagtaacaaagaagaagttaatttacataaacctttcttctatattagttattcaatatggttctttttagggtgtttaatctatttttcacagatggcatataatcagttagctaatgcagttatttttattttgatattaaacactataactcgtgatagtttttctgcggggacggatttttttactaaatcattacgttttgattcagatagaaaaagtatcggtttgtataggatgtcaaacactgattttaaacaaatttacgattctaaattatctctaattcgctttattggttttaaagaaacaatacttgctattattttattagcaatatttttaaatcaagacatatatttatatataattggatttgaaataataatcatcaatacagtaataattcctaatttatcattattaccttcgtatttatctccacatttcaatcatcaacattacagtgaattagagtcttttgaagaacaaatttttcttgaagatactgtttttgataaagttaagaattttttatcgtcatcatattttttaattctatttgtaggttacttatctcaacgtaattatattgacataatgatttttataattattttcaacattttagccttaatacttgtttcgttgtttattaggttttctaaacaaaaaataacaaagtcttggagaaagagggatttatatttatag

SEQ ID NO: 412261 - DNA, 612 bp, Staphylococcus aureus
ttgaagtcattaattttcaaaactaaagtaacgagtttagaagatatcgataaagcagaaacaaaatacgaccatgcaaaagtgaaagaagttaatgttttgaaagatgttaatgaagagttacatgtagatgaaatctatggcagtttgtatcatacaaaacaaggtaaaggtattcttgataaacaaggaacaaaagagattacagggaagactaaattcgcgaatgcagtagtaaaagtatattcagagttaggtgaagcacaactgtttcctgatattcaagtagatgaaaatggtaaatttagctttgatgctgaaaaagctggtttcagattgcaaaatggagagacattgaattttgcagtagttaaacctattactggtgacctattacatcaaggatttgtctctaaatatattgatgtatatgaatctccggaagaaaagaaagaacgtgaatttgaagaaaaacttgaaaacacgcctgcatatcataaattacatggtgataaaattgtcggctatgatgttcaaggtaatccatcaacttggttttatccattaggtgaaaagaaagttgaacgtaaggcaccaaaattagaaaaataa

SEQ ID NO: 412262 - DNA, 1833 bp, Staphylococcus aureus
atggtgaatttaaaaattcgtaatttatataacacgattttagatagttcttttctaattaggtatggatactatgatgttagaatgaaaaagattgaatcaaaaaatattaataatgaagaattagaagattattatggcaaaccagatactttctatttaaaaatttttggtttgcaagacttatattttctgatgaaatcagaggatttaagaggattttttaatttctctgattttaaaaagaatgtagatacggaaccaatttattttaatactcctaaaaataattatgttcgtagagaatataagatgccaaatgtctatagttacttacatctatgtttttttatagaagataataaagaggaatttatcaatattttcgaaaacaatgtacaatcaacttcaaaatattttaatgaattaaactttaattttaaattcactaagaaaatagagcagaggcttctttttggagggaatagtattttgtctttagatttatcaaacttttatcatactttgtacacacatagtataccttgggtcatacacggaaaacagaactcgaaagataatagatataaagggtttgctaataatttggatagtttaattcaaaaatgtcaatatggagaaactcatggtatacccgtggggaatattatatcaaggataatagcagaactatatatgtgctatatagacaaaaaattaattgaaaaaggatataaatatgctagatatgtagatgatattaaatatccatttgtatcaaatacagataaagaaggatttttgatggaatttaattccatatgtcgagagtacaatttaattctaaatgataaaaaaacagatgtgcagacttttccatatcgtaataacatgcaaaaagtagagatttttagttatctagatagcttgaataaaagctcggaaattgcggattggaaatcaaaaattaatgattttattgatttctgcttaagtgaagaagtttcaggtaataaaggagcagtaaaatgcatttattcggtggtaataaataaacttagagattcaaaaatgtcctcaaataagataaacaatattcttgttagtagggaaaaattaacaaaatataacctatatgagaaatttttggatatttcattgaaagattcgaggttaacaaataaatttataaactttacagagcaattgatagacttaaaaattagtaaagaaaaactaaagaaaatagcaaggcaatattttaaagaaaacaaggaaatatggaaaggaaatttagattattatattttaaatggttggaatcaagaagtataccaaatattattatactctgttttattcgatgaagaaaaaatactaaataaaaaatctttacaattaatattaaaaaatgatttagatgattactcaaaatgtttgagtgtcattttgtggattaaaaagaaatttagctttaaagtgttgttaaatacattggaagataaattaaaagaagtgcattcttcttacaacgatgatgcaagcgttagaatgcaagaaaaatattggttattaaggtactttattttttatattaataaaaataatattattgacgatgcatttttcaaaaaacattacaatgaaaataatataaaaaaagataggaacaatatcataaagtctgaacttaatatgcactatgttttaaaaagtgattcgagaaaaaagcaatatgtaaacagagtgaatgagttttttggatttttattaaataataatgtggcattaattcagacaaactataaccataaattatttgaatatctataa

SEQ ID NO: 412263 - DNA, 222 bp, Staphylococcus aureus
atgattgaaaacaatctgacacatttcatcggttcagatgcgcataacacagaaatcagaccgttcttaatgaaagacttatttaatgataagaaattacgtgattattatgaaggtatgaacggatttattagtaatgcgaagttagttgttgatgataaaaaaattcctaaacgaatgccacaacaagattataaacagaaaagatggtttgggttataa

SEQ ID NO: 412264 - DNA, 219 bp, Staphylococcus aureus; identical to SEQ ID NO: 412222

SEQ ID NO: 412265 - DNA, 768 bp, Staphylococcus aureus
atgatatatgtacatattcgtcaggcgaataaaaaagcttttatgaattatgagaaagtatgtgtcgcaactgatgcatatgaaactgaagataaagttgataatattttagaacacaaattaggggtatatgagtctgaaatagaaaagattattgattatattataaaaaatattaaatctaaggacttagatgtttcagaaaatatgcaaaacaagatttttcaatatattcatttacaatatttacgtactgacgccggaagaattaattttatgaatttaattgaaaatccgtttacatataaacctagaaaaaaacctattgatctagatgaaatacaaaaacacaaaaatacaataaaaaagtttaatgaaatttttaagcaaggtaacaacctagaaaacttattaaaaagaatgaaaaaaccatctaacatgaattttcatattgcaataagtgaagataatttattaactagtgataatccagtaatcgctactgataattggaaccaaataatgcttccaattactccaaacattcttatagaatttcaagaagataaaattaactcatctaacgatttaagagtaatattaaaaaaaaataaaacaagatatgtaaatgaagcaacaattaatacagcaaattattttattatatcaaataaagagttcacccgttatcaatataaatatatagacaatcgctttaataataagaattgggagattggttatccacatgtaaatttgaaaaattga

SEQ ID NO: 412266 - DNA, 633 bp, Staphylococcus aureus
gtgctttgtgaatctagacaaatttataaaaatcctaaatatcgagttattaaatataataatgaatatttcatggtcgatttagtaagtacttggattacttattttttccctatgattaattggtttttgcccaaaaagtacgcaaaaattagcgaaaatgaatttgaaaggttaaatattgtcgaacctgttaaaaacaatgttttttggccggttgcaggaagttcagttctattcggaattatattgagaaagtacggtaacttctttaatgttcagtttgaaaaacaactagcaatcactgtattttttatcatgttaatagggatgttaattttttatttctatctaaataaaaaattaatattaaaaatttttaataccaacgtggttaataagaatagagttgtattaataccgactttcaaacaagggttgttaatagtttttgcgtacatttttttaggaagcgcttcaatatttactttaaccattcttttgacgacagagtcacaaaatataataatatttttaacttgggttattatcacgatgtttttctttttagtgaatatggcttcgataggtaatacaaatattcatgttattttaagaataaacgagtattaa

SEQ ID NO: 412267 - DNA, 2163 bp, Staphylococcus aureus
atgaataaaattaatgatagagatttaactgagttaagtggttactgggtttatcaagatataaatacaaataaagaaattaaagttaatggaaaacgatttatgcaagtagatagttacaatgatgataaaaataggaatttgaatggtgctgctgatattaaaatatatgagttgttagatgataaaagtaaaccaacaggccaacagactatcgtctatcaaggaacttctaatgaggcaattaatcctaaaaacccacttaggtctaaaaatatcggtgatgattggatacaaaacatcaaattaatgaatgattcaaatatgtccacacaatatttgaatcaagcggatgaattttcaaatcaatataagaaaaaaatagaagatgcaaataaattatcaaaaagtgaatttcttagaaaatataatacaaatcctaaaaattacaagcacaaaagcattgtagctgacggtggtaattccgaaggtggcgcaggagcaaaatatcatggggccaaacatcaaaatgaaaatatagttgcttctaatcctgctatgttaccatatgcttcatgggaacaatataaaaattcaaaatttaaaaatatgattagttttcatagtacaaatgacttactatcatggttacaagatccatttgcgaaagaaatgccaggtaaaagaattaatataagagatggtgttccaactttaaatggattaattgatagtcatcttggttttaaaagggaattcaattcgaaaactaatgaatataaggatatacctgttcataaaatagaatcggtcaaggatacagagattaaaaatggaaaagaagtgaaaaaggttataaatataaatctagacatggatggtagaattccaataaatgtttggacaggggattcaatagcgaggtcaggtaaagggggaaatattaagttagatattgagaaattaggtgatttataccaacttgttacaggggaaacaagcattatgttacaagaatgtgtgacatttttaaatgaaagttttaatatatctcagtcggaaaattcttattttggagatagaaagcataagttaaaacaaaaatttaagaatgtaattgaaattgatgttttagaaaatatgagtagagacattacatctaaaaagaatgagttatttgaaagtatagattcttttatggataaaattggacctattgcaattttagttccagctttaaacttgaaaccgttaaagtggggtattaataaggtcgatagtcaactccagagtggaatagaaagaattcacgactcaatcgataaaatattagtaaaaatgtttaaaaatttagatcatgatttacaagatggtgtgacggaagaaatgatgaaacatttaaaaatcgttagcgaaaatatcgttctaattaaaaatcaaaatgacatttatggtaatcaaattgctgatataaaaagtatcatgtcctatcaagatgctactattatggatggaaacctaaatatcaattataatggtcaacatatggtttcgggtaaagttaacctttcaaaatatttatcaagaaaaatgactattttaaaaaatcatattgataatgctgttgaagaattatctgattatattcaaaaagtttataatgaaaatttcaaagagttagtaagaaatataaataacacaacagaaattataaaaggaattatagatggtcttaatttattaattacaatgttatacgaaaaaagaatcattgatggtttaaaagaatcctctattgatcgaaaacaatttgaaaattcaatagaagaattaaaaataaacctaacaaaatggacagattttttacatgatttaaaggcagcatcgccgattttagaaagtcacttagatgatatagttagaaatatgaaaccgttaattgttaatcagatttttgaaccatctcattatgatgatatgtttattttaaacactcaagctcatgcacgtcttgatcaaatggcacaacagtttgaagttgtttgtaatggtttgaacgaaaatgaagggcaagctattcaaacaatggatcaatctgcttcgttaattcgttcaaacttaattcaagttaaagaacaattagaaaaactagcagtatactaa

SEQ ID NO: 412268 - DNA, 861 bp, Staphylococcus aureus
atgaataatgaatcaaaaaaagacacaaatacagaaacaaatacagaaataaaatcagtaccagaagaaatggaagcttcaaaatatgtaggccaaggtttccaaccacctgcagaaaaagatgcgattgaatttgcgaagaagcatcgtaaagaatttgaaaaagtaggtgaacaattctttaaagataactttggactaaaagttaaagctacaaatgttgtaggtaaagatgatggtgtagaagtttatgtgcattgcgaagatcatggcattgtatttaatgcaagtttacctttgtacaaagatgccatccatcaaaaaggatcaatgcgtagtaatgacaacgctgatgatatgagtatgatggtaggtacagtactcagtggctttgaatatcgagcgcaaaaagaaaagtatgataacttatataaattctttaaagaaaatgaagagaaatatcaatatacaggatttacaaacgaggcaattaacaatacacaaaacgtcgggtatcaaaatgaatacttttatattacatatttatcaagaaacttaaaagaatatcgtaaatattatgaaccattgattcataaaaatgataaagaatttaaagaaggtatgcaacgagccagaaaagagctaaattatactgcaaatactgatgctgtttctacacttttttctactaagaaaaactttactaaagacaatacagtagatgatgtgattgaattgagtaataaattaaaggataaacccaatatgcctcaaaaatctcaagttactattcaattaggaaaaccaagtataaatactaaaaagccgttttatgacgatataaatccaattgaagggtga

SEQ ID NO: 412269 - DNA, 225 bp, Staphylococcus aureus
atgtatgaatcaactggtaaagtgctatcagtgaatggaaatatagtgacatctgatgcggttgtccaacctggcagctctggttcacctatattaaatagtaagcgagaagcaattggtgttatgtatgctagtgataaaccaacaggtgaaagtacaaggtcatttgctgtttatttctctcctgaaattaagaaatttattgcacataatttagataaataa

SEQ ID NO: 412270 - DNA, 561 bp, Staphylococcus aureus
atgaaaatacaagagattgtaggaaatataaagagagcttatctgacaccattaataatttttgtgattttgttttcattattttttgatttgataatgtatttttatggaaaccttcaagggaaaaaggttgaaaaatcaaacgttattcgttatttaacattaaatgttgtagctgggtattcaatggtactacttgttgcctctatttatgtttttggggtagcaggctatggttttgatgtatttaattactggttaggtattatattaatgctatttgtatcgtggtttgctctatttttgttttataaaaatgaatttgatagtgaaaatccaaataaaacagttaatgttatagcaattattataaagttatctgcttttggaggacttttctatatcagaacagtcgttcctaatactgcagatgaagagaaatttataactctaagtatcttaattaatatagctgttgatttattgctggttagatcatattttaactatgcattatataagagtgtaaaaaaagatatcgaaaacggagtggatgattaa

SEQ ID NO: 412271 - DNA, 714 bp, Staphylococcus aureus
atggctaaactaaatgtagaagtatttgcggatggtgcagatattgaagaaatgaaagcagcttataaaaacaaacaagtggatggctttacaacaaatcctagtttaatggcgaaagcgggcgtaacagattacaaagcttttgctgaagaagctgtgaaagaaattccagatgcttcaatttcatttgaagtatttgcagacgatttagaaactatggaaaaagaagcagcaattttaaaacaatatggcgaaaatgtatttgttaaaattcctattgtaaatacaaaaggtgaatcaacgattcctttaattaaaaaactttcagctgacaatgtgagattaaacgttacggctgtttatacaattgaacaagttaaagaaataactgaagcagtaactgaaggtgtgccaacatatgtttcagtatttgcaggacgtattgcagatacaggcgtagatccattaccattaatgaaagaggctgtaaaagttacgcatagtaaagacggcgttaaattattatgggcaagttgccgcgaattattcaatgtgattcaagctgatgaaattggtgcagatattattacatgccctgcagatgttgtgaaaaaagtgaatacaaacttaggtcgcgatattaacgaattatcagtagatacagttaaaggctttgcgaaagatattcaatcttcaggtctttctattttataa

SEQ ID NO: 412272 - DNA, 1251 bp, Staphylococcus aureus
atgaatcttaacgatacgatatttatgtttttgtgtacattattagtttggctaatgacaccaggattaagtttattttatggtgggttagttcaatctaaaaatgcgctaaatactgtcatgcaaagtatggcagcaattgtgcttgttacatttgtatggataacagtaggttttacaattagttttggggaagggaatttatggtttggtaactgggaatatacatttcttaatcatgtaggtttcgcgacacaagaagatattagtccgcatattccattggcattatttatgttattccaaatgatgttttgtacgattgcaatctcaatattatcaggttcaatcgctgagaaaatgaagtttattccttatttattatttgtagtaatatggactgctcttgtatacagtccagtagcacattgggtttggggcggcggttggattaacaaactcggtgtattagatttcgctggaggtacagtcgttcatattacatcaggtgtttctggtttagtattagctataatgattggaaaaggaaacaaacattctgaatcaacaccacataatcttatcattacattgattggcggtatattcgtgtggattggttggtatggatttaatgtaggcagtgcttttacatttgatcaaattgcaatgcttgcatttacgaatacagttatttctgccagtgccggggctattggttggttaattttagaatatatttttaaaaagacgacaagtttacttggacttttactcggtgcattagcaggattagttgttattacacctgcagctggatatgtaacatatcttagtgcaacaatcatggctttaatagggggtatctgttgttatattgtcatcaattacataaaggtaaaattaaagtatcatgatgcattagatgcatttggtatccacggtgttggcggtattattggtgcagtattaacagcctttttccaaagtaaaaaagcaaatccagatattgagaatggttttatttacactggtgacgtgcatattatacttgtgcaaatattatgtgtaacagcagttgtaatttttagcatcgtcatgacgtttattattgcgaaagtaattaaattaattacaccattatctgttacagaacaagaaacgaatatagggttagacaagattgttcatggtgaacatgcttactttgaaggtgagttaaatagattcaataaacatattcgatattag

SEQ ID NO: 412273 - DNA, 132 bp, Staphylococcus aureus
atgactggaaacataagcacaggcaaactgttctttaaagcagttgcagagattactaaagggaatgtgaaagctgaaaatactggcgaaaaaggttcttttagtaatttaggcaattgtataatgatgtaa

SEQ ID NO: 412274 - DNA, 1647 bp, Staphylococcus aureus
atgaattcttcttcaccagagaatccaaatggaaagaagtattcaccagtcttcatctatagtgcaattgttgttgctatagtcgtattacttggtgcatttttacctgaacaattcaactatgttaccaataatattaaaatgtggattacagaaaagttaggttggtattatcttattcttactacgattatcgtgttcttctgtatattccttatttttagtcctattggaaaacttaaactaggtaaaccaaatgacaaacctgagtttaatacaatttcatggtttgctatgttgtttagtgctggtatggggataggtttggtgttttatggtgcagctgaaccgatggcgcactttgctacgccacctacggcagatcccaaaactactgaagcttatactgaagccctacgttcaacatttttccattggggattccatgcttgggctgtttatggtgttgttgcgttagcgttggcatattcgcaattccgtaaaggtgaaccaggtttattatctagaactttacgtcctcttttaggtgataaagtagaaggtcctattgggatttttattgacgttttatctgtatttgcgacaatcgttggggtagctgtttcgttaggtatgggtgctctacaaattaatggtggtttacattacttgttcaatgttccaaacaatacgtttgtacaagcgattatcatcattgttgttactatcttatttatagcaagtgcatggtctggattaagtaaaggtattcaatacttaagtaacttgaacattggtttaggtactattttaatggtagctgctttaattgttggaccaactgttcttattttaaatatgttaactagctctacgggtagtttactaaacacattcttgtttaatagttttgatacagctgctttaaatcctcaaaaacgtgaatggatgtcttcatggacactttattactggggttggtggttaagttggagcccattcgttggtgtgtttattgcacgagtttcaaaaggacgttcaattagagagttcatttctggtgtcttgctagttccagcaattgttagttttgtatggtttagtgtctttggtgtattaggcatcgagacaggtaagaaatacaaagaaatttttgatatgactcctgaaacacagctatttggagtgtttaatcatgtgccatttggcattgttttatcgttgattgcattattattaattgcatcattctttattacatctgctgactcagcaacatttgtattaggaatgcaaacaacatttggttcattaaatccatctagaatggtaaaagttgtttggggaatttcacaggccttaatagcatttgtacttttattagctggtggcggtaacggtgctgaagctttaaatgcgattcaaagtgctgcaattataagtgcattcccattctcctttgtcgtcatactcatgatggtaagtttctacaaggatgcaaaccaggaacgtaaattcctaggtttaacattgactccgaataaacaccgcttacaagaatatatcaagagtcaacaagaagattatgaatctgacattcttgaaaagcgtcagtcacgtagaaatatagagaaaaaagataactaa

SEQ ID NO: 412275 - DNA, 666 bp, Staphylococcus aureus
atgtacagcatgaagaaagacaaatactatatttataacgaaaaagaaagtagaaaaaggtattctcctaattcaacttataaaatttatttagctatgtttggacttgaccgacatattataaatgatgaaaattcacgtatgtcatggaatcataagcattacccttttgatgcttggaataaggaacaagatttaaatacagcaatgcaaaattcagttaattggtacttcgaacgtattagcgatcaaataccaaagaactatactgcgactcaactcaagcaattaaattatggtaataaaaatttgggaagttataaaagctattggatggaagatagtttgaaaatatctaatcttgaacaagtaatagtttttaaaaatatgatggaacaaaataaccattttagtaaaaaagcaaagaatcaattatcttcttcattattgattaagaaaaatgaaaagtatgaactgtatgggaaaacaggtacaggtatagtaaacgggaagtataataatgggtggtttgtaggttacgtaattacaaatcatgataagtattattttgctacacatttatcagatggaaagccatctgggaaaaatgctgaattaatcagtgaaaaaatattaaaagaaatgggtgttttaaatggccaataa

SEQ ID NO: 412276 - DNA, 492 bp, Staphylococcus aureus
atgcacaaaaaatattttattggcacttccattttaatagcagtatttgtcgttatatttgaccaagttactaaatatattatagctactacaatgaaaattggagattcatttgaagtgataccgcactttttaaacataacatcacatcgaaataatggtgctgcatggggaatattgagtggaaaaatgacatttttctttattattaccattattatattaatagccttagtatatttctttattaaagatgctcaatataatttgtttatgcaagttgctattagtttactttttgcaggtgcacttggaaactttattgatagagttttaacaggagaagttgttgactttattgatacaaatatttttggttatgattttccaatatttaatatcgcagattcaagtttaacaattggtgtaatattaattattattgccttattaaaggatacttccaataaaaaggagaaggaggttaagtaa

SEQ ID NO: 412277 - DNA, 222 bp, Staphylococcus aureus
atgaatatttctaaagactcaaaagaattagaatctagagaaaaagagttattgaaatattttccatcagattataaaaagcctgaagaaaaaacatcagatactgaacgtaaattaaatagtaaggaattttataatattaaacgtaaagataaacaaacgattatacagtatattgttaattatgatgtgaatattactgaaaaaaagaagttaaagtaa

SEQ ID NO: 412278 - DNA, 198 bp, Staphylococcus aureus
atgataccaggtgtaaatgcgtcacctatgcatccttggcgtagaagtaccacagtgccacatctcggcaattggcgagacaagttctttaaagagcgtgaaggtaaatatcaagtagaagtaaaagaagcaaaattacaggaaaaagctaaaaaccagatgaaagaaatgattgaaagtgataaaataaaaatataa

SEQ ID NO: 412279 - DNA, 345 bp, Staphylococcus aureus; identical to SEQ ID NO: 408518

SEQ ID NO: 412280 - DNA, 189 bp, Staphylococcus aureus; identical to SEQ ID NO: 410786

SEQ ID NO: 412281 - DNA, 624 bp, Staphylococcus aureus
atgcgtgttgaatttaatccaaataaactcacacatgaagaaatgctttggttaaaacaaaatattatcgactacatggaagatgacggttttacgaggttagatttagcttttgattttgaagatgatttgagtgattactacgcaatgactgataaagcagttaagaaaactattttttatggtcgtaatggtaagccagaaacaaaatattttggtgttcgtgacagtgatagatttattagaatttataataaaaaacaagaacgtaaagataacgccgatgttgaagttatgtctgaacatttatggcgtgtagaaattgaattgaaaagagatatggttgattactggaatgattgctttgatgatttacacattttgaaacccgattggacaacaccagaaaaagtaaaagaacaagcaatggtttatttgttactgaatgaagaaggcacgtggggaaaacttgaaagacatgctaaatataaatacaagcaattgattaaagaaatatctccaattgatttaacgaaattaatgaaatcgactttaaaagagaatgaaaagcaattgcaaaaacagattgatttttggcaacgtgaatttagattttggaagtaa

SEQ ID NO: 412282 - DNA, 648 bp, Staphylococcus aureus
atgacttttaatattatcaaattagaaaattgggatagaaaagaatattttgaacactattttaaccagcaaactacgtatagcattactaaagaaattgatattactttgtttaaagatatgataaaaaagaaaggatatgaaatttatccttctttgatttatgcaattatggaagttgtaaataaaaataaagtgtttagaacaggaattaatagtgagaataaattaggttattgggataagttaaatcctttgtatacagtttttaataagcaaactgaaaaatttactaacatttggactgaatctgataacaacttcacttctttttataataattataaaaatgacttgcttgaatataaagataaagaagaaatgtttcctaaaaaaccgatacctgaaaacaccataccgatttcaatgattccttggattgattttagttcatttaatttaaacattggtaacaatagcaactttttattgcctattattacgataggtaaattttatagtgagaataataaaatttatataccagttgctttgcagcttcatcatgctgtatgtgatggttaccatgcttcattatttatgaatgaatttcaagatataattcataaggtagatgattggatttag

SEQ ID NO: 412283 - DNA, 801 bp, Staphylococcus aureus
atgaataacagaaatcatagaaaaatcattattattgatggtcaattaggttatgtcggaggatttaacattggagatgaataccttggtttaggtaaactaggatattggagagatacacatttacgaattcaaggagatgcagttgatgcattacaattgcgctttattttagactggaattcgcaagcacatcgacctcaatttgaatatgatgttaagtatttccctaaaaagaacggaccattgggtaattcaccaattcaaatagctgcaagtggcccagctagtgactggcatcaaattgaatatggttatacaaaaatgattatgagcgctaagaagtcggtatatttgcaatcgccttatttcattccggataattcatatataaatgccattaaaattgcagctaaatcaggtgtagatgtacatttaatgattccatgtaagccagatcatcctttagtttattgggcgacattttcaaatgcctctgacttattatcaagtggtgttaaaatttatacgtatgaaaatggatttatacattctaaaatgtgcttaattgatgatgaaatcgtatcagtgggcacagcaaatatggactttagaagttttgaattaaattttgaagtaaatgcctttgtatatgatgaaaatcttgctaaagatttaagggtggcttatgaacatgatattacaaaatcaaaacaacttactgaagaatcatatgccaatagaccgctgtctgttaaattcaaagaatcgttagctaaattagtttcgccaattttataa

SEQ ID NO: 412284 - DNA, 486 bp, Staphylococcus aureus
ttgttttttggtagaaccgtttcggcacgcaaattgaataaaaacaatggtaacgtgttaacggatttcgatggacttttgaaacaacaaatagaaagctttgataaaggtaattatggtactgataacaaacaagttcaaaaacatcatgatttagtacgtatgcttttgatggatcaagatggttttttaactgaaaataataaagttgatcatttcattgacggtaatgatttatacgatcaagttttaaaagatattaaaaatgcaaaagaatatatccatttagaatactatactttcgctttagatggtttaggtaaaagaattttacatgctttagaagaaaaattgaaacaaggtttagaagtaaaaatattatatgatgatgttggttctaaaaatgttaagatggcaaattttgatcactttaaatcattaggtggcgaagttgaagcatttttgcgtctaaactaccattattaa

SEQ ID NO: 412285 - DNA, 162 bp, Staphylococcus aureus
atgtggttacgtttttctgtgcaattaattatgtctgttttgatgtttatttttatatatcagcaaataaatcaaagtcatttagatttttggtttattatttatttcttaatttttatggctgttgttttgttttggaaaccttcagcaaacaaaaagtag

SEQ ID NO: 412286 - DNA, 906 bp, Staphylococcus aureus
atgagcgacaatattgtagctatttatggagatgtgcctgaattggttgaaaaacaaagtgcagaaatcatatcacaatttttgaaaagtgatagagatgactttaactttgtgaaatataatttatacgaaacagagattgcaccaattgttgaagaaacattaacattgcctttcttttcagataaaaaagcaattttggttaaaaatgcatatatatttacaggtgaaaaatcgccaaaagatatggctcataatgtagatcaattaatagaatttattgaaaaatatgatggcgaaaatttgattgtctttgagatatatcaaaataaacttgatgaaagaaaaaagttaactaaaactctaaaaaagcatgcaaggcttaaaaaaatagagcaaatgtctgaagaagaaataaaaaaatggattcaaagtaaattaaatgagaatttcaaagatatcaaaagagatgcattagatttatttattgagttgacaggtattaactttaatattgtctcacaagagatagaaaagttgattttatttttaggcgatagaccaacaattaataagcaggatgttaaccaaattattaatagaagtttagaacaaaatgtatttttactgactgaatacattcagaaaagaaagaaagaacaagcaattcatttagtaaaagatttaataacaatgaaagaagaacctattaaattacttgcactaattacaagtaattaccgattattttatcaatgtaagattctgagtcaaaaaggatatagtggacagcaaattgctaaaacaataggcgtacatccatacagagtaaaattagcgttaggacaagtaagacattatcactgtctcttatacacatctccgagcccacgagaccgaggctga

SEQ ID NO: 412287 - DNA, 948 bp, Staphylococcus aureus
atggcaacaactaaattaggcaataccaaatcggcaagtcgagcaatcaattacgcagagaaacgtgcagaagaaaaaagtggtttgaattgtgatgtagattatgcaaaatcagcttttaaacaaacaagagccttgtatggcaaagaagatgggattcaagcacatacggttattcaatcttttaaacctggtgaagtaacgccagaacaatgtaatcaacttggcttagagctagcagaaaaaatagcccctaatcatcaagtagccgtatatacgcatacagataaagaccattatcataatcatattgtaattaattcagttgatttagaaactggtaaaaaatatcaaagtaataaaaaacaacgtgacttagtaaaaaaagagaatgacaatatctgtcgtgaacatggtttgagtgttacagaacgtggcattgccaaaatgagatacacacaagcagaaaaaggcattgtctttgatagagatgaatattcttggaaagatgaattacgagatttgattgaaaatgcaaaaacccatacaagcaatttagagacgttttcagagcatttagaagaaaaaggggttggagttaaacttcggggcgaaacaatctcatataagcctgaaaatgaaaataaatgggtacgtggacgaacactaggctcagaatatgagaaaggggcaattgatcatgagcatgaaagacatcaaaaacaacaaagagaacccgaatacgcagatgaattcaaaatcaactgggacgccgtcgagcagcacacagaacagcttaaacaacgaagagttgagcgagctcaagagacaaaacaagctcatagtaaaatatctagcagagatacaagagaatcagaaaatcagagagaaagagcaaaaggaaataacatccgaattgaaagaggcgacgaaggactttcgagataa

SEQ ID NO: 412288 - DNA, 183 bp, Staphylococcus aureus; identical to SEQ ID NO: 408524

SEQ ID NO: 412289 - DNA, 1539 bp, Staphylococcus aureus
atgaaaaagaaattaggtatgttacttcttgtaccagccgtaactttatcattagccgcatgtgggaatgatgatggaaaagataaagatggcaaggtaacaattaaaacgacagtttatccattgcaatcatttgcagagcaaattggtggaaaacacgtgaaggtatcatcaatctatccagcagggacagatttacatagctatgaaccaacacaaaaagatatattaagtgcaagcaagtcagacttgtttatgtatacaggggataatttagatccggttgctaagaaagttgcatctactattaaagataaagataaaaaactgtctttagaagataaattagataaagcaaagcttttaactgatcaacacgaacatggtgaagagcatgaacatgagggacatgatcatgggaaagaagaacatcatcatcatggcggatatgatccacacgtatggttagatcctaaaattaaccaaactttcgctaaagaaattaaagatgaattagtgaagaaagatccaaaacataaagatgactatgagaaaaactacaaaaaattaaacgatgatcttaagaaaattgataacgatatgaagcaagttactaaagataagcaaggtaatgcagtattcatttcacatgaatcaattggatacttagctgatcgttatggttttgttcaaaaaggtattcaaaacatgaatgctgaagatccatcacaaaaagaattgactaaaattgttaaagaaattagagatagcaatgctaaatatattctttacgaagataatgttgcgaataaagtgactgaaacaattcgtaaagaaacagatgcgaagcctttaaaattctacaacatggagtctttaaataaagaacaacagaaaaaagataatattacctatcaatcattaatgaaatcgaatattgaaaatatcggtaaagctttagacagtggtgttaaagtgaaagacgacaaagctgaaagtaaacacgacaaagcaatttctgatgggtattttaaagatgagcaagttaaagaccgtgaattaagcgattatgctggtgaatggcaatctgtttacccttacttaaaagacggtacgcttgatgaagtgatggaacataaagctgaaaatgatccgaagaaatctgctaaagatttaaaagcttattatgacaaaggatataaaactgatattactaacattgatataaaaggaaatgaaattacatttactaaagatggtacgaaacacactggtaaatatgaatacaatggtaagaaaacattgaaatatcctaaaggtaaccgtggcgtgagatttatgtttaaattggtcgatggtaatgataaagacttaccgaaattcatccaatttagcgatcacaacattgcacctaaaaaggcagaacacttccatatctttatgggtaatgataatgacgcgttattaaaagaaatggataactggccaacatattatccttcaaaattaaataaagaccaaatcaaagaagaaatgtaa

SEQ ID NO: 412290 - DNA, 1212 bp, Staphylococcus aureus
atgactaatcaaggctcattaaataaatcacctattttcaccaaaagttttacaattaacttttttgtcaattttatcgtatacctatgcatgtatttgttacttgtagttattgctggctatagtaagcaagctttcgacgcttccgattcattagccggattagttgtaggactatttattgtcggttctttaattggtcgatttgctacaggtaaatttgtaaatcaaatcggacctaaacgattattatttattggtttaattgctttaattatcacgcaattactttattttattgatggatctttagcttttttaatctttgtacgtctcataaacggtatcgcaactgcagttgtgacaactgcaacaggtactattgcggcatacgttacccctgttaatagaaaaagtgaaggcatcagtttattttctttaagtttagtattaggtacagcgattggcccatttctaggcatgttacttattacaaaatacgcaattgatttactgtttattatttgtgttatattaggcatactcggagtcattatctcattatttataaaagttgatttcgaagtaacaaatagcaaaactgaaactaatgtcattgataaaccaagatttagtattcatcaatttattgcaaaagaggccattcctgttgctgttattatgcttttaattggcgttacctatgcgtccatcctaacttatttacaagcatttgctatagagcgacacctagtaactgcagcaagctatttctttatttgctatgctatagcatcgttaattactagacctattgctggtagattgatggatgataaaaatgaaaatattattgtctacccagcatttatcatgcttttcctttcatttgtgtgcttaatttcaagctatcaaagctggttaatattacttgctggtgcttgcctaggtttagggtatggaaatttatcatctgcaatgcaatctattgcgataaaagtctcacccccgattaaatatggtatcgcgacatctactttttacgttggtctagatgcaggtgtcggcttcggtccatcattccttgggttatttactcatatgttttcatatagtgaaatcttcggttttatggccgctttagcaatcattactatgcttgtttacttcttaattcatggacgtcatgtaactagaaatgccatgaactaa

SEQ ID NO: 412291 - DNA, 954 bp, Staphylococcus aureus
atgggcaatcatttccaatacgcttttgaaaacaaacgttatcacacatggaattaccatttaaaaaataaatttggacaaaaaatatttaaagttgcattggatggcgggtttgactgtcctaatcgtgatggcactgtagcacatggtggatgtacattttgttctgctgcaggtagtggagactttgcaggtaatcgtgcagattcaattgcagtacaatttaaagaaattaaggaaaagatgcatgagaaatggcacgaaggaaaatatattgcttattttcaggcatttacaaatacacatgcaccagttgaagtgttaaaagaaaaattcgaacctgtacttaaagaaccgggtgttgtgggattatctattggtacgcgtcctgactgtctaccagacgatgttgtcgaatatttagcagatttgaatcaacgaacatatttatgggttgaattgggactacaaacaatccatcaatcaacatctgatttaatcaatcgtgcccatgatatgcaaacttattatgatggcgtggcaaaattacgtaaacataatatcaatgtatgtacacacatcattaatggcttacctggcgaagactatgacatgatgatggctactgccaaagaagttgcacaaatggatgtaaaaggtattaaaattcatttacttcatttgttaaaaggtacaccgatggtaaaacaatatgataaaggtttattaacttttatgactcaagaagaatacacaaacctagttgtagaccaattagaagtgattccccctgaaatgatcgttcaccgaattaccggtgatggtccaatagatatcatggtcggtccaatgtggagtgttaataaatgggaagtattaaatggcatcgacgctgaattagcacgtagaaattcttatcaaggcttgcgttacaagtctaaggtgaggcaatga

SEQ ID NO: 412292 - DNA, 348 bp, Staphylococcus aureus
atgaaagtgaactatgaaacagggttccaaataggcgtaatggaagctaggttgaaggagatgagaaaacaacgtgatgagtacaagaagcaacgagatgagcttattggggatataggtaagttaagagaacgtaacaaagatctagagaagaaaagtgaagcgtggaacgaattaagggaaacttatttaaaaaattataaaaaccatattaaccaagatgaccgaaacagaagtatgttaatagaacaacaatacttaagcttcttatttgcaatggactgtatagagggttcaaatcacttacaagaatttttaaatcaattggaggaagacactaatgaataa

SEQ ID NO: 412293 - DNA, 261 bp, Staphylococcus aureus
atgtattacaaaattggtgagataaaaaacaaaattataagctttaacgggtttgaatttaaagtgtctgtgatgaagagacatgacggtatcagtatacaaatcaaggatatgaataatgttccacttaaatcgtttcatgtcatagatttaagcgaactatatattgcgacggatgcaatgcgtgacgttataaacgaatggattgaaaataacacagatgaacaggacaaactaattaacttagtcatgagatggtag

SEQ ID NO: 412294 - DNA, 165 bp, Staphylococcus aureus
ttgaatgtattaattgaatatttactttttactatatatgcgttagttataactatttttatcactcagtgcatatcaatgttcaaactgattgataacatgtataactatgatcatttaaagcactataaagaaaaaaatgatgaagatgacaaggagggatga

SEQ ID NO: 412295 - DNA, 153 bp, Staphylococcus aureus
atggctattactattgttttttccaatctaacattaaataaaggcatatactttctaaaagtcacactaaataaaactgaactacctaatgctggccaaaatgcattgtttttagcaggtttgaaagtatttaaattttctaattcttcttga

SEQ ID NO: 412296 - DNA, 240 bp, Staphylococcus aureus
atgaattgtacaaaaaatgcaatgttaccaattgttttagaaaaaaatgcacgtgaacatcttgctaaatatgttgaaattgaggtcgatttaccaaatcaaactgtgtcatcaccagacaagagtttccattttgaaattgatgaaacttggaagaataaacttgtaaatggcttagatgacattgcaatcaccctacaatatgaatcattaatagaaaaatatgaaaaatcactttaa

SEQ ID NO: 412297 - DNA, 243 bp, Staphylococcus aureus
atgagtaataaaagtaattcagaaataatcgcaggagtattagaaatgagtaaaagcgatatatatatttgggatgtactaagcgagtttgacagtgaacaagaggaagaaatactcgattttatagatgagaacattgaagaatttgaaatattcctcaataccgcactaattcatattgttgaaagattgaaattgagaatagcgtttgctacagctaaggaggacaacgataatgaataa

SEQ ID NO: 412298 - DNA, 222 bp, Staphylococcus aureus
atgccgaaagaaaaatattacttataccgagaagatggcacggaagatattaaggtcatcaagtataaagacaacgtaaatgaagtttattcgctcacaggagcccatttcagcgacgaaaagaaaattatgactgatagtgacctaaaacgattcaaaggcgctcacgggcttctatatgagcaagaattaggtttacaagcaacgatatttgatatttag

SEQ ID NO: 412299 - DNA, 756 bp, Staphylococcus aureus
atgaataagttactaatagatgactatccgatacaagtattaccgaaattagctgaattaatagggttaaacgaagcaatagtattgcaacaaattcattattggctaaacaactcaaaacataaatacgatggcaaaacttggatttttaattcttatccagaatggcaaaaacaatttccattttggagcgagagaactataaaaaggacatttgggagtttagaaaaacaaaatttattgcatgtaggtaactacaacaaggctggatttgaccgtacaaaatggtattcaatcaattatgaaacattaaacaaactagtggcacgaccatcgggacaaaatggcccgacgatgaggacaaattggcacgatgcaagaggacaaaatgacccgaccaataccatagactacacagagactaacaaacatagagagacagacgacgtctcaaagtcatttaagtatattagtaccaatttagaaattatacaaaaccctttaaaagcagaacagttagaacacgaaattaaatcatttaagcaagatcagttcgaaatagtaaaagtcgctaccgattactgcaaagaaaacaacaaaggtctgaattacttactaactgtattaaagaactggaataaagaaggcgtttcagataaagaaagtgctgaaaacaaattgaaacctcgtaactctaaaaaagaaactactgatgatgtcatagcacaaatggaaaaagaattgagtgatgactaa

SEQ ID NO: 412300 - DNA, 162 bp, Staphylococcus aureus
atgagcgacacatataaaagctacctattagcagtactatgcttcacagtcttagcgattgtactcatgccgtttctatacttcactacagcgtggtcaattgcgggattcgcaagtattgcaactttcatattctataaagaatacttttatgaagaataa

SEQ ID NO: 412301 - DNA, 231 bp, Staphylococcus aureus; identical to SEQ ID NO: 407325

SEQ ID NO: 412302 - DNA, 177 bp, Staphylococcus aureus; identical to SEQ ID NO: 407324

SEQ ID NO: 412303 - DNA, 411 bp, Staphylococcus aureus
gtgaaaactaaacaaaaatatcaattatcaaaagtagttcaagtattagaaaaagtattatatgaaaaagataaggacatattcttatcagcgaaagatagatttcattttattacagattatcgctataacgatacagcgttttacgaacatgttttgaaactcgttcataaagagttgtttaacattcttgctgaattagattttgaaaatgaaggattttctattcttgatgaagtaacaatgacattaagtgatgtcatgaaagaaacacaacacgtttaccgttatagtgtcatagatgaaaaaggtgaacacaaacatacaacagatcgcaaaggacacgtgattggaatgttagagtgggcattagattacattgcgggaaatattgaagtggaggaattataa

SEQ ID NO: 412304 - DNA, 315 bp, Staphylococcus aureus
atggaacttaaatttgtgattcccaacatggaaaaaacattcggcaatttagaatttgctggcgaggataaagtcgttcagcgaagaatcaacggacggctaactgtcttatcaagaagctataatctctattctgatgttcaaagagcagatgatattgtggtggtgcttcctgctgaagctggcgaaaaacatttcggctttgaggaacgtgtgaagttagtcaatccacgtattaccgcagagggctacaaaatcggcactcgtggttttacaaattaccttttacatgctgacgacatgataaaagaataa

SEQ ID NO: 412305 - DNA, 384 bp, Staphylococcus aureus
atgagattagcaaatggcattgtattagataaagacacgacttttggagaattgaaattctctgctctacgtcgtgaagtgagaatccaaaatgaagacgggtcggtttcagatgaaatcaaggaacgtacctatgacttaaaatccaaaggacaaggacgcatgattcaagtaagtattcctgccagcgtgcctttgaaagagtttgattataacgcacgggtggaacttatcaatcccattgcggacaccgttgctactgccacctatcaaggagcagatgttgactggtatatcaaggcagacgatattgtgctgacaaaggattctagttcattcaaagctcaaccacaagcaaagaaagaaccgacacaagacaaatag

SEQ ID NO: 412306 - DNA, 1386 bp, Staphylococcus aureus
atgaaacagcgtggtaaaaggattcgcccatctggtaaagatttagtctttcattttacgatagcgtcactcctgcctgttttcctgctggttgtcggactgtttcatgtgaagacaatccagcagatcaactggcaggattttaacctatcacaagcagataagattgacattccctatttaattatcagtttcagtgtcgcaattcttatctgcttgctggtagcgtttgtattcaaacgggttcgctatgatacggttaaacaactttaccaccgtcaaaaactggcaaagatgatacttgaaaacaagtggtatgaatctgaacaggtcaaaacagagggtttctttaaagatagtgctggtcgtacaaaggaaaagataacctacttccctaaaatgtattatcgacttaaaaatggcttgatacagatacgggtggaaatcacgctgggaaaatatcaagaccaactcttacacttggaaaagaaattagagagtggcttgtactgtgagctgacggataaagagttaaaggattcctatgtggaatatactttgctctatgacaccatagccagtcgtatttctattgatgaagtagaagctaaagatggtaaacttcgcttaatgaaaaacgtatggtgggaatatgataagctccctcatatgttgattgctggtggtacaggtggcggtaaaacttactttatactgacactgattgaagccttgcttcatacagattcaaaactgtatattcttgacccgaaaaatgctgatcttgcggacttaggttctgtgatggcaaatgtctactatagaaaagaagacttgctttcttgcattgaaacattctatgaagaaatgatgaaacgtagtgaggaaatgaagcagatgaagaactataagactggcaaaaattatgcttacttaggtctcccggcacacttcttaatctttgatgaatacgtcgctttcatggaaatgctgggaacaaaagaaaacaccgcagttatgaataagctgaaacagattgtcatgttaggtcgtcaagctggcttctttctaatactggcttgtcaacgtccagacgcaaaatatttaggcgacggaatccgtgatcagtttaatttcagagtggctttaggtcgtatgtctgaaatgggctatggcatgatgtttggcagtgacgtacaaaaggatttcttcttaaagcgaatcaaaggtcgtggctatgttgatgtaggaacaagtgtcatatcagagttttatactccccttgtaccaaaaggatatgatttcttggaggaaattaaaaagttatccaacagcagacagtccacgcaggcgacgtgcgaagcggaagtcgcaggtgtggactga

SEQ ID NO: 412307 - DNA, 1089 bp, Staphylococcus aureus
ttggagggatttttactgaatgaacaaacttggttacagcatttaaaagaaaaacgcttggcttatggactatctcaaaaccgtttagctgttgcgactggtattacaaggcagtatctaagcgatattgaaacaggaaaagtcaagccggtggtcgaaaacatcttacaactgaaactgtcctattttcttcatgaggactatggtttctattcttattcagagcattatgctttaggcgacatattcgtcctttgctcccatgaactggacaaaggagttctggtggaattgaaaggtcgtgggtgcagacaatttgaaagctatcttctggcacaacaaagaagctggtatgagttctttatggacgttttggtggctggcggtgtgatgaaacgccttgaccttgccattaacgataagacagggattttaaatatccctgtactcactgaaaagtgccaacaggaagaatgtatctccgtcttccgcagttttaaaagctatcgcagtggcgaactggtacgcaaagaggaaaaggaatgtatgggaaacaccctctatatcggttcattacaaagtgaagtttatttctgtatctatgaaaaggactacgagcagtacaagaaaaatgatattcccattgaagacgcagaagtaaaaaaccgttttgagattcgattgaaaaatgagcgtgcctattatgcagtccgtgatttactcgtctatgacaatccagagcataccgcctttaaaattatcaatcggtatatccgttttgtagataaagacgattccaaacctcgttctgattggaaactgaatgaagaatgggcttggtttattgggaacaatcgtgaacgattaaaactaaccacaaaaccagagccttactccttccaaaggacgctgaactggctatctcatcaagttgccccgaccttaaaggttgcgattaaacttgatgaaatcaaccagacgcaggttgtaaaagacattctcgaccatgcgaaactgacagaccgacacaagcagattttgaagcaacagtcagtaaaagaacaggacgtgataacaacaaaaaaataa

SEQ ID NO: 412308 - DNA, 222 bp, Staphylococcus aureus
atgaattttggacaaaacctttataactggtttctatcaaacgctcaatcactggtgcttttagcaatcgttgtgattggcttgtatcttggcttcaagcgtgagtttagcaaactgattggctttttaattattgcgattattgcggttggcttagtcttcaacgctgctggagtaaaagacattttactagagctattcaatcgcattattggtgcttaa

SEQ ID NO: 412309 - DNA, 498 bp, Staphylococcus aureus
atggacgatatgcaagtctatattgcgaatttaggcaaatacaatgagggcgaattggtcggtgcgtggtttacctttcccattgactttgaggaagtcaaagagaaaatcggcttgaatgatgaatatgaggaatacgccattcatgactacgagttaccctttacggttgacgaatacacttccattggcgaactcaatcgactatgggaaatggtatcggaattacccgaagaattacaatcggagctatctgctctgctcactcatttttcaagcattgaagaactaagcgaacatcaagaggatattatcattcattccgattgtgatgatatgtatgacgtggcacgctactacattgaagaaacgggtgctttaggcgaagtaccagctagtcttcaaaactatattgattatcaagcctatggtcgggatttagacctttcaggaacgtttatctcaaccaatcatgggatttttgaaatcgtctattaa

SEQ ID NO: 412310 - DNA, 2448 bp, Staphylococcus aureus
atggcatatccaattaaatacattgaaaacaatctcgtctggaataaagacggggaatgttatgcttactatgagcttgttccttacaattactcatttctaagtccagaacagaaaatacaagtgcatgattctttcagacagcttatcgcacaaaatcgtgatggcaaaattcatgctttacaaatcagtacagaatccagcatacgttctgcacaagagcgttccaaaaatgaagtcactggcaagctcaaagcggttgcctatgacaaaatcgaccaacagacagacgctttaatatccatgattggcgaaaatcaagtgaactaccgtttctttatcggctttaagttgcttctcaacgatcaggagttttctatgaaaagtcttaccgttgaagcaaaaaatgctttgtctgattttgtctatgatgtgaaccataagctgatgggcgattttgttagtatgagtaatgatgaaatcctgcgttttcagaagatggaaaagctcttagaaaataaaatctctcgtcgtttcaaaatccgcaggttagataaggacgacttcggctatctgattgaacacctttacggacagacaggcactgcctatgaagagtatgagtaccatctatcaaagaaaaagctggataatgaaacgctgattaaatactatgacttgattaagcctactcgctgtttggtggaagaaaaacagcgatatttgaaaatccagcaggaagatgaaaccgtctatgtagcttactttaccattaacagcattgtcggagaactggacttcccgtcctctgaaatcttctactaccagcaacagcaatttacattcccgattgatacgtcaatgaatgtggaaattgtagcgaatcgtaaagccctatctactgtccgcaataaaaagaaagaactgaaagacttggataaccacgcttggcaaagtgataatgaaaccagctccaatgtggcggaagctctggaaagtgtgaatgagctggaaaccaatttagaccaaagcaaggaatctatgtacaagctgtcttatgtggtaagggtatcagcaaatgatcttgacgaactcaaacgtcgttgtaatgaagtgaaagatttttatgacgatttaagcgtaaaactggtacgaccatttggggatatgctcggcttacatgaagaatttttacctgccagcaagcgttatatgaatgattatattcaatacgtgacctctgatttcctcgctggtttaggttttggtgctactcaaatgctgggggaaaatgaggggatttatgttggctacagcttagatactggacgcaatgtctatctgaaacctgctcttgccagtcaaggggttaagggttcagtaaccaatgcgttagcgtcggcttttgttggttcgctgggtggtggtaaatcctttgcgaataaccttatcgtctattatgcggtgctttatggggcacaagcagtgattgtagacccaaaagcagaacgtggcagatggaaagaaaccttgccagagatttcccatgaaatcaatatcgtcactctgacttctgatgagaaaaacaaaggcttacttgacccttatgtgattatgaaaaatcccaaagattctgaatcactggctattgatattctgacattccttacggggatttcctctcgtgatggggaacgcttcccaatccttagaaaagccattcgtgcagtaaccaatagtgaagtacgagggttgatgaaagtgattgaggaattacgggttgagaatacgccactaagtaccagtatagccgaccatatcgaaagttttacagactatgactttgcacatttattattcagtaatggttatgtggagcagtctatcagcttagaaaaacaactgaacattatacaggttgcggacttggtacttcccgacaaggaaacttcctttgaggaatataccactatggagcttttatccgttgctatgctgattgtcattagtacctttgctttagactttatccatacagaccgaagcattttcaagattgtagatttagacgaagcatggagctttttacaggtagcacaaggaaaaacactatctatgaagctggttcgggctggtcgtgctatgaacgctggggtatatttcgtgacccaaaatacagacgacctcttagatgaaaaactgaaaaataacctcggcttaaaatttgcatttcgttccactgaccttaacgagattaaaaagaccttagccttttttggtgtagacccagaggacgaaaacaatcagaagcgattgcgtgatttggaaaacgggcaatgccttatcagtgatttatatggtcgtgtcggtgtgatacagttccaccctgtatttgaagaactgctccatgcctttgataccagaccacctgtgcgaaaagaggtgtaa

SEQ ID NO: 412311 - DNA, 2178 bp, Staphylococcus aureus
gtgaaaccatcaatagtaaacagaataaaatcaaactggacgctgaaacgtctaggtaaagtggcaatgacagtggctttcacacttgtgattgccatttttcttttagccatgctgggaacggtggttcaagctgcgggcttggtagatgatacggtcaatgtggcaaatgaatacagccgatacccacttgaaaactatcaactggatttttatgtggataatagctggggctggcttccgtggaactggtcggacgggattggaaaacaggtcatgtatggactatatgccattaccaattttatttggacaatcagtttgtatgtttccaatgcgacaggttacttagtacaggaagcctattccttagacttcatttccgctacagcagattccattggtaagaatatgcagaccttagctggtgtgagtgcaaacggattttcaacagagggtttctatgttggattcctcttactcttgattttggttcttggggtttatgttgcctatacgggactgataaagagagaaaccacaaaggcaattcatgccattatgaattttgtgctggtgtttatcctatcggcttcctttattgcctacgctcccgactacattaaaaaaatcaatgacttttcatcagacatcagtaatgccagtttatcacttggcacgaagattgtcatgccccattccgatagtcaaggcaaggacagcgtggacttaatcagagatagcctgttttccatacaggttcagcaaccgtggctactgcttcaatacaacagttcagacattgaaagtatcggtattgaccgtgtggaaagcctgctctccaccagcccagattccaacaatggcgaagacagagaaaaaattgttgcggaagaaattgaagacagaagcaataccaatctaaccattacaaagaccattaaccgtttaggtacagtcttcttcctatttgtcttcaatattgggatttccatatttgtattcctattaacaggaatcatgattttctcgcaggtactttttatcatctatgctatgtttctgcctgtgagctttattttaagcatgattccatcatttgatggtatgtcaaaacgagccataacaaagctctttaataccattttgacacgagctggaatcacattgattattacgacagcatttagtatttcaaccatgctctataccttatcggctggttatccgttctttttgattgcttttctacagattgtgacctttgcaggaatctacttcaagctgggcgatttaatgagtatgttttctctacagagtaacgattctcaaagtgtgggaagtcgtgtgatgagaaaacctcgtatgcttatgcacgctcacatgcaccgtctacagcggaaacttggacgttccatgactactctaggggctgggtctgccattgttacaggtaaaaaaggacagtcgggttcggggagttctgcaaggacacaagcagatcactcccgaccagacggaaaggaaaaatcaacacttggaaaacgtatcggtcaaaccatcggtacagtagctgataccaaagacagaatggtagacactgctagtggtttgaaagaacaggttaaagatttgccgaccaatgcaagatatgcagtatatcaaggaaaatccaaagtaaaagagaatgtccgtgatttaaccagtagtatttctcaaaccaaagcggacagagccagtggacgcaaggaacagcaggaacaaaggcgaaaaaccattgcgaagcgtcgctctgaaatggaacaggtcaaacagaaaaaacagcctgcttcttctgttcatgaaagaccgactacaagacaagaacaatatcatgatgaacagacctcaaaacagtctaatattcagacttcatataaggaatctcaacaagccaaacaagagcgtccagcagttaagtccgatttttcaagtccaaaagtggaacgccaaggcaataccgttcaagaaaaaaccgttcaaaagccagcaacttcaaccactacagcagatagaacttcacaacgtccaatcacaaaagaacgtccgtctactgttcaaagagtaccactacaaaatacaagaagtagaccaccaatcaaaaccgccaccattaagaaagtcggtaagaaaccatga

SEQ ID NO: 412312 - DNA, 1002 bp, Staphylococcus aureus
atgaagttgaaaactttagtgattggtggttctggattattcttgatggtcttctcactgcttctgtttgttgccattttattttcagatgaacaggacagcggaatttccaatattcattatggaggtgtgaatgtttccgcagaagtgctggctcataagcctatggtagaaaaatatgccaaagaatatggcgttgaagaatatgtcaacatacttcttgcgattatacaggtggaatcgggcggtactgcggaagatgttatgcagtcctcggaatccctcggtcttccacctaattcattgagtacagaagaatccattaagcaaggtgtgaagtatttcagtgaattattagccagtagcgaaaggctcagtgtagatttagaatcggttatccagtcctacaattatggtggtggtttcttagggtatgtggctaatcgtggaaataaatatacctttgaactggctcaaagtttctcaaaagagtattcaggtggcgaaaaagtgtcttaccccaatcccatagccatacctatcaatgggggctggcgatacaactatggcaatatgttttatgtgcaactggtaacgcagtatcttgtcacaacagagtttgatgatgatacggtacaagccatcatggacgaagcactgaaatatgagggctggcgatacgtttacggtggagcttccccgactacttcttttgattgtagcggactgacacaatggacgtatggaaaagctggaattaacttaccacgaaccgcacaacagcaatatgatgtgacccagcatatcccactatcggaagcacaagctggcgatttggttttctttcattctacctataacgctggctcttatattactcatgttgggatataccttggcaataaccgtatgtttcatgcaggcgacccaatcggttatgccgacttaacaagcccctactggcaacagcatttagtgggagcaggacgaatcaaacaatga

SEQ ID NO: 412313 - DNA, 933 bp, Staphylococcus aureus
atgagaaaggaagatttaatgatgaaatttagaaaaaatcagaataaagaaaaacagataccaaaggaaaagaaacctcgtgtctataaggtcaatcctcataaaaaggttgtgattgccttgtgggtacttttagggcttagtttcagctttgcgatattcaagcactttacagctatagatactcatactattcacgaaacaactatcatagaaaaggaatacgttgatactcatcatgtagaaaattttgtagagaactttgcgaaagtctactattcatgggagcaatccgataagtccattgataatcgaatggaaagtctaaaaggctatctgacagatgaacttcaagctctcaatgttgatacagtacgcaaagatattcctgtatcgtcttctgtaagaggatttcagatatggacggtagagccaactggcgacaatgagtttaatgtaacctacagtgtagaccagctcattacagagggagaaaatacaaagaccgtccactctgcttatatagtgagtgtctatgtagatggttctggaaatatggtactggttaagaatccgaccattaccaacatacctaagaaatcaagttataaaccaaaagccattgaaagtgaggggacggttgattccattacaaccaatgaaatcaatgagtttttaacgacgttcttcaagctctatcctacagcgacagccagtgaactttcctactatgtgaatgacgggatattaaaaccaatcggaaaagagtacatctttcaagaactggtaaatcctattcacaatcgtaaggataatcaagtcacggtatcgctgacagtggagtatatcgaccagcagaccaaagcaacgcaggtatctcaatttgatttggtacttgaaaagaacgggagtaattggaagattatagaataa

SEQ ID NO: 412314 - DNA, 1920 bp, Staphylococcus aureus
atgaaaattattaatattggagttttagctcatgttgatgcaggaaaaactaccttaacagaaagcttattatataacagtggagcgattacagaattaggaagcgtggacaaaggtacaacgaggacggataatacgcttttagaacgtcagagaggaattacaattcagacaggaataacctcttttcagtgggaaaatacgaaggtgaacatcatagacacgccaggacatatggatttcttagcagaagtatatcgttcattatcagttttagatggggcaattctactgatttctgcaaaagatggcgtacaagcacaaactcgtatattatttcatgcacttaggaaaatggggattcccacaatcttttttatcaataagattgaccaaaatggaattgatttatcaacggtttatcaggatattaaagagaaactttctgccgaaattgtaatcaaacagaaggtagaactgtatcctaatatgtgtgtgacgaactttaccgaatctgaacaatgggatacggtaatagagggaaacgatgaccttttagagaaatatatgtccggtaaatcattagaagcattggaactcgaacaagaggaaagcataagatttcagaattgttctctgttccctctttatcatggaagtgcaaaaagtaatatagggattgataaccttatagaagttattactaataaattttattcatcaacacatcgaggtccgtctgaactttgcggaaatgttttcaaaattgaatatacaaaaaaaagacaacgtcttgcatatatacgcctttatagtggagtactacatttacgagattcggttagagtatcagaaaaagaaaaaataaaagttacagaaatgtatacttcaataaatggtgaattatgtaagattgatagagcttattctggagaaattgttattttgcaaaatgagtttttgaagttaaatagtgttcttggagatacaaaactattgccacagagaaaaaagattgaaaatccgcaccctctactacaaacaactgttgaaccgagtaaacctgaacagagagaaatgttgcttgatgcccttttggaaatctcagatagtgatccgcttctacgatattacgtggattctacgacacatgaaattatactttctttcttagggaaagtacaaatggaagtgattagtgcactgttgcaagaaaagtatcatgtggagatagaactaaaagagcctacagtcatttatatggagagaccgttaaaaaatgcagaatataccattcacatcgaagtgccgccaaatcctttctgggcttccattggtttatctgtatcaccgcttccgttgggaagtggaatgcagtatgagagctcggtttctcttggatacttaaatcaatcgtttcaaaatgcagttatggaggggatacgctatggctgtgaacaaggattgtatggttggaatgtgacggactgtaaaatctgttttaagtatggcttatactatagccctgttagtaccccagcagattttcggatgcttgctcctattgtattggaacaagtcttaaaaaaagctggaacagaattgttagagccatatcttagttttaaaatttatgcgccacaggaatatctttcacgagcatacaacgatgctcctaaatattgtgcgaacatcgtagacactcaattgaaaaataatgaggtcattcttagtggagaaatccctgctcggtgtattcaagaatatcgtagtgatttaactttctttacaaatggacgtagtgtttgtttaacagagttaaaagggtaccatgttactaccggtgaacctgtttgccagccccgtcgtccaaatagtcggatagataaagtacgatatatgttcaataaaataacttag

SEQ ID NO: 412315 - DNA, 354 bp, Staphylococcus aureus
atgcgtaaaaaagaagataaatatgattttagagcctttggtttagccattaaagaagctcgattgaaacgaggtttaactcgtgaacaagtgggagcattgattgaaattgacccacggtacttaactaatattgaaaataaagggcaacaccccagcatacaagttctttatgaccttgtatcgttacttcatgtttccgttgatgaatttttcttacctgctaataacttggtaaaaagcacccgacgattacagatagagaaatacatggatagctttacagacaaagaactatccttaatggaatctttagccagcggtatcaacgaagcaagaaacatcgaagactaa

SEQ ID NO: 412316 - DNA, 423 bp, Staphylococcus aureus
atgaaaccatcttcttttcagaccacaatagaaaatcagtttgactatatctgtaaacgtgctatggaagacgagcgaaagaattatatgctttatctttcaaggattgcaaagcgtgaggtgtccttttcggatgttggcgattatcttgttagccagtttgcgacaacagataactattcaactgactttcagatttttacactcaatgggttatcagtaggcgttgaaaatgatttgttgagtgaagcattacgtgagttgccagacaagaaacgtgaaattctactgctgttttactttatggacatgagcgattcagaaattgcagacctgttgaaattgaaccgttctactgtctatcggcatagaaccagtggactagccttaattaaaaagtttatggaggaatttgaagaatga

SEQ ID NO: 412317 - DNA, 231 bp, Staphylococcus aureus
atgaaaacacaatatcctatgattccctttcctctcattgtaaaggcaacagatggcgataccgaagcgattaaccagattctacatcattacagagggtacataacgaagcgttccctacgacttatgaaagatgaatatggcaatcaaagtatggtcgttgatgaagtcttacgtggaagaatggaaaccagactgattacaaagattttgtcatttgaaattaagtaa

SEQ ID NO: 412318 - DNA, 204 bp, Staphylococcus aureus
atgaagcagactgacattcctatttgggaacgttataccctaaccattgaagaagcgtcaaaatattttcgtattggcgaaaacaagctacgacgcttggcagaggaaaataaaaatgcaaattggctgattatgaatggcaatcgtattcagattaaacgaaaacaatttgaaaaaattatagatacattggacgcaatctag

SEQ ID NO: 412319 - DNA, 1218 bp, Staphylococcus aureus
atgtcagaaaaaagacgtgacaataaaggtcgaatcttaaagactggagagagccaacgaaaagacggaagatacttatacaaatatatagattcatttggagaaccgcaatttgtttactcgtggaaacttgtggctacagaccgagtaccagcaggaaagcgtgattgtatctcacttagagagaaaatcgcagagttacagaaagacattcatgatggtattgatgttgtaggaaagaaaatgacactctgccagctttacgcaaaacagaacgctcaaagaccaaaggttagaaaaaacactgaaactggacgcaaatatcttatggatattttgaagaaagacaagttaggtgtaagaagtattgacagtattaagccatcagacgctaaagaatgggctattagaatgagtgaaaatggttatgcttatcaaaccatcaataactacaaacgttctttaaaggcttcattctatattgctatacaagatgattgtgttcggaagaatccatttgactttcaactgaaagcagttcttgatgatgatactgtccctaagaccgtactaacagaagaacaggaagaaaaactgttagcctttgcaaaagctgataaaacctacagcaaaaattatgatgaaattctgatactcttaaaaacaggtcttcgtatttcagagtttggtggtttgacacttccagatttagattttgagaatcgtcttgtcaatatagaccatcagctattgagagatactgaaattgggtactacattgaaacaccaaagaccaaaagtggcgaacgtcaagttcctatggttgaagaagcctatcaagcatttaagcgagtgttagcgaatcgaaagaatgataagcgtgttgagattgatggatatagtgatttcctctttcttaatagaaagaactatccaaaagtggcaagtgattacaacggcatgatgaaaggtcttgttaagaaatacaataagtataacgaggataaattgccacacatcactccacatagtttgcgacatacattctgtaccaactatgcaaatgcaggaatgaatccaaaggcattacagtacattatgggacatgctaatatagccatgacgctgaactattacgcacatgcaacattcgattctgcaatggcagaaatgaaacgcttgaataaagagaagcaacaggagcgtcttgttgcttag

SEQ ID NO: 412320 - DNA, 123 bp, Staphylococcus aureus
atgaatttattcagacaacaaaaatttagtattagaaaatttaatgtcggtattttttcagctttaattgccactgttacatttatatctattaacccgacaacagcgtctgcagcagagtaa

SEQ ID NO: 412321 - DNA, 1593 bp, Staphylococcus aureus
atgacactacttactgtaaatccattcgataatgttggattatcagccttagttgcagcagtacctattattttatttttattatgcttaaccgtttttaaaatgaaaggcatttatgcagcattgacaactttggttgttacattgattgtggctttatttgtatttgaattaccagcgcgtgtatcagcaggtgcgattacagaaggcgttgttgccggtattttcccaataggatatatcgttttaatggcagtttggttatataaagtttctattaaaacaggacaattttctattattcaagatagtattgcaagtatttcagaggaccaaagaatccaactattattaattggattttgtttcaacgcatttttagaaggtgcagcaggatttggtgtgccaattgcgatttgtgcagtattattaattcaacttggatttgaaccattaaaagcagcgatgttatgtttaattgctaatggtgcggcgggtgcctttggtgcaattggtttaccagttagtattattgatacgtttaacttaagtggaggcgttacaacattagatgttgcgagatactcagcattaacacttccaattttaaactttattattccatttgttttagtattcattgtagatggtatgaaaggtattaaagaaattttacctgtcattttaacagtgagtggtacatatactggattacaattattattaacaatattccatggtccagaactagcagacattattccatcactagcaacaatggtggtgttagcatttgtttgtcgtaaatttaaaccgaaaaacattttcagattggaagcgtctgaacataaaattcaaaaacgaacgcctaaagaaattgtctttgcttggagtccgttcgtcattttaactgcctttgtattagtatggagtgcaccattcttcaaaaaattattccaacctggaggtgcacttgaaagtttagtaataaaattgccaattccaaatactgtgagtgatttatcgcctaaaggaattgcgttgcgtctcgatttaattggtgcaactgggacagcgattttattaacagtaattattacaattttaattacgaagttaaaatggaaaagtgcaggtgctttattggtcgaagcaattaaagaattatggttaccgatccttacaatttcagctatcctagctattgctaaagttatgacatacggtggtttgactgtagcaattggacaaggtattgctaaagcgggagcaattttcccattattctctccagtattaggttggattggtgtgtttatgactggttcagttgtaaataacaatactttattcgcacctattcaagcgacagtggcacaacaaatttcaacaagcggttcattacttgtggcggctaacactgcaggtggtgtagcagcgaaacttatttcaccacaatcaattgccattgcgactgcagctgttaaaaaagttggtgaagaatctgcattattaaaaatgacgttaaaatacagtattatatttgttgcctttatttgtgtttggacgtttatactaacgttaatattctaa

SEQ ID NO: 412322 - DNA, 264 bp, Staphylococcus aureus
atggaaatcttaaattgtaaaaaagaaaagttaacaaaaataaaaaaagggttagaaaacgatggtctactcattcaaaaacgacgtggtttaaataaaccaaatattctatatttaatgaaacctattgtcacagaacgtgatatttacaaaatagaaaaagaagaaaacgatgttgaaccttacggcgagaaggaagttcgaaaatcgaacgtccagaagttcgaaaatcgaacgtccagaagttcgaaaatcgaacactaa

SEQ ID NO: 412323 - DNA, 282 bp, Staphylococcus aureus
atgacgcataatatagaaaaacgcattaataaattaaaaacttctggaaatccaaaatttaaaaaattagattcagatattcactatttactcaagagatttgaaggtgaaaaaaaccataaaggtttttatccaaagtttaaacaaggagaaatagtttttgtagatttcggtataaacgttaataaagaattctctaattcacactttgcaatagtgatgaataaaaatgattctaatacggaagatatagtaaatgttattcccttatcttctaaataa

SEQ ID NO: 412324 - DNA, 585 bp, Staphylococcus aureus; identical to SEQ ID NO: 409158

SEQ ID NO: 412325 - DNA, 441 bp, Staphylococcus aureus
atgttatatcgaattttacaagatcaaattaataatcaacgttatacactggtgttttttaacaatatagaaacaatgattaaaacattttcgatttataagcagaaaattactaaattaacatatgtccatagcgaggatgtttttcgctttgaaaaagttgaacaattaaggaatggacaatacgatgtcatttttactacgacaatattagaacgtggatttacaatggcaaatttagatgttgttgttatcgatgcacatcaatatactcaagaggctttaatacaaattgctggacgtgttggacgaaaattagaatgtcctactggaaaagtattgttttttcatgaaggtgtaagtatgaatatgattcaagctaaaaaagagattcaaaagatgaacaaattagcattaaaaagaggttggattgatgaataa

SEQ ID NO: 412326 - DNA, 882 bp, Staphylococcus aureus; identical to SEQ ID NO: 408512

SEQ ID NO: 412327 - DNA, 609 bp, Staphylococcus aureus
ttgaaaattgatgattggatttattcaattgaagtcttagctaacaaggattacgaaggtgcttattatccaagtgtagaaaatatccaaggtgcaaaagattatcatgaaggaaaagctgatcatattaacggattgaagaaaatagatgactacacaatgcaggttacatttgataaaaagcaagaaaattacttaacaggatttattactggacctttattaagtaaaaaatatttatcagatgtaccaattaaagatttagcgaaatcagataaaatccgaaaatatcctattggtattggaccatataaagttaagaaaatcgtcccaggtgaggctgttcaacttgttaaatttgatgattattggcaaggtaagcctgcattagataaaatcaatttaaaagttattgatcaagctcaaattattaaggcaatggaaaaaggcgatattgatgttacgaatgatgctaccggtgcaatggcaaaagatgctaagtcatctaatgctggtctcaaggtattatctgcgccaagcttagactacggtttaataggattcgtatctcatgattacgataaaaagctaataaaactggtaaagtga

SEQ ID NO: 412328 - DNA, 219 bp, Staphylococcus aureus; identical to SEQ ID NO: 410261

SEQ ID NO: 412329 - DNA, 675 bp, Staphylococcus aureus
atgattaatattaaaaatatttattatatgttatcttatgcatttacagtacttaacaaaaaaggctatcagaagttagcaacagaacaatttgaaaatatatttgatttatattcagctattcttataaaaggtatatcaagtcagttaaatagtggacttcatcatgaatatatagaacagacagattctctaaaagttattaggggaaaagttgatgttaagaattctatacaaggcttaggagttttaagtcaacgtattaattgtatttatgatgaattttcattaaatacatacatgaacaagattttaaaaactacaatgaaatgtttaataaaaacagatatttctagaaagaataagataaagctccgaaagttattagttcattttaataatgttgatactttagattatagaaatattcaatggtatcattcgtttgatcgaaataatcagacgtataaaatgttaatatctatatgctatttaatttttcaaggagtaatacaaactgaaagcaagggacaaaatgatcttatggtatttgtagacgaacaacaaatatctcggctatatgaaaaatttattctagagtactataaaaaagaatttccagagcttgttgtaacatcatcaaatattcaatggtcattagataatgagaagtga

SEQ ID NO: 412330 - DNA, 576 bp, Staphylococcus aureus
atgattgcctatccaattcgggtaggctctgtttataggggtgaacaaatgaaactgcttaaaacgaagaattgtttatattatcgtaatggcgacaataaactatctgagtatcaactattaacgcaatttaacccaacttttattaataaaaaaattaggatgtgtgaattccaaattgaaagtatgtaccatatgagtgcgtcgaccacaacatgtgatgaaataatgggagtcgtgtctgtctcatatccaattgaaaaactagttatcaaaattattgaaacaaaggcaagattacaaaactataaaaatagatctataaataatatggcgttgttgaaaacggtactaaatcattatacagaaaaagagcagaagcaagttgtaaaatatatgcgttcaaatggacgatataagccttacaacgtcattgaacgcttacaggttgatttgtatcaagcaagtattaaacaacgttcagaacgtcaaaaacaaagaaatatagcaattgaaaacagtaagattgcacgagtaaatgcatatcaccaatcttcatatgtaaaagtggtgtaa

SEQ ID NO: 412331 - DNA, 579 bp, Staphylococcus aureus
atgaaaactgaatcgtactttaaagaatacaaccaatttgtaatagatcaacaaaaggctatacaagaattggaacaagagcgtaatgcattggagagtaaaataaagttagataagtccacatacaaacagttaatcatggatggacaagatgataaagcagataacctatatcaagcaacagatgctgatgaaaagaaactaaaagcacttaataaacgcttagagacaaagaaaagtgtgtcgaaagaagttaaatatcaaaagacaattgaattattaaaacatcaaagcgagttgtcatcattatatgaatcagaaaagcaatcagctttaggtaaattaaaaaaggtagtcgatgcatataatgagatcattgatgaaatagaagatattaatgatagatatgaagatgagcatcagcaatatgcgagtatttatagtcaagaacaattatatgatgataaagaggctagggaagcattgaatggctactttagagaaaatatatttacatcatatattaatggtaatgatttgccatacgaacacaataacaagttgtttttaaaatgctaa

SEQ ID NO: 412332 - DNA, 342 bp, Staphylococcus aureus
atgcaaagtatcgcagaaaaagagacgtatcatttacccaccgaacacctgcaagttttcaatgtgataaaaaatacgtccaataagtatattactaaaactaaaatcttaaatcaattgggatatgaatataattcaagcaatgaacgatggttacgaagagtaatcaattcattagtatatcattatggctatcctatcggatgcagttataaacctagtgaacgtggttattacatcattacgacagaacaagaaaagcaacaagcgatgagaagtattaagaaattagctgatggcagtatgaaacgctatgaagctttgaaacgtattaaagtgtaa

SEQ ID NO: 412333 - DNA, 942 bp, Staphylococcus aureus
atggcgtatatcacaactactagatggctagataatgaggaacaagatttagatataattatccaaaaacttttggatgtaagtgaattgaacgagaatataaacacagatttaaaaacatatcattataattttaaaacatacaaagtatttacagaaaataaagaaatagaattaggtagtcagaaaattgaatttaatactatccatttctcatacgattctgtgagaagtggtgatgaaccacttgaggatagaacaactaataatacggggtttgttttagtttattttatgaatagttctgtgaaatatattataaataagaatacagactctcaatattttttgagacgttttttgaaatacacaggacaaaacgaaataactaagattaatttaaacttcaacgatgacttgcttttatggattgtttataaaatttataaggaaataagcgattttattataactactaatacacaaagcgaagagcaccttacttttgataatattaaaggatttaagggtgatactccagataataataaggtttcttctcatggtaatacagtgctaaatttaataagtactctatcgtttgtactcgaaaaaggtaagttaggtcagataattctttgcttgtcttatacgaatcatgaaaatatagagttaaggttaagcggtagtgatttagtaggtatagattttaaaagatacgatggaatttatgaacatgaagaatgtgaagaattattcaaagctaagttgttattattagtatatttaaaaatcataccaaatataaattctttttatcaaagtgatttaaatgaaaagaagtggactgatgaagtgaaaattaattttttagaagacattaaaaatgaaataattaatagaatagacttgaagaaagagactattagtgaaaataattaa

SEQ ID NO: 412334 - DNA, 471 bp, Staphylococcus aureus
ttgatacagatattttataaattcttatcttcattactccatagaacacatattaaagttaatttttataaaaatgagtcttctttatctgatgaagtaataaagtataaatttaatagtgatgttacaactattttttttaatgtaaaattaacaggtaaaagttcagtgatttcgaaatataccattgattttaatctcccgtatagtgtatctgcacaagtagataataaaaatgataaaagtattaaagttaatagaaaaaaagataggatttctatagctttaaaagatcttgtaaataataagaattatttaaatggtgatattataccgttgaattttaaagtgattaagtcagaaaatgaggtaaatgcagatatagaattacaatgtaatcctaatgttaatttaatgaaaaaaatttgggtttcatttaactcgaataaagctaaatttgaaaaggagtaa

SEQ ID NO: 412335 - DNA, 267 bp, Staphylococcus aureus; identical to SEQ ID NO: 408392

SEQ ID NO: 412336 - DNA, 279 bp, Staphylococcus aureus; identical to SEQ ID NO: 408393

SEQ ID NO: 412337 - DNA, 234 bp, Staphylococcus aureus; identical to SEQ ID NO: 408395

SEQ ID NO: 412338 - DNA, 324 bp, Staphylococcus aureus
gtgaatgactgtccaattatcgatgttgatatgctcgaacagtggtcaaaggagtttgaacaatcaaatggtagtcctaatatcaaagggtacacacgacgtgatagtgcgtattggcgagatatagcttttggtgtaagtgagggagagcgcaattcaacattggcttcaattacaggttatcttttgcgtaggtatgtagatccaaacttagtttatgggttagtgagtgcgtgggcaagtgtatgcaaaccacctattaatcaaagtgaagtaaacaatacttttaaaagtattttgaaaaaagatagtaaaagcagttag

SEQ ID NO: 412339 - DNA, 138 bp, Staphylococcus aureus
atgaacttattacacaattcaatgaatattatgatgttacaattaaaaaaaaacagaacgaaaactcaaaaattgaaagtgatatatttagtaataaaatcaaattggttaaagggactacaaaaaaagaagttatag

SEQ ID NO: 412340 - DNA, 363 bp, Staphylococcus aureus
atgaataaaaatcaattaaagtcagaaattttagaatatataaaagcgcatgctggtacatcatttgtagaaatagaacatgtatttgaagaaaataactttgattataaaggtgacggcgcatatacaagtggtcaacatcccaatgttgtgttttggattgggtggaatcaagaagcgtttgatgttatcgctgaacttaaaaaagacggacgtattgagatggatatttgtgagccaattgtttatatggttgatggtaaaggtttggatttgcctattgtaaggtcgaaaaatattaaaacagatcattggttgcctgtcacgtttactattagtaagaaagaaaaggagcatgtttaa

SEQ ID NO: 412341 - DNA, 186 bp, Staphylococcus aureus
atgagtgattataaattaaaaataattgaattgatcaaaagtgatataacaggttaccaaattcacaaacaaactggcgtagcgcaatatgtaatttcacaattaaggcaaggaaagcgcgaagtagataacttaactttaaatacaactgaaaaactatacagttacgcacgacaagtgttataa

SEQ ID NO: 412342 - DNA, 129 bp, Staphylococcus aureus; identical to SEQ ID NO: 407347

SEQ ID NO: 412343 - DNA, 189 bp, Staphylococcus aureus
gtgatagcgaatattgaaatgttgtatcagttagctacaggaatcaatgaaccagcactagagttagttgagggattaaaattagtaactgagtttatacaagatgagaatgcgacacaagaggattacacggctttagagcataagttaactgagttgaagtcatcttattacagtttgaataagtaa

SEQ ID NO: 412344 - DNA, 189 bp, Staphylococcus aureus
gtgatagcgaatattgaaatgttgtatcagttagctacgggaatcaatgaaccagcaccagagttagttgagggattaaaattagtaactgagtttgtacaagatgagaatgcgacacaagaggattacaaggctttagaacgtaaattgaatgatctaaaagcgtcttactatagcttgagtaaataa

SEQ ID NO: 412345 - DNA, 2631 bp, Staphylococcus aureus
atggaaatgaaaccaaaatatgatcctcgtgaagttgaagcgggacgttatgaagaatgggtgaagaatggttattttaaaccgtcagaagataaatcaaaagaaacatatacaattgttatcccgccaccaaatgtaactggtaaattacatttaggacatgcatgggatacaactttacaagatatcattacacgtatgaaacgtatgcaaggatacgatacgttatacttaccaggtatggatcatgctggtattgcgacacaggcaaaggtagaagctaaattaaatgaacaaggaataactagatatgatcttggtcgtgaaaagtttttagaacaagcatgggattggaaagaagagtatgcgtcatttattcgtgcgcaatgggctaaattaggtctaggtttagattatagtagagaacgttttactttagatgaaggtttaagtaaagcagttaaaaaagtttttgttgatttatacaataaaggaattatttatcgtggcgaacgtattataaattgggatcctaaagcacgtacagctttatctgatattgaagtaatacatgaagatgttcaaggtgcgttttatcattttaaatatccttacgctgatggtgaaggttttattgaaattgcaactacaagaccagaaacgatgttaggtgatacagcgattgttgttaaccctaatgacgaacgatacaaagatgtaatcggtaaaactgttatattaccaatcgtaggacgcgaactgcctattttagcagatgaatatgttgatatagacttcggttctggtgctatgaaagtgacaccagcacatgaccctaatgattttgaaattggtcaaagacatcaattagaaaatattatcgttatggatgaaaatggtaaaatgaacaacaaagctggtaaatacgaaggtatggaccgttttgattgtcgtaaacagctagttgaagatttaaaagaacaagatttagttatcaagattgaagatcatgttcattctgtaggtcattcagaacgatctggcgctgttgttgaaccatatttatcaacgcaatggtttgtgcgcatggaagacttagcgaaacgttcattagataaccaaaaaacagatgatcgtattgatttttatccgcaacgtttcgaacatacatttaaccaatggatggaaaatattagagattggacgatttcaagacaattatggtggggtcatcaaattccggcttggtatcataaagaaacaggagaaatatatgttggagaagaagcgccaactgatattgaaaattggcaacaagatgaagatgtattagatacgtggttctcaagtgctttatggcctttctctacgttaggttggcctgatttagaaagcgaagactttaaacgatactacccaacaaatgccttagttacaggttacgacattatctttttctgggtagcacgtatgatattccaaggcttagaatttacagatcgtcgtccatttaatgatgtgttattacacggcttagttcgcgctgaagacgggcgtaagatgagtaaatcattaggtaatggtgtggatccaatggatgttattgacgaatacggtgctgatagcttgcgttacttcttagcaacgggttcatctccaggacatgatttaagatactcaactgaaaaagttgagtcagtgtggaactttatcaataaaatttggaatggagcacgtttcagtttaatgaatatcggtgaagactttaaagttgaagatatcgatttaagtggtaacttatcattagcagataaatggattctaacacgtttaaatgaaacgattgcaacagttactgatctaagtgacaaatatgaattcggcgaagttggacgagcattatataatttcatttgggatgatttctgtgattggtacattgaaatgagtaaaattccaatgaatggtaatgatgaagaacaaaaacaagttacacgttcagtattgagttatactttagacaatattatgagaatgctacatccattcatgccatttgtaacagagaaaatatggcaaagtttaccacatgaaggtgaaacaattgttaaagcttcatggccagaagtgcgtgaatcattgatttttgaagaaagtaaacaaacaatgcaacaacttgttgaaatcattaaatctgtaagacaatcacgtgtagaagtaaatacgccattgtctaaagaaatacctattttaattcaagctaaagataaagaaattgaaacaactttatcacaaaacaaagattatttaatcaaattctgtaatcctagtacgttaaatataagcactgacgtggaaattcctgagaaagcaatgacatcagttgtaattgcaggtaaagtggtattaccattagaagggctaattgatatggataaggaaatcagccgtttggaaaaagaattagctaaacttcaaagcgaattagatagagtagataaaaagctctctaatgaaaactttgtaagtaaagcacctgaaaaggttataaatgaagaaaaacgtaaaaaacaagattatcaagaaaaatatgatggtgtgaaggcaagaattgaacaattaaaagcatag

SEQ ID NO: 412346 - DNA, 561 bp, Staphylococcus aureus
atgaatgaatgcgcatttggaactaaagatccagtctacttagactatcatgatcatgtatggggacaaccgctctatgatagcaaggcattgtttaaacttttagcattagaatcacaacatgctgggctatcttggttaactattttaaaaaagaaagaagcctatgaagaagcattttatgatttcgaaccagaaaaggtagcacaaatgaccgctcatgatatcgaccgcttaatgacttttccaaatatcgttcatcatcgtaaaaaattagaagcaattgttaatcaagctcaagggtatttaaaaattgaacaagcatttggtagttttagtaaatttttatggtcttatgtaaatggtaagcctaaagatttgcagtatgaacatgcttctgatcgtatcacagttgatgatactgcaacacaactatctaaagatttaaaacaatacgggttcaaatttttaggtccagtaacagtattttcgtttttagaggcagccggtttatatgatgcacatttaaaagattgtccatcaaagcctagacacaattaa

SEQ ID NO: 412347 - DNA, 723 bp, Staphylococcus aureus
atgaaagtagcaatttatactagagtgagtacacttgaacaaaaagaaaaaggacactctatcgaagaacaagaaagaaaattaagagcttacagcgacataaacgactggaaaattcataaagtatatactgacgctggatactccggagctaaaaaagacagacccgctttacaagaaatgttgaatgaaatagataattttgatttggttttagtctataaactagatcgattaactcgaagtgttaaagacttactagagatactagaattgtttgagaataaaaacgtgttgtttaggagcgcaacagaagtatatgacacaacttctgctatgggacgtttgttcgtaacattagtaggtgctatggcagagtgggagcgtactacaattcaagagcgtactgcaatgggtcgacgcgcatcagctagaaaagggttagctaaaactgtccctcctttctattacgacagagtaaacgataaatttgtgcctaatgaatataaaaaagtattacgatttgcagtagaagaagcgaaaaaaggtactagtttaagagaaataactatgaagttgaacaactctaaatacaaagcacccttaggtaaaaactggcacagatcagttatacgtaatgctcttataagtccggtagctagaggtcatcttgttttcggtgatatattcgtcaaaaaatacccacgaggctattataagtga

SEQ ID NO: 412348 - DNA, 186 bp, Staphylococcus aureus
atgagtacttataaagaaattgaacacttacacatcaatactggtggtaaagagcttactcaagaacaaatagaagaagccaaagcttttatagacagtcaaggatttaaagatatgattcgagaagctaaagagtcacgtcaaagagttatggagtctaaaattaccgatagaactaaaatgtga

SEQ ID NO: 412349 - DNA, 147 bp, Staphylococcus aureus
atgaatttaaaagaagttgacattaacattgaagagtgggaaatggttgaaatccccttttatacagaagaagaactgacttataggttgaataatggtttacctataactaaaagtgaacttgaagaacaggagtcgaaaaaatga

SEQ ID NO: 412350 - DNA, 1950 bp, Staphylococcus aureus
atggaaataaaaataaataagttaactatatcaaactttgctggaatcaaagaagaaagctttaactttaacggcaaagatacaaaaatatacggcaataatgcgactggcaagactacaacagcaaccgcattacaatggctgcttttcgataaaggtttggacggatcaaccaaatcatttaaccctgtacctttaaacgaaaaaaacgaagaaaattatgagttaattccgactgttttcgcagaatttgaaatcgacggaaaaattacgacttttaaaaaagagtcacatcctaaatacacaataaatcaaaaaacgaatcgcaaggaatactcacgaagtcgaacgaagaaacaatatatcaatgatgaatcaataaaagtaaaggattataaagctcgtattgatgaactgattgatgaagatgtattcaagttaattacgaaccctcaagcatttaacttactagattggaagaagcgaagaagtttgttgtttgaaattgctaaaccaatcaatgatgaggatgtcattaaaacaaatgatgattttaaagaattaaataatattcttggagatcatgaaattgaaacaaagaaaaagattcttacggacaagataaaacagattaacaaagatatcaaagatattccgatacgtattaaccaaacacaacaaaataagcaggatgtaccagaattcgataacgatagatacgcaattatcaaacaagaaattgagcaacttgaaaatgagcgtatagatattcaaaacggtaaggaagaaattaatttgcgtaatcaattagctgataaacaatcagaattgaaacgcatagaagacaataacagcgcaagtaatgagaacaaaatccatgctttaacaaatgaattacacgttgaaaatggaacggtagcaaaccttaaaacgagattaaagcaaaacaaacaacaaatcacacatgaagaaaatagacgtaatcaattattggaaaatcacaaaggactaaaaagtgatttagaaaaatctaaaaatcaaaaatttgaacatcttgatgacaatgtatgtagttgttgtggtcaacagttaccaactgaacaagtgaatgaggcaagagaaaaagctttacagaaattcaatgtaaaaaaatcgaaagaattagaaacaatacaaacatctatcaatcacattatttcagaaggcaagaaaataaagccaatcatcgagaagttagaggatgacaataataatcttcaaattaaaatcaacgaagcagaagagcgttcagcaagaatacaaaacaaaattaataagttgaaaacgactcacgttgacgttacgcaaactgacgaatacaaagcagtaatgttagagataaatgagattaatcaaaaacgctctaacatcaggaaaactattcaagataaagtttcaggaatagatgacaaaataagcgaacttactcaagaaaaatcagaaattgaagtgtcaagatcaatcgaaaaatcaaataaacatctagatgatgttatttctgaattaagaaatgaagaagacagattattggatgaaaaagaaaagtattcacatgacctttatatcttaaaagaatttacaacaacaaaagtcaaaatgcttactgaaaatatcaataacgaatttgatattgctgaatttaagttattcaataccttagttaacggcgaattagaagaaacatgttccacaacggttaacggcgtcgaatacgacagcggtttaaataacgcctcaagaattaatgttggcttagatatcatcaatacactgtcaaaacattttaaagttacagcaccaatatttattgataatgctgaatcagtaacagagcttatcaaaacagaatcacaacaaattcaattgatagtaaatgaacaagataaaaaattaagaatggagactatataa

SEQ ID NO: 412351 - DNA, 921 bp, Staphylococcus aureus
atgactgaaaataataaattacaaactattgaacaacaattagtacaagaaaagaacgtatctgacaacgtattaaacaaagtgagagttttagagtcacaaggcaatttggaattgccaaatgattattcaccaagtaatgccatgaaacaagcatggttacaaattagccaagataacaaattaatgagttgtaacgatacaagcaaagcaaatgccttattagacatggtaacgcaaggtttaaatccagctaaaaatcaatgctactttattccttacggcaacaaaatgcagttacaacgtagctatcacggtaatgtaatgatgttaaaacgtgatgcaggtgctcaagatgttgttgctcaagtgatttataaaggcgatacattcaagcaagaaatgggagaaacaggacgtatcaaagcgattaaacacgaacaagacttctttaacatcgacaaagaaaacattatcggtgcgtactgcacaatcgtatttaatgatggacgagataactatattgaagtcatgactattgaacaaattaaacaagcgtggatgcagtcatcaatgattaaagatgaaaaagcattacaaaattctaaaacacataataatttcaaagaagaaatggctaaaaaaacagttatcaatagagctgctaaacgttatatcaacacatcaacagatagcaatcttttcaaatacgcacaagaatccgaacaacgtcaacgcaaagaagtgttagacgcagaagttgaagaaaatgcaaatcaagaacaattggactttgaacaaccagttctcgaagaagcacaatacacagaattagaaaatgataagcctattgatgtatctgactttgaagaaataaaagaacctgcaacagaaaaagaaagcgaagaagagccattttaa

SEQ ID NO: 412352 - DNA, 486 bp, Staphylococcus aureus
atgactgctggaacacaacaagctatgaattttgaaagtcatcgcttatgcacgattaaggcaaagcaagagctgcgaataggcacatggtcaattctaccgtttgacatcgaacatgatgctaacgagcctgtggctttcttattacaaagtacattaggttataaggttctgtatgttactgatacaaagtatttgaaatacaaatttaacggcattacacacatgatgttagaagttaattatatctatgaacaaatgcaggaaaacataaaaaacggcagtgtgcacagcacattagcaaacagaattatggagtctcattttagcttagaacatgctatcggaatgttaaaagcaaatgatttaactagactcgaagaaatacatttaattcatttaagtagtcaaaattcaaatgcaaaatacattaaaagtgaaatacaaaaagtgacgggcgcgcccgtttatgttggaggtttataa

SEQ ID NO: 412353 - DNA, 1959 bp, Staphylococcus aureus
atgaacaaacagcaaaaagaatttaaatcattttattcaattagaaagtcatcactaggcgttgcatctgtagcgattagtacacttttattattaatgtccaatggcgaagcaaaagcagctgaagaaacaggtgttacaaatacagaagcacaaccaaaaactgaagcagttgcaagtccaacaacaacaacaactgaaaaagctccagaagctaaaccagtagctaaaccagtagctaatgctgtctcagtatctaataaagaagttgtggcccctactactgaaacaaaagaagctaaagaagttaaagcagttaaagaagttaaagcccctaaggaagcaaaagaggaaaaacctgcagcaaaagctgacaacaatacatatcctattttgaatcaggaactaagagaagcgattaaaaaccctgcaataaaagacaaagatcatagcgcaccaaactctcgtccaattgattttgaaatgaaaaagaaagatggcactcaacagttttatcattatgcaagttctgttaaacctgctagagttattttcactgattcaaaaccagaaattgaattaggattacaatcagggcaattttggagaaaatttgaagtttatgaaggtgacaaaaagttgccaattaaattagtatcatacgatactgttaaagattatgcttacattcgcttctctgtttcaaatggaacaaaagcagttaaaatcgtaagttcaactcacttcaataacaaagaagaaaaatacgattacacattaatggaattcgcacaaccaatttataacagtgcagataaattcaaaactgaagaagattataaagctgaaaaattattagcgccatataaaaaagcgaaaacactagaaagacaagtttatgaattaaataaaattcaagataaacttcctgaaaaattgaaagctgaatacaagaagaaattagaagagacgaaaaaagctttagatgaacaagtgaaatccgcgataactgaattccaaaatgtacaaccaacaaatgaaaaaatgaccgatttacaagatacaaaatatgttgtttatgaaagtgttgagaataacgaatctatgatggatacttttgttaaacaccctattaaaacaggtatgcttaatggcaaaaaatatatggtaatggaaactactaatgacgattactggaaagatttcatggttgaaggtcaacgtgttagaacaattagcaaagatgctaaaaataacactagaacgattatcttcccatatgttgaaggtaaaactctatatgatgctatcgttaaagttcacgtaaaaacgattgattatgatggacaataccatgtcagaatcgttgataaagaagcatttactaaagccaatgccgataaaactaataaaaaggaacaacaagacaactcagctaagaaggaaactactccagctatgcctagcaaaccaacaacaccacctgttgaaaaagaatcacaaaaacaagacagccaaaaagatgacaataaacaatcaccaagtgttgaaaaagaaaatgacgcatctagtgagtcaggtaaagacaaaatgcctgttacaaaaccagctaaagctgaagtagaatcaagtagtacaactccaactaaggtagtatctacgactcaaaatgttgcaaaaccaacaactgcttcttcagaaacaacaaaagatgttgttcaaacttcagcaggttctagcgaagcaaaagatagtgctccattacaaaaagcaaacattaaaaacacaaatgatggacacactcaaagccaaaataataaaaatacacaagaaaataaagctaaatcattaccacaaactggtgaagaatctaataaagatatgacattaccattaatggcattaatagctttaagtagtatcgttgcattcgtattacctagaaaacgtaaaaactaa

SEQ ID NO: 412354 - DNA, 534 bp, Staphylococcus aureus; identical to SEQ ID NO: 407413

SEQ ID NO: 412355 - DNA, 1464 bp, Staphylococcus aureus
atgggtgaatttaaaggatttatgaagtatgacaaacagtacttaggtgaattatcactggtagaccgtttgaagcatcataaagcatatcaacaacgatttactaaagaagatgcctctatccaaggtgcgcgatgtatggattgtggaacgccgttttgtcaaaccggacaacagtatggtagggaaacaataggttgtccaattggaaactacattcctgaatggaacgactttgtgtatcatcaagattttaaaactgcttatgaacgcttaagcgaaacaaataactttcctgactttacagggcgtgtatgtcctgcaccatgcgaaagtgcttgtgtgatgaagattaatagagaatcgattgcgattaaaggtattgaacgcacaattattgatgaagcttttgaaaatggttgggtagcgccgaaagttccgagtcgccgtagagatgaaaaagtggcaatcgttggaagcggtccagcaggattaactgctgctgaagaacttaatctactaggatatcaagtgactatttatgaacgtgctagagaatcaggcggtttattaatgtatggtatacctaatatgaagcttgataaagatgtggttcgacgtcgtattaagttaatggaagaagcgggcattactttcgttaatggtgttgaagtaggcgttgatattgataaagcaacgttagaatctgagtatgatgccattatattatgtactggtgcacaaaaaggtagagatttacctttagaaggacgcatgggtgatggtatacatttcgctatggattatttaactgaacaaacgcaactgttaaatggagaaattgatgatataacaataactgcaaaagataagaatgtcattatcattggtgctggtgatacaggggcagactgtgtagcgacagcattaagagaaaattgtaagtcgattgttcaatttaataaatatacgaaattgccagaagcaattacgtttacagaaaatgcatcatggcctttagcaatgccggtgtttaaaatggactatgcgcaccaagagtacgaagctaagtttggtaaggaaccacgtgcatatggtgttcaaacaatgcgttacgatgttgacgataaaggacatatacgtggtttgtatactcaaattttagagcaaggcgaaaatggtatggtcatgaaagaaggacctgaaagattttggcctgctgaccttgtattattatcaatcggcttcgaaggtacagaaccaacagtaccgaatgcttttaacattaaaacggatagaaatcgaatcgtggctgatgatacaaactatcaaactaataatgaaaaagtatttgctgctggagatgctagacgtggtcaaagtttagttgtatgggcgattaaagaaggtagaggcgtagcgaaagcagtagatcagtatttagcgagtaaagtttgtgtataa

SEQ ID NO: 412356 - DNA, 825 bp, Staphylococcus aureus
atgagatataaacgaagcgagagaattgtttttatgacgcaatatttgatgaaccatccgaataaattgattccattaactttttttgtgaaaaaatttaaacaggcgaagtcttcaataagtgaagatgtccaaattataaaaaatacattccaaaaagaaaagttaggtacagtaattactactgctggcgcaagtggtggtgttacgtataaaccaatgatgagtaaagaagaggcgactgaagttgttaatgaggtcattactctattagaagagaaagaacgtttgttacctggcgggtatttatttttatcagatttggtaggtaatccatcgctactaaacaaagttggtaagttaattgccagtatttacatggaagaaaaattagatgctgttgttaccattgcgacaaaaggtatttcattggcaaatgcggttgctaatattttaaatttaccagtagtagtgattagaaaagacaacaaggtgactgaaggttctacagtttcaattaattacgtttcaggatcttcaagaaaaatagagacaatggtactttcgaagagaactttagcagaaaattcaaatgttttagttgtcgatgattttatgagggctggtggctctatcaatggtgttatgaatttaatgaatgagtttaaagcccatgtaaaaggggtatcagtacttgtagaatcaaaagaagttaaacaaagattgattgaagattatacttccttagtgaaattatctgatgtagatgaatataatcaagagtttaacgtagaacctggcaacagtttatctaagttttcataa

SEQ ID NO: 412357 - DNA, 690 bp, Staphylococcus aureus; identical to SEQ ID NO: 408319

SEQ ID NO: 412358 - DNA, 1167 bp, Staphylococcus aureus; identical to SEQ ID NO: 408318

SEQ ID NO: 412359 - DNA, 1728 bp, Staphylococcus aureus
atgaaacgagaaaatccattgtttttcttatttaaaaaactatcatggccagtgggtcttatcgttgcagctatcactatttcatcactagggagcttaagtggactattagtgccactgtttactggacgaattgtagataaattttccgtgagtcatatcaattggaatctaatcgcattatttggtggtatctttgtcatcaatgctttattaagcggattaggtttatatttattaagtaaaattggtgaaaaaattatttatgcgatacgctcagttttatgggagcatatcatacaattaaaaatgccattctttgacaaaaatgaaagtggtcaattaatgagtcgattaactgacgatacgaaagtgataaatgaatttatttcacaaaagctacctaacttattaccatcaatcgttacattagttgggtcactaatcatgttatttattttagattggaaaatgacattattaacatttataacgataccgatatttgttttaattatgattcctctaggacgtattatgcaaaagatatcgacaagtacacaatctgaaattgcaaactttagtggtttgttagggcgtgtcctaactgaaatgcgtcttgttaaaatatcaaatacagagcgacttgaattagataatgcacataaaaatttgaatgaaatatataaattaggtttaaaacaggttaaaattgcggcagttgtacaaccaatttcaggtattgttatgttgctaacaattgcaattattttaggttttggtgcattagaaattgcgactggtgcaatcactgcaggtacattaattgcaatgatattttatgttattcaattatcgatgcctttaatcaatctttcaacgttagttacagattataaaaaggcagtcggtgcaagtagtagaatatacgaaatcatgcaagaacctattgaaccgacagaagctcttgaagattctgaaaatgtattaattgatgacggtgtgttgtcatttgaacatgtagactttaaatatgatgtgaagaaaatattagatgatgtgtcgttccaaatcccacaagggcaagtgagtgcttttgtaggtccttctggatctggtaaaagtacgatatttaatctgatagaacgtatgtatgaaattgagtcaggtgatattaaatatggccttgaaagtgtctatgatatcccgttatctaagtggcgacgcaaaattggatatgttatgcaatcaaattcgatgatgagtggtacaattagagacaatattttatacggaattaatcgccatgtttcagatgaagaacttattaattatgctaaattagcgaactgtcatgattttatcatgcaatttgatgaaggatatgacacgcttgtaggtgaacgaggattgaaactgtctggcggacaacgtcaacgtattgatattgctagaagttttgttaaaaatcctgatattttgttacttgatgaagcaacagctaatctcgatagtgaaagtgaattgaaaattcaagaagctttagaaacattgatggaaggtagaacaacgattgtcattgcgcatcgtttgtctacaattaaaaaagccggtcaaattatattcttagacaaaggacaggtaacaggtaaaggtacgcattcagaactgatggcatcacatgcgaagtataaaaactttgtagtgtctcaaaaattaacagattaa

SEQ ID NO: 412360 - DNA, 3153 bp, Staphylococcus aureus; identical to SEQ ID NO: 408274

SEQ ID NO: 412361 - DNA, 603 bp, Staphylococcus aureus
atgttaattagtctcgtaatcccagtttttgctttgttagttattggtggtattatttggatgattatagaaggtatagtacatatttcaaaaaagaataaagcaattgataacttttttaacaaagttaataaagtaagtgagacatataaattcgctactacttttttatttctaatcttggctacggctggtatttctcaattttatctatattatatagtatcagagtttctttttttgctggttatatttacctttggtattgcaggtatcatttttttaatgccatatggcttatgtttcctaccactttataaacaaaaaaagaaaaaacagacatttaaaaaatacatggcttacactacgattggtttgtcaatttatctaggcttatctctagttttggttcacactacgaaaatttatatggacgaaggtggcgtaagatactattacggtagttttgtaatgaaacaagcgggcggttatgcttatttagctttagcagtactttcaacgttgttaattgttgcgaaaaaagctacaaataaaaataaaaaaatcgaaaccgtcgacaatacaaatataacggaaagataa

SEQ ID NO: 412362 - DNA, 708 bp, Staphylococcus aureus
gtgtattcgttccgattattttcaaaaaaactgtttccagttccagatgagtttaaccgtaaaattgaagttagtttaattggtaaaaatcaattaacgattcctatagcgcaaaatttaacatctcagttatatgacgtgacattatattatcgcaaagacttgagtgatcgtcgtcaattgtcggatgatatcacgatgatagaaattgctgattatgaacaagatgttttagaacgactaggtctgtttgaccgagacatagttgtttgtgccacgaatgacgatgatattaaccgaaaagttgctaaattagccaaaacacatcaagttgagcgtgtcatttgcagacttgaaagcacaacggacgatacagagttagttgattcaggtattgaaattttcagtagctacttaagtaataaaatcttattaaaaggtttaattgaaacacctaacatgttgaatttattaagtaatgttgaaacgtcactatatgaaattcaaatgttaaattataaatatgaaaatattcaattacgtaatttcccattcggaggagacatcatcttcgtgcgtattatccgtaataatgagtcgattgttccgcatggagatacacaattgcgatatggtgatcgcttaattgttaccggtgctaaagaatacgttgatgaattgaagcaagagttagaattttatttttaa

SEQ ID NO: 412363 - DNA, 774 bp, Staphylococcus aureus
atgttaatcgatacacatgtccatttaaatgatgagcaatacgatgatgatttgagtgaagtgattacacgtgctagagaagcaggtgttgatcgtatgtttgtagttggttttaacaaatcgacaattgaacgcgcgatgaaattaatcgatgagtatgattttttatatggcattatcggttggcatccagttgacgcaattgattttacagaagaacacttggagtggattgaatctttagctcagcatccaaaagtgattggtattggtgaaatgggattagattatcactgggataaatctcctgcagatgttcaaaaggaagtttttagaaagcaaattgctttagctaagcgtttgaagttaccaattatcattcataaccgtgaagcaacacaagactgtatcgatatcttattggaggagcatgctgaagaggtaggcgggattatgcatagctttagtggttctccagaaattgcagatattgtaactaataagctgaatttttatatttcattaggtggaccagtgacatttaaaaatgctaaacagcctaaagaagttgctaagcatgtgtcaatggagcgattgcttgttgaaaccgatgcaccgtatctttcgccacatccatatagagggaagcgaaatgaaccggcgagagtaactttagtagctgaacaaattgctgaattaaaaggcttatcttatgaagaagtgtgcgaacaaacaactaaaaatgcagagaaattgtttaatttaaattcataa

SEQ ID NO: 412364 - DNA, 813 bp, Staphylococcus aureus
atgaagtataaaacagagagacgtgaaatgatgggaaatataaaaagttttgcattgtacataagtatcttgcttttaatagttgttgtagcaggttgtggcaaaagtgataaaacaaaagaagattccaaagaagaacaaattaaaaagagctttgcgaaaacattagatatgtatccaattaagaatctcgaggacctatatgataaagaaggatatcgagatggcgaatttaaaaagggagataaggggacgtggactttactcacaagtttttcaaaaagtaacaaaccggatgaaatagatgacgaaggcatggttttatatctaaatagaaataccaaaaaggcaacaggttattattttgtaaataaaatttatgatgatattagcaaaaatcagaatgagaaaaaataccgtgttgaacttaaaaataataagattgttcttttggataatgtagaagacgaaaaacttaaacaaaaaattgaaaattttaaattttttagtcagtatgcggattttaaagatttaaaaaattatcaagatggaagtataacaactaatgaaaatattcctagttatgaagcagaatacaaattgaataatagtgatgaaaatgtaaaaaaacttagagatatttatccaattacaacgaaaaaggctccaatattaaagttacatatagatggtgatataaaaggaagttcagttggatacaaaaaaatagaatataaattttcaaaagttaaagatcaagagacaacattaagagattatttaaattttgggccgtctgatgaagatagctaa

SEQ ID NO: 412365 - DNA, 1203 bp, Staphylococcus aureus
atggctaaaattccagttacggtattaagtggttatttaggctcggggaaaacaacgttgttaaatcatattttacaaaatcgtgaaggtcgacgtatcgcagtaattgtaaatgatatgagtgaagttaatatcgataaagatcttgtcgcagatggtgggggactatcgcgcacagacgaaaaattagtcgaactttctaacggttgtatctgttgtacacttagagacgatttattaaaagaagttgagcgtttagtgaaaaaaggtggcatcgatcaaattgttattgagtcaacagggatttcagagccagtacctgttgcacaaactttctcatatattgatgatgaacttggcattgatcttacagcgatttgccgtttagatacaatggttacagttgtggatgctaaccgcttcgtccatgacatcaactcagaagatttattgatggatcgtgatcaaagcgttgatgaaacagatgagcgttcgattgctgatttattaattgaccaagttgaattttgtgatgtattgattattaataaaattgacttaataagtgaagaagaactagcgaagttagaaaaagtgttaagtgcattgcaaccgactgctaaaattattaagacaacaaattctgaagtagatttaaaagaagtcttgaatacgcagcgttttgattttgaaaaagcgagcgagtcagcaggatggatcaaagaacttgagtctggtgggcatgcatcgcatacacctgaaacagaagaatatggtatatcatcgtttgtatataaacgtcgtctacctttccatgctaaaaggttcaatgattggttagaaagcatgccaaataatgtcgttcgatcaaaaggtatcgtatggttagcacaatacaatcatgtagcatgtttattatctcaagcagggtcatcttgcaatattcatccagttacatattgggtggctagtatgtctgaagcgcaacaaacgcaaatattagcagaacgccaagacgtcgcagctgaatgggatccagaatatggcgatcgtcatacacaatttgtcattattggtacagacttagatgaaggtgcaattacaaaagaactcgatgcatgcttagtcaatgcgcaagaaattgatgcagattggcaacaatttgaagatccatatcaatggcaaattagaccggcacgataa

SEQ ID NO: 412366 - DNA, 279 bp, Staphylococcus aureus
atggaaaataatgaaagtaatattactgatgtaactcagaacgaagagcaactagataacagtgatgaacaatcacaacagaatgagaaaacattttctcaagaagaagtatcacaattgattaaagagcgtatagctagagaacgcaaaaaatcagatgaacgtattaaaaatgccaaagaaaacaatgatagcaatgaagtagcttatttattaaaaggtgctaaagttaaaaaagtagatggcaatcaaaatagtgtatcttttgtgccagggtaa

SEQ ID NO: 412367 - DNA, 381 bp, Staphylococcus aureus; identical to SEQ ID NO: 408523

SEQ ID NO: 412368 - DNA, 183 bp, Staphylococcus aureus; identical to SEQ ID NO: 408524

SEQ ID NO: 412369 - DNA, 585 bp, Staphylococcus aureus
atgatccatgaacattgtaattcaaaaccttacatttatcattacatacatcaagatagaaccgtgccactatatgccgtatttgaattattcactttaggaaatctggtatttttcactcgttgcatgtcccaaaatttaaatatagaagctcaaaaacaactaaaattatactccccagcatttgatcaaagtaaagatatactaggtgacatcattgattgtatgaaaggcttaagaaatgctatagctcacaatggtgtactttatgactgtagatttaaaactggagagacaagtaatagattaaaagaatatttagcagtaaaaatggatatacacaatttagatttcgacagaataattgattatctcattttattaattctaatttgttctggtctctcttattctaaagcagaactccaaagaattataaggcaattcgaacaaaaccttgattttttacgatcaaagataagcgagtcgacttatgataaaattataggcgttcgagcaagacctaaattaagaagtttaaagaactttatcaataaccttgatttttatctaaaaacagattaa

SEQ ID NO: 412370 - DNA, 1488 bp, Staphylococcus aureus; identical to SEQ ID NO: 408360

SEQ ID NO: 412371 - DNA, 1233 bp, Staphylococcus aureus
atgagtaatacacaaacgaaaaatgtgccagagttgagattcccagggtttgaaggcgaatgggaagagaagaaggttggcgagttattagaatttaaaaatggtttaaataaaggaaaagaatattttggctcaggatcgtcgattgttaacttcaaagatgtatttaataacaggagcttaaatacaaataatctgactggaaaagttaatgtgaatagcaaagaactaaaaaattattctgttgaaaagggtgatgttttttttacaaggactagtgaggtaattggtgaaataggttatccgtctgtaattttaaatgaccctgaaaatactgtgtttagtggatttgtattaagagggcggcctaaatcaggaattgatttaataaataataattttaaaagatatgtcttttttactaattcatttagaaaagaaatgattacaaaaagttctatgacaactagagctttaacatcaggtagcgcaattaataaaatgaaggtcatataccctgtttcggctaaagaacagagaaaaataggtgacttcttcagcaaactcgaccgacaaattgaattagaagaacaaaagcttgaattacttcaacaacaaaaaaaaggctatatgcagaaaatcttctcacaggaactgcgattcaaagatgagaatagtgaagattatccacattgggaaaatagcaaaatagaaaaatatttaaaagagagaaacgaacgttctgacaaaggtcaaatgctttcagtaactataaatagtggcattataaaatttagtgaattggatagaaaagataattcaagtaaagataaaagtaattataaagtagttaggaaaaatgatattgcatataattctatgagaatgtggcaaggggctagtggtagatcaaattataatgggattgttagccctgcatatactgtgctttatccaacacaaaatactagctcattatttattggatataagtttaaaacacatagaatgattcataaatttaaaattaattcacaaggattaacatcagatacatggaacttaaaatataaacaattaaaaaatataaatatagatatacctgtattggaggaacaagaaaagataggtgatttctttaaaaaaatggatatattgattagtaaacagaaaataaaaattgaaatattagaaaaagagaaacaatcctttttacaaaagatgttcttataa

SEQ ID NO: 412372 - DNA, 1689 bp, Staphylococcus aureus
gtgttagatgtcattgaatcaggcgccaaaaatcaaaatatacaaataattaaatccgttaaagattttgataataaaaaagaattttttgttttcaactcaaaacgaaataattctgactttatacgtaataaaacatcacttttaactccatcagatttattaaacagagagataaaaggaaagtattatattattggtgaacatttcaatgtagaagagcttacgagtgaattaaaaaaagctggtttaacatctgaagttgaatacataaatagaaacatattattttttgaattagtcatagataatgatttattagtgcctttcatattcttaggcgtattatatcttttgtacttcttatatgacagaggatataatttgaaattttatgctattcaaaagctacatggcttttcaactacacgcattatttttcataatattcatataaaaatcatttattggctagtacttaccactattttctttattgctaatatattaatcattcatatagccaatttagaattggatttcttaatgtttattcgtagatttatcgtgttgctttttgtttttgcttgtattactacattgttgtggctgatttcgtatagtcttcttttgaagttaagtattccattaaccttaaaagggaaaaaaggatataagttttcaatatttatgggtaccttcaccaaatgtatcatggtgctaatactatcttttttactggcacaaaatttaaatgcttatacgaagttaaagaatatatatgactctgaaaaaatctggcaaaagttagataattactatacattagagatttctcctaatattagaaattcagaagaaaaacaaattttagaaactaatatatacaatttaattaagaaaagcgaacaacttggtggattgcttttaaagaataataatatagccaatcccgataaaaacaattacattcctgaaaatggcaatgtcttttttatcaataacaattttctgaatttctataaaaatataaatcatgattttaaaatgattgtcaatcattcggataaaataaacgtgtttattcctccaaggttacaatatcaaaaatctgaaattcaaaaaaatcaccaaggatggattgactttcaaaagcaacaaaacaaaaaagtagatgtgcaagtactgtcaaaaaacgtatctgttttttcttttgatcgcacaactaatttgaaatttggatatctagattctccaatagtaatgttgttgacacctgacgatttaacaggagatttttatttagctgctgtttctcaaggtggatatctatttaaagatttagatacacttaaacagttgcttaaagataatcacctagaagaagaaattagcggtataactaattacaaggattctgtgttaaatgaattaaatgaaacgaaaacaaaaatgataataacaatagttactattattattaacgttttcattcttttgatagctactgtatttgaaacaattcaatattttagctggaataaaaagcaactattattaagaaaaattcatggttattcattattcagcagtaatgtacgttatttaacaatttctattttactttctattatgttagcttacacctgtctcttatacacatctccgagcccacgagaccgaggctga

SEQ ID NO: 412373 - DNA, 360 bp, Staphylococcus aureus
atgttccattttcactggatattttgtatctttactttgtgcataccctttactatcttcccacaattctctaacaataaaattacctttcgttgttctagtattacgatttatatagagcaccatacttctagattccatttttttatccttcagctcaactaccatctcagaatcaacaatccaagtgcctttatctcctttatcaaactcttcgtcacgaaatccttccttatcataaaagtcttcaagatttttagttggatacaggctcaacgttttgttgaagttttctttaatttgtttatctttactactttcttcttttttcattccgcaagcccctataaaaacagatag

SEQ ID NO: 412374 - DNA, 645 bp, Staphylococcus aureus
atggatttaaaaaaacgaactcaattaatacaatgggctcaagaaaaagaagaacgatttattatagaagatgattatgattccgagtttagatatttcggtaaacctattccagcaattcaaggtctatattcaagaggagaaaaagtgatttatatcagtacattttcaaagtctatttttcctagctgtcgtgttgcatatatggtgttaccctattctataatgaaaaaatatcattctcaaaatcacattgaaggcaacactgtacctgttcatatgcaaaaccttattgcaacgtttatatcttccggtggttttgaaaggcatttaaataaaatgagacgaatttatcgtagaaaactaacctatattttaaaaagattaaaaccatacaaagagcaacttgatattcaaggtgctgaaacaggtatgcattttacaattacagtaaaaaatggattaacattacaagagtgtcttgatagagcaaataaagtaaagttaaaattacaagtttataattttgatgatgaccaagactataagaaaacccctaaatttatattaggctttggcggtatagacgatgatgctttaaaaccgcatgtagacgctctaataaaatcattaattataaagtaa

SEQ ID NO: 412375 - DNA, 354 bp, Staphylococcus aureus
gtgcttacgaatgcggcagtcggtgacgaaacagaaacgaaagaagttgtggtcaagcgtggggaatataaagagaatccacaaagtggcaaagtacagttagtctataatgaacatgttgaactgatagaggtgccaattaagccaagtgatcgtttaaaagctcgtgatatgttgggtaaataccataagttatttacagataagcatgatatcaacggggatgttcctatattcattaacattggtgaatgggacggagacgatgaggaattagataaaactgtaaaagatgtatctaacgctaatcctaaccatactgtgattgtggatgatataccgttagaggattga

SEQ ID NO: 412376 - DNA, 252 bp, Staphylococcus aureus
atgtatcaatatttagttcctagtgatttaggattgaaaaattcacaagttgttcagtttccaataagtaatatttctagtaagaaaatcttgcacaataaatttaaatcaatagttaacactgaagaaattgatgaaaatatttctttttataaacttgtgaacaagttttcacctgaagtagcacctgaagatacagtggatttacttcagataataaaaaggaggagtaaagatggaaattttaaatga

SEQ ID NO: 412377 - DNA, 357 bp, Staphylococcus aureus
atgaaattaggtatgctattaattagatggatgctagcaacatcattcttagtacacggcacattgaaatttgtagatttagatggaacaattcacttcttagggtctttaggtttaccacctaccatcgcagtattgatgtcaattggtgaggttgttggaggtttagcacttattatcggctttttaacgccttatgttaatgttttttatatttgtgttatgttaggctcaatcttcacacttaaacttacaagaggatatgtaagtggttatgaatttgaaatcatacacatcgtaatgaacttagcttgtattagtagttacagctggaagaaatggctacaattttattaa

SEQ ID NO: 412378 - DNA, 327 bp, Staphylococcus aureus
gtgaaaagtatcaaaaaagatattgataaagtgtacaaagaacagaatcaaatgaataaaattgcctcgaaagtacaaaacactattaaaacagacattaaacaagaagacagtaatacacatgtctataaaaatggtaaagtcattgttattggtattcaattgtataaagatcgtgaaaaaatgtattatttcgcatatgaaataaaagatggtaaggcagagattaatagagaaatagacccaattaagtatatgaaagaccataaagcagattatgaagatgaaaatgtagaagtggaaaaaaataacgtatgctttctttaa

SEQ ID NO: 412379 - DNA, 369 bp, Staphylococcus aureus
atgaaaaataataaaagtgctttgctaataatcgatgatgttgaaagaatgagtgacaaagtaagttttgaagaatttttgggatttattagaaatgatttaattgattatttagactgtaaagtgctatttataggaaatttagatgagctaaataaaaaagcggattttcataagaatagtgagaaaataatttctagaatattaaagtttcctaataatagagaagtagcaatggatatagtaaaaagtaatttacctaagttatttgtaaagaacatctctactaaagagctatttaatggtttttttgatataagtgatgaaaaaaagaaattattttcgaaaaatctaaacaaaataatttaa

SEQ ID NO: 412380 - DNA, 162 bp, Staphylococcus aureus
atggaaaatggctatagtagtgctgcaacagtcattagtggtctcaaaggtccattgagtacactcggtggtggcgtcatgaattcagcacaaaagttctttgaagcagatgaacattggggtacggaatttgccaagctttactataatattgagggatag

SEQ ID NO: 412381 - DNA, 378 bp, Staphylococcus aureus; identical to SEQ ID NO: 408858

SEQ ID NO: 412382 - DNA, 318 bp, Staphylococcus aureus
atgcgcaaaaaaactgtaggtggagaggatagattaccagacgatgatggaggtcatttaattgctagaatgtttggtggttcaaaagacatagataaccttgtagcacaaagtaaatttatcaaccgtccatttaaggaaaatggtgaatggtatgatattgaaaaagaatggaaaaatgctattaattttggaaaggaagtaaaaaatattaaaattgaagtgaaatataatggtaatagtcaacggccaactatatttaaggttggatatgagattaataatgaacgaaaagttaaaacaatagaaaacatatag

SEQ ID NO: 412383 - DNA, 1542 bp, Staphylococcus aureus
atgattacccaatcattaaagacagttatcaatttttcaaatgaaaatttttttcaagattacttaaataaaaataatatgtctttaaaaaaaacagaaattgaagatataaaaaaatttgtggcattattaaatggaaaattagaaaaaaatagtaacttatttagggggtatatccttggatattcttttcaagatttaacaggagaatttgatttattaagatttactgaaacacatattattaacattgaacttaaatcacgcgataccactgaaaaagaaatagaagatcaattaaaaagaaataagttttatttaggaagtactaattacacacttttacagtatgggtttttatcatcagaaaataaattatataaattaaatgaagaggacttattgcgagaaataaatgtagaagaatttatcagtgaatgttcgaacttaaaaaataaattatttataaatgtagaagagttatttagaccctgtctagttaaaataaagaaatgtttaacccaatttttgaataatgatgactcaattgttaaattaacaggtgtgcctggttgcggaaaaagtttgattctttatgatttttacaaagagtgcttaaaaattgataagaaagttgccttaatgcattgtggtgctgagttgaatgacggacagctagatttaataaaaggtcatgattggaatatatatcccccaaaggcaaacgaagagtttatatctttagatgctgacatctatatgattgatgaagctcaacgtaagtatcctcatcagttagagaaaatttattcttatattaaagaaaatgataaaaagttaattatttcttatgatcctgaacaaacattggtgaaaagagaaactaaatggaatatttctaaaactatagcagaagattacgaaggtaaaacattaaatctagaatccaggatacgtaataacaaagaaattagtagttttattaggttattattaaataaaaatcaatctaactatattcgggattttaaaaatattgaaatagtatatgcgaatgatattagtgaatcaaaaactattttaaaatttttagataatacatataccgttattgattacaccgctcctaattttaatagaaaaggctataatgaaatatctaacatgagatacggaaatactatattgaattctcataacgtcataggtcaagaatttgataatgtgtgtttaatcttaggtaatgaatttttttatgataatgatgggttcttaagagcgaatgatgttaatgatcaacttgatcttatgaaattactttatcaaaatgtgactagaacaaaacataaacttgttttagtagttaataggaataaagagttatatattgaccttttaactatactaaaacccagaattcagaagtcaataaaattaaaagaaattgaaaatataggttacaatacaataccaaattcaaaaggtgtgttttatatatttaagcataataacaatattttaaaaaaacgaaaatactggtga

SEQ ID NO: 412384 - DNA, 261 bp, Staphylococcus aureus
ttgagaaaggcaattaaaagtttaataaccaatattataaccaaaaaattaaaaaaatttgaagatattgaaatcgctgatttacttaatctaaaagtatcgtggattgatagcaaaaataaggaacaaatattttcttatattgttgagcaacatatagaaaagtacggagaaattccttttttaaatatacctttaaaattaaaaggttattcagataatattattagaaattatagctatattgttgaatatgattaa

SEQ ID NO: 412385 - DNA, 1080 bp, Staphylococcus aureus
gtggatagcttttcctatgtaagtgatattgcccaaagacttaaagagttctttaattttctggacatgaaatttaaacaagttcagagagtacaccaattaacgagagtggaaattgaagcatatttaagtgaactaaacatgatgggaataaaacctagtacaataactgggaggatctctatattggaaggactatttagtacccttcttaggctagaatgggatgatgttccttccaaaatattaatttattctgaggactatccgaaaataccaagagcaaaaccacgctttatagatgaattcgtcctagagcaattgaacagtcatcttgataaattacccgaatatatagctacgatgactatgattgttcaagaatgtggaatgaggataagtgaattgtgcaccttgaaaaaaggctgtctattagaggacaaagatggagatttctttttaaagtattatcaatggaaaatgaaaaaggagcatatagttccaatatctaaagaggtagctttacttattaaagttcgggaagataaagtttcagaggaatttccagatagtgaatacctctttccaagaaaagatggatcgccattaaaacaagaaacatttagaggtgagttaaataaattagcttatgagcaaaatatagtggataaatcaggtgagatttatagattccatgcccatgcctttcgccatacagtaggaacaagaatgattaacaacgggatgccccagcatattgtgcagaaatttttggggcatgaaagcccagaaatgacaagcagatacgctcatatctttgatgaaactctaaaaaatgaatttactaaatttcaggaaaaactggttaccaataatggagatgtgcttgatctagatgaagataatgaagtcgatgatgtagagcttcaatggttcaagaaaaatataaatgcacaagtgcttccaaatggttattgtagattgccagtagtagcaggtggttgtccacatgcgaatgcatgcttagattgcactcacttctgtaccagtaagcaatttggtatgtcaacaattttttag

SEQ ID NO: 412386 - DNA, 927 bp, Staphylococcus aureus
gtgaaaattttatatgatgacgttggttcaaagaaagttaagatggctaattttgatcattttaaatcgttaggtggagaagttgaagcattttttgcttctaaattaccgttattgaatttcagaatgaataatagaaatcatagaaaaatcatcgtaatcgatggtcaactaggttatgtcggaggatttaacattggtgatgaatatctaggtttaggaaaattagggtattggagagatacgcatttacgtatacaaggggatgcggttgatgcactgcagttgcgatttattttagactggaattcgcaagcacatcgacctcaatttgaatatgatgaaaaatattttcctaaaaagaataaatcattcggtaatgcgccaatccagattgctgcaagtggtcccgccagtgactggcatcaaattgaatatggttatacaaaaatgattatgagcgctaagaagtcggtatatttgcaatcgccttatttcattccggataactcatatgtaaatgccattaaaattgcagctaaatcaggggtagatgttcatctaatgattccatgtaagccagatcatcctttagtttattgggcgacattttcaaatgcttctgacttattatccagtggtgttaaaatttatacgtatgaaaatggatttattcattctaaaatgtgtttaattgatgatgaaatcgtatcagtgggcacagcaaatatggactttagaagttttgaattaaattttgaggtaaatgcctttgtatatgatgaaaatcttgctaaagatttaagagcggcttatgaacatgatattacaaaatcaaaacaacttactgaagaatcttatgctaatagaccattgtctgttaagtttaaagaatcgttagctaaattagtttcgccaattttataa

SEQ ID NO: 412387 - DNA, 150 bp, Staphylococcus aureus; identical to SEQ ID NO: 409943

SEQ ID NO: 412388 - DNA, 180 bp, Staphylococcus aureus
atgttaagttatggtggattgcttaaacaaaagcataaaattttaaacttagacgatgccgaagatggtaatttgattaatacaagtgatgaagataaaacgacagacgaagaagcaaaagcacattcaattacggcaatttggaatttcgaaaagcaaaattattatttaagacattag

SEQ ID NO: 412389 - DNA, 150 bp, Staphylococcus aureus; identical to SEQ ID NO: 409943

SEQ ID NO: 412390 - DNA, 150 bp, Staphylococcus aureus; identical to SEQ ID NO: 409943

SEQ ID NO: 412391 - DNA, 180 bp, Staphylococcus aureus; identical to SEQ ID NO: 412388

SEQ ID NO: 412392 - DNA, 150 bp, Staphylococcus aureus; identical to SEQ ID NO: 409943

SEQ ID NO: 412393 - DNA, 150 bp, Staphylococcus aureus; identical to SEQ ID NO: 409943

SEQ ID NO: 412394 - DNA, 213 bp, Staphylococcus aureus
atgaaagaaaagtttgatttagtaaaactattaaatattctaaagaagaatattaaattattgcttattttaccggcaatatgtcttgtagtaagtgcggcattaaccttttttgttatgcctgacaaatatactgcttctactcaaatattagtgaacatgaaaaagtcctcaagtgatttagctttccaaaatgttcaaagtagtttgtag

SEQ ID NO: 412395 - DNA, 477 bp, Staphylococcus aureus
atggcagttgtttatgtagcaggaggatgtttatggggtgttgaagcattttttgcaacaatacctggaattatacatacagaagcaggaagagcaaatggaagaagttctaaattagacggtccgtatgatggttatgctgaatgtgtcaaacttcatttcgatgatcgtatgttaacaattacagacattatgaattatttatttgaaatcattgatccttacagtgtgaatcaacaaggaaatgatattggacaaaagtatcgaacgggtttatatagttgtgtagatgaccacttaattgaagcgcgtcagttcattgaacgacgtaaagacagagatcaaattgcagtggaagtcttaccgctgtctaactacattaaaagtgctgaagaacatcagcaacatttagaaaaatatccagaagatatgcatatgtgtcatatttcaaaagatttgctaaataaatacaagtga

SEQ ID NO: 412396 - DNA, 174 bp, Staphylococcus aureus
gtgagagaacgcactaaagttatatatcgtggttggaataaggagatatttattttacagggtaaaaatatgaatgttattggtttgcgccaaatatttgatgaactcaaaagatcgtatgaaggttataaaatcgttgttattccaatagaagttgattttgaaatcaaataa

SEQ ID NO: 412397 - DNA, 165 bp, Staphylococcus aureus
atgaatgctgaaaagcatatgcaaatgatgcaaatgttacaaaattgtgtgattgataagtatgtatcacacgacgaatacgaagagttaattgccatagataagcatggtaataaaatgtttattaaattttatccgaatacggaggatgacacaaatggataa

SEQ ID NO: 412398 - DNA, 1128 bp, Staphylococcus aureus
atgaaatggttatcacgaatattaacagtaatagtgaccatgtctatggcgtgtggtgcattgatatttaatcgtagacatcagctaaaggcgaaaacgctgaacttcaatcataaagcattaacaattattattccggctagaaacgaagaaaaaagaataggtcatttactacattcgataatacaacagcaagttccagtagatgtcattgttatgaatgacggatcgacagatgaaacagcacgtgtagcacgttcatatggtgcgactgtagtagatgttgttgatgatactgacggcaaatggtatgggaaatcacatgcttgttatcaaggtgtgacgcatgcatgtacgaatcgtattgcctttgtagatgctgatgtaactttcttaaggaaagatgctgttgaaacgttgattaatcagtatcaattacaaggtgaaaaaggattgttaagcgtacagccttatcatataacaaagcgtttctacgaagggttttcagcgatatttaatttaatgacagtcgttggtatgaatgtattttctaccttagacgacggtcggactaaccagcatgcatttggaccggtgacattaacaaataaagaagattattatgcaactggaggtcataaaagtgcaaaccgtcatattattgaaggatttgctttaggaagtgcatatacttcacaatcattgcccgtaacagtttatgaagggtttccatttgttgcatttcgcatgtatcaagaaggatttcagtcattacaagaaggatggacaaagcatttgtcaactggggcaggtggcacaaagcctaagatcatgacagcaattgtgttgtggttgtttggttctatagcgagtattttagggctatgtcttagtttaaaatatcgccaaatgtctgtaagaaaaatggtagcactttacttgagctatactacacaatttatttatctgcatcgaagggtcggccaattttctaatttattaatggtatgtcatccattgttatttatgttttttactaaaattttcatccaatcttggaaacaaacgcatcggtatggtgtagttgaatggaaaggtcgtcaatattctatatctaaagaacaataa

SEQ ID NO: 412399 - DNA, 1257 bp, Staphylococcus aureus
atgatagacaactttaaacaggtccttaaattaattaaagagaaacgtaccaataatgtagttaaaaaatctgattgggataaaggtgatcaatataaaactttagtccatgataagttacccaagcagttaaaagcgcatataaaagaagataaatattcagttgtagggaaggttgctactgggaactatagtaaagttccttggatttcaatatatgatgagaatataacaaaagaatcaaaggatggatattatttggtatatctttttcatccagaaggagaaggcatatacttatctttgaatcaaggatggtcaaagataagtaatatgtttccgcgggataaaaatgctgcaaaacaaagagcattaactttatcttccgaactcaataaatatattacatcaaatgaatttaatactggaagattttattacgcagaaaataaagattcatcttatgatttaaaaaatgattacccatcaggatattctcatggatcaataagaatcaaatattatgatttgaatgaagggttcacagaagaagaaatgctatatgatttaaagaaatttttagaactatttaatgaattagcttcaaaagttacaaaaacattctatgatggcttagtcaatagaatagacgaaatacaggaagatagtgaaattgaagaaattagaatagcacaaatagataagacactcaagcaagtggaagcacctaaaggagtaattccaaaatataaaaaaggtgtatcaaagactactaaaaatgattcagaaattgaaaaatcaaataaagagaataaattaaccggtaaagttggagaaaaattagcgctaaaatactttaatgatctaattgataataaaatagacgaagataagaaagaacagtttaggaatattttaaatgataatccaggctctcaacacggtcatggctatgatttagtagcttttgatccaacaaatacagatgaagctatagaaaaatttattgaaattaaaacatctatatcttctaatattgaggaaccattttttatgtcgctaaatgaaatgtttgctttgaaagagtataagaagaaatatttaatattaagaatatttaatgtttctggtgaagaaccacaattttattttatagatccgtatgcaaattattctgaatttaaagatgtagatgatctcattgataaagtatttaatgtagaagctattcaatataaagtttttggcgaaaaatga

SEQ ID NO: 412400 - DNA, 630 bp, Staphylococcus aureus
atgtgtaaagtcctaaaaataccaagaagtacctattatgattctataaaaagaaaagataataaaatcactaaagatgattcaaacgtagaacgtgctgtcataaatatttttaattctaatagaaaagtctttggtgcaagacgaaagatagctcgtatcatgaaaaaacataatctagtttctgtttatacgaaagctaaatacaaaaattatccaaaagaaactaatgaaaaacgaattaaaaatcatttgaatcgcgcttttaatagagaacaaccaatggagacattagtaagtgatttgacatatgtaaaagtcgcaggaacatggcattacatatgtttatttatagatctatttaatagagaaattgttggttacagtgcaggtaaaaataaggacgcaaatttagtatcaaaagcaatcagcagaataaatcataatcttgaacaaatcaacctgttccataccgatagaggcaaagactttgataatcatttgatagatgaagtcctagaatcctttaaaatcaaatgttcattaagtaccaaaagttgtccttatgataacgcagttgcggaagcaacgatgaaagcaatgagatctgaatttgtaaaacaaatgtaa

SEQ ID NO: 412401 - DNA, 402 bp, Staphylococcus aureus
atggcgaaaataaattttgatgctgcgacgaaaggaaatccaggcataagtacatgtgccattgtaatcaaagaagatgagcagcattatacatatacacatgagttaggcgaaatggataaccacactgcagaatgggctgcatgtatttatgcactagaacatgcacgtgaattaaatgttcaaaacgcactattatatacagactcaaagataattgcagatagcattgaagctggttatgtgaaaaacgcaaatttcaaaccttattttgatcaaatagaaatatttgaaaaagattttgatttattatttgttaaatggataccgagagaacaaaacaaagaagcgaatcaacacgctcaacaggcattgtataaattaattaaaaagaataaataa

SEQ ID NO: 412402 - DNA, 1392 bp, Staphylococcus aureus
atggaaaagccgtcaagagaggcatttgaaggcaataataagttgttaataggaattgttttaagtgtaataacgttttggctatttgcacaatcattggttaatgttgtaccaatacttgaagatagtttcaatacagatattggaacggttaatatcgccgttagtataactgctttattttcaggaatgtttgtagtaggagcaggtggtcttgctgataaatatggcagaattaaactcacgaacattggtattatcttaaatatattgggttcattattaatcattatttcaaatattcctttattacttattataggaagattaattcaaggactttcagcagcatgtattatgcctgcaactttgtctattattaagtcatattacattgggaaagatagacaacgcgctttaagttattggtcaattggctcatggggcggctctggtgtttgttcattttttggaggtgcagttgcaacgcttttaggttggcgttggattttcatcctatcaattataatttcattaattgcgctttttcttattaaaggcacacctgaaactaaatctaaatcgatttctctaaataaatttgacattaaaggtctggttcttttagtcattatgcttctcagtttaaatattttaattactaaaggatcagaattaggtgttagctcacttctttttatcactttattagcaattgcaattggatcttttagtttatttatagttcttgaaaagcgtgctacaaatcctttaatcgattttaaattatttaaaaataaagcttacacaggtgcaacagcttcaaactttttgttaaatggtgttgcaggaacattaatagtagccaacacatttgttcaaagaggtttaggatattcttcattgcaagcaggaagtttatcaatcacttatttagtaatggtactaattatgattcgtgttggtgaaaagttacttcaaacactcggatgcaagaaaccaatgttaattggaacaggagttcttattgtcggagaatgtctcatttcattaactttcttgccagaaatattgtatgtcatttgttgtattataggttatttattctttggtttaggactagggatatatgctacaccatcaacagatacagcaattgcaaatgcaccgttagaaaaagtaggcgttgctgcaggtatctataaaatggcttctgcattaggtggagcatttggcgtcgcattgagtggtgcagtatatgcaatcgtatcaaatatgacaaacatttatacaggtgcaatgattgcattatggttaaatgcaggtatgggaatattatcattcgttatcattttgttacttgtgcctaaacaaaacgacactcaattatga

SEQ ID NO: 412403 - DNA, 1323 bp, Staphylococcus aureus
atgtcaaatggtaaagaattacaaaaaaatataggtttcttctcagcgtttgctattgttatggggacagttattggttcaggagtattctttaaaatatcaaacgtaacagaagtaacaggaacagcaggaatggccttgtttgtatggttcctaggcggcatcattaccatttgtgcggggttaacagcagcagaacttgctgctgcaatccctgaaacaggtggcttaacgaagtatatagaatatacatacggtgatttctggggcttcctatcaggttgggcgcaatcatttatttattttccagctaacgtagcagcattgtctatcgtatttgcgacacagctaattaatttattccatttatctataggttcgttaataccaatagcaatcgcatctgcgttatctattgtgttgataaatttcctaggttcaaaagcaggcggaattttacaatcagttactttagtaattaaactgattccaatcatcgttattgtaatttttggtatttttcaatctggagatatcactttttcattaattccaactacaggtaattcaggaaatggtttctttacagcaattggtagtggtttattagcaactatgtttgcatatgatggttggattcatgtaggaaatgttgcgggggaacttaaaaatcctaaacgcgatttacctttagcgatttcagttggtatcggttgtattatggctgtgtatttattaattaacgctacattcttattaacgttgccaatagaactacttgctggtaatttaaatgcggcttcagatacatcaaaaatattatttggtgaaaatggcggtaagattattacaatcggtatattaatttctgtttatggtacgatcaatggctatactatgactggtatgcgcgtaccatatgcaatggctgaaagaaaattattgccatttagccacttattcgcaaaattaacaaaatctggcgcaccatggtttggcgcaattatacaacttataatcgctatcatcatgatgtcaatgggagcatttgatacaattacaaacatgctaatctttgttatttggttgttctattgtatgtcatttgttgcggtaataattttaaggaaacgcgaaccaaatatggagcgaccatataaagtaccgttatatccaatcatacctttaattgcaattttggcagggtcatttgtattaattaatacactgtttacacaatttatactagcaatcattggaattctaataacagcacttggtataccagtttattattataagaagaaacaaaaagcagcataa

SEQ ID NO: 412404 - DNA, 1491 bp, Staphylococcus aureus
atgcaagatacaattcaaatagacaataaaaccattgaatggttagttgtacaaagagggtttgagataccctcttttaattttgttactgaaaaagaaagtgtgaaaggtagaacaggttctattgctaaagctcgttatctaaatgatatcgaatttgaattacctctaataattagaaatgaagtcttggcgccaggtggacaaaaaacgcatgacgatatattggaagagttagttgaattttttgatattgacaatttaaagccgaaaaaacttaaattcaaatctcaaaactggtattggtttgcatactttgatggaccattaaaattaccgaaaaacccaagaggttcagtgaagttcactatcaaagtagtactaacagacccttacaaatattcagtaacaggaaataaaaatactgcgatttcagaccaagtttcagttgtaaatagtgggactgctgacactcctttaattgttgaagcccgagcaattaaaccatctagttactttatgatcactaaaaatgatgaagattattttatggttggtgatgatgaggtaaccaaagaagttaaggattacatgcctcctgtttatcatagtgagtttcgtgatttcaaaggttggactaagatgattactgaagatattccaagtaatgatttaggtggtaaggtcggcggtgactttgtgatatccaatcttggcgaaggatataaagcaactaattttcctgatgcaaaaggttgggttggtgctggcacgaaacgagggctccctaaagcgatgacagattttcaaattacctataaatgtattgttgaacaaaaaggtaaaggtgccggaagaacagcacaacatatttatgatagtgatggtaagttacttgcttctattggttatgaaaataaatatcatgatagaaaaataggacatattgttgttacgttgtataaccaaaaaggagaccccaaaaagatatacgactatcagaataaaccgataatgtataacttggacagaatcgttgtttatatgcggctcagaagagtaggtaataaattttctattaaaacttggaaatttgatcacattaaagacccagatagacgtaaacctattgatatggatgagaaagagtggatagatggcggtaagttttatcagcgtccagcttctatcatagctatctatagtgcgaagtataacggttataagtggatggagatgaatggattaggttcattcaatacggagattctaccgaaaccgaaaggcgcaagggatgtcattatacaaaaaggtgatttagtgaaaatagatatgcaagcaaaaagtgttgtcatcaatgaggaaccaatgttgagcgagaaatcgtttggaagtaattatttcaatgttgattctgggtacagtgaattaatcatacaacctgaaaacgtctttgatacgacggttaaatggcaagatagatatttatag

SEQ ID NO: 412405 - DNA, 1278 bp, Staphylococcus aureus
atgaaggaaaaacgaactaacgtaaggtggatgttcgcgcttgcgttcttctttattggggttattgcgtatatggatagagcaaacatttcatatatcgctaaacaaatgatggatgatttagggatgaccaaaccacaatttggcttattggcatcattcttctctctaggttatgcattaatgcaagtaccatcggggatgttggctgaaaaattcggtccacgtaagatgattacaattgcattagtttggtggagtgcatttacaatcttaacgggtatgattaagaaccacggtttaatttatttagtgagattcttatttggtgtaggtgaggcgccaatgtacccttctaatgctgtgtttaactcattttggttctctaaaaatgaaaaaggtagagcatcaagtgcattattagcaggatcatatttcggacctgtattagcaccaatagttacaattgctattgttaacgcatttaactggcaagcagtattttacatttttggtgcagtaggtattttaatggctgtattatgggcgattattgccaaagacttacctgagcaacatagaatggttaatgaagcggagaaacgtttcattatggaaaatcgtgatatcgtagctactgaaaagtcatcaccaccatggaatgatttctttaaacgttttagcttctatgcaattgcaattcaatactttgttgtacaatttatcattacattattcttaatttggttaccgacgtatttaacagaagtattccacgttaactttaaagaaatgagcattagttcattaccttggttattaatgttcttcttaatcttatcagcaggtgcaatttctgaccgtgtattaggattaggtcgttcaaaattcgtagctagaggtgtaattgcaatcgcaggatttattgtgtttgcagtttcaattatctttgctgtacgtacaggaaatttatatgtaagtattttctggttatcactaggtcttggtggtatcggtatttcaatgggtatgagttgggctgcagcaactgacttaggacgtaacttctctggtacagtatcagggtggatgaacttatggggtaatataggtgcattaatcagtccgctattagcaggtctattcgtagaacatttaggttggacaatgacattccaattgttaatcgttccagcagtaatcgctgtgattatgtggttctatgtgaaaccagatcaacctttaattgttagtgatgataaagcaatagaaaaataa

SEQ ID NO: 412406 - DNA, 486 bp, Staphylococcus aureus
atgaagaaattttctaaaattattctagctagtggtattgttttgggtttctctgtaacgcccgaactatttaatgcaacgcaagcacaagcgcaagagtctattgaaccgtattataattatgatggttatactgcgtatcaaagtggatttatattagacaaaaatttcaaagagtcattgaaatacgataattttactatcaacggttatcaaatatcaaagaacccaaccggtgacaatcgaataaatttatacgatcaaacactttatggtgtatctgagaataaagctaatggtgttttcttctctctcgatggaaaatctattaataaaaatactttaattcaaaattatggccaaccaaattcttactctcctacttcagcatggggtgaagaatatatgtacaaaattggtaataaagatgtcagattttatatttacaatggctatgtgattaaatgtcaaattataagtgaataa

SEQ ID NO: 412407 - DNA, 675 bp, Staphylococcus aureus
atgaactatttcagatataaacaatttaacaaggatgttatcactgtagccgttggctactatctaagatatgcattgagttatcgtgatatatctgaaatattaagggaacgtggtgtaaacgttcatcattcaacggtctaccgttgggttcaagaatatgccccaattttatatcaaatttggaagaaaaagcataaaaaagcttattacaaatggcgtattgatgagacgtacatcaaaataaaaggaaaatggagctatttatatcgtgccattgatacagagggacatacattagatatttggttgcgtaagcaacgagataatcattcagcatatgcgtttatcaaacgtctcattaaacaatttggtaaacctcaaaaggtagttacagatcaggcaccttcaacgaaggtagcaatggctaaaataattaaagcttttaaacttaaacctgactgtcattgtacatcgaaatatctgaataacctcattgagcaagatcaccgtcatattaaagtaagaaagacaagatatcaaagtatcaatacggcaaagaatactttaaaaggtattgaatgtatttacgctctatataaaaagaaccgtagatctcttcagatctatggattttccccatgccacgaaattagcatcatgctagcaagttaa

SEQ ID NO: 412408 - DNA, 1464 bp, Staphylococcus aureus
atgggtgaatttaaaggatttatgaagtatgacaaacagtacttaggtgaattatcactggtagaccgtttgaagcatcataaagcatatcaacaacgatttactaaagaagatgcctctatccaaggtgcacgatgtatggattgtggaacgccgttttgtcaaaccggacaacagtatggtagggaaacaataggttgtccaattggaaactacattcctgaatggaacgacttagtgtatcatcaagattttaaaactgcttatgaacgcttaagcgaaacaaataactttcctgactttacagggcgtgtatgtcctgcaccatgcgaaagtgcttgtgtgatgaagattaatagagaatcgattgcgattaaaggtattgaacgcacaattattgatgaagcttttgaaaatggttgggtagcgccgaaagttccgagtcgccgtagagatgaaaaagtggcaatcgttggaagcggtccagcaggattagctgctgctgaagaacttaatctactaggatatcaagtaactatttatgaacgtgctagagaatcaggcggtttattaatgtatggtattccgaatatgaaacttgataaagatgtggttcgacgtcgtattaagttaatggaagaagcgggcattactttcattaatggtgttgaagtaggcgttgatattgataaagcaacgttagaatctgagtatgatgccattatattatgtactggtgcacaaaaaggtagagatttacctttagaaggacgcatgggtgatggtatacatttcgctatggattatttaactgaacaaacgcagttgttaaatggagaaattgatgatataacaataactgcaaaagataagaatgtcattatcattggtgctggtgatacaggggcagactgtgtagcgacagcattaagagaaaattgtaaatcgattgttcaatttaataaatatacgaaattgccagaagcaattacatttacagaaaatgcatcatggcctttagcaatgccggtgtttaaaatggactatgcgcaccaagagtacgaagctaagtttggtaaggaaccacgtgcatatggtgttcaaacaatgcgttacgatgttgacgataaaggacacatacgtggtttgtatactcaaattttagagcaaggcgaaaatggtatggtcatgaaagaaggacctgaaagattttggcctgctgaccttgtattattatcaatcggcttcgaaggtacagaaccaacagtaccgaatgcttttaacattaaaacggatagaaatcgaatcgtggcggatgatacaaactatcaaactaataatgaaaaggtatttgctgctggagatgctagacgtggtcaaagtttagttgtatgggcgattaaagaaggtagaggcgtagcgaaagcagtagatcagtatttagcgagtaaagtttgtgtataa

SEQ ID NO: 412409 - DNA, 1827 bp, Staphylococcus aureus; identical to SEQ ID NO: 409921

SEQ ID NO: 412410 - DNA, 2631 bp, Staphylococcus aureus
atgatagaaacacctcaattaaatacaacggctaatgatacatctgatattagtgcaaacacaaacagtgcgaatgtagatagcacagcaaaaccaatgtctacacaaacgagcaataccactacaacagagccagcttcaacaaatgaaacacctcaactgacggcaattaaagatcaagcaactgctgcaaaaatgcaagatcaaactgttcctcaagaagcaaattctcaagtagataataaaacaacgaatgatgctaatagcatagcgacaaacagtgagcttaaaaatcctcaaacattagatttaccacaatcatcaccacaaacaatttccaatgcgcaaggaactagtaaaccaagtgttagaacgagagctgtacgtagtcttgcagttgctgaacctgtagtaaatgctgctgatgctaaaggtacaaatgtaaatgataaagttacggcaaaagattttcaattagaaaagactacatttgaccctaaccaaagtggtaatacttttatggcggcaaactttacagtgactggacaagtgaaatcaggggattattttacagcgaagttaccagatagtgtaactggtaatggagacgtggattactctaattcgaataatacgatgccaattgcagatatagtaaacgataaaaatgaagttgtagcaaaagcgacatatgatattttgactaagacatatacatttgtctttacagattatgtaaatgataagcaaaatattaatgggaaattttcattaccactatttacagacagagcaaaggcacctaaatcaggaacatatgatgcaaatattaatattgcggatgaaatgtttaataataaaattacttataactatagttcgccaattgcaggaattgataagccaaatggcgcgaacatttcttctcaaattattggtgtagatacagcttcaggtcaaaatacatacaagcaaacggtatttgttaaccctaagcaacgagttttaggtaatacgtgggtgtatattaaaggttaccaagataaaatcgaagaaagtagcggtaaagtaagtgctacagatacaaaactgagaatttttgaagtgaatgatacatctaaattatcagatagctactatgcagacccaaatgactctaatcttaaagaagtaactgatcaatttaaggataaaatcacttataaataccaaaatgtagcaagtattaattttggtgatataaataaaacgtatgtcgttttagtcgaaggtcattatgataaaacaggtaaaaacttgaaaacgcaagtcattcaagaaaatgttgacccagcgacaggtaaagactacagtattttcggttggaataatgagaatgttgtacgttatggtggtggaagtgctgatggtgattcagcagtaaatccgaaagacccaactccagggccaccggttgacccagaaccaagtccagacccagaaccggaaccaagtccagacccggatccggaaccaacgccagatccagaaccaagcccagacccggatccggattcggattcagacagcgactcaggttcagatagcgattcggattcagacagcgattcagactcagacagcgactcaggttcagatagcgattcggattcagacagcgactcagaatcagacagtgagtcagattcagatagcgattcagaatcagatagcgactcagattcagatagtgagtcagattcagacagtgactcggactcagatagcgattcagactcagacagcgattcagactcagacagcgactcagattcagatagcgactcagactcagacagcgattcagaatcagatagcgactcagattcagatagtgagtcagattcagatagtgactcggactcagatagcgattcagactcagacagcgattcagactcagacagcgactcagactcagatagcgactcagattcagatagtgagtcagattcagacagtgactcagactcagatagcgattcagactcagacagcgattcagattcagacagcgattcagactcagacagcgactcagactcagacagcgactcagaatcagatagcgattcagactcagacagcgattcagattcagatagcgactcagactcagacagcgattcagattcagatagcgactcagactcagacagcgactcagaatcagatagcgattcagactcagacagcgattcagattcagatagcgactcagactcagacagcgattcagattcagatagcgactcagactcagacagcgactcagaatcagatagcgattcagactcagacagcgattcagattcagacagcgactcagactcggatagcgactcggattcagatagtgactccgattcaagagttacaccaccaaataatgaacagaaagcaccatcaaatcctaaaggtgaagtaaaccattctaataaggtatcaaaacaacacaaaactgatgctttaccagaaacaggagataagagcgaaaacacaaatgcaactttatttggtgcaatgatggcattattaggatcattactattgtttagaaaacgcaagcaagatcataaagaaaaagcgtaa

SEQ ID NO: 412411 - DNA, 1263 bp, Staphylococcus aureus; identical to SEQ ID NO: 406906

SEQ ID NO: 412412 - DNA, 636 bp, Staphylococcus aureus; identical to SEQ ID NO: 406899

SEQ ID NO: 412413 - DNA, 522 bp, Staphylococcus aureus
atgaaaaggaaagtattagtactaacaatgggtgtaatttgtgcaactcaattatggcattctaatcacgcaaacgcattagtatcagagagtgttgaaactaattttgttgtaaaagattcggataataaaaatattttacaaacccatactgaaattactactgaggagaaattttcagtagtagaaaagagtcaattaaatacactaaaatcactatctaatgacaactacatagaatatgatttacatactaatcaaacaggcataaaaaaaggttggttatatggttatagtgaaattgactcatcacatttcacagaccgtgacaaacgcgttattagacgtgatcatgttaaagaagcacaaagcttaattaatgattataaatatacgcaaaaatatgaagatctcgctaaggcaactgcaaaagtaagtacacttagtcagtctcaccaaaattatttgaataaacaaattgataaagtgaataataagatagagaaaactgaaaaacgctaa

SEQ ID NO: 412414 - DNA, 3441 bp, Staphylococcus aureus
atgattaataaagaacaattagatcttttatataaattaaaaaaagaagttgaaaagtcgcgaaatgaagcacttttacatacaattaaccaagtaattaagaaagtatatttgcagcaatatacatgttcgttcgttggacatttttctgcaggtaaatcgacaatgataaatttattaattgaacaagatatcttaccaagttctcctgtaccaacgacaagtaatactgctattgtgtcagtttcagacaatcacgatattattgctaatttgccgaatcaaacgtatgccaaattatctaattatgatgaagtaagggaaatgaatcgccaaaatgtcgacgttgaatctgtagaaattaattttcaatcagctaaatttgaaaatgggtttacgttgcaagatacaccaggtgttgattcaaatgttgcatcacatcagtcaataacagaacaatatatgtatacaagtaatatgatattttatacggttgactataaccacgttcaatctgaacttaactttaagtttatgaagcatataaatgatgttggaatacctgttgtgtttatcattaatcaaattgacaagcatcaagacgatgaattgtcattctctacgtttaaatctcgagttgaaaaatcaattgcagattggggtattaaattagaacgcaccttttatgtatctaaatttgatcaccctgaaaatgaacttgaagtattatcaagttatctaatttcattagatcaacatagagagacaatagaggattatacatcaagaacggttgaatacattaccgaagctcagctagattacattcagtctgaaattcaggaagtactagaagatttaggtatcgaagaagcggagtttgaacaagcatttttaaatagtcaacaacatcaagcaattagtgaagaggcacaacttttaaataatccagatgaattaatggcatttttaaagaataagcgtaaaaatattttagaaaatgcatacattatgccgcataatatgagagaaatgttacgaagttatttggaaagtatgtctcaagactttaatgttggtgggttttttaataaaaagaagaaaaagctacaaattcaacaacagcgattattaacagcgacagatgcgttacaagaacatgttaatcaacaaattcgtcaaccaatgcgagaagatatgtcatttgtaacgcgttttatcaataaaaaagaagcttcagataaagtattaaatcagcattatgacgttaagccggaaatgattgaagatttatatcaaccacaaacatcaatcagcaatacttatgtacttacattttcagacgaagtggttaaagccattaagaaatatgttgaacaacaatcaacaccaatttttaaagaaataatagaaaatgtacaggcagatgaattaccaacagaagaaagtgatgatttaaaagaatatcaacgttatacagaattaaatgagctgcgtcagtcattgacgactaagaattatcgtcactactatattcatttagatgaatctctagataaattaataggtcgacaagagacaacatatcaagtggctactgataatactcaggataatcgtgataatcagcagctaaatcaaaatacagctacaacaaatatgtctatagatattcaaaaagcgcttgatataatttcggatgtgcctttgttcaagcgtacaaagcaagatatccacgaaacattaacacgtatagataataaattaataaaaataggtgtatttggaacatttagtgctggtaaaagtagtttgataaatgcattattaggcgagcatattttagtcagttctccaaatcctactacagcagctactacagaaatatcttatggagacgagagttatataacgctaaaatcacaatcgcaattattagatgaaattaatgcagtagttgaataccaagatatgtcttattcgactatagaagactttattaattcagatttagaaaagttaaaatcacatttaaataaaaatcaactcgcttttattcaggcagttgaaaaacattataaattgtatgtcaatatgttggaaaatggagaaaaacatgccattaatcaacaggaattgaaaaagtggagtgcagaagatgaatatgcaacatttgttaagacagtacacattgcattaatgcatgattggttaaaaggtaaaataattgttgattcattagggctacactcaaataaccaaaggcatacaaatgaaaccgagcaaattttaacttcttcagacttaatattgtatgtaagttattttaatcattcatttactgataatgacaaggcgtttatagaacacatgaaagatatgaaccagttgaatgaaaaccaagcatttaaaatggtaattaatgctgctgatttagcagaaagtcaagatgatcttgaagcggttgaaacatatgtatcagatgcattaagacaagtacacttacaatcagacatttttgctgtatcaagtcgaaatgcattacaagctgaagataagggcattgatcaattaaaacaaagcatacaacaatttgttgatgttgaatctaaatcaattttagaacaacaaatgattcatcagcttaaacaaatggatcgttcttatgtagagatgattacagaatttgaaacaaataaagctgatatttcacgtcgccaacaaaggttaacagtctataaagataaacagcgtttacaacatcaattaattgatgcgacgttacaacatacagacaacgaagttgaagaacaagtttatcatttaaatgcacgtttaaaattacaactacttgacgatgttaaatcagtgtttaattctcaaatgacgcaaaatagtgattttaatgaagaaaagaaagtgtctacgaaagtatacttagatcaaattcatcaacgattgtttttagagcaatctttaattacagaacgtataaaaaaatactttaataagcaactcactgagcaaattgcaccaatcgttcaacaattagcagatttacatgtcattgttaatcctcagtttaactttgaatcagctaatatagagcaaccattattgcacatcgatttcaatgatatgctaaatgcattgcctaaacaattaacaaaacgtaaaattttgaatccaaatgggcaaagagatatacatgaatcaatttgtcaaagtacattaggattattacaaccacaaatgggattattgaggcaacaacttgaattatatgttaagcaaatggctgtagaagctgaatcgcaatttgaaagttttgaagctaatattcaaacgcaaataaacgatttattagcatttgatttagatacaacacttatcaatcaattgaaagataaacatcaacaactgaaaactattttatattaa

SEQ ID NO: 412415 - DNA, 792 bp, Staphylococcus aureus
atggaatatctaaaaaggcttgcattgttcataagtgttattattttgaccatttttataatgggttgtgatagtcaaagcgatactgcagaaaatccaaaagaaggttcaaaagaagcacaaattaaaaagagtttttcgaaaacgttagatatgtatccaattaagaatctcgaggatttatatgacaaagaaggatatcgtgatggcgaatttaaaaaaggtgataaagggacgtggacaatatcaacagattttgctaaaagcaacaaaccaggtgaaatggatagtgaaggtatggtgctacatttgaatagaaatatgaggacggcaactgggcattatactataagaacaacttatgatgaattgggtaagatgacacgcgaaaaaaattatcgtgttgaacttaaaaataataagatagtagttttagataaagtagaagatgtaaaccttaaacataaaattgaaaattttaaattttttagtcagtatgcagattttaaagatttgaaaaattataaaaatggaagaatatctatcaatgaaaatgttccgtattatgaagcagagtacaaaaggaataatagtgatggaaatgtaaaaaaacttagagaaaagtacccaattacaaccaagcagtctccaatattaaaactgcatatagacggagatattaaaggtagctcagttggatataagcagatagagtacatgttttctaaggagaaagaggatgagacttttatgagtgattttttgaacttcggaccatcacatagtaattag

SEQ ID NO: 412416 - DNA, 615 bp, Staphylococcus aureus
atgaaaagattagttacagggttactagcattatcattatttttagctgcatgtggtcaagatagtgaccaacaaaaagacggtaataaagaaaaagatgataaagcgaaaactgaacaacaagataaaaaaacaaatgattcatctaaagataagaaagataataaagatgatagtaaagacgtaaacaaagataataaagataatagtgcaaacgataaccagcaacaatctaattcaaatgcaacaaacaatgaccaaaaccaaacaaataataaccaagcgaataataatcaaaaatcaagttacgttgcaccatattatggacaaaatgccgcgccggttgcacgtcaaatttatccgtttaatggaaataaaactcaagctttacagcaattgccaaatttccaaacagctttaaatgcggctaataatgaagcaaataaatttggtagtaataataaagtgtataatgattattctattgaagaacataatggcaactataagtatgtgtttagttttaaagacccaaatgcaaatggaaaatattcaattgtaacggttgattatactggacaagcaatggttactgatccaaactaccaacaataa

SEQ ID NO: 412417 - DNA, 309 bp, Staphylococcus aureus
atgaaatttaaaaaggttttagtagctacggcaatggtaggtgttttagcaactggcgttgttggatatagtaatcaagcagatgcgaaagtttattctcaaaatggacttgtactacatgatgatgcaaacttcttagaacatgaattaagctatatcgatgtgttattagataagaatgctgaccaagctacaaaagacaacttaagatcatacttcgccgataaaggactacattcaatcaaagacattatcaacaaagctaaacaagacggctttgatgtttcaaaatatgaacacgtaaaataa

SEQ ID NO: 412418 - DNA, 1503 bp, Staphylococcus aureus
atgagagaaaattttaaattacgtaaaatgaaagtcggtttagtatcagttgcaattactatgttatatatcatgacaaatggcgaagcagaagcatctgaaggtagccaaactgttaagaacccaaaggtgaatgcaactgaagaaatcaaagttggatcacaaccagttcaaaataatcaagaagtaagttcggaacaaacaaaaaagaattttgttaatttagaccccattaaacctggtgctcaaaaggtaacagggactactttacccagccatattattctaatgaatatagatggtaaaagtgctgattcagtagatggaggaaatagtgatttagtatttgctgatgaaaacggaagattcgagtatccactacacaatagaaaaattgttcataatcaagaaattgaggtttcgtcatccagtcctgatttaggtgatgatgaagaagatgaagaagtagaagaagattcaactgaaaaagctggtactgaggaagaaaacacagatgctaaagctacatacacaacaccacgatatgaaaaagcgtatgaaataccgaaagaacaactaaaagaaaaagatggacatcaccaagttttcatcgaacctattactgaaggttcaggtattattaaaggtcatacgtctgtaaaaggtaaagttgctctatctattaataataaatttattaattttgaagaaagagctaaagatggaattagtaaagaagatactaaagctagttccgatggtgtttggatgcctattaatgaaaaaggatattttgattttgatttcaaaaaaaatccttttgataacttagagttaaagaaaaatgatgaaatctcattaacatttgcacctgatgatgaagatgaagcattgaagtcattaattttcaaaactaaagtaacgagtttagaagatattgataaagcagaaactaaatatgaccatactaaagtggaaaaagtaaaagtattgaaagatgttaaagaagatttacatgtagatgaaatttatggaagtttgtaccatacagaacaaggtaaaggtattctcgataaacagggaactaaagaaattacaggtaagactaaattcgcgaatgcagtagtgaaagtatattctgacttaggtgatgcgcaactgtttcctgatattcaagtagatgaaaatggtaaatttagctttgatgctgaaaaagctggtttcagattacaaaatggagaaacattgaattttgcagtagttaaacctattactggtgagctattacatcaaggattcgtttctaagtatatcgatgtttatgaatctccggaagaaaagaaagaacgtgaatttgaagagaaacttgaaaacacgcctgcatatcataaattacatggtgataaaattgtcggctatgatgttcaaggtaatccatcaacttggttctatccattaggtgaaaagaaagttgaacgtaaggcaccaaaattagaaaaataa

SEQ ID NO: 412419 - DNA, 831 bp, Staphylococcus aureus
atgcataaaatattttcaaagaataacctgatattttttgtattcgttgcatttatttttgtggtaattgtactgcaattctttgtcagtagtgaaaatgcaaccaaagtcaatttatcacaaacttttgaacctattagttggttgcatttattaggaactgatgattatgggagagatttatttacccgaattattatcggtgcacgttcaacattgtttgttactgttttaacattaatagctatcgttgtcataggtgttacactaggtctatttgccggatataaaaaagggtggattgaacgattagtgttaaggtttattgatgttggtctgagtattccagaatttatcatcatgattgctttagcaagtttttttcaaccatctttatggaatttagttatctcaattacattaataaaatggatgaattacacaaggttgactagaagtatagttaatagcgaaatgaataagccttatataaaaatggcacaattatttcatgtaccaacaagaacaatattaatacgtcatttaacacctaaaattataccggctattatcgttttgatggtcgttgatttcggtaaaatcattctatatataagttcactatcatttattgggttaggtgcacaaccgccaacaccagagtggggcgctatgttgcaacaaggtcgtgattttatttcgtctcatccaattatgttgattgcacctgcttcagtcattgctataactattttaatttttaatttaaccggtgatgcactaagagatagattgctgaaacaacggggtgaatatgatgagtctcattga

SEQ ID NO: 412420 - DNA, 444 bp, Staphylococcus aureus; identical to SEQ ID NO: 406762

SEQ ID NO: 412421 - DNA, 1221 bp, Staphylococcus aureus
atggtaaacgaatattattacttacctaaaacactatataatacattagctagtccagagtttgatgatttaaagagaactgatgcaagtcaagtcgatgggcaagatgatacttcagaagatgatgataacgaaagtgaaaaagctgactctaaatctgcagatagtgagtcaaaaggtggcgcctatttagaaatggaacttcacgaaggacaaaatagtgaaacattgggtaatgatgaagcacgtgaaggcgatgctacagatgatatgactgatatgatgaccaaaaagggcaaaggttcaaacgatacgctaaatcgtgaagaaggcgatgctgttggtcaaagccaagcatttcaacttgatggtgtgaacaaaaatgtagaaataaaatggcaaattcctgaaattgagccacaatatgttttagaatatcaagaatcgaaacaagacgtacaatatgaaatcaaagacttaattcaaattataaagaaaacgattgaacgagaacaacgagatgcacgttttaatttaacaaaaggacgattacaaaaggatttaattaattggtttatcgacgatcaatataaattgttttacaaaaaacaagatttaagtaaatcatttgatgcgacgtttacattgttaattgatgcgtcagcaagtatgcatgataaaatggctgaaacgaagaaaggtgtagtgttattccacgagacgttaaaagcattgaacattaaacatgaaattttatcattcagtgaggatgcctttgattcagacgatcatgcacaaccaaatatcattaatgaaattattaactatgattactcaacctttgaaaaagatggcccacgtattatggcacttgaacctcaagatgataatcgtgatggtgttgctattagagttgcaagtgaacgattaatgcgtcgaaatcaacatcaacgatttttaatcgtattttcagacggcgaaccgtctgcatttaattatagtcaagatggtattattgatacgtatgaagctgtagaaatgtcacgtaaatttggtattgaagtatttaatgtatttttgagtcaagatccaataactgaagatgttgaacaaacaattcataatatttatggtcaatatgctattttcgttgaaggtgttgcgcatttacctggacatctctctccattattaaaaaaattactacttaaatctttataa

SEQ ID NO: 412422 - DNA, 2607 bp, Staphylococcus aureus
gtgttaaaaaagtggctaaattcaaacgtcaaacaattctttgttataactttcattagtgtaatattaacgcttattttattttctactcatatctatgattatattgtgaatggtactgtttttagtggggctggagatggattccgtcaaatgatgccatttcaaatgtatttgtatgaacatttaagtagtttttctagtttatatgatgcatcgtttggattaggtggcgattatatgaaaggactatcatattattattcgctgtcacctttaatgtggctaaattttctattcattaaaataggagaaacggttggtatatttaatccgacaacaatacatttttggccgacaaaccaacttattatggccatgataagagctatcataacatttgtcgtgaccttctacttatttaaaatattacactttaaacgctcaacaaatatgatcgctacgattttatacggcatgtcaactgtcgttatatactttaattttacttggtcattttatggaagtttattatatttattaccattatcgattcttggtttggaaagatattttcaacaacgcaaaatcggtattttcattgttgcgatagccttaacactatttagcaatttttatttcagttattatcaagctattattataggttgctactatttatatcgactcattttcacttacaaatatgacattgtctctagaacacaaaaattaatttgcgtcatatctgctacagttttgagtgtgttatcaagtgtatttggtttattcactggcatttctgcgtttttggaaaatgacagaaagcaaaatcccaatgttgatataccgtttttgacaccacttgattaccattattttttctttagcgatggattttatattacgatttcaattcttactatcgttgcattattgtcattcaaactgtatcgtttttacttttatagacttttcgcaatagtaacatggttattatttattggttcattatcacagtatttcgacagtgcttttaatggtttttcatttccagaaaggcgttgggtgtatatcttagcactatcatcaagcgctctttgcggattgtttattcaacatttatcaacattaaatatgaaatattatttaatcagaacaataccagtaagcatcatcgcattactttatgtattactatcaccgacacacccacttgcacttatagtaggtattatcctgctaatggtgcttgccgttattttaaaatttagtttatggcgttataaaaaattaaccgttgcaatattagtattaatcgttatgattcaacaaatcgtcattttagataacaataaaaatatggcaatcaaaccttatcaacaatcattatcaacgttgaaacaacatgattaccatagtaactatgtaaaccagcttataaaaaagataaatcaaaatgcaactggtccatttaatcgcattgattatatgtcagactatgcattaaattcaccatttatatatcattataatggcatttcattatattctagtatttttaatggagacatattaaaatattatgacaagacactccaaattaatatgccaatcgataaaaacagcacttatagattacttggcaatcgtcaaaatttactatcactttggaatgttaatgatcgaattagagtgaatcatgatgacaacttaccatatggatttaaaattaagtctgaacacaaagacaataaagttcgttggattcattctaaaaataccatccattatccaagtgcacatattacaaataaggtcttttccaataaagaattaaaatctccattagataaagaacaagcaatgttgcaagggattgtttctaacaagactaaagatgttaatacacattttaaagccaataaaaatttactatcagattcaacaattaaattaaatagtgcagcctggcaatctcctacaaaacatttattacaagttaaacaaaataatggtggtctaactgtacagttgccaaaatcagtttctaatcaatttaaagatttgtattttgaaatggatttagaattactttcgccggataaagctcatgatgttaaagtgaatgaatatacacaagaaagaaataaactcacttataaatatcgacgctttgtaacacccgtaacaatacgcattaaagcttcagataggattagattatcattgcctaaaggtaagtatcgtgtaaatttaaaagggatatacggcgaagattataccacgcttaaagacgcttcaaattcattagaggctgtcaaagttagtaagacaaagcaaggttatactattactaaaaataaaaattcatctgggtatattgttttgccaacagcatataatcaaggtatgaaagcgacatcaggtgatcaaagtcttaaagttgaacaagtaaatggtgttatgaccggcattaaagcacctaaaaatataacaaagattcaattgagctatgccccaccatactattatttacttataacaattactatatttggcattatatgtagtattattttcacgagatgggcaagacaaaaataa

SEQ ID NO: 412423 - DNA, 366 bp, Staphylococcus aureus
atgtattttgatgagagtgtaatgactcaattattggacactattatcaaaaagatgggagatcataatttgacatttgcgattgaattttgctcaaaaacaattgcgaataatacaaagagacatcaatcggtatcaaagttatcctcacaacctgtttttaaatatggttacaatgatttaaaaaaattgaatgaaattttaccaaatacaataagagtaatacatgaatataattattttgactattataagaatcgatggggcttatttggatattgtagatttataccttatttaaaaaaaaggttaaacaataaaatagtacttatgaaatataaagttccaaagagacagagacattaa

SEQ ID NO: 412424 - DNA, 999 bp, Staphylococcus aureus
atgcaatataatactacaaaatatatagacgaaaatcaagataatgaaacattgaaagatatgactaaaagtgggacacaacgcccatggagagaaaagaaaatcgacaatgtaagttatgcagatatactagaaattttaaaaattaaaaaggcttttaacgtgaagcaatgtggtaacgtcttagaatttaagccgactgatgaagggtatttaaaactttataaaacatggttttgtaagtctaaattatgtccggtttgtaattggaggcgttcaatgaaaaatagttatcaagctcaaaaagtcattgaagcagtggttaaagaaaagccaaaagcacgttggttattcttaacactttcaacaaaaaatgcgatagatggtgagcatttagaacagagtttaaaatatatgtcgaaagcttttaacaagttaaaaatgtatgcaaaagttaaaaagaatttaatcggttttatgcgttcaactgaagttacagttaacaaaaatgacggaagttataatcaacatatgcacgttttattgtgtgttgaaaatgcttatttcagaaaaaaagagaattatataacgcaagaagagtggatcaatttatggcaaaaagctcttcaagttgattacaaaccagtcgcaaatatcaaagcaattaagccgaataaaaaaggcgataaagatatacaagctgcaattaaagagacatcaaaatactcggttaagtcgtccgattatttaacaggaaaccatgaaaaagacgcagaaattgttcaagatttagaacaaggtttatacagaaaacgtatgttaagttacggtggtttacttaaacaaaaacataaacttttaaatttagacgatgccgaagaaggtaatttaattcaaacgagcgatgaagaaaaaacgactgaagaagaacaaaaagcccattcaattacggccatttggaattttgaaaaacaaaattatttcttaaaaaatttgtaa

SEQ ID NO: 412425 - DNA, 324 bp, Staphylococcus aureus; identical to SEQ ID NO: 409861

SEQ ID NO: 412426 - DNA, 936 bp, Staphylococcus aureus; identical to SEQ ID NO: 407146

SEQ ID NO: 412427 - DNA, 1053 bp, Staphylococcus aureus
atgaaaaataaaaaacgtgttttaatagcgtcatcattatcatgtgcaattttattgttatcagcagcaacgactcaagcaaattcagctcataaagactcgcaagaccaaaataagaaagaacatgttgataagtctcaacaaaaagagaaacgtaatgttactaataaagataaaaattcaacagtacctgatgatattgggaaaaacggtaaaatcacaaaacgaactgaaactgtatatgatgagaaaacaaatatactccaaaatttacaattcgactttatcgatgatccaacttatgacaagaatgtattacttgttaaaaaacaaggctcaattcattcaaatttaaagtttgaatctcataaagaagaaaaaaattcaaattggttaaagtatccaagtgagtaccatgtagattttcaagtaaaaagaaatcctaaaactgaaatattagaccaattgccgaaaaataaaatttcaactgcgaaagtagacagtacattttcatatagctcaggtggtaaattcgattcaacgaaaggtattggacgaacttcatcaaatagctactccaaaacgattagttataatcagcaaaattatgacacaattgccagcggtaaaaataataactggcatgtacactggtcagttattgcgaatgacttgaagtatggtggagaagtgaaaaatagaaatgatgaattattattctatagaaatacgagaattgctactgttgaaaaccctgaactaagctttgcttcaaaatatagatacccagcattagtaagaagtggctttaatccagaatttttaacttatttatctaatgaaaagtcaaatgagaaaacgcaatttgaagtaacatacacacgaaatcaagatattttgaaaaacagacctggaatacattatgcacctccaattttagaaaaaaataaagaaggtcaaagattaattgtcacttatgaagttgattggaaaaataaaacagttaaagtcgttgataaatactctgataataaatcatttagagaaggataa

SEQ ID NO: 412428 - DNA, 444 bp, Staphylococcus aureus; identical to SEQ ID NO: 406068

SEQ ID NO: 412429 - DNA, 1293 bp, Staphylococcus aureus
atgaaaacaacgattaaacaagcgaaagatcatttaaaccaagacgttacaattggtgcttggctaacaaataaacgttcaagtggtaaaatcgcctttttacaattacgtgatggaacaggctttatgcaaggcgtagtagttaaatcagaagttgatgaagaggtattcaaacttgcgaaagaaattactcaagaatcatctctatacgttacaggcacaattacagaagataatcgttctgacttaggatacgaaatgcaagtgaaatcaattgaagttatttcagaagcgcatgactatccgattacacctaaaaatcatggtacagaattcttaatggatcaccgtcatttatggttacgttctaaaaaacaacatgctgtaatgaaaattagaaatgaagttattcgtgcaacgtatgaatttttcaacaaagatggatttacaaaggttgatccaccaattttgacagcaagtgcgccagaaggtacaagtgaattattccatactaaatactttgatcaagatgcgtttttatctcaaagtggtcagttatacttagaagctgcagcaatggcacacggaaaagtattttcatttggtccaactttcagagctgaaaaatcaaaaacacgtagacacttgatcgagttctggatgattgaaggggaaatggctttcacaaatcatgctgaaagtttagaaattcaagaacaatatgtaacacatgttgtaaaatcagttttagaaaattgtaaactagagttgaaaattttagagcgtgatacatcaaaacttgaaaaagttgcgacaccattccctagaatttcatatgatgatgcaattgaattcttaaaatcagaaggctttgatgatattgaatggggcgaagattttggtgcgccacatgaaacagccattgctaatcattatgatttaccggtgtttattactaattatccaactaaaattaagcctttctatatgcaaccaaatcctgaaaatgaagaaactgtattatgtgcagacttaattgcacctgaaggatacggtgaaattattggtggatctgaacgtgtggatgacttagaattgttagaacaacgcgttaaagaacatggattagacgaagaagcatatagttactacttagacttacgtcgttatggtagtgtgccacactgtggatttggtttaggtttagaacgtacagtagcatggatttctggtgttgaacacgttcgtgaaacagcgccattcccaagattattaaaccgtttatatccataa

SEQ ID NO: 412430 - DNA, 975 bp, Staphylococcus aureus
atgagcgacaatattgtagctatttatggagatgtgcctgaattggttgaaaaacaaagtgcagaaattatatcacaatttttgaaaagtgatagagatgactttaactttgtgaaatataatttatacgaaacagagattgcaccaattgttgaagaaacattaacattgcctttcttttcagataaaaaagcaattttggttaaaaatgcatatatatttacaggtgaaaaagcgccaaaagatatggctcataatgtaaatcaattaatagaatttattgaaaaatatgatggcgaaaatttgattgtctttgagatatatcaaaataaacttgatgaaagaaaaaagttaactaaaactctaaaaaagcatgcaaggcttaaaaaaatagagcaaatgtctgaagaagaaataaaaaaatggattcaaagtaaattaaatgagaatttcaaagatatcaaaagagatgcattagatttatttattgagttgacaggtattaactttaatattgtctcacaagagatagaaaagttgattttatttttaggcgatagaccaacaattaataagcaggatgttaaccaaattattaatagaagtttagagcaaaatgtatttttactgactgaatacattcagaaaagaaagaaagaacaagcaattcatttagtaaaagatttaataactatgaaagaagaacctattaaattacttgcactaatcacaagtaattaccgattattttatcaatgtaagattttgagtcaaaaaggatatagtggacagcaaattgctaaaacaataggcgtacatccatacagagtaaaattagcgttaggacaagtaagacattatcaacttgatgaattattgaatattatagatgcttgtgcggaaactgattataaacttaaatcatcatatatggataaacagttaatactggaattattcattctatctttataa

SEQ ID NO: 412431 - DNA, 489 bp, Staphylococcus aureus
atgtctgttaaatcacatttatcaattttaaccttatttattattgcaaccatcgcatcgtttatagggctgttaattttatattatatctgtcgtttaatttcagaagaacgtctatatcgctttattgatcgacacggtaagtggattaaattgaaaagtaaggatttaaagcgagcaaatgattggtttaaaaagtatggcgtatgggctgtatttatctgtcgtttcatacctgtattacgtgtattgattaccattccagccggtgtaaaccgcatgaatgttgtgacatttaccgttatttcattaataggtacaacaatttggaatttcggtttaattttactaggacgcacgttgagcgatagctttggtatgttgatgactggtcttcatacatattcacgtattatgtatgttgtcatcattatcgcagtcatttactttgctatacgttacattggcaaacgtaagagagtaaaataa

SEQ ID NO: 412432 - DNA, 501 bp, Staphylococcus aureus
atgactttcgaagaaaagctaagtcaaatgtacaatgaaattgcagatgaaatcagtggaatgataccagtagaatgggaaaatatatatacaattgcctatgtaactgatcaaggtggagaggtcatttttaattatacaaaacctgaaagtgaagatttgaattattacacggatatatctagagattataatatttcagaagaaatatttgatgatttatggatgaatctttattacttgtttatgaatttgagggatttatttaaaaaagaaggtcttgaaccatggacatcatgtgaatttgattttacaagagagggtaatttgaaagtatcgtttgattatatagattggattaaattaggttttggtccatcaggaaaggaaaactactatatgtataaaaagtttggtgttataccagaaacggaatatgaaattaataaagttaaagaaatcgagcaatttattaaagagcaagatgaagctgaactatag

SEQ ID NO: 412433 - DNA, 501 bp, Staphylococcus aureus
atgactttcgaagaaaagctaagtcaaatgtacaatgaaattgcagatgaaatcagtggaatgataccagtagaatgggaaaatatatatacaattgcctatgtaactgatcaaggtggagaggtcatttttaattatactaaaccaggtagcgatgaattgaattattacacggatatatctagagattataatatttcagaagaaatatttgatgatttatggatgaatctttattacttgtttatgaatttgagggatttatttaaaaaagaaggtcttgaaccatggacatcatgtgaatttgattttacaagcgaaggtaaattaaaagtttcatttgattatattgattggataaatacagagtttgatcaattaggccgtgaaaactattatatgtataaaaagtttggtgttataccagaaacggaatatgaaattaataaagttaaagaaatcgagcaatatattaaagagcaagatgaagctgaactatag

SEQ ID NO: 412434 - DNA, 270 bp, Staphylococcus aureus
atgattcaccattcaaatgagtataacattgatataacagcgcaaaatattaataaatatactgcattacaatatatatttgatgcagatgttaaatatatagcatttggtaatgaccacaatgatattgtcatgttacaacatgctagtagtggctatattataggaccatcagaagcatacacacacgcaatattgaaacttgataaaatcaaacacatcaataataatgcacaagctatttgcaaagtcttaaaatcatataaataa

SEQ ID NO: 412435 - DNA, 459 bp, Staphylococcus aureus
ttgccagaatttgaagattatgttgtattaacacaacagcagaaccaaaattataaaatagtacaacagtttaataattttgataaggccatactgcttggtacgtcaacattttttgaaggttttgattttcaagcaaatggtattaaatgtgtgatgatagcgaagttaccgtttatgaacaagcataatgcaaaatattggcttatggattctgaattcacttcaactttcaaggaatatgtattacctgatgcagttacacgttttagacaaggacttggaagattaattagaagtgaaaatgatcgcggcataatagtttcatttgatgatcgacttataaacagtaattataaaaacttttttgaacaaacacttgaaaattatcgtcagaaaaaaggcgacattcaacagtttggaaaattattaagacaaattcaaaaaaagaaaaagtga

SEQ ID NO: 412436 - DNA, 501 bp, Staphylococcus aureus
atgactttcgaagaaaagctaagtcaaatgtacaatgaaattgcagatgaaatcagtggaatgataccagtagaatgggaaaatatatatacaattgcctatgtaactgatcaaggtggagaggtcatttttaattatactaaaccaggtagcgatgaattgaattattacacggatatatctagagattataatatttcagaagaaatatttgatgatttatggatgaatctttattacttgtttatgaatttgagggatttatttaaaaaagaaggtcttgaaccatggacatcatgtgaatttgattttacaagcgaaggtaaattaaaagtttcatttgattatattgattggataaatacagagtttgatcaattaggccgtgaaaactattatatgtataaaaagtttggtgttttaccagaaatggaatacgaaatggaagaagttaaagaaatcgagcaatatattaaagagcaagatgaagctgaactatag

SEQ ID NO: 412437 - DNA, 573 bp, Staphylococcus aureus
atgggatatttaaaagggtttgcattgtacataagtatcttaattttaatagtttttatagcaggttgtggcaaaagtgataaaacaaaagaagattcaaaagaagcacaaattaaaaagagctttgagaaaactttagatatgtatccaatcaaaaatctcgaggatttatacgacaaagaaggctatagagatggtgaatttaaaaagggtgataagggtacatggactttactcacaagttttgctaaaagtaacaaaccaggtgagatagatgatgaaggcatggttttatttttaaatagaaatataaagaaggcaacaggatattattacacgagcaaagttcatgatgaatttaatgaaaaagagcatcaaaaaaaatatcatgttgaacttaaaaataataaaatagttcttttggataatgtagaagattcaaagctcaaaaataaaatagaaaattttaaattctttagtcagtacgctgattttagagattttaaaaactataaaaatggaaatatatcaagtgcagataatgtaccaagtctgtctcttatacacatctga

SEQ ID NO: 412438 - DNA, 276 bp, Staphylococcus aureus
atgacaggtgttactaccttaccttgttccactggtttagaaggctttttaggttcttctttggcaggtggtactggtttaccaggttcagctggtacctctggcgttggtggtgttggtgtttccggctcacttggtacctctggtgttggcggtgttggtgtttccggctcacttggtacttctggtgtcggtggtgttggtgtttccggctcacttggtacttctggtgttggtggtgttggcggcgttgtatcttcttcaatcgtttgttga

SEQ ID NO: 412439 - DNA, 174 bp, Staphylococcus aureus
ttgaaagtatcttttgattatatagattggttaaatacagaatttgatcaattgagtcttgaaaattattatatgtacaaaaaattcgaggttataccagaaatggaatatgaaatggaagaaattaaagaaatcgaacaatatattaaagagcaagaagaagctgaaatatag

SEQ ID NO: 412440 - DNA, 276 bp, Staphylococcus aureus
atgaaatcaatggtagaaatgcaacgtgaagttgatgaatatattggacaatttaaaacaggatatttttcaccattagctaacttagctagattgactgaagaagtgggcgaacttgcacgtgaaataaatcatacctatggtgaaaaaaagaagaaagattcagaggaagcaaatacgattaaagcagaattaggtgataatttatttgtgttgttatgtttagcgaattcctgtctcttatacacatctccgagcccacgagaccgaggctga

SEQ ID NO: 412441 - DNA, 255 bp, Staphylococcus aureus
atgagcataatcagtaacagaaaagtagatatgaatgaaacgcaagacaatgttaagcaaccagcacattacacatacggcgatattgaaattatagattttattgaacaagtaacggcacagtatccaccacaattagcatttgcaataggtaatgcaatcaaatacttgtctagagcaccgttaaagaatggtcatgaggatatggcaaaagcgaagttttatgtagatagagtgtttgacttgtgggagtaa

SEQ ID NO: 412442 - DNA, 552 bp, Staphylococcus aureus
atgaacgaattatggaaagatgttgtaggttacgagggcatatacgaagtaagcagtaaaggtagagttagaactcacaaaaataaagttacttggtctaaccgttatcaaaaatggaggcattggaaacagcgttatttaaaagataaaacacctaatggtcgagatgtaagagtaaccctttggaaaaatggtaaacgcaaagattttttagtccacagattagtggcattcgcctttataccaatgatagaaggtaaaaattgtattaaccatattgacgggaaccccaaaaataacaatgtagaaaatcttgaatggtgtaatcacttggaaaataataggcatgcatttgaaacaggattaatgcataccaatatggctgtaaaacttattaatcatttaggtatcgaatatgaatttataagtatgagtagagcaggaaaattcttaggcagaagtcatagttatattagcgacaaaataaaaaataatcacaaagatgttactgatatacatggtaataaatataaatttgagaagttgatataa

SEQ ID NO: 412443 - DNA, 984 bp, Staphylococcus aureus
atggataaagaaactaatgacaacgaatatagacgtcaaagtgaacatcgcacttcggcgcctaagcgaaaaaagaagaagaaaattaggaaattacctatcattcttctgattgttgtaattttacttatcgcattagttgtatatattgtacatagttataatagcggtgtagaatatgccaagaaacatgcgaaagatgttaaagtacatcaatttaatggaccagtaaaaaatgatggtaaaatttctattcttgtactcggtgcagataaagcacaaggtggacaatcaagaacagattctatcatggttgttcaatatgactttatcaataaaaagatgaaaatgatgtctgtcatgcgtgatatttatgcagatattccaggatatggaaaacacaaaattaattcagcatacgctttaggtggtccagatctacttagaaaaacacttgataaaaatttaggaattaatcctgaatattatgcagtagttgattttactggatttgagaaaatgattgatgaattaatgccagaaggtgtaccaattaatgtcgaaaaagatatgtcgaaaaatattggtgtatctttgaaaaagggtaaccataggttgaatggtaaagaattacttggttatgcaagattccgtcacgaccctgaaggtgacttcggacgcgtgcgacgtcagcaacaagtaatgcaaacattgaaaaaagaaatggttaattttagaacagttgttaaattaccaaaagttgcaggtattttaagaggctatgtgaatacaaacattcctgattcagggatctttcaaacaggtttgagttttggtatccgaggtgaaaaagatgttaagtcattgactgtgccaatcaagaactcatacgaagatgtcaatacaaatactgatggtagtgcattacagattaataaaaacacaaataaacaagctattaaaaactttttagatgaagattaa

SEQ ID NO: 412444 - DNA, 354 bp, Staphylococcus aureus
ttgttatcttttaaacctttattagcggttaagtctatacgtattctaacgacaacgaatccaataattgcaccaataagtacacctagtattgttgaaatgataaattgttcaacagcttggaataatgaaaaggtaccagttactaatgcagtaacagcaattttaaatgaaatgatacctgctgcatcattgagtaaagattcaccttctaaaatcgtcatagaacctttaggtaataattttccgcgtgtaatagcagatactgctactgcatcagtaggacataaaattgctgctattgcaaaagcggctggcattggtaaggcaggccaaatccaatgtataaaatag

SEQ ID NO: 412445 - DNA, 1167 bp, Staphylococcus aureus
ttgaaaattatatattgtattactaaagcagataatggtggtgcacaaacacacctcattcaactcgccaaccatttttgcgtacaccatgatgtttatgtcattgtaggcaatcatggaccaatgattgaacaactagatgcaagagttaatgtaattattatcgaacatttagtaggtccaattgactttaaacaagatattttagctgtcaaagtgttagcacagttattctcgaaaattaaacctgatgttatccatttacattcttccaaagctggaacggtcggacgaatttcgaagttcatttcgaaatcgaaagacacgcgtgtagtttttactgcgcatggatgggcttttacagagggggttaaaccagctaaaaaatttctatatctagttatcgaaaaattaatgtcacgtattacagatagcattatttgtgtttcagatttcgataaacagttagcgttaaaatatcgatttaatcgattgaaattaaccacaatacataatggtattgcagatgttccagctgttaagcaaacgctaaaaagccaatcacataataatattggcgaagtagttggaatgttgactaataaacaagatttacagattaatgactcgacaaaacaccaatttgttatgattgcaagatttgcttatccaaaattgccacaaaatctaatcgcggcaatagagatattgaaattacataacagtaatcatgcgcattttacatttataggcgatggacctacattaaatgattgtcagcaacaagttgtacaagctgggttagaaaatgatgtcacatttttgggcaatgtcattaatgcgagtcatttattatcacaatacgatacgtttattttaataagtaagcatgaaggtttgccaattagcattatcgaagcgatggctacagggttgcctgtcatcgctagtcatgttggtggcatttcggaattagtaactgataatggtatatgtatgatgaacaaccaacccgaaactattgccaaagtcctggaaaaatatttaatagacagtgattacatcaaaatgagtaaccaatctagaaaacgttatttagaatgttttacagaggagaaaatgattaaagaagtggaagacgtttataatggaaaatcaacacaatag

SEQ ID NO: 412446 - DNA, 201 bp, Staphylococcus aureus
ttgtggagtattacaacagaacattactcattaagtgcccatgttgtgttagataaaaaatatgagggcgatgattatcaagcgattgatcaagtatcatcattgttgaaagaaaaatatggcattgcacattcaacgttgcaaattgaaaacttacaattgaatccattagatgagccatacttcgacaaattaacataa

SEQ ID NO: 412447 - DNA, 285 bp, Staphylococcus aureus
atgagtgtaactggaatggcaatgatcataccgtatagtaatacatctccaacatttgcctttaattcttttgcgatgactaccggtcctggatgtggtggtaaaaagccatgtgtcactgataaagctgttaccataggtagtcctagttttaacactgaaacatttgcgcgttttgctactgtaaatactaatggaatcagtaagactaaacctacttcaaagaacaatgcaatcccgacgataaatgctgcaacaagcattgcccattgtacatgtttttga

SEQ ID NO: 412448 - DNA, 2070 bp, Staphylococcus aureus; identical to SEQ ID NO: 407767

SEQ ID NO: 412449 - DNA, 1599 bp, Staphylococcus aureus; identical to SEQ ID NO: 411376

SEQ ID NO: 412450 - DNA, 1302 bp, Staphylococcus aureus
atgtctaaattattaatgataggcactggtccggtcgcaatccaattagcgaatatttgctatttaaaatcagattatgagattgatatggttggacgtgcctcaacatcagaaaaatcaaaacgcttatatagagcgtataaaaaagaaaagcgatttgaagttaaagtacaaaacgaggcgcatagacacctagaaggtaaatttgatattaatcgcttatataaagatgtaataaatgtaaaaggtgaatacgacacgattgtaatggcatgcacagcagatgcatactatgacactttacaacaattatcattagaaacattgcagagtgtgaaacatgtcattctaatatcaccgacatttggttcgcaaatgattgtcgaacaatttatgtctaaatttaataaagatatcgaggttatttcattttcaacgtatcttggcgatacacgtattctcgataaagaagtgccaaaccacgttttgacaacaggtgtaaaaaagaaattgtacatgggatcgacacatttaaactcaacaatgtgtcaacgaatctctgctttagctgagcaattgaagattcaattagaagtcgttgaatcgccactgcatgctgaaacgcgaaacagttcgctttatgtgcacccaccactatttatgaatgacttttcattgaaagccattttcgaaggaacggatgtaccggtttatgtgtataagttatttcctgaaggaccgataacgatgacactaatccgtgaaatgcgtttaatgtggaaggaaatgatggctattttacaagcatttagagtgccgtcagtcaacctgcttcagtttatggtgaaggaaaattatccagtacgtcctgaaactttggatgaaggtgatattgagcatttcgaaatcttgccagatatcttacaagaatatctactttatgtaagatataccgcaatcctcattgatccattttcacagccagacgaaaacggacattactttgatttttcagctgtaccatttaagcaagtctataaaaatgatcaggatgttgttcaaattccaagaatgccgagtgaggattattacagaacggcgatgattcagcatattgggaaaatgctaggtatcaaaacgccaatgattgatcagttcctaactcgctatgaagcaagttgccaggcgtacaatgagacacatgaagatcaacaactatcttctcaatttaatacaaatctatttgaagaagataaggcactcgtcacaaaatttttggaaatcaatagaacgctttcataa

SEQ ID NO: 412451 - DNA, 765 bp, Staphylococcus aureus
atggacataaattcagaagaatacaaacaagaggtacttatcaaagatgttgtcatgcttgctgctcgcatactattagaatctggtgcagaaggtacgcgtgtagaagataccatgacacgtattgcaaaaaaacttggttacagtgaaagtaacagctttgttacaaacactgtcatccagtttacattacattcggaatcgtttcctagaatatttagaattacctctcgagatacaaacttaataaaaatttctcaagctaataaaatttcgcgtcaaattacaaataatgaaatttctttagccgaggcaaaaacgcaacttgaaaaaatatatgttgctaagcgtgacagcagtcttccctttaaaggttttgctgcagcaatgattgcaatgagtttcttatatttacaaggtggtagattgattgatgttttaactgcgatattagcaggtagtctaggatacctagtcactgagattttagatcgtaaattacacgcacagtttatcccagaattcattggttcattagttattgggattatcgccgttattggacatacacttattccaacaggtgacttggcaactattatcattgcggcagtcatgcctattgttcctggtgtattaataacaaacgcaatacaagatttatttggtggacacatgttgatgttcacaacgaaatcattagaagcattggttactgcgtttggcatcggtgctggcgttggtagcgtattaattttagtatag

SEQ ID NO: 412452 - DNA, 387 bp, Staphylococcus aureus
ttgaatatgaagttaggtagcattttgttacctagcttttttattatattcatagaagctgattttccgccagcttctgtgtttgggccgtttccccagcttacacgttatagtaagctgactttccgccagcttctgtgtttggccccccaacttgcaatgtcagtagaaactgaggatccaatttcactatgtttggccccccaacttgcaatgtcagtagaaactgaggatccaatttcactatgtttggccccccaacttgcaatgtcagtagaaactgaggatccaatttcactatgtttggccccccaacttgcaatgtcagtagaaactgaggatccaatttcactatgttggggccccgccaacttgcatcgtctgtag

SEQ ID NO: 412453 - DNA, 195 bp, Staphylococcus aureus
gtgtttgaaaatgaacctttgaaacctaatcatgaattatatgaattggataatgtaactataacagcgcatataactggtaatgattatgaagcaaagtatgacttattagatatttttaaaaacaatctagttaattttctcaataagaatagtctaattgagaatgaagttgatgctaaaaaaggctattaa

SEQ ID NO: 412454 - DNA, 1047 bp, Staphylococcus aureus
ttgggacttgctacaccaacatctattatggtaggtaccggtcgtgcagctgaaaatggtattttatttaaaggtggcgagtttgttgaacgcacacatcaaattgataccatcgttttagataagacgggtaccattacaaatggtcgtccagtcgtgacagattatcatggtgacgatcaaacgctacaactgcttgctactgctgaaaaagattctgaacacccattggcagaagccattgtcaattatgcaaaagaaaagcaattaacattaactgagacgacaacatttaaagcagtacctggtcatggaattgaagcaacgattgatcatcaccatatattggttggtaaccgtaaattaatggctgacaatgatattagcttgcctaagcatatttctgatgatttaacacattatgaacgagatggtaaaactgctatgctcattgctgttaattattcattaactggtatcatcgcagtggcagatactgtaaaagatcatgccaaagatgctataaaacaattgcatgatatgggtattgaagttgccatgttaactggcgataataaaaacactgctcaagccattgcaaaacaagtaggcatagatactgttattgcagatattttaccagaagaaaaagctgcacaaattgcgaaactacagcaacaaggtaagaaggttgcgatggttggtgacggtgtaaatgatgcacctgcattagttaaagctgatatcggtatcgccattggtacaggtacagaagttgcgattgaagcagctgatattactattcttggtggcgacttgatgcttattcctaaagccatttatgcaagtaaagcaaccattcgtaatattcgtcaaaatctattttgggcattcggctataatattgccggtatccctatagctgcattgggcttacttgcgccatgggttgctggtgctgcaatggcactaagttcagtaagtgttgtaacaaacgcacttagattgaaaaagatgcgattagaaccacgccgtaaagatgcctag

SEQ ID NO: 412455 - DNA, 1335 bp, Staphylococcus aureus
atggttaaaaatcataaccctaaaaatgaaatgcaagatatgttaacgcctttagatgctgaagaagcagctaaaacaaaattacgcttagatatgagagagattcctaagtcttcaattaaaccagaacattttcatttaatgtacttattagaacaacattctccatattttatagatgctgaattaactgaactacgtgacagtttccaaatacattatgacattaatgacaatcatacaccttttgataatattaaatcatttactaaaaatgaaaaattacgttacttactcaatatcaaaaatttagaagaagtaaatcgtacacgctacacatttgtgttggcaccagatgaattatttttcacaagagatggattaccaattgctaaaacaagagggttacaaaatgttgttgatccattacctgtgtcagaagctgaatttttaacaagatataaagcactggttatctgtgcattcaatgagaaacaatcatttgatgctttagttgaaggaaacttagaactacataaaggaacgccatttgaaactaaagttattgaagcggcaactttagatttactaacggcatttttagatgaacagtatcagaaacaagaacaagattatagtcaaaattatgcatatgtacgtaaagtaggacataccgtttttaaatgggttgctatcggtatgacaacgttaagtgttttattaattgcattcttagcctttttatatttttcagtaatgaagcataatgagcgcattgaaaaaggataccaagcatttgtaaaggatgattatacgcaagtactaaatacgtatgatgatttagatggaaaaaaattagataaagaggcactttacatttatgccaaaagttatatccaaacaaataaacaaggtttagaaaaagataagaaagaaaatttacttaataacgtgacaccaaattcaaacaaagactacttgttatattggatggaattaggacaaggacatcttgatgaagcgattaatattgccacttatttagatgataacgatattacaaagttagcgttgattaataaattaaatgagattaaaaataacggagatttatcgaatgataaacgttctgaagaaacgaaaaagtataacgataaattgcaagatattttagacaaagaaaaacaagttaaagatgaaaaagcgaaatctgaagaagagaaagcaaaagcgaaagatgagaaattaaagcaacaagaagagaacgaaaagaaacaaaaagaacaagcacaaaaagataaagaaaaacgccaagaagctgaaagaaaaaaatag

SEQ ID NO: 412456 - DNA, 570 bp, Staphylococcus aureus
gtgttaagagccttaaaagcgattgaacgttcaaatgttgttttagtggtcattgatgcagaacaaggcattattgaacaagataaacgtgttgcaggatatgcacatgaacaaggtaaagcagtcgtgattgtcgtaaataaatgggatactgtggaaaaagatagtaaaacgatgaagaaatttgaggatgaagtacgtaaagaattccaatttttagattatgcacaaattgcttttgtgtctgctaaagaacgcacaagattacgtacattattcccttacattaatgaagcaagtgaaaaccataaaaaacgtgtacaaagttcaactttaaatgaagttgttactgatgcaatttccatgaaccctacaccaacagacaaaggtagacgtttgaatgtcttttatgcaacacaagttgctatagagccaccgacatttgttgtatttgttaatgatgtagaattaatgcatttttcttataaacgctatttagagaatcaaatccgtgccgcttttggttttgaaggtacaccaattcatattatagctcgaaagagaaattaa

SEQ ID NO: 412457 - DNA, 846 bp, Staphylococcus aureus
atggctgctatttcggctgttatgaataaaaatgatgctattttatcagatgagcttaatcatgcatcaattattgatggatgtcgcttatctaaagctaaaattattcgagttaatcattcagacatggatgatttacgtgcgaaagcaaaagaagcagttgaatcaggtcaatacaataaagttatgtatatcactgatggcgtttttagtatggatggtgatgtggctaaattacctgaaattgtagaaattgcagaagaatttggtttattaacttatgttgacgacgctcatggttcaggtgttatgggtaaaggtgctggtacggttaaacattttggtttacaagataaaatcgatttccaaattggtacgctttctaaagcaattggtgtcgttggcggttatgtagcaggtacaaaagagttaatagattggttaaaagcacaatcacgaccattcttattctctacatcattagcacctggggatactaaagcaatcactgaagcagttaaaaagttaatggcttcaactgaattacatgataaattatgggacaatgcgcaatatttaaaaaatggattgtcaaaattaggatatgatacaggtgagtcagaaactccaattacaccagtaattattggtgatgaaaaaacaactcaagaatttagtaagcgtttgaaagacgaaggtgtctatgtgaaatctatcgttttcccaacagtgccaagaggtacaggacgtgtaagaaatatgcctacagctgcacatacaaaagacatgttggatgaagcaattgcggcttatgaaaaagtaggaaaagaaatgaagttgatttaa

SEQ ID NO: 412458 - DNA, 1485 bp, Staphylococcus aureus
atgtttaactactcaggattaaacgaagaatgtggcgtgtttggtatttggaatcatcctgaagcagcgcaactaacatatatgggacttcatagtttgcaacatcgtggtcaagaaggtgcaggtatagttgtttctgatcaaaatgaattaaaaggcgagcgaggattaggcttactaactgaagcgattaaagatgaccaaatggaacgattaaaaggatatcaacatgcaattggtcacgtccgttatgctacttcaggtaataaaggtattgaaaatattcaaccgtttctgtatcacttttatgatatgagtgtaggtatttgtcataatggtaacctcattaatgctaaatcattgcgtcagaatttagaaaaacaaggtgctatcttccattcgtcttctgatactgaagtcattatgcatttgatacgtcgaagtaaagctcctacttttgaggaagcgttgaaagaaagtttgcgaaaagttaaaggcggttttacatttgcgattttaactaaagatgcgttatatggcgcagtagatccaaatgctatcagacctcttgttgtaggtaaaatgaaagatggtacatacatccttgcaagtgaaacatgtgcaatagatgtgttaggtgcagaatttgttcaagatattcatgcaggtgaatatgtcgtgattaacgataaaggtattacagttaaatcctatacacatcatacgacaactgcaatttctgcgatggaatatatttattttgcgagaccagactcaacaatagctggtaaaaatgtccatgcagtacgtaaagcttctggtaaaaaattagcccaagaaagccctgtaaacgctgatatggtcatcggtgtacctaattcatcattatctgcagcgagcggttatgctgaagaaatcggtttgccatatgaaatgggactagttaaaaatcaatatgttgcaagaacatttattcaaccaacgcaagagttacgtgaacaaggtgtaagggtgaagctatctgcagtgaaagatattgtagacggtaaaaatattattcttgttgatgattctattgttcgcggtacgacaattcgacgcattgtgaaaatgttaaaagattctggtgcaaataaagtgcatgtgcgtatagcatcgccggaatttatgttcccgagtttttatggaatcgatgtttcaacaacggcagaattaatttctgcaagcaaatcacctgaagaaattaaagattatattggcgctgattcgttagcatatctatctgtagatgggttaattgaatcaattggtttagattatgacgcgccttatagtggcttatgtgtagaaagtttcactggagattatcctgcagggttatatgattatgaagcaaattataaagcacatttaagtcatcgacaaaagcaatatatttctaaaaacaaacacttttttgatagcgagggaaatttaaatgtctaa

SEQ ID NO: 412459 - DNA, 528 bp, Staphylococcus aureus
atgaatcaaacaactaaactttgtgcagcaacgacattagcattaggtactttaattggcgcaacagttgtagggactgcatcaccaatacatcaagaagcacaggcggcaacaacaccttactatacttatcatggatatatcggtcataacgctaattttataatggataagcattttattaacgctattaaatatgacaacgtgacatttaatggcattaaattagcgaagacaaatgcgacaaaaaaagtagagaaatacgatcaaacttttaaaggtgtaactgcaaaaggaaatgaagcgaatcaattacaatttatcgttaaaaataatatatcactaaaagatattcaaaaagcttatggtaaagatttgaaaaaagataataataaaacgaaagaatctgatagcggtattttttattatcaacattctaaaaagtcattaggcatttggtttgttgttgatcataatagagtggttgaagttacagtgggacatacgccatacaaaacgagtaaataa

SEQ ID NO: 412460 - DNA, 258 bp, Staphylococcus aureus
atgggtgctgattatattgcagtacacactggttatgatttacaagcagaagggcaatcaccattagaaagtttaagaaccgttaaatctgttattaaaaattctaaggttgcagtagcaggtggaattaaaccagatacaattaaagaaattgtcgctgaaagtcctgatcttgttattgttggtggcggaatcgcaaatgcagatgatccagtagaagctgcaaaacaatgtcgcgctgcaatcgaaggtaagtaa

SEQ ID NO: 412461 - DNA, 861 bp, Staphylococcus aureus
ttgacgtatattacaaatgaaaatccagctgtgacaattttacatgcacaaggaacgccaaatgtaacaccagagttgattgcagaaacgaatgagaagtacggtttcaacgatccattattaattcaatataaaaattggttacttgaagcgatgcaatttaattttggtacaagctacattacaggtgatcctgttgctgaacgcattggtccagcatttatgaatacattgaaattaacaataatttcaagtgttatggtgatgattacatcaattattttaggtgtagttagtgcattaaaaagaggaaagttcactgatcgtgcgatacgttcagtggctttctttctaactgcattaccatcatattggatagcttcaatacttattatttacgtttcagtgaagttaaacatattgccgacttctggattaacaggtccagaaagttacatattgccagtgatcgttattacgattgcctatgctggtatttactttagaaatgttagacgctcgatggtggaacaattaaatgaagattatgtactttatttaagagcaagcggtgtgaaatctatcacattaatgttgcatgtgttgcgtaatgctttacaagttgcggtatcaatcttttgtatgtctataccaatgataatgggtggactagttgttatcgagtatatctttgcatggcctggactaggtcaattaagtttaaaagcaatacttgaacatgattttccagtcattcaagcatatgtattaattgtagctgtattatttattgtatttaatacattagcagatatcattaatgcgctattaaatccaagattaagggagggcgcacgatga

SEQ ID NO: 412462 - DNA, 537 bp, Staphylococcus aureus
atgaaaatcaatgagtttatagttgtagaaggacgagatgatactgagcgtgttaaacgagctgttgaatgtgatacgattgaaacgaatggtagtgccatcaatgaacaaactttagaagtaattagaaatgctcaacaaagtcgaggcgttattgtattaacagatccagatttcccaggagataaaattagaagtacaattactgaacatgtcaaaggtgttaaacatgcgtatattgatagagaaaaagctaaaaataaaaaagggaaaatcggtgttgaacatgccgacttaattgatattaaagaagcgttactgcatgttagttcaccctttgatgaagcttatgaatcaattgataaatctgtgcttatagagttggggttaatcgttgggaaagatgcaaggcgccgtagagaaattttaagtagaaaattgcgaatcggccattcgaatggtaagcagttattgaaaaagttaaatgcatttggttataccgaagcggatgtaaggcaagctttagaagatgaatga

SEQ ID NO: 412463 - DNA, 1356 bp, Staphylococcus aureus
atgggaaaatattttggtacagacggagtaagaggtgtcgcaaaccaagaattaacaccagaattggcatttaaattaggaagatacggtggctatgttctagcacataataaaggtgaaaaacacccacgtgtacttgtaggacgcgatactagagtttcaggtgaaatgttagagtcagcattaatagctggtttgatttcaattggtgcagaagtgatgcgattaggtattatttcaacaccaggtgttgcatatttaacacgcgatatgggtgcagagttaggtgtaatgatatcagcctctcataatccagttgcagataatggtattaaattctttggatcagatggttttaaactatcagatgaacaagaaaatgaaattgaagcattattggatcaagaaaacccagaattaccaagaccagttggcaatgatattgtacattattcagattactttgaaggggcacaaaaatatttgagctatttaaaatcaacagtagatgttaactttgaaggtttgaaaattgttttagatggtgcaaatggttcaacatcatcactagcgccattcttatttggtgatttagaggcagatactgaaacaattggatgtagtcctgatggatataatatcaatgagaaatgtggctctacacatcctgaaaaattagcagaaaaagttgttgaaactgaaagtgattttgggctagcatttgacggcgatggagacagaatcatagcagtagatgagaatggtcaaatcgttgacggtgaccaaattatgtttattattggtcaagaaatgcataaaaatcaagaattgaataatgacatgattgtttctactgttatgagtaacttaggtttttacaaagcgcttgaacaagaaggaattaaatctaataaaactaaagttggcgacagatatgtagtagaagaaatgcgtcgcggtaattataacttaggtggagaacaatctggacatatcgttatgatggattacaatacaactggtgatggtttattaactggtattcaattagcttcagtaataaaaatgactggtaaatcactaagtgaattagctggacaaatgaaaaaatatccacaatcattaattaacgtacgcgtaacagataaatatcgtgttgaagaaaatgttgacgttaaagaagttatgactaaagtagaagtagaaatgaatggagaaggtcgaattttagtaagaccttctggaacagaaccattagttcgtgtcatggttgaagcagcaactgatgaagatgctgaaagatttgcacaacaaatagctgatgtggttcaagataaaatgggattagataaataa

SEQ ID NO: 412464 - DNA, 933 bp, Staphylococcus aureus
atgctagaaagtaaatggggcttaagatttattgcctttcttttggcattgtttttctttttatctgttaacaatgtttttggaaatatctttaacactggtaatcttggtcaaaagtctagtaaaacgattcaagatgtacccgttgaaattctttataacactaaagatttgcatttaacaaaagcgcctgaaacagttaatgtgactatttcaggaccacaatcaaagataataaaaattgaaaatccagaagatttaagagtagtgattgatttatcaaatgctaaagctggaaagtatcaagagaagtatcaagttaaagggttagctgatgacattcattattctgtaaaacctaaattagcaaatattacgcttgaaaacaaagtaactaaaaagatgacagttcaacctgatgtaagtcagagtgatattgatccactttataaaattacaaagcaagaagtttcaccacaaacagttaaagtaacaggtggagaagaacaattaaatgatatcgcttatttaaaagccacttttaaaactaataaaaagattaatggtgacacaaaagatatcgcagaagtaacggcttttgataaaaaactgaataaattaaatgtatcgattcaacctaatgaagtgaatttacaagttaaagtagagccttttagcaaaaaggttaaagtaaatgttaaacagaaaggtagtttagcagatgataaagaattaagttccattgaattagaagataaagaaattgaaatcttcggtagtcgagatgacttacaaaatataggcgaagttgatgcagaagtagatttagatggtatttcagaatcaactgaaaagactgtgaaaatcaatctgcctgaacatgtcactaaagcagaaccaagtgaaacaaaagcttatatcaatgtaaaataa

SEQ ID NO: 412465 - DNA, 810 bp, Staphylococcus aureus
atggatttttccaacttttttcaaaacctcagtacgttaaaaattgtaacgagtatccttgatttactgatagtttggtatgtactttatcttctcatcacggtctttaagggaactaaagcgatacaattacttaaagggatattagtaattgttattggtcagcagataagtatgatattgaacttgactgcaacatctaaattatttgatatcgttattcaatggggggtattagctttaatagtaatattccaaccagaaattagacgtgcgttagaacaacttggtagaggtagctttttaaaacgctatacatctaatacgtatagtaaagatgaagagaaactgattcaatcggtttcaaaggctgtgcaatatatggctaaaagacgtataggtgcattaattgtctttgaaaaagaaacaggtcttcaagattatattgaaacaggtattgcaatggattcaaatatttcacaagaacttttaattaatgtctttatacctaatacacctttacatgatggtgcaatgattattcaaggcacgaagattgcagcagcagcaagttatttgccattgtctgatagtcctaagatatctaaaagtttgggtacaagacatagagcagcggttggtatttcagaagtatctgatgcatttaccgttattgtatctgaagaaactggtgatatttcggtaacatttgatggaaaattacgccgagacatttcaaacgaaatttttgaagagttgcttgctgaacattggtttggcacacgctttcaaaagaaaggtgtgaaataa

SEQ ID NO: 412466 - DNA, 909 bp, Staphylococcus aureus
atgacaaagaaaaaaggaattgatattattggtgtaccgtcaacatttggacaaagaaaattaggtgttgatttaggaccaactgcgattagatatgcaggtttaataccaagactaaagcaattagaccttgatgttaatgacaaaggggatattaaggtatcagttgtagacattgaaaaatttcaaagtgaacaaaaaggattaagaaactacgatgaaattatagatgttactcaaaaattaaataaagaagtatcagcatcaattgaaaataacagatttcctctagttcttggtggagatcattctattgcggtaggttcagtatcagcaataagtaaacattataataatttaggtgttatttggtatgatgcacatggtgatttaaatatacctgaagagtcaccaagtggaaatattcacggtatgcctctaaggattttgacaggtgaaggtcctaaagaacttttagaattaaatagtaatgtaatcaagccagaaaacatcgtactaattggtatgagagatttagataaaggtgaaagacaatttatcaaagatcataatattaaaacatttactatgtcagatattgataaattggggataaaggaagtaattgaaaatacaatagaatatttgaagtcacgcaatgttgatggcgttcatttatctttagatgttgatgccttagatccacttgaaacgccaggcacaggtactagagtcttaggcggacttacatatagagaaagtcattttgcgctggaattattacatcagtctcagtcagttacttcaatggacttagttgaagtgaatccacttattgatcataacaaccatactgctgagcaggcagtttcattaattggaacattttttggtgaaactttattataa

SEQ ID NO: 412467 - DNA, 507 bp, Staphylococcus aureus
atgcatcagatttttaaagcagttagagatttggcagatgaatataaagatgttgtcttcatttatccaatgcatcgtaatccaaaggtaagagcgattgccgaaaaatatttatctgggagaaatcggattgaattaattgagccattagatgcgattgagttccataattttacaaatcaatcgtacctcgtactgacagattctggtggtattcaagaggaagctcctacatttggaaaacctgtgttggtattaaggaatcatacagagcgtcctgaaggcgttgaggcgggaacatcgagagtaattggcacagattatgacaatattgttcgaaatgtgaaacaattgattgaggatgatgaagcgtatcaacgtatgagtcaagcgaataatccatatggtgatggacaagcatcacgacgtatttgtgaagcaatagaatattattttggattgcgttcagacaagccggatgaattcgtacctttacgtcataaataa

SEQ ID NO: 412468 - DNA, 858 bp, Staphylococcus aureus
atggtattaattagtttaatcttagcgcaaattgttttacctttaattacaccatctgccgaagatactacttttaaaggtatgacttatcaatctgccaaaattttcattgtccaaaaagttatcgaacattttaaaaacgaaagtaaaaaagacaaaaacgatacaaattatcgcccagttttaaaccaatactttggagaattgttatttttattaaattcagaacctgataatcaaaatacaaaagaactcaaacgtttagaagatattgcaaaagtaatcgaaacatctacacttgagcgtttaattgataaaggtaaggcaacatatcaggatataaataattaccgcaatattgtcgaattaacagagacacaccgtactgcttcatttattgaaaaatttgcaaacttcttcaagatgttatggcttagacttaaagcgatgaagcactacaaatccttaaacaaagaatctaagaagcaagaatttgaaaattcattcaaagatgttcaaaaaattatgcgtattgtgaatcacaatattattttacgcttaaaagaagaacaaaatagtacaaatgtacttgaggttagcttagtcattaatcattactatgatatgagtcgctcattaaagtggcgtgcgcaacgtcgaaaagaacgtcaagaaaacagcaatcaaatcataccgcaagctatgttccataaccacaaattggaagcattgtacttacaacgtcatcttttagatgaattaattcgcaaaaataaaatcaacaatatcgttgcagctcaaattcgagaaaatatcaattacaacgaaattgtcttgtctttacagtccaaacattaa

SEQ ID NO: 412469 - DNA, 1830 bp, Staphylococcus aureus
atgttcaatcaatttaaaagacttattatagggcaacctaaaaaaaacagagaactaaaagacgaaaagatatcgaagtttaaagggttagcgattctttcgtcggatgcattatcttcagtagcttacggtcccgaacaaatactgattacattatcagtagtgggtgcagttgcaacttggtatactttaccgattgcaggtgctgttctgatcttattagctgctttaattatgtcttataggcaaattatttatgcatatcctaaaggtggcggcgcgtatatggtgtccaagaccaatttaggagaaaaatggggattgcttgcaggaggctcattattagtcgattacatactgactgtcgctgttagtatatcatctggtgctgatgcatttgttgctgcattcccaagtttatatgggcataaagtactgattgcatgtttacttgtactttttattttaatattaaatttacgtggtttaactgaatctgccaccgtattatcctatccagtatatcttttcattatagggttagtgatattaatatttataggtactttccgtgtggcgacaggagatattcaaccacatatgcatgcatcagtaggaactgcggttcctggagtaacattattcttgctattaaaagcattttcatcaggggcttcatcattaacaggtgttgaagctatttcaaatgcggtaaccaattttagagaaccaagtgctaataatgctgtaaaaacgttaattgctatgggttcaattttagcgtttttattagttggtatcgttggtttagcatatgtttatggaattatgccacaaacggaaacgacagttttatcacaattagctatgcaaatatttggtgataatgctgccttctattttgtacaggcaacgaccgtgatgattttggtattagcagccaacactggatttacagcttttccgatgttagcggcttcaatgtctaaagataaatatatgcctagaatgtttactgttagaggtgatcgcttaggctactctaactcgattattattttaggtgtattagccattattttaattattgtatttgatggtatgactgaagatttaattccattgtatgcggttggtgtattcattccatttacactagcacaattcggtatggttattaaatggattcatgaacgtcctaagaattggttaagtaagttgtctgtgaacttacttggtggtatcgtgacatttattgtttttatgattttactcataactaaatttagccaagtttggccgatacttattttcttgccgttcgtggtaattttcttcttgaaaattaacaaacattatcgagatatcgcagaacaattgcgttctgatattgatgttcataatgtagaagtagtagatcgtaatttagcaattgttccgataacaagcattacaactgcagttgataagtctatttattacgcacaaatgcttgcgaataatgatgtcattgcagtacatgtatcatttggagatgaagatgaaaaagcattccaagagaaatggaaacgtcatttcccagatgtaagattagttattttacactcggaatatcgcagtattatacgaccaatttcacgttttatcgataagattaatcgtaaagccaacgatcaaaactatatgattacagtagtgataccagaatttattactaagaaacgttggcataatttattacacaatcaaactagtttgcgtatgaaattgtatttaatttatcaaaagaatgttaacgtatgtacaattccatttaaacttaaaaaatag

SEQ ID NO: 412470 - DNA, 1500 bp, Staphylococcus aureus
atgactactaaaaaactgtattttctatccatttctattatcattttagtcgccatttcaattgctatatatataacattaaatagcaatacgaagacacggttaaccaatgattcgcaacaacaaatagatacaattatcgagcatgatttacaaaagggacatattcctggagcatcaattttaatagtaaaaaatggcaaagtttttttaaataaaggttatggttatcaagatgttgataaaaaagtcaaagcttctcccacaacaaagtatgaaattgcttctaatacgaaagctttcacaggtcttgcaattttaaaattagctcaagaaggtcgattaaacttaaatgatgccgtatccaaacatgtgcctcattttaaaatgaactataatggtcaaaatgaaactattacgattaagcaacttttggctcaaacaagtggtatacctagtgatattacaagcgaagactccgtaacaaataaaaataatcgtttaaatgatgtaacccgtgcaattatgggtgatgaattacatcataagcccggaaaagaatttgaatactcaaatatgaactatgatttattaggtttaattatccaaaacgttacgaagcaatcctatacaaaatatattacaaattcatggctcaagcctttgcatatgacacatacatcattcaaacaaaccaataacaaatcaaaacatgatgctattggctacgaattacaaggttcgacacctgtcgtctctaaacctgaatttaacctttgggatacaccatcagcatatatgttgacatcaactgaagatttggaacattggataaaattccaacttaatccacctaataaatacaaatcattagttcaacaatcacataaaaatttatcatcaacaatcggtgaacctaatgccaatgcatatgcttccggctggtttaccaataatgatgaacatttagtgtttcattcaggaacgctcgataacttttcatcatttattttactaaatccaaaacaaaattatggaattgttgtgcttgcaaatctaaattcggaatatgtacccaaattagttgagcatcttaacacacaattattaaatcataaacaatattctactgtagcatctgtactgaacgcgcataaagatcaatttaatattgttaccgttttgatgacaacacttattttattagcatttatattctcagcttatcgtgcttggcaaatgcgtcacgggaaaatcatcctgcgcaaatcaaaacttaccacatttttaagttggctaactttatgtttatgtatcgctatagcgctcatattatatgcattaccatatctcattctcggtagcaataactggtcttttgtactgacttggctgccaatagaaattaaattaacgttaactacaacatttattgcattattcagtatgttaattacaattctgttagtactacatacaacgacaattaagaaaccataa

SEQ ID NO: 412471 - DNA, 153 bp, Staphylococcus aureus
gtggtaccagaagaaaaaggttctattactttgtcaaaagaagcagctatcatatttgcaaccgcaaaattcaaaccatttaagaacagaattaaaaataacccacaaaaaacaaatccatttcttaaattacatgaaaacaaaaaatcttaa

SEQ ID NO: 412472 - DNA, 408 bp, Staphylococcus aureus; identical to SEQ ID NO: 407717

SEQ ID NO: 412473 - DNA, 483 bp, Staphylococcus aureus; identical to SEQ ID NO: 407718

SEQ ID NO: 412474 - DNA, 2553 bp, Staphylococcus aureus
ttggtcgaaatttatttaacaagcatcattgataatttacataatgcacaaaaaaatgttggcgctattatgacgcgtgaacatggtgtgaatagtaaattctcgaattacttattaaatccaattaacgacttcccggaattatttacagatacgcttgtaaattcaatttctgcaaacaaagatattacaaaatggttccaaacatacaataaatcattattgagtgcgaattcagatacgttcagagtgaacacagattataatgtttcgactttaattgaaaaacaaaattcattatttgacgagcacaatacagcgatggataaaatgttacaagattataaatcgcaaaaagatagcgtggaacttgataactatatcaatgcattaaaacagatggacagccaaattgatcaacaatcaagtatgcaagatacaggtaaagaagaatataaacaaactgttaaagaaaacttagataaattaagagaaatcattcaatcacaagagtcaccattttcaaaaggtatgattgaagactaccgtaagcaattaacagaatcactacaagatgaacttgcaaataacaaagacttacaagatgcgctaaatagcattaaaatgaacaatgctcaattcgctgaaaacttagagaaacaacttcatgatgatattgtcaaagaacctgatacagatacaacatttatctataacatgtctaaacaagactttatagctgcaggtttaaatgaggatgaatctaataaatacgaagcaattgtcaaagaggcaaaacgttataaaaatgaatataatttgaaaaaaccgttagcagaacacattaatttaacagattatgataaccaagttgcgcaagacacaagtagtttgattaatgatggtgtcaaagtgcaacgtactgaaacgattaaaagtaatgatattaatcaattaactgttgcaacagatcctcattttaattttgaaggcgacattaaaattaatggtaaaaaatatgatattaaggatcaaagtgttcaactagatacatctaacaaggaatataaagttgaagtcaatggcgttgctaaattgaaaaaggatgctgagaaagatttcttaaaagataaaacaatgcatttacaattgttatttggacaagcaaatcgtcaagatgaaccaaatgataagaaagcaacgagtgttgtggacgtaacattgaatcataaccttgatggtcgcttatcgaaagatgcattaagccagcaattgagtgcattatctaggtttgatgcgcattataaaatgtacacagatacaaaaggtagagaagataaaccattcgacaacaaacgtttaattgatatgatggttgaccaagttatcaatgacatggaaagtttcaaagacgataaagtagctgtgttacatcaaattgattcaatggaagaaaactcagacaaactgattgatgacattttaaataacaaaaagaatacaacaaaaaataaagaagatatttctaagctgattgatcagttagaaaacgttaaaaagacttttgctgaagaaccacaagaaccaaaaattgacaaaggcaaaaatgatgaattcaacacaatgtcttctaacttagataaagaaattagtagaatttctgagaaaagtacgcaattgctatcagatacacaagaatcaaaaacaattgcagattcagttagtggccaattaaatcaattagataataacgtgaataagctacatgcgacaggtcgtgcattaggtgtaagagcgaatgacttgaaccgtcaaatggctaaaaacgataaagataatgagttgttcgctaaagagtttaaaaaagtattacaaaattctaaagatggcgacagacaaaaccaagcattaaaagcatttatgagtaatccggttcaaaagaaaaacttagaaaatgttttagctaataatggtaatacagacgtgatttcaccgacattattcgtattattgatgtatttactatcaatgattacagcatatattttctatagttatgaacgtgccaaaggacaaatgaatttcattaaagatgattatagtagtaaaaaccatctttggaataatgtcattacgtcaggtgttattggtacaactggtttggtagaaggattaattgtcggtttaattgcaatgaataagttccatgtattagctggctatagagcgaaattcatcttaatggtgattttaactatgatggtcttcgtacttattaatacgtatttactaagacaggtaaaatctatcggtatgttcttaatgattgctgcattgggtctatactttgtagctatgaataatttgaaagcggctggacaaggtgtgactaataaaatttcaccattgtcttatatcgataacatgttcttcaattatttaaatgcagagcatcctataggcttggcgctagtaatattaacagtacttgtgattattggttttgtactgaacatgtttataaaacactttaagaaagagagattaatctaa

SEQ ID NO: 412475 - DNA, 1206 bp, Staphylococcus aureus
atgttgaatgaaatagataattttgatttggttttagtctataaactagatcgattaactcgaagtgttaaagacttactagagatactagaattgtttgagaataaaaacgtgttgtttaggagcgcaacagaagtatatgacacaacttctgctatgggacgtttgttcgtaacattagtaggtgctatggcagagtgggagcgtactacaattcaagagcgtactgcaatgggtcgacgcgcatcagctagaaaagggttagctaaaactgtccctcctttctattacgacagagtaaacgataaatttgtgcctaatgaatataaaaaagtattacgatttgcagtagaagaagcgaaaaaaggtactagtttaagagaaataactataaaattgaacaactctaaatacaaagcacccttaggtaaaaactggcacagatcagttataggcaatgctctaacgagtccggtagctagaggtcatcttgttttcggtgacatattcgtcgaaaacacccacgaagctattataagtgaagaagaatacgaagaaataaaattaaggataagtgaaaaaactaactctacaatcgtaaaacataacgctattttcagaagtaaactattatgtccaaactgtaaccagaaattgactttaaacacagtcaagcatacgcctaaaaataaagaagtttggtattctaaactatacttttgttctaactgcaaaaatactaaaaataaaaatgcatgtaacatcgacgaaggcgaggttttaaaacaattttacaattatctaaaacaatttgatttaacatcatataaaatcgaaaaccaacctaaagaaatagaagatgtcggcatcgatattgaaaagttgcgaaaagaacgcgctagatgtcaaacactttttatagaaggtatgatggataaggatgaagcttttccaataataagtcgtattgacaaagaaatacatgagtatgaaaagcgcaaggataatgataagggtaagacttttaactatgagaagattaaaaatttcaagtattcattgctaaacggctgggaattaatggaagatgagttaaaaactgaattcataaagatggcaatcaaaaacattcattttgaatatgtaaaaggaattaaagggaagcgccagaactcattgaagattacgggtatagagttttattaa

SEQ ID NO: 412476 - DNA, 240 bp, Staphylococcus aureus; identical to SEQ ID NO: 410374

SEQ ID NO: 412477 - DNA, 234 bp, Staphylococcus aureus
ttgattaaagataaagggaaaataattgatattcatttatctgtaaaagccactgaaaatattgatggcgaagtgctgttcaaagcaacacaacctttaggtagaacaatgaaggttggtgttcaaaataatgcaatgacaattactttaacgaaacaaaatcaatggcttgatagtttgaagttcttagttaagtgcattgaagaaagtatgagaatcagtgatgaagcataa

SEQ ID NO: 412478 - DNA, 231 bp, Staphylococcus aureus
atgaaaattttagatagaattaatgaacttgcaaataaagaaaaagtacaaccacttactgtagctgaaaaacaagaacaacatgctttgagacaggactatttgagcatgattagaggtcaagtgttaacaacattctctacaatgaaagtcgttgatccaatcggtcaggatgtcacaccaaataaagtttatgatcttcgccaacaatacggttatattcaaaattaa

SEQ ID NO: 412479 - DNA, 153 bp, Staphylococcus aureus
gtggtggttaaagaaattttgagactattattcttactagcgatgtatgagttaggtaagtatgtaactgagcaagtatatattatgatgacggctaatgatgatgtagaggcgccaagtgattacgtctttcgagcggaggtaagtgagtga

SEQ ID NO: 412480 - DNA, 789 bp, Staphylococcus aureus
atgcaagcattacaaacatttaattttaaagagctaccagtaagaacagtggaaattgaaaacgaaccttattttgtaggaaaagatattgctgagattttaggatatgcaagggcagacaatgccatcagaaatcatgttgatagcgaggacaagctgacgcaccaatttagtgcatcaggtcaaaacagaaatatgatcattatcaacgaatcaggcttatacagtttaatctttgacgcttctaaacaaagcaaaaacgaaaaaatcagagaaaccgctcgaaaattcaaacgctgggtaacatcagatgtcctaccagctattcgcaaacacggtatctacgcaacagacaatgtaattgaacaaacattaaaagatccagactacatcattacagtgttgactgagtataagaaagaaaaagagcaaaacttagttttacaacaagaaatcggagaactaaaacccaaagcagactatgtagatgaaatcttaaagtcaactggcacattagctacaactcaaatcgcggcagactacgggatttcagcacaaaagttgaacaagctactacacgaagctagattacaacgaaaagtaaataaacagtgggtgctttactcagaacacatgggcaagagttacacagaatcagacactatagcaattgtacgctctgacggtagagaagacacagttttacaaactagatggacacaaaaaggcagattgaaaatacatgaaatcatgactgaattcggttatgaagctaacgtaactgcttaa

SEQ ID NO: 412481 - DNA, 228 bp, Staphylococcus aureus
atgacacaaatcatcgttaaaaaagaaccggtaacattaaagacactgagagctaaatatgatttgactcaagctaaagctggcgctaaagttggcgtgtctgctgatgtgtggcataactgggaaaaaggaaagactttccctaatgttccgcagttaaaaaagatagaagaaaaatttgacatatcctacgatgatattatttttttaaccaaaaataacggttaa

SEQ ID NO: 412482 - DNA, 633 bp, Staphylococcus aureus
atgttaggcaacaaagaaattatggcaaaaaatatttctcgtctcatgaaagaaaataatattgatagaaataaattgtctagagacttaaaaataagttatacaactttatcagattggattaacgcaaaaacgtacccgagaatagacaaaatcgaaatgttagccaaatacttcggagtagaaaaatcatcacttgttgaatcacctagcaaaatcgtgcaacttgatacactaccagttaaaaaaataccagttgtatcaaagatatctgctggcatgcctatttacgcagaagaaaatttaatcgattacatatacttcgctactaaaaatttgagttctaacaaagaagaattcggattacaagtgtctggggatagtatggacaaactctttcaagaaggtgacgttgtagttgttgaaaaggattcgactgttgaaaatggtcaattaggcgttgtattagtcaatgggtacaacggtactgtcaaaagaatacgttacaacaacgaccaaattattttaattcctgaatcaaacaatcctagtcactatccacaagtatacggaaaagatgacgagattaagattgtaggtagagttgtagcaagtcaaaaactattcaaataa

SEQ ID NO: 412483 - DNA, 699 bp, Staphylococcus aureus
atgaaaagtaaattaattttatactatgaatttattttgtttgtactaacacttttggctattaccgccatttttataaacgatccacttctaaaaacaatagacattattgtttatgctatttttgttactgatgtgacggtacgcttgttgttaagtaaaaacaaaattaaatttattcaaaataacatttgggattttatagctataattcccttcgattctatatttaaagtcgcaagattaatacgattattcaaattgttgaggtgcttatctatactgaaaaggtatacacccactgttttgaacatacttaatcaacacggcttaatgaatgcgctcgtttttataaccgtcactataacatctttgagcgtacctgtatatttagttgaaccaaacataaaaacttacggcgatgctctatggtgggcagttgtaacaacgacaactgttggatacggcgatttatctccttcaacaattgtaggcagagtgattggatttattcttatgatatcgggaattggagttatagggcttttaacaagttctctagctagccattttatacggaaaaaacctcaatcgaataacacaatagaatttttaaaagaagaaataaatagaatagaagatttatccaacaatgatatagaacggatttgtttaatgctaaaaactttcaaaaaataa

SEQ ID NO: 412484 - DNA, 663 bp, Staphylococcus aureus
atgtgcaagttggggaacggggcccaacatagagaatttcaaaaagaaattctacagacaatgcaagttggcggggccccaacacagaaggtgacgaaaagtcagcttacaataatgtgcaagttggggaacggggccccaacacagaaggtgacgaaaagtcagcttacaataatgtgcaagttggggaacggggcccaacatagagaatttcaaaaagaaattctacagacaatgcaagttggcggggccccaacacagaaggtgacgaaaagtcagcttacaataatgtgcaagttggggaacggggcccaacatagagaatttcaaaaagaaattctacagacaatgcaagttggcggggccccaacacagaaggtgacgaaaagtcagcttacaataatgtgcaagttggggaacggggcccaacatagagaatttcaaaaagaaattctacagacaatgcaagttggcggggccccaacacagaaggtgacgaaaagtcagcttacaataatgtgcaagttggggaacggggcccaacatagagaatttcaaaaagaaattctacagacaatgcaagttggcggggccccaacacagaaggtgacgaaaagtcagcttacaataatgtgcaagttggggaacggggccccaacatag

SEQ ID NO: 412485 - DNA, 216 bp, Staphylococcus aureus; identical to SEQ ID NO: 409121

SEQ ID NO: 412486 - DNA, 771 bp, Staphylococcus aureus; identical to SEQ ID NO: 407372

SEQ ID NO: 412487 - DNA, 282 bp, Staphylococcus aureus; identical to SEQ ID NO: 407821

SEQ ID NO: 412488 - DNA, 180 bp, Staphylococcus aureus; identical to SEQ ID NO: 409070

SEQ ID NO: 412489 - DNA, 180 bp, Staphylococcus aureus
atgaaattcattagtaataataatattacagatccaactttaaacttagcaatggaagaatatgttttaaaaaatttaccagcagaagaaagttactttttattttacataaatagaccatctatcattgttggaaagaattggtatgtcaacatttttttagacagttttcatgtgtag

SEQ ID NO: 412490 - DNA, 150 bp, Staphylococcus aureus
gtggatacagtaggtagaaataaaaaagtgattgaaaattatattcgtaatcaattacaagaggatatcgttgcagaccaaatctcaatggaagaatatttagatcctttcactggagagaaaaatagaaaaagaaagaaaaaagagtaa

SEQ ID NO: 412491 - DNA, 285 bp, Staphylococcus aureus
atgaactatgaaacaggggtccaactaggtgtaatggacgctaggttgaagaagatgagaaaacaacgtgatgagtacaagaagcaacgagatgagcttattggggatataggtaagttaagagaacgtaacaaagatctagagaagaaagcaagcgcatgggataggtattgcaagagcgttgaaaaagatttaataaacgaattcggcaacgatgatgaaagagttaaatttgggatggaattaaacaataaaatttttacggaggatgacacaaatggataa

SEQ ID NO: 412492 - DNA, 171 bp, Staphylococcus aureus
gtggatacagtaggtagaaataaaaaagtgattgaaaattatattcgtaatcaattacaagaggatatcgttgcagaccaaatctcaatggaagaatatttagatcctttcactggagagaaaaataaaaaagaaagaaaaaagagtaaccctttagggttgctggaatag

SEQ ID NO: 412493 - DNA, 150 bp, Staphylococcus aureus
gtggatacagtaggtagaaataaaaaagtgattgaaaattatattcgtaatcaattacaagaggatatcgttgcagaccaaatctcaatggaagaatatttagatcctttcactggagagaaaaataaaaaaagaaagaaaaaagagtaa

SEQ ID NO: 412494 - DNA, 255 bp, Staphylococcus aureus; identical to SEQ ID NO: 410710

SEQ ID NO: 412495 - DNA, 366 bp, Staphylococcus aureus
ttggtattagacagtattgtattttcagcaatgcgtctatttaatgatgcatatcctttagccgcgctcccaactgcacgtattaataagccaccagcaagaacagcaggaccaatagatgcaccaaaaattgctaagcctaccgaagcctttctaacccaaccaggaagatgtgtaaatccatcaactaattttgttaatccttccgcacctgctctaatcataggcgttaaatctttaccaacttcaattgctaacgattcaaaagcgccacctaattgttccagagcacctttgaggttatctttcatcaaatcagctgcttttttactttcaccattagagttcttcaatgatttgctatag

SEQ ID NO: 412496 - DNA, 360 bp, Staphylococcus aureus
ttgccaccaaaaaactttatagtttctcctaaaccgttaataccgtttctgaaccattccacacgatcatatgcggttttaaaaactttatatgcaattgtaatagcagttattgtagcacctataggtcctgttaaaaactttaaggctacaccagcaaatcttgcgcctccacttactgcaaataaggattttgcggctaatcctaaaccgtttttcaaaagtttgaacggtaaaattgctagctttgcagaatttttcaaaacatttataggttttaaattaaacaacatagctccggctaatcctttaaagccttttgacgtttttcctgttgtagaaccaagaaataaggtttga

SEQ ID NO: 412497 - DNA, 1023 bp, Staphylococcus aureus
atgtacttaatagaaccgattaggaatggagaatatattactgatggtgcgattgcactcgccatgcaagtttatgttaatcagaatatctttttagatgacgatattttattcccttattattgtgatccaaaagtggaaattggacgttttcaaaatactgctatagaagtgaatcaagattatatagataaacacagtattcaagtagttcgccgagatactggtggtggcgctgtgtatgttgataaaggtgccgttaatatgtgttgtattttagaacaagacacttcaatttatggtgattttcaacgattttatcaaccagctataaaggcattgcatacattaggtgcaagagatgtgatacaaagcggtagaaatgatttaacattgaacggcaaaaaagtgtcaggcgccgcaatgacattaatgaacaatcgtatttatggcggttattcgctattacttgatgttaattatgaagcaatggataaagtgttaaagcctaatcgcaaaaagattgcatcgaaagggattaaatctgtgcgcgcacgtgttggtcatcttagagaagcattggatgaaaagtatcgtggtataaccattgaagaatttaaaaatttaatggtgacgcagattttgggaatcgatgacattaaagaggcaaaaaggtatgaattatccgaagcagattgggaagcgattgatgaattagctgataaaaagtataaaaattgggattggaattatggcaagtcacccaaatatgaatataatcgaagtgaaagattatcatcaggtactgtagatattaccatttctgttgaacaaaatcgtattgcagattgtagaatttttggtgatttctttggacaaggtgatataaaagatgtggaacaagcgctacaaggaacaaaaatgacaagagaagatttaacgcatcagttaaagcaattagacatcgtttattattttggtaatgttacggttgaatcattggttgagatgattttaagttaa

SEQ ID NO: 412498 - DNA, 945 bp, Staphylococcus aureus
atgcagagtagtaaatggaatgcaatgtctctgttaatggatgacaagacaaagcaggctgaagtattgcgtactgcgattgatgaagcagatgcgatagtgattggaattggtgcaggcatgtctgcatctgacggatttacatatgtaggagagcgttttacggaaaatttcccggattttattgaaaaatatcgcttctttgatatgttgcaagcgagtttacatccttatggcagttggcaagagtattgggcgtttgagagtcgttttattacattaaactatttagatcaacctgtaggtcagtcttacctcgctttaaaatccttggtggaaggtaaacagtaccacattataactacgaatgcagataatgctttcgatgtagctgattatgatatgacgcatgtatttcatatacaaggcgagtatatactgcaacagtgtagtcagcattgtcatgctcaaacgtatcgcaatgatgatttaattcgtaaaatggttgttgcgcaacaagatatgcttataccttgggagatgattccaagatgtccaaaatgtgatgctccaatggaagtgaataaacgtaaagcggaagttggcatggttgaagatgctgaatttcatgcgcaactgcaacgttataatgcttttctagagcaacatcaagatgataaagtgttgtatttggaaattggaattggttttactacaccacaatttgtgaaacatccttttcagcgtatgacacgtaaaaatgaaaatgcactttatatgacgatgaataaaaaggcatatcgcattccgaattcaattcaagaacgtaccatacatttgactgatgatatctcaacattgattacaacagcactccggaacgatagcacaacgaaaaataacaacattggagagacagaagatgtacttaatagaaccgattag

SEQ ID NO: 412499 - DNA, 948 bp, Staphylococcus aureus
atggctttaacgatacggtatcaaactacatatgaaccgtttaaagtagttgatgatatcaaagagataccaaaagatgcgactattgtttggtatgattttgatgaaccgaatgaacaagaaaatgaatggtttaaagcacattttaattttaatgatttagaagtggatgatgcaattaacggtatgccacgagctaaatataaatcttataaagattatcaatacttagtatttcatagtattatggggtcaaactattcaccaatagcactaaatatttttatacaagacaatgtattagtaacatatcatcatcaaacgttggaatcattaaataaagtagtctataagtatatgaatacattagatgcagaattagattgtgcagatgtcgtcatattaattttagatatgatggttgataaatatttcaactttgtatatgcacttgaagatagtgtttatcattttgaagaccgccatgtagatgatcgctttaataaaatggtcatggatagtgtctttaagttacgttcggatttgattaaagtaaaacgtgtactgtttcctatgcaagagctaattgatacaatgaaacaaaatggtgatttgattatagataataaacattcgctatacattcaacatatcgatgaccacttgattaagcaacgtaatatcattcgcactgctcaagaaatgacaaacgaaatacgagaaaattttgagtcatacacgtcatttagaatgaatagtattatgcaagtactgacattagtatcagttatattttcaccgttaacattcatagctgggatttatggtatgaactttgtaaatatgccggcattacatttacattatggatattatatttgcttagctgtaatgtttgttatagctgtcgtattaatcatctttttcagacgtaaaaaatggttttaa

SEQ ID NO: 412500 - DNA, 435 bp, Staphylococcus aureus
atgaaaaaagtaatcggactgctactagtaagtacattagctttaacagcttgtggtgaaaaagaaaaaccaaaaaaagaagaaaataaaaagtcgcaaacacaaaagcacaaagatagtaaaacaaaaaatcatcaagaaaaaccgaaaaaagttgaagataaaaatccacctattaatagcgtacaaaacaatgcaaccaatcaaagccaagcacaaaacaatcaatttagtaatcattcagacctgtctaataacgcacctgcaaatataaatgaaaacgattcacaaaatactaatttaaatgatgagtatgtcgtttcgcctggctggactaaagatgaacaggctaaagcttttgaagagtacaaaaaaggaaaagaagaggaagcaagagctggtgctagcgcagtaccaggagccaatattaactaa

SEQ ID NO: 412501 - DNA, 1389 bp, Staphylococcus aureus
atgaatgcttttcttacactgattaatattattgtattggtgattttcatcgtaatattgcacatgatggctcgcaaacatatatcttttgcgaaacgtgtgtttacagctttaggtatcggcattgtatttggcgtgttattacatcttgtctatggaacacattcgaatgttattacatcaacaagtgactggttcaacattgtcggacaaggttacgttgcattgttgcaaatgattgtgatgcctttaattttcatttctattgtcgctgcattcactaaaattcaaatcggagaaaagtttgctaaaattggtagtctcatttttatctttttaattggcactgtcaccattgctgcaattgttggtgttgtgtatgccttggtgtttggtttagacgcatcaacaattaatcttggtaacgctgaacaagcacgtggaagcgaaattgctaaacaagcgaaagatttaacagcacatacgttaccacaacaaattttggaattattgcctaaaaatccattcttagatttcactggacaacgtgcaacttccacgattgctgtcgtgatatttgcttcgtttataggatttgcttatttacgcgtagcacgcaaacaacctgatcatggtgaattgcttaagcgtgcgattgacgctatctattcactagtaatggcgattgtgacgttcgtcttacgtttaacgccatacggtgtattagcaattatggccaacacgttatcgacaagtgactttggcgccatttggactttaggaaaattcttaatcgcatcgtacgctgcattaattacgatgtatatcattcacttaattattttaagcctgttaggcattagccctattcgctatattaaaaagactttggaagtattaatctttgcattcacatcacgctcaagtgcgggcgccttaccactgaatgtacaaacacaaacaagacgtctaggcgtgccagaaggtattgccaatttcgctgcgacatttggattgtcgattggacaaaatggttgtgcaggcatttaccctgccatgcttgcaattatggtcgcacccgtcgctaatgtagaaattgatttacaatttattgtaacgttaatcgctgtcgtgattattagttcattcggcgttgctggcgtcggtggcggggctacatttgcatccatattggtgttgtcaacgttaaacttgccagtcgctttagccggcgtgctcatctccgttgaaccattgattgacatgggtagaacagcattaaacgtgaacgattcaatgctagctggtacaggtaccgccaagttaactaaacattgggacaaagatactttcgaatcaaatgataatgctgcattaacttcacactaa

SEQ ID NO: 412502 - DNA, 591 bp, Staphylococcus aureus
atgccagtttctacaggtatgcaattagttggtacaacattattcagcgttatctttttaggtgaatggtcttcaatgactcaaattatctttggtttaatcgccatgatattattagttactggtgtagcacttacttcacttaaagctaaaaatgaacgtcaatcagataatcctgaatttaaaaaagcaatgggtattttaattgtatctacagttggatatgtaggtttcgttgtacttggtgacatctttggtgttggtggaactgatgcattgttcttccaatctgtcggtatggcaattggtggctttatcctatccatgaatcataaaacatcacttaaatcaacagcacttaatctattgccaggtgtgatttggggaattggtaacttgttcatgttctattctcaaccaaaagttggtgtagctacaagtttctcattatcacagttacttgttatcgtttcaaccttaggcggtattttcattttaggagaaagaaaagatcgtcgtcagatgacgggtatttgggcaggtattattattatcgtgatagctgctataattctaggtaatttgaaatag

SEQ ID NO: 412503 - DNA, 336 bp, Staphylococcus aureus
atgtttaatcatgtgaaaaaaggtgcaatcttagttaacgcagcacgtggtgcagtcatcaatacacctgatttaatcgctgcagtgaacgatggtactttgttaggtgctgcgattgatacttatgaaaatgaagcagcatacttcacaaatgactggactaataaagacattgacgataaaacattattagagttaatcgaacatgaaagaattttagtaacaccacatattgctttcttctctgatgaagcagtacaaaaccttgttgaaggtggtttaaacgcagcattatctgtcattaacactggtacatgtgaaacacgtttaaattaa

SEQ ID NO: 412504 - DNA, 171 bp, Staphylococcus aureus
atgtataaaaattataacatgacccaacttacactaccaatagaaacttcgttagaattcctcaaaatgatatttcgcgatatgttaatgaaattgttgaaacgatacctgatagcgaattcgatgaattcagacatcatcgtggtgcaacatcctatcatccaaaaatga

SEQ ID NO: 412505 - DNA, 1041 bp, Staphylococcus aureus
gtgaaagattttaatctacatattactgacaaagaattcattgtatttgttggaccatcgggatgtggtaaatcaacaacattacgaatggttgctggactagagtctatcacatctggagatttttatattgatggggaacgcatgaacgatgttgaaccaaagaatagagatattgcgatggtatttcaaaactatgcattatatccacatatgactgtttttgaaaatatggcatttgggctaaagctacgtaaagtgaataaaaaagagattgaacaaaaagttaatgaagcagcagaaatattaggattaactgagtatcttggtcgtaaaccaaaagcgttatctggtggacagcgtcaacgtgttgctttgggcagagctattgttagggatgcgaaagtctttttaatggatgaaccattatcgaatctagatgcgaagcttcgagtacaaatgcgcacagaaatattgaaattacataagcgacttaatactacgacaatttatgttacacatgatcaaactgaagcattgacgatggctagtcgaattgttgttttgaaagatggcgacattatgcaagtcggcacacctagagaaatatatgatgcccctaattgcatatttgtggcgcaatttatcggctcaccagcaatgaatatgttgaatgccacagttgaaatggatggattgaagataggaacacaccattttaaattacataataaaaaatttgaaaagttaaaagctgctggctacttagataaggaaattattttaggtattcgagctgaagacattcatgaagaaccaatatttattcaaacttctccagaaacacaatttgaatctgaagtagttgtatccgaactgttaggttcagaaattatggtacatagcacattccaaggaatggaaatgatttctaaattagattcaagaacacaagtgatggcgaacgacaagattacactagcatttgatatgaataagtgtcacttttttgatgaaaaaacaggaaatcgtatcgtctaa

SEQ ID NO: 412506 - DNA, 582 bp, Staphylococcus aureus
atgaatcggcagtccactaagaaagctttactaataccatttgtcatcatgatcatcacagcaattgttttaatgggtgtatggtttatctttaatagtcttatagcattaattgcatctatcgttcttgtcgtgatgattattgttagcatcgttttattcagacaagctttaatgaaaatggatagttatgtagatggtttgagtgctcaaatttcaacaacaaataataaagcaatcaaacatttaccaattggtatcattgttttagatgaaaatgatcacatcgaatgggttaaccaatttatgacagatcatatggaagcaaacgtcatttctgaatctgtaaatgaagtatttccaaacattttaaagcaattagatagagtgaaatccgttgaaatagaatataatcagtatcatttccaagtacgttattctgagaatgatcactgcctctatttctttgatataactgaacaagtacaaacaaatgaactatatgaaaattctaaaccaatcattgcgacattatttttagataactacgatgagattacgcaaaatatgaatgatacgtag

SEQ ID NO: 412507 - DNA, 1368 bp, Staphylococcus aureus
atggtaacgcgtgttattagtcgatgggcaactgagtataatatattctttaaaaggtatagttccgatcaattcgtagcctatttaaatcaaaaaatattagctgacttagaagaatctaaatttgatatcttgagtcaattacgtgaaaaaagtgttggttatcgtgcccaattaacattaagtatcggtgttggtgaaggtactgaaaatttaatcgacttaggtgaattatcacaatcaggcctagacttagcattaggacgtggtggtgaccaagttgcaattaaaagtattaatggtaatgtgcgcttctatggcggtaagactgacccgatggagaaacgtactcgtgtaagagcgcgtgttatctcacatgcgttaaaagatatccttgcagagggtgacaaagtcattatcatgggacataaacgtcctgacttagatgcaattggtgcagcaatcggtgtgtctagatttgcaatgatgaataatttagaagcatacatcgtattaaatgagactgacattgatccaacattacgacgcgtgatgaacgaaatagataaaaagccagagttaagagagcgatttattacatcagatgatgcttgggatatgatgacatctaagacaaccgtagtgattgttgatacgcataaaccggaactggttttagatgaaaatgtcttaaataaagcaaaccgtaaagttgttatcgatcatcatagacgtggtgaaagcttcatctctaatccattgttggtatatatggaaccatatgcaagttcgacagctgaattggtaacagagttactggaatatcaaccaacagaacaacgtttaacacgtcttgaatcaacagtgatgtatgcaggtattattgtagatacaagaaactttacattacgaacaggatcaagaacattcgatgcagcgagttatttacgtgcacatggtgcagatacgattttaacgcaacatttcttaaaagatgatgtggatacttacattaatcgatctgaattaattcgaactgtaaaagtcgaagataatggcatagccattgcgcatggttcagacgataaaatttatcatccagtaacagttgcacaagcagcagatgaactgttaagtttagaaggtattgaagcatcatatgttgttgcgagacgtgaagataatttgattggtatatctgcgcgttcactcggttcagtaaatgttcagttaacaatggaagcacttggtggcggtggacatttaaccaatgctgcaacacaacttaaaggtgtgacagtcgaagaggcgatagcacaattacaacaagcaattacagaacaattaagtaggagtgaagatgcatga

SEQ ID NO: 412508 - DNA, 1077 bp, Staphylococcus aureus
atgggctctgatgaacaaggtattgttcacatggtaggacctgagacaggacttacacagcccggcaaaacaatcgtttgtggtgactctcacacagcaacacatggagcatttggtgctattgcatttggaattggaacaagtgaagttgaacatgttttcgcaactcaaacgctatggcaaacaaaacccaaaaacttaaaaatcgatattaatggtaccttaccaacaggcgtctatgctaaggacattattctgcatttaattaaaacgtatggtgttgattttggtacaggctatgctttggaatttactggcgaaacaattaaaaacctttcaatggacggtcgaatgactatttgtaacatggctatcgaaggtggtgccaaatacggcataatccaacctgatgatataacatttgaatatgttaaagggagaccatttgccgataacttcgctaaatcagttgataagtggcgtgagctatattctgatgacgacgcgatatttgatcgtgtaattgaacttgatgtttcaacattagaaccacaagtgacatggggaactaatcctgaaatgggtgttaatttcagtgaaccattccctgaaatcagtgatatcaacgatcaacgtgcgtatgattatatgggattagaaccaggacaaaaagctgaagatatcgacttaggatatgttttcctaggttcatgtacaaatgctagactttcagatttgattgaagctagtcatattgttaaaggaaataaagttcacccaaatattacagctattgtcgtaccaggttctcgtacagtaaaaaaagaagctgaaaaattaggtctagatactatctttaaaaatgcaggttttgaatggcgtgagccaggatgttcaatgtgtttaggtatgaatcctgaccaagtaccagatggtgtacattgtgcttctacaagtaatcgaaactttgaaggacgacaaggtaaaggtgcaagaacacatttagtatcccctgctatggcagcagctgcagctatacacggtaaatttgtggatgtgagaaaggtggttgtttaa

SEQ ID NO: 412509 - DNA, 573 bp, Staphylococcus aureus
atggcagcaatcaaacctattacaacatataaaggtaaaatcgtcccacttttcaatgacaatattgatacagaccaaattattcctaaagttcatttaaaacgtatttcaaaaagcggatttggtccattcgcttttgatgaatggcggtacttacctgatggttcagataatcctgatttcaatccaaataagcctcaatataaaggtgcatccatattaattactggtgataattttggatgtggttcaagtcgcgaacatgctgcttgggcacttaaggactacggattccacattatcatcgcaggaagtttcagtgacattttttatatgaattgtaccaaaaatgcgatgttacccattgttttagaaaaaagtgcacgtgaacatcttgctcaatatgtagaaattgaggtcgatttaccaaatcaaactgtgtcatcaccagataaaagttttcattttgatatcgatgaaacatggaaaaataaacttgtaaatggcttagatgacattgcaatcaccctacaatatgaatcattaatagaaaaatatgaaaaatcactttaa

SEQ ID NO: 412510 - DNA, 396 bp, Staphylococcus aureus
atgccaattggaccagttaaagccgtgaagacagttcctaatataggtactttagtcgataaaaaactaattaatccatcagcctttgcaataccagctaatagtggggctaatacagttactgcattgccaattgtacttataaatgcgcctaatccaaaaactacaggaccaattgcagcagcaataccaccgaaaataacaattgatcttttagaaccatcacttaaattggaaaaccaatcaaccgctatagatagctttttgattaattcttccattactggtgcaaacgcactttcaatagaagtccatacatcagcacctactaattttaatttattcattgctactttaaatctttcggagccactttcagaatctttaaacgtttga

SEQ ID NO: 412511 - DNA, 1761 bp, Staphylococcus aureus
atgactgtaaaatacgatcctcgaactattccatctgatttaacagatgactatacaccagttgatattatggatccgtcgggagaagtgattgctacaggatcatttgataatagtaataaaacaaccacttatacttttacagattacgttgataagtatgaaaatgtaaatgcaaaattagttatgaattcttttattgataaaaaagaggtgccgaatgaagaaacagtagatttaacatttgcaactgctaatgagtcaataaataaaagttttaatgttagttaccaacgacctattgttgaacgtgcgtcgaatattcaatctatttttacaaatttagatttagacggtaacactgtagaacaaacagtttatgtgaatccacttagtttaaatgctcaaaacgctaaagttttaattagaggtgcaggcgtgtatgatgatggtggatttttcaatggtgaaggcagcactattatagacaatagcactgatattaaagtatataaggctaaaccaggacaaaaattgccgcaaaacaatagaatttatgattatagtcaatatgaagatgtaacaaatcaagtgaatattgataaaaattattctaataatcaagctatggttgattttggaaatataaattcaccttatatcatcaaggtgaaaagtaaatatacacctggagcagaggatagtttagcaatacaacaaggtgttagaatgacaacaactaatgatggtattttatcttatgctggttatacgaatagtattattagtactagtgaccaaggtggaggtaatggagaagaggcgcctgagaaaacatataaaataggtgactatgtatgggaagatgttgacaaagatggtgttcaaggtacagatgaaaaagaaaaaccaatcagtaatgtactagtaacattaacttatccagatggcacttcgaaatcagtgagaacagacgaaaatggacattatgagtttgataatttatatgatggtgaaacatatcaagtttcatttgaaacgcctgaaggctatgaaccaactaaagtcaatgctggaaataatagtgaattggattctaatggtagtaatgtttcagtaactattaatggctcagacgatatgacattagatagtggtttctacaaaacaccaaaatatagtataggtgattatgtatggttagatagcaataaagatggcgtccaagatgaagaagagaacggtatttcgggagtaacagtaacgttaaaagataaaaacggcaaaactttacaaactacacaaactgatggaaaaggtaagtatcgctttgataatttggacagtggagattataaagtagtatttgaaaaaccagaaggtttaacacaaacggctacaaattctactaacgaggatgaagatgctgatggtggagaagtagatgtaactattacagatcatgatgactttagcatagataacggttattttgaagacgatacagatgctgacgcagattcagatgctgacgcagattcagatgctgacgcagattcagacgcagatgcagattcagatgctgacgcagatgcagattcagatgctgacaaaggtcataatgacaaagtaaatagtaaagaattgcctgatactggtaatgaaaataatggtacattatttggttcattattcgctgcgcttggaggattattcttagttggcagacgtcgtaaaaacaaaaataatgaagaaaaataa

SEQ ID NO: 412512 - DNA, 1260 bp, Staphylococcus aureus
atgattcgtgaaattgaaacgcaagatttcgatatcgaacatctcgcgacggcaattcgtaaagttgaaacatcaacactaggtgaagaaagtgaaaatgactttatcggactgttcagcgatatggacttaagttcaacgcggctaggtaacaatgtcaaagaacgtactgcgttaatctctaaagtcatggttaaccttgacgatttaccatttgttcacagtgatatggaaattgatatgttaggtgatgcatatgaattccttatcgggcgctttgcggcgacagcgggtaaaaaagcaggcgagttctatacaccacaacaagtatctaagatactggcgaagattgtcacagacggtaaagataaattacgtcacgtgtatgacccaacatgtggttcaggttcattactgttacgtgttggtaaagaaacacaagtgtatcgttattttggtcaagaacgtaacaataccacttacaacttggcgcgcatgaatatgttattacatgatgtacgatatgaaaatttcgacatccgtaatgatgacacgcttgaaaatccagcctttttaggcaatacatttgatgcggttattgcgaatccaccatacagtgcgaaatggacagcagattcaaaatttgaaaatgacgaacgattcagtggttacggcaaacttgcgccaaagtctaaagcagactttgcctttattcaacacatggtacattacctagatgatgaaggtaccatggcagttgtactaccacatggtgtcttattccgtggggctgcagaaggcgtcattcgtcgttatttaatcgaagaaaagaactacttagaagccgtgattggcttaccagccaatattttctatgggacaagtattccaacgtgtatcttagtatttaaaaaatgtcgccaacaagacgacaacgtactatttatcgatgcatccaatgattttgaaaaaggaaaaaatcaaaaccatttaagcgatgcccaagtcgaacgtattatagacacatataagcgtaaagaaacgattgataaatatagctacagtgcgacattacaagagatcgccgataacgattacaacttaaacataccgagatatgttgatacattcgaagaagaagcaccgattgatttagatcaagtccaacaagatttgaaaaatatcgataaagaaatcgcagaaattgaacaagaaatcaatgcatacctgaaagagcttggggtgttgaaagatgagtaa

SEQ ID NO: 412513 - DNA, 1464 bp, Staphylococcus aureus; identical to SEQ ID NO: 411623

SEQ ID NO: 412514 - DNA, 885 bp, Staphylococcus aureus; identical to SEQ ID NO: 411625

SEQ ID NO: 412515 - DNA, 1113 bp, Staphylococcus aureus; identical to SEQ ID NO: 411626

SEQ ID NO: 412516 - DNA, 783 bp, Staphylococcus aureus; identical to SEQ ID NO: 411627

SEQ ID NO: 412517 - DNA, 486 bp, Staphylococcus aureus; identical to SEQ ID NO: 411628

SEQ ID NO: 412518 - DNA, 396 bp, Staphylococcus aureus; identical to SEQ ID NO: 411629

SEQ ID NO: 412519 - DNA, 270 bp, Staphylococcus aureus; identical to SEQ ID NO: 411630

SEQ ID NO: 412520 - DNA, 1005 bp, Staphylococcus aureus; identical to SEQ ID NO: 411631

SEQ ID NO: 412521 - DNA, 843 bp, Staphylococcus aureus; identical to SEQ ID NO: 411632

SEQ ID NO: 412522 - DNA, 660 bp, Staphylococcus aureus; identical to SEQ ID NO: 411633

SEQ ID NO: 412523 - DNA, 1026 bp, Staphylococcus aureus; identical to SEQ ID NO: 411634

SEQ ID NO: 412524 - DNA, 1143 bp, Staphylococcus aureus; identical to SEQ ID NO: 411635

SEQ ID NO: 412525 - DNA, 915 bp, Staphylococcus aureus; identical to SEQ ID NO: 411636

SEQ ID NO: 412526 - DNA, 1338 bp, Staphylococcus aureus; identical to SEQ ID NO: 411637

SEQ ID NO: 412527 - DNA, 735 bp, Staphylococcus aureus; identical to SEQ ID NO: 411638

SEQ ID NO: 412528 - DNA, 675 bp, Staphylococcus aureus; identical to SEQ ID NO: 411639

SEQ ID NO: 412529 - DNA, 363 bp, Staphylococcus aureus; identical to SEQ ID NO: 411640

SEQ ID NO: 412530 - DNA, 2706 bp, Staphylococcus aureus; identical to SEQ ID NO: 411641

SEQ ID NO: 412531 - DNA, 1485 bp, Staphylococcus aureus; identical to SEQ ID NO: 411642

SEQ ID NO: 412532 - DNA, 1203 bp, Staphylococcus aureus; identical to SEQ ID NO: 411643

SEQ ID NO: 412533 - DNA, 195 bp, Staphylococcus aureus; identical to SEQ ID NO: 410129

SEQ ID NO: 412534 - DNA, 309 bp, Staphylococcus aureus; identical to SEQ ID NO: 411645

SEQ ID NO: 412535 - DNA, 324 bp, Staphylococcus aureus; identical to SEQ ID NO: 410127

SEQ ID NO: 412536 - DNA, 1323 bp, Staphylococcus aureus; identical to SEQ ID NO: 410126

SEQ ID NO: 412537 - DNA, 366 bp, Staphylococcus aureus
atgttaaatgaaaaagaaagttttagattattatatcaagctatacgagagcttgcagataaaattggagataatcagttagaaactaattccgttagtttattattattggactttgattttgaacatgaagtatttgatgaattgtatcttgcgattttaaaatatttaaatacagtaagtatagagaacataagtcatagtgagcttttgaatttaatagaaaatacgattccagaagatcgagagattaacacgtttgtaaaaaataaaataataattggctttgctaataattacttccctgaattacaagtattagcaaacgaaataaaatctgatatggctagttcattaaaacaatga

SEQ ID NO: 412538 - DNA, 1305 bp, Staphylococcus aureus
atgtctaaattattaatgataggcactggtccggtcgcaatccaattagcgaatatttgctatttaaaatcagattatgagattgatatggttggacgtgcctcaacatcagaaaaatcaaaacgcttatatcaagcgtataaaaaagagaaacaatttgaagtcaaaatacaaaacgaggcgcatcaacatctggaaggtaagtttgaaattaatcgtttgtataaagatgttaaaaacgttaagggtgaatacgaaacggttgtcatggcatgcacagcagatgcttattatgacacactacagcaattgtcgttagaaactttgcaaagtgtcaaacatgtcattttaatttcaccgacatttggatcgcaaatgattgtggaacaatttatgtctaagttcagtcaggatatcgaagtgatttcattttcaacttatcttggcgatacacgtattgttgataaagaagcgcctaatcatgtgttgacaacaggtgtaaaaaagaaattgtacatgggatcgacacattcaaactcaacaatgtgtcaacgaatctctgctttagctgagcaattgaaaattcaattagaagtcgttgaatcgccactgcacgctgaaacgcgaaacagttcgctttatgtgcacccaccactatttatgaatgacttttcattgaaagccattttcgaagggacggatgtaccggtttatgtgtataagttatttcctgaaggaccgataacgatgacactaatccgtgaaatgcgtttaatgtggaaggaaatgatggctattttacaagcatttagagtgccgtcagtcaacctgcttcaatttatggtgaaggaaaattatccagtacgtcctgaaactttggatgaaggtgatattgagcatttcgaaatcttgccagatatcttacaagaatatctgctttatgtaagatataccgcaatcctcattgatccattttcacagccagacgaaaacggacattactttgatttttcagctgtaccatttaagcaagtctataaaaatgaacaggatgttgttcaaattccaagaatgccaagtgaagattattacagaacggcgatgattcagcatattgggaaaatgctaggtatcaaaacgccaatgattgatcagttcctaactcgctatgaagcaagttgccaggcgtacaaggatatgcatcaagatcaacacttatcttctcaatttaatacaaatctatttgaaggagataaagcactcgtcacaaaatttttggaaatcaatagaacgctttcacaataa

SEQ ID NO: 412539 - DNA, 1194 bp, Staphylococcus aureus
atgaaaggtgcaatggcttggccctttttgagattatatatattaacattgatgttctttagtgccaatgcaatcttaaacgtatttataccgttacgagggcatgatttaggcgcaacgaatacggttatcggtatcgttatgggggcatacatgttaacagcaatggtgtttcgaccatgggcaggacaaattattgctcgtgtcggtcccattaaagtattaagaattattttgatcatcaatgccatagctttaattatttatggttttactggattagaaggttatttcgtagcacgtgttatgcaaggtgtgtgtacggcattcttttctatgtctttacagttaggtattattgatgcattaccagaggaacatcgttctgaaggtgtatcattgtactcgctattttcaacgattccaaacttaattggaccattagttgccgtaggtatttggaatgcaaataatatttcactatttgcaattgtcattatctttatcgcattaacaacaacattctttggctatcgcgtgacctttgctgaacaggaacccgatacgtcagataagattgaaaaaatgccgtttaacgctgtaactgtttttgcgcaatttttcaaaaataaagagttgttgaacagtggtattatcatgattgttgcatcgattgtatttggtgcagttagtacatttgtaccgttatacacagtgagtttaggattcgcgaatgcgggaatctttttgacaatacaggccatcgcagttgttgtggcaagattttacttaaggaaatacattccgtcagatggtatgtggcatcctaaatatatggtatctgtactatcattattagtgatcgcgtcatttgtagtggcatttggtccgcaagtaggtgcaattattttctatggtagtgcaatattaataggaatgacacaagcaatggtgtacccaacattaacatcatacttaagcttcgtcttaccaaaagtaggtcgtaatatgttgttaggtttatttattgcctgtgcagacttaggtatatcgttaggtggcgcattgatgggacctatttccgatttagtaggatttaaatggatgtatctaatttgtggtatgttagtcattgtaataatgattatgagtttcttgaaaaagccaacaccacgtccagcgagtagtctttaa

SEQ ID NO: 412540 - DNA, 258 bp, Staphylococcus aureus; identical to SEQ ID NO: 410863

SEQ ID NO: 412541 - DNA, 501 bp, Staphylococcus aureus; identical to SEQ ID NO: 410353

SEQ ID NO: 412542 - DNA, 369 bp, Staphylococcus aureus
atgaattatttaagatataagcaatttgacaaagatgtcattactgtagccgttggctactatctaagatatgcattaagttatcgtgatatatctgaaatattgagagaacgaggcatctatgttcatcattcaacaatttatcgatgggtacaggaatatgctcctattttgtatcaaatttggaagaaaaagaataagcaagcttattataaatggcatatagatgagacgtatatcaaaattaaagggcaatggaattatttatatcgcgctattgatgcagatggccatacactagatatttcgttacgtaagaaacgagataatcactcagcatatacgtttattaaacgtcttattaaataa

SEQ ID NO: 412543 - DNA, 348 bp, Staphylococcus aureus
atgagttatgaaaatacttgtgatgtgatctgtgtacatgaggataaagttaacaatgctttaagttttttagaagatgataaatctaagaaattacttaacattttagaaaaaatttgtgatgagaagaaattgaaaatcatattatctttgattaaagaagatgagttgtgtgtttgtgatatttctttgatattgaaaatgagtattgcttcaacttcacatcatttaaggcttttatataaaaatgaggtacttgatttttataaagatggaaagatggcatattattttattaaagacgatgaaataagagagtttttctctaaaaatcatgagggtttttga

SEQ ID NO: 412544 - DNA, 618 bp, Staphylococcus aureus
atgattcaaacggttgttgctgctgctgttctttatattgctacagcagttgatttattagtaattttattaatattttttgctagagcaaagactagaaaagaatatagagatatttatgttggtcaatatttagggtctattattttaatattagttagtttgtttttagcttttgtattaaattatgttccagaaaagcggatattaggtttattgggtttaataccaatttatcttggaattaaagtggctatttatgatgattgtgaaggagaaaagagagctaaaaaagaattgaatgaaaaaggattgtctaaattagttggtacggttgcaattgttacgatagcaagttgtggcgccgataatattggtttatttgttccgtattttgtgacattaagtgttactaatttattacttactctgtttgtctttttaattttaattttcttcttggtgtttactgcacaaaaattagctaatatcccaggaattggagaaattgttgagaaatttagtcgttggattatggctattatttatatagctttaggtttatttattattattgaaaatgacactattcaaacaattttaggatttatattttaa

SEQ ID NO: 412545 - DNA, 450 bp, Staphylococcus aureus
atggaacttgatgcattagtaatgcctaacttagctaaaatggaattttctattaatccagaatattggaaagacgaaatgagcagaattaaatcattttttatagacaaacgtatctatacagttggaccaatagtatttacacgagaagttgtcgggctagatgaaatgaagtttgtaacctatatttcattaaattctgaaattgacgatatacctgaattgaatattaaatttataccttcaattgcccttttaccaactatttctcataaatgctttgatgaagatgaatttgaaaatgtttatatgagaatcaaagagtttgcagtagaaaataacataacgctatcaaattcaccattctaccatgtgatggttgattattttggtggtcaagtatatgaaattcacgctgaaatcaatttagatgaggatgaattggaatga

SEQ ID NO: 412546 - DNA, 450 bp, Staphylococcus aureus
atgaatgaattaagctattctactataatgtttagaaatgttatatcaaaagaatatttagatatagacttaaaaaatttaaatgaagtgacaacacattttttaaatgaagtaaagcattatgatttaaatgaaaatgaaccattaattctcactattaaccagttgatgaaaaatgagaaagtaaatattacaatttattcatctattaataatttaagtagtttacatgattcttttgaatttcaatcttacctttatattgatcaaatgttacataatcaacttagaccactaaattatgaagaagatattaagaagggtttagaagatatagaaagatttgcaaaagaaaatcaacttcaacgtatatcaccatattattttatactaaatgatgtgaatggatttaaatggattgatattaaagtaaaagttatggaatattga

SEQ ID NO: 412547 - DNA, 171 bp, Staphylococcus aureus
atgttaagttatggtggattgcttaaacaaaagcataaaattttaaatttagacgatgctgaagatggtaatttgattaatacaagtgatgaagataaaacgacagacgaagaaaaaaagcacattcaattacggcaatttggaatttcgaaaagcaaaattattatttaa

SEQ ID NO: 412548 - DNA, 1905 bp, Staphylococcus aureus; identical to SEQ ID NO: 408598

SEQ ID NO: 412549 - DNA, 699 bp, Staphylococcus aureus
atgaaattaacagcgatagctaaagcaacattagcattaggaatattaacaacaggtgtgatgacagcagaaagtcaaactgtaaacgcgaaagtaaagttggatgaaacacaacgcaaatattatataaatatgctaaaagattattattctcaagaaagctatgaatcaacaaacattagtgttaaaagtgaagattattatgggtctaacgttttaaactttaaccaacgaaataaaaatttcaaagtatttctaattggcgacgatagaaataaatataaagaactgacgcatggccgtgatgtctttgcagtacctgaattaatagatactaaaggcggcatatataccgttggcggtataacaaagaaaaatgtgagatccgtgtttggctatgtaagtcatccaggactgcaagttaaaaaagttgatcctaaagatggcttttcgataaaagagttgttctttattcaaaaggaagaagtatcattgaaagaacttgattttaaaatcagaaaaatgttagtcgaaaaatatagattgtataaaggaacagcagataaaggtagaattgttatcaatatgaaagacgaaaagaaacatgaaattgatttaagtgaaaaattaagttttgatcgtatgtttgatatgctggatagtaagcagattaaaaatattgaagtgaatttgaattaa

SEQ ID NO: 412550 - DNA, 183 bp, Staphylococcus aureus
atgttgattatattgaaaatattgattttagtagttttttcaatagtttatttaactttgttgtttttatggtatgagacagaatcttggaagttacttatatctatttttttattaatttcattagttatgttgtatattaaatatttcactgatggtcatagttatccagttattttttaa

SEQ ID NO: 412551 - DNA, 363 bp, Staphylococcus aureus
atgacaaagcgatttttattgataacattgattttagttatatctacagctttaattgcatgtggtaaaaagtatgataaagaaatagaagaagttactagtttagaaataaaagatagaaatgattcatctgatacaacctttaataaatatgaaagaaagaaaagtaatatttatgtgtatcaagatggtaaagttattatgttaagttatgcacctttaaaaggaaactcagagttaagtacacgtatgtatttaaaaaatgaaactacaggaaaatatgaaaaagatattaatggtaaaccaaagaaatttatgaaagaaaataagcccgattataaagaggaaaatttaaaagaatag

SEQ ID NO: 412552 - DNA, 135 bp, Staphylococcus aureus; identical to SEQ ID NO: 408666

SEQ ID NO: 412553 - DNA, 705 bp, Staphylococcus aureus; identical to SEQ ID NO: 408724

SEQ ID NO: 412554 - DNA, 846 bp, Staphylococcus aureus
atggatttagttgaagattgtaatacatttctgtcttttgtagctgataaaactttagaaaaacagaaattatataaagctaattcttgtaaaaatcgattttgtcctgtctgtgcttggagaaaagctagaaaagatgctttaggtttatctttgatgatgcaatatattaagcagcaagaaaataaggagtttatttttttaactttgactacacctaatgtaatgtgtgaggaattagaaaatgaaataaaacgttacaataattcttttagaaaacttataaaaagaaaaaaagtaggtagtgttataaagggatatgtccgtaagttagagattacatataataaaaaaagagatgactataatcctcattttcatgtgttaattgcagtaaataaatcgtatttcacagataaaagatattatattagccaacaagaatggttagatttatggcgtgacgtaacaggcatttcagaaatcacacaagttcaagttcaaaaaataagacaaaataacaataaagagttatatgaaatggctaagtattctggtaaagatagtgattatttaataaatcaaaaagtatttgatgcattctataaatcacttaaaggtaaacaggtattagtttattcaggattatttaaagaggctaaaaagaaattgaaaaatggggatttagattatttaaaagaaattgatccaaccgaatatatctatcaaattttttatatttggaaacaaaaagagtatttaactagtgaactttatgacttaacagaacaagaaaaaagagaaattaatcacaaaatgatagacgaaatcgaggaagaacaataa

SEQ ID NO: 412555 - DNA, 675 bp, Staphylococcus aureus; identical to SEQ ID NO: 408718

SEQ ID NO: 412556 - DNA, 906 bp, Staphylococcus aureus
atggaagagaaacaatacttatggagatataacgatatagaaaaaagaatgaatgaacttcacaaaaaatataaagaattagtggatatattttttggtgatgtaatagataaaaatactggatacttccccttttattccggtataaaatatagctacgcagatttgaatatcagtttttacagaggtttaatttatattcacggtgggtcagaaggcatgcaagcgaaaaaaataaatatttctgtagatgatgttttaaaaagaacagaaagatctttcgagaagttaagtgaatatataaaaagtactttcattttcgaaaaagtcatacatgattttcaaatgtttaacttgagcgatttagctagtatatacaacgacgatgcaattgcgcattattattttgaaactcattctgacttatatttatcagataaatctacaaaaatttatcgaacacctaattctttgttagaaaacgcaaatgatttaccggcttctttaagaaaatacactcaattattagaaacagttaatgacaaggattttgaaactcatatagttgaagcttatgattgctttatgtctgaaaaaaggctagctacatcactacttttaggtagagcgctagaactaatgtgtaggctgatattgaacaagtttgataaagatataattaaacaaacacctgattacaagaggaatataagaacatttttaaacgaaatggaaaacaacgatttaatagaagaacatttaaaacattcagtcaaagctgctattgaacacagaaactctattatgcatggtattaaaatcgaagagtacaattcgataattcaaacattatttgacgaaatagctaagctgtctaatgtatataagtctcttaataaacagtaa

SEQ ID NO: 412557 - DNA, 162 bp, Staphylococcus aureus
atgagcaacatttataaaagctacctattagcagtattatgcttcacagtcttagcgattgtactcatgccgtttctatacttcactacagcatggtcaattgcgggattcgcaagtatcgcaacattcatattctataaggaatacttttatgaagaataa

SEQ ID NO: 412558 - DNA, 387 bp, Staphylococcus aureus
atgaaaatcacagtaaacgataaaaatgaggttatcggatacgttaatactggcggtttacgcaatagtttagatgtagacgataacaatgtacctatcaaatttaaagaagagtttgaacctagaaagtttgttttcactaacggcgaaattaaatacaatagcaatttcgaaaaagaagacgtaccgaatgcatcaagtcaacaaaacacgtcagatttgagtgatgaggaacttcgcagaatggttgcgagtatgcagaaacaagttgttcaaagcacaatgttatcaatgcaagcaaataaacaaaatgcattaatggcaaagcaaattgtggaactcaataaaaaattagaagaagctaaaggagaggctgaaaatgcttaa

SEQ ID NO: 412559 - DNA, 177 bp, Staphylococcus aureus
atgcttaaattaatttcgccaacattcgaagatattaaaatatggtatcaatgtaaaatatatactaaagaagatattgcttggtttgtagatatggaagttatagacaaagaagaatacgcaatcattactggcgataaatatccagatacaaaagcaaacgagtcacaagtgtaa

SEQ ID NO: 412560 - DNA, 435 bp, Staphylococcus aureus
atgaaaaataatataaaagatttaacgctttctgaaattgtcggcgccatcatgttgttttctttcggtttcagaattttattccgtggcgtattttgggttaaagagcaaggtgatgtgctagatgattctgatttttatttagccttgcatcatgttatgcctatttggatatggggcatattggttggcgttgcaggattgattataattgtttcatctgtatttttagcttcaagtgacgaaaacaatagatgtagctggttgttgctggtgggttgtgctttgacaggcgtattgtactttttaatgacaagtgcaagtgtttatcatgatattaactggctttctactgtgcattttgccgtaatgtcaacgaccggttttgttgttgcatttattggaggtgctgacatctatgcaagaagaaagtaa

SEQ ID NO: 412561 - DNA, 396 bp, Staphylococcus aureus
atgcaagaagaaagtaatttcgtttctaagcacgaatttaccaaagctaacggcaagatctatgagcgtattaacgaaatagataggaagcatacagagtcgttaggcgaattgaaagttaaagtagaaacgcaaacagcggtgcaaaaacaatcatacgaagctcaaaaagaaacgaacgcaaatataaaagatttaactaaggttatgactgacgttagttctgaaatgaaagacattaaatacaaagtgcaaggtcatgacgaaaagataaaagcgatacaaggtacaattgattcaaaaataaaaggtagctctcaaataataacgacacttataaccacaactggcggtgtaatagtcgctgcgattggagtagctaaattcttcttttaa

SEQ ID NO: 412562 - DNA, 1065 bp, Staphylococcus aureus; identical to SEQ ID NO: 412205

SEQ ID NO: 412563 - DNA, 243 bp, Staphylococcus aureus
atgacagataacgcacgcaaagaatacctaaatcaattctttggatctaagagatatctgtatcaggataacgagcgagtggcacatatccatgtagtaaacggcacttattactttcacgggcatatcgtaccaggttggcaaggcgtgaaaaagacatttgatacagcggaagagctcgaaacatatataaagcaacatggtttgggatacgaggaacagaagcaactaactttattttag

SEQ ID NO: 412564 - DNA, 1833 bp, Staphylococcus aureus; identical to SEQ ID NO: 412262

SEQ ID NO: 412565 - DNA, 159 bp, Staphylococcus aureus
atggtaaccaaagaatttttgaaaattaaacttgagtgttcagatatgtacgctcagaaactcatagacgaggcacagggcgatgaaaataagttatatgacctatttatccaaaaacttgcagaacgtcacacacgccccgctatcgtcgaatattaa

SEQ ID NO: 412566 - DNA, 258 bp, Staphylococcus aureus; identical to SEQ ID NO: 410708

SEQ ID NO: 412567 - DNA, 399 bp, Staphylococcus aureus
ttgtattctaaattaatagctggtgcgattcatggtaagcctataggtggtttggtagctggtaatgttaaaacatcagctaaaaaccaaaaaaatccaccagtgccagcaggttatacacttgataagaataatgtgccttataaaaaagaggctggtaattacacagttgccaatgttaaaggtaataacgtaagggacggctattcaactaattcaagaattacaggtgtattacctaataacgcaacaatcaaatatgacggcgcatattgcatcaatgggtatagatggattacttatattgctaatagtggacaacgtcgctatattgcgacaggagaggtagataaagcaggtaataggataagtagttttggtaagtttagcacgatttag

SEQ ID NO: 412568 - DNA, 1050 bp, Staphylococcus aureus
atgccagtatataaggatgataatacaggtaaatggtatttttccattagatataaagatgtatacggtaataacaaacgtaagatgcaacgcggtttttcaactaagcgtgaagctaagagagcagaggctatttttttgaatgacgtaaacgaaggatatagcgattcaaaaacatttgattatgtttttcatcactatttagaaaatagcgatttgagacctaaaacaaaacgacgcaaacaaaatgaatatcataaacactttaaagctaagttcgggcacataaaaatgaataagataacgcaaaatcaatgccaagagtttcgtaaatatctaatagagaatgtagcatcaacaaattctgctcgtacaatttggtcaggttttaaagttgtaattaattatgccaaaaaatactttggattacgtacagatccaacaatatcaattaaacctattccgcgtgtaaagccaaaacctaagtttatgatgcgtgaagaatttgaagaaagaatcaaagacattgaagatcaagattacagagagttatttacattaatgttttatacaggtttaaggattggcgaagctatggcgcttgtttggacagactacaataaatataaaaaagagatatccataaataaaacaatggacatctctaatagaactatatatccgagaccaaaaacagatagttcagaggatattgttcctttacctaaattcatcaatacaatgttaactgaacgacaccaacgtgaaaaagagttaaataaatattttgatgaacgtagttattttattttcggaggaatggctcccaaacattacagtcatgttcaaaagaaattccaaaaagctttcccccattataacattcacgcgttaagacattcttatgcatcttatcttgcaaataatggtgtagatattttcgttttacagtcacttatgagacatgctcaaatcactgaaacgatgggcacttacagccatttatatactcagaaaaaacacgatgcaatagccatttttgacaagtaa

SEQ ID NO: 412569 - DNA, 303 bp, Staphylococcus aureus
atgactaaaaactataaagacatgactcaggacgaattaaggggtttattaggtgaaaaaacctcagaactgtatgatttagcgaaagaaattaagagagaaagtaaatttgatattttgtttttctcagcaataggagttagcgacggagatttcataaaaagttcaagttctgcgcttggcaatgcttttaatcttgctgaattattggataatgctactaatttcgacgatgtcattaacgccattcaaaaacgtaaactacaaaaatttcttgctatagataacaacaaggagggctaa

SEQ ID NO: 412570 - DNA, 654 bp, Staphylococcus aureus
atggctgaacaacttaatttataccaacgcataaataaggctaagcactcaatggagggcttcgttaaagatacaaaaggttatcaatatagttacgtttcagggtcgcaagtgttacacaaacttaaccctgaattatacaaaaacggaatcaatataacatttaagactgccgaacctcacttcgaacaagtgactgtgattgttaaaggtaaagagaaaatcgagtttttagtatcgctaaacgtacactacacaatcacaaatgtagacaatccagaagagaaaatagaatcaagtatttttgcaattggtcaacaagatgacccaagcaaagctttaggcactgcactaacttattccgaacgttattttttaatgaaattctttggacttcctaccgatgaggacgatgcggatgccaaacaaaagaaagaacgatacacaaagcctgacgcaaaagctatcggaacattaaaagaagaaatattcaagttcagcgaatttatgcagtctctaggtaaagaggtaagtgttaatgatgttcatgaaatattaggtatcaacgatattcaaagtttatcaagcgctcaaattaccgcaattattaacaagttaaacgaatggacaaaacaaacaaaggggaatgaataa

SEQ ID NO: 412571 - DNA, 858 bp, Staphylococcus aureus
atggatcctattttaggtaaaggtattgataaaattattgaaggcgcatcaaaagggcctgtagaaacattctctaaaacttgggaacttgtctttgggaaattccacctttatgtggataaagttatttatcaaagagaagtagaatttgaaaaattcaaagaacaatttaaaaaagaaatatcttctgtacctgaaaataatttacaagaaccacaattttctcttctaggtcctgctctagaagcttcaaagttttacattagtgaaaaaactttaagtaatatgttcgcaaaactaatagcatcatctatggatgacagaaaaaactcattaacccaccattcatttgttgaaataattaaacaattatccccaaatgatgctattcttttaaaacatttaaagaatcacgaagtacatcctgccgttaaatatagagcggttttaaacccaaagaatgacggtatgaatatatcggacacgttaataaaagactctccgttagatatagaatcaaccgaaatttcaattaataacctagtaaggttaggggttttaaatgaaacttttgacatgtcttacttaacaaaaaaaggaatttataataagttttatgctcctcagtttttaaatcactttaataagattatagaaaaacaaagatttgtttcgggattagaatttgttaaaagaatgttaaagtcaggacacaacctagaaacaataagtaaactttctggcattgaatttgaagtattaaagttacattacagcccctgggtaatagacatcaaaaaaggctcaattagtttgtccgcctatggtaaagcttttgtaaaaacctgtattaactaa

SEQ ID NO: 412572 - DNA, 720 bp, Staphylococcus aureus
atgaataaaaatatagtcattaaaagcatggcagcattagccattctaacctcagtaactggaataaatgctgcagtcgttgaagagacacaacaaatagcaaatgcagagaagaatgttacgcaagttaaagatacaaatatttttccatataatggcgtcgtttcatttaaagatgcgacaggttttgtaattggaaaaaatacaattatcaccaataaacatgtatcaaaaaattataaagttggcgatagaattactgcccatccaaacggtgacaaaggaaatggtggtatatataaaattaaaagcatttctgattatccgggtgatgaagacatctctgtcatgaatattgaagaacaagcagtcgaacgtggaccaaaaggctttaattttaatgaaaatgtccaagcattcaattttgcgaaagatgctaaagttgatgacaaaattaaagttattggttacccattacctgctcaaaatagttttaaacagtttgaatctacaggaactataaaaagaatcaaagacaatattttaaattttgatgcatacattgaacccgggaattcaggatcaccagttctaaattctaacaatgaggtcataggtgtggtgtatggcggtattggaaaaattggttctgaatataatggtgccgtatactttacgcctcaaatcaaagattttattcaaaagcacattgaacaataa

SEQ ID NO: 412573 - DNA, 225 bp, Staphylococcus aureus; identical to SEQ ID NO: 412269

SEQ ID NO: 412574 - DNA, 222 bp, Staphylococcus aureus
atgccgaaagaaaaatattacttataccgagaagatggcacggaagatattaaggtcatcaaacatgaagataacgagaatgaagtttattcgctcacaggagcccatttcagcgacgaaaagaaaattatgactgatagtgacctaaaacgatttaaaggcgctcacggacttctatatgagcaagagctaggtttacaagcaacgatatttgatatttag

SEQ ID NO: 412575 - DNA, 615 bp, Staphylococcus aureus
atgactcaatttctaggggcgcttcttcttacaggagttttaggttacataccatataaatatctaacaatgataggtttagttagtgaaaaaaacaaggttatcaatactcctgtattattgattttttctattgaaacatgtttgatatggttttatagttttataatttttaataatgttgatttaaaaaatttgagtttacttcagttgcttacaggtctaaaagcaaatatttggtttctaattatttttgttttaacagtgcttgtatttaatcctttaattgttaaattcattatctggttaattaatgaaacaagaaagtttatgaatttggattgtataagcttattagacaaaagagacaagttgtttaataacaacggtaaaccagtatttatagttattaaagactttgaaaacagaatcattgaagagggtgaacttaaaacctataattcagctggtagcgatttcgatttactagaggttgagcgacaagatttcaaagtatctgatttaccgtcaaacgatgaattgtatattaaacatacacttgtagaccttaaacaacaaattaaattggatttatatttaatgaatgaatactaa

SEQ ID NO: 412576 - DNA, 477 bp, Staphylococcus aureus
atgaaagaaagatatggaacagtctataaaggctctcagaggctcatagacgaagaaagtggagaagtcatagaggtagacaagttataccgtaaacaagcgtctggtaacttcgtaaaggcatatatagtgcaattaataagtatgttagatatgattggcggaaaaaaacttaaaatcgttaactatatcctagataatgtccacttaagtaacaatacaatgatagctacaacaagagaaatagcaaaagctacaggaacaagtctacaaacagtaataacaacacttaaaatcttagaagaaggaaatattataaaaagaaaaactggagtattaatgttaaaccctgaactactaatgagaggcgacgaccaaaaacaaaaatacctcttactcgaatttgggaactttgagcaagaggcaaatgaaaaacaagaaaatgcattatctgattattattctttcaaggactag

SEQ ID NO: 412577 - DNA, 126 bp, Staphylococcus aureus; identical to SEQ ID NO: 409030

SEQ ID NO: 412578 - DNA, 2238 bp, Staphylococcus aureus
ttgcaacaaggtcataacggcattaacaatgcgatgactaaagaagaaattgaacaagccaaagcacaacttgcacaagcattacaagaaattaaagatatagtgaaagctaaagaaaatgcgaaacaagatgttgataaacaagttcaagcattaattgacgaaattgatcgaaatccaaatctaacagataaggaaaaacaagcacttaaagatcgaataaatcaaatcttgcaacaaggtcataacggcattaacaatgcgatgactaaagaagaaattgaacaagccaaagcgcaacttgcacaagcattacaagacattaaagatttagtgaaagctaaagaagatgcgaaaaatgctattaaagcattagcaaatgcgaagcgtgatcaaatcaattcaaaccctgatttaacacctgagcaaaaagcaaaagcactcaaagaaattgacgaagctgaaaaacgagcactagaaaacattgaaaatgctcaaactaaagatcaattaaatcaaggattaaatttaggattagatgatattagaaatacacatgtatgggaagttgatgcacaacctgctgtaaatgaaatttttgacgcaacacctgagcaaatcctagttaatggtgaactcattgtgcatcgtgatgacatcattacagaacaagatattctagcacatatcaacttaattgatcagcttacagcagaagttattgatacaccgtcaactgaatcaatttctgatagcttaacagcaaaggttgaagtaacattacttgatggatcaaaagtgattgttaatgttcctgtgaaagtagtagaaaaagaattgacagtagtcaaacaacaggcgattgaatcaattgaaaatgcggcacaacaaaagattaatgatatcaataatcacgcaacattaacacctgaacaaaaagaagctgcgattgcagaagttaataagctaaaacaacaagctattgagcaaattaacaatgcagcagatgttcatacggttgaagaagttcaacaccaagaacaagcgcatattgaacaatttaatccagatcaatttacaattgaccaagccaaatcaaatgctattaaatcaattactgatgctatccaacatatgattgatgaaattaatgcaagcaaggatttaactgataaagagaagcaggaagctatatctaaattaaatcaattaaaagaacaatcaattcaggcgattcaacgtgcgcaaagcatcgatgaaattacgcaacaattagatcaatttaaagcgcaactgaaagtggcaaatccatttgctaaagaattggaaaaacgtaaaaaagtagcgatttcaaaaattaaagatatttctacagataaaattgatcgcattagaaatagtacaataggaactgctgaagaaagacaagcagcaatgaatcgaattaacgaaattgtgcttgaaacaatcagagatattaataatgcgcatacgccacaacaagttgaggctgcattgaataatggtatcgcacgaattttagcagtacaaattgtaacatctgatcatagcaaacattcatcaaattcagatggtcaatctaatagtcatataagcatcggttatggcactgtaaatcatccatataacagtacgactagtggacataaaaagaaattggatcaagatgatgaaatcgatccacttcatatgcgtcatttcggtgaccgaattggtaatgttatcaaaaacgcacttggcgttgttggtatttctggattacttgctagcttctggttcttcattgcgaaacgtcgtcgtaaagaggatgaagaggaagaattggaaattagagataatagcaaagacaagaagaaaggttcaatagaaggtactaaacatttaccacttttatttgcgaaacgtcgcagaaaagaagatgaagaaaatgtggaagttacaaatgaacacacagatgaaaaagtgttgcaagataacgaacattcaccactcttaatcgcaaaacgacgcaaagataaagaggtagatgttgaaacaacaactagtattgaatctaatgaagatgatgcacctttattattggctaaaaagaaaaatcaaaaagataaccaatccaaagggaaaaagtccgcatcaaaaaaaccttctaaaaaggtagcagctaaaaagaagaaaaagaaatctaaaaaaataaaaaataatttgtttcttcgataa

SEQ ID NO: 412579 - DNA, 579 bp, Staphylococcus aureus
atgacatttgaaaaagaaacagtcttaaaaacattatttcctgaagatgtacttagtattgctaaaggtttaacagacggtgaagtcgaatttttacaacaagtagattcattgctagaaagtaagtaccgtgaaaatattaatcaacattggatagacgctactgtacccgaggactattttaaagatctgggagaattaaattattttaacaatccattactttacaaggatcgtccaaacgccaaaatgcctagtcaactatttcagtttttcatgtcttacctactcgcgcgatttgatatttccttagctaccctactcggtgttcatcaaggtttagggcataacactttctatttcggaggtagcaaagaacaaattgcgaaatatgtacctaaattacagtcacatgaactgcgtacatgctttgctttaactgaaccagaacacggttcggacgttgcgggaggtcttgaaacagtcgctgaacgccagggcatacttgggttatcaatggtgaaaagaaatggattggtggtgcacatgtatctgatgtcattccagtattcgcagtaa

SEQ ID NO: 412580 - DNA, 414 bp, Staphylococcus aureus
atggctacaggtggtatggctggcgctttacgtgccacattagattatgtcactgagcgtaagcaattcggcaaaccaattagtaaatatcagttaatacaagaaaagctagcaatgatgcaaggtaatttagctcaagcaatggcaacatgtgctcaattagctaatatgcaagcacatggtgaatatgacgaggttgcaacttcaacggcgaagatgatgaatgccttacgtttgcgtgagacagtagctatgggccgcggtattacaggtggtaatggcatactagctgacgattatgatattgcacgtttcttctctgatgcagaagcgatttacacgtacgaaggtacacatgaaattaatgccttagtaattggacgcgctttgactggagattctgctttcgtataa

SEQ ID NO: 412581 - DNA, 495 bp, Staphylococcus aureus
atgattctatctatattacttatctttttctgtatcagacttgtcagcttaaagatatctattaatcactcaaaacaattaaaagcagacggtgcagttgaacatggcgttaaaaattcgaagtttttagcaatgacacacgttttaatttatgtattggctggtgtagaggcatttattaataaagatacatttagctttgcaaatggtattggcttagttatattaatctttgcttatatcatgttatttatggttattaaaactttaggtggtatttggacattaaaattattcattttacctaaccatcctattattaaatctggattatataaaattacaaaacacccaaattacttcttaaatattattcctgaattaatcggtgtattattattaacacacgcaacatatacaactattttattagtaccgtatgcgtatttcttatatgtacgtattaaacaagaagaaaaattaatgaatatttaa

SEQ ID NO: 412582 - DNA, 228 bp, Staphylococcus aureus
atgacagaaattcaaaaaccgtatgatttaaaaggcagatcattattaaaagaaagtgattttaccaaagcagaattcgaaggacttattgattttgcaattacattaaaagagtataagaaaaacggtattaagcatcactacttatctggaaaaatattgcactactattcgaaaagaattcgacgagaacgcgtgcagcgtttacagttgcgtctattgatttag

SEQ ID NO: 412583 - DNA, 696 bp, Staphylococcus aureus
atgttcgatggtattgaattccgtggtttttcacaacaagctgttgaagatttagcgaagttctctggtgtaccggtgtggaatggattaacagacgattggcatcctacacaaatgttagctgattttatgacaataaaagagaattttggatatctagaaggaataaacttaacttacgttggagatggacgtaataatattgcgcattcattaatggtagcaggtgctatgttaggtgttaatgtaagaatttgtacacctaaatcattaaatcccaaagaggcatatgttgatattgcaaaagaaaaagcgagtcaatatggtggttcagtcatgattacggataatattgcagaagcagttgaaaatacagatgctatatatacagatgtttgggtatcgatgggtgaagaaagtgaatttgaaaaacgtattaatttattaaaagactatcaagtgaatcaacagatgtttgatttaacaggtaaagattcaacgatattcttacattgtttaccagcattccatgatacaaatacactttatggacaagaaatttatgaaaaatatggattagctgaaatggaagttacagaccaaatctttagaagtgaatattcaaaagtgtttgatcaagctgaaaatagaatgcatacaattaaggcagtaatggcagcaacattggggagttaa

SEQ ID NO: 412584 - DNA, 1188 bp, Staphylococcus aureus
atgaattctactataggaggggttcatgatttaacaacagcaaaaacaataagtggtaaggatgttaaagaaaagggagaaacatttaataagcaaattactgatacattagataattttaataattttcaaagtttacactttttagatgattccgaattattatctatgattacacctgtttctacaatggcctctaaagttaaaaatatgccaagtaatcgatcaactatatctggaaatgctggatatataaaaagtgagtataaacttcattcagaaaacaaccaatttcgtgaattgaaaaaagaattggaaaaatatgaaagcgcaatatatggtggtaataaatatcgaaagactgttaaatctatgattgaaataaaaaatgcattaattgttgcatatatagctggtgacggtaatatctttaaaggtaatgaattattagctaaaaaccagttggggaaattgggaaataaaaaattaaaattaataaatgcaactatgcaaacaaatgttgaaaatattgaaggaaaaagattagttaaagctgctaaatttatacttgataaaaataataaaatgaaattcagtgagaaattaaaagctggttttaaaatgaccagaaattatagcgatactgaattcaagcagctagaaaaagttgcaggaaaatacaatggtaaatctgcaatgaaaagaggtgctaaagccgcatgggaaagtatgagtcaaaaacagttacgcgaatttttgaaaaatcctaaaaatttaaaaaatatatgtttggatgaagttaaggattttctaggcaaaaacaaactaggaaaatttttgaaaagtatgagatatgctggtaagcttttagggccactaggagcagtagcagcagtagcaaacaatgttgtaaatgagaaatcaggacagaaaaaaattgttggatctattgttgatttaggggcaattggtggatccactgcaactggagcagcaattggagcagcaattggaggtcctgtaggtgcagttgtaggcggaatagctggaattgtagtaggtgccgcgtctgattttaaattagtaggtggcaagtcattaacggatattgctaaagataaacttaataatacggttagttctattagaagtaatggttttggtaaaactttatgtaatgtattttaa

SEQ ID NO: 412585 - DNA, 501 bp, Staphylococcus aureus
atgattttcgaagaaaaactaaatgaaatgtacaacgagattgcgaataaaattagtagcatgataccagtagaatgggaaaaggtatatacaatggcttatatagatgatggaggaggtgaagtattctttaattatactaaaccaaacagcgatgaattgaattattacaccgatatacctaaggagtataacatttctgtgcaagtatttgatgatttatggatggatttatatgatttgtttgaggaattaagaaatttatttaaagaagaaggactagaaccatggacatcatgcgaatttgattttacaagagaaggtaaattaaaagtttcatttgattatatagattggataaatacagagtttgatcaattaggccgtgaaaattattatatgtacaaaaaatttggggttataccagaaatggaatatgaaatggaagaaattaaagaaatcgagcaatatattaaagagcaagatgaagctgaactatag

SEQ ID NO: 412586 - DNA, 498 bp, Staphylococcus aureus
atgaaagtttctttgattgctgcgatggataagaatagagtgattggcaaagagaatgacattccttggaggattcccaaggactgggaatatgttaaaaatactacaaagggacatccgataatattaggtaggaagaaccttgaatcaatcggaagagccttacctgacagaagaaatattattctgacgagagataaggggtttacctttaatggttgtgaaattgttcattcaatagaagatgtttttgagttatgtaaaaacgaagaagaaatttttattttcggaggagaacagatttataatttgtttttcccttatgttgagaaaatgtacatcacaaaaatacatcatgaattcgaaggagatactttttttccagaagtgaattatgaggaatggaatgaggtatttgcccaaaaagggataaagaatgataaaaatccgtataactactattttcatgtatatgaaagaaaaaacttattgagttaa

SEQ ID NO: 412587 - DNA, 1953 bp, Staphylococcus aureus
atgaccaagcttaaaagattagccacgaaggaagatgaaattgtagatgttaaaattccgatttcaaacgaagaattaaaagatagggctaaacaatatgatttattaactccaaaacgatttgcaacaaggtataacaaaatgttgttcttgccaacgtcttttaaatggaacggttctgaatatcccattcaatataattactgcatcaatccgttttgttgtaattttgggaaagaacagcacaaattcaaagatgtaaaagggaaaccaagtcgatataaaatgactggtagttccaaagataaaggtcataaaggtatgtactgcaatgacaatcctattggcagaggtgtatcgcaaaactgtacagtaacccctttatctaattggtctgttgttgaagaaattaaacgccttatagaaatcaatagcatccaagatgttgagccagattatcaatttcataaagaaggctgctcggaagaagaatcaaccccattcaatgagccgaagcaattttacaaaagggggaaaagtaggggcaaatctcaacgctatcaatgtaaggcgtgtaagaagttcactaatgttctaccaaaaagagaagaaaccactacttatcaccaacaaaagaacaccattcttccaatgttcgctaagatggttgttggaagggtttcagtcagtcgtacttgtgatattttaggaattggagttggaacctactatcataagctggagtggctgtataggcgttgtttggagtttttagaacgatatgagacacaaccccttcaaacaaagaaatttaacgagatgtggcttaatacggacaagatgcactactacctaaataacgtccgtaagaaaggacaaggttcaaagaaatatacggggtttgaagaccttaatatgcaaacgtatatagttgtatctgctgaggtcttatcaagatatgtgttccgttctgatgttgcctatgattggaatatttcaatggatgaattaaatgaagatacaagaaaattcaaagaagaccatctcaatacttttagtcgtaaaaatgataggttagattggtcttattatccacaagaaccatccgctaacgatagcgaaaataggaatgcttatcttcacgaattagggaaaattactaataggagtagatttgtcgatggtttaaatgttgatgctccttatactacaactgctcactattggttaattaaacaaatggttaatgccgacgaatggcgaatgattagtgatgatgacttctctattagaaacgccttttatagagtattcacgaaagaattaaggttgagcgatgcacatcattttatttgccaagttaacaagacgaaaagcagaaaacaatgcttaaaagaattcggacaagcaaaagcagaactgctcgattggggagatatcagaggattcaaaacaaagtttctacggactttggcatctcattatctaactgaattactaacaagtcatcaattccacgaagaggctattagtaaagatggagaaagatatcgcaaatatgccgataaccctatcaaacatccattagccactaaggataaaggattttattcagttgattgtagaacggatttatctgctctggaaccaaacgaaatcgcaaagatgctattaaatgttaatgaccattcgaccaatagctttattcaacagataagacgttatatatcatctcttgaaagaccattaacaacagctcgtggtgataagaagagctatatttacgctaacttcaatccgaagtatgctcaatttgcgattacaattctaagaacttactacaacttttgtcgcccttttaaatcagcggataaaaaggttttgacacctgctcaaagattagggattacagataaacaatttgattggaaagatataatttatttcaaatga

SEQ ID NO: 412588 - DNA, 285 bp, Staphylococcus aureus
gtgttaaaatggttacaatttactaagcaaaaaggggtgcattttcctatgcaatttcttgagccaaaaaataagaacgctaagtctgtggattgggaaatatcagagcaagtaagggtgatagttaagcaatacgctgaatatgcagagcgtactgaaagcgaagcagtggatgaattcttattgaacattttagacgataagaagtttattgaatggattgccaacaagcgaagtaataagcggattgttgaaaaaatgggtatcaaagatagagtgggttga

SEQ ID NO: 412589 - DNA, 882 bp, Staphylococcus aureus
ttgaaacattatctatataccgacaaagaatttatatattcttatttaagtcaacacggaaaaggtttaaatctatcttacagtcaaatgaacaaaaatacaagtacagagagtgaaagtaaaagtaccgctaacacaaaatctaaagaagaattcgagggaaattcaactggagatttaggtttagaaattaatgcaggaattgctaaaggttcttacactgatggaactaattataaaattaaaattaacaaaaactctttgaaagaaactttaaattttatcgattctaaaagcgaagctcaatcagaattatacaaaattgaattgcacgattatctttatgaaatatttgaaaataccgctatgaataaaggtgataaaatttccttatatccagataaaaaaataacaattgcagaattggatggtaatcattttaaatttttagaacaattaatgaatatttatataaaatctgatacatcaagttttatcggtatagataataatactcaagaagaattcaaaagtataaaaaaagacttgcaacctttagaaaaaatgagttcaattatagataaattagttcctggggattataaaattatacttaatcacgacaatcaatctttaatcggttcactttacgaagaaaatttaaatgtaccatttaaagagctaaagtacttttatgctcaaagtaaattaaacgttgtcggaataaaagctagcaaaattgaacctaataaatttgaatacgaaaatgtatttgaagttatacaactagacgctttattacaaggaccattattaaatgaattattatcaaatgaatcgatttattattttaaacctatactaatttacagtaacatttaa

SEQ ID NO: 412590 - DNA, 204 bp, Staphylococcus aureus
atgtttaaaactttaaaaaaaatgaaaattaaagacgatattgaatttaaacaattttcaaacgaagtcgattattattatcgtagatttagtgaaaaaaatggcaaaagaatgaaaggtctcaacaaccaaagaaaattaaatgccaagaataaacagcaatcatctttatgggcaaacgcaattaagagtggtaaattttaa

SEQ ID NO: 412591 - DNA, 669 bp, Staphylococcus aureus; identical to SEQ ID NO: 410409

SEQ ID NO: 412592 - DNA, 2160 bp, Staphylococcus aureus
atgatggctataaaatttataagacaatacgatgaaaaggattgtggtcctacttgccttgccatgatttcacagttttatggtaagcgtgtatctatcccacgtttgcgcgaatatgctaaaacagataaattaggtacaaatttatatggtctcgtacaagcaggtaaaaagattggtattgagttaactggcgtaaaagctgattcctttgatgatttaaaacaagcacaattaccagttatggtacatattattaatcaacaaggttatgatcactatatcattattgaaaaaataaaaaataacacgctttatattgtcgatcctgctaaaggtaaatataagttatcaagtactgaatttggaaaatattggactaatattgctgtattaattgataaaacagatgattttactactgacaatgaatcaccctcgtatcttaatatttttattgatatatttaaaaataattatggaaagttgttatttattgcttttatctcactatttattaatattgttggtattgtcggggctctatattttaaattattaaccgatcatattattccatccaatgttcttaaaaatttacatattattagcttcggtattttacttttatacataatcaatgcactcattaattatttaaggtttcaacttatcttacatttaagtttgaaaatcgatgttaatttaatgaaagattatttttatcatgttttacatcttccgatgaacttttttgatacacgtaaatctggcgaaatcctacaacgtttcatggatacatctaaaattcgtgaagctttatcatcttcaacggtaacgttgctagttgatactttcatgattattatcggtgctatattactttatatgcaaagtcctttgttactactgataacaattatttttataccttgttttattatttgtagttacactttacgtaaaccttttgaaaaatataatcaaaaggtggctgaaaaagatgctgaattgagttcatatttaatagaatcctttgatggtagtaatactattaaaagttatcaatctgaagacgatcgtttctacattggtactactaaatttaatggtattattgaaaacttattaaaactgggtagattttctaatatacaattaacggttaacaactttttaaaattaactatcagtcttgttatattgtggcttggtagttacttagtcatgacggatagtatgacgttaggtagtttattagcttttaatgccttaactatttattaccttgatcctattgaacgtctcataaatattcaaccaacactgcaatcttcatttgttgcagcacgtcgtattgctgaaataactgatttagagaccgaaactgaattatatacttctaaacaaccttatacttttaaaaacaacattcgcattgaaaatgtaaactttcagtatggctttcgaagtgtggtattgaaggatattaatttaaatattaaaaaagggcaaaaggttgctattgttggtgaaagtggtagtggtaaatcaactataggtaagttactcaatcgctattacactgcttcagaaggtaatattatgattgataactatattattgatgatattgatctttctgacttacgtaagaatataggctatgtttcacaaaacacattcctttttgctgatacaattaaaaacaatcttttacatggtagcaataaatacaaaagtgatgaagatatcgttaaagcttgtcaattagcagaatccttagattttatacagaaattcccagatcagtttaacactatgttagaaaaagaaggagctaatctatcgggcggacaaggccaacgcttatctttagcacgtacatttttaaaagatcctgatatatatattttcgatgaagctacaagtgccttagatagtttaactgaaaacaaaattatggagcatattgacttactaactcaacatggtaaaaccgtaattattatttcacataaattaagtactataaaaaatgctgataatatctatgttttaaacgagggtcaaattgctgagaatggtacacatgatgagttgattcatttaaacggtatatataaaaatttatggcaacttcaaatgaaaatagactga

SEQ ID NO: 412593 - DNA, 144 bp, Staphylococcus aureus
atggaaacactaaatgaaaaacaattaaaagatatcaatggtggtcgtgaaactggttgttctggtgattttgtagaagatggaataatgtgcaatatcggacaaggtattggtaaagcaattaataaagtacgaggaaaataa

SEQ ID NO: 412594 - DNA, 150 bp, Staphylococcus aureus
atgaaaacactaaatgaaaaacaattaaaagatatcaatggtggtaaagggattgttggtgaagtcactggcgaagtcactagtattggtaatgccatttcaaatggttggcatgatttaaaacagtctgtcgctgatactacaaaatag

SEQ ID NO: 412595 - DNA, 675 bp, Staphylococcus aureus
atgaactatttcagatataaacaatttaacaaggatgttatcactgtagccgttggctactatctaagatatgcattgagctatcgtgatatatctgaaatattaagagaacgtggtgtaaacgttcatcattcaacgatctaccgttgggttcaagaatatgccccaattttatatcaaatttggaagaaaaagcataaaaaagcttattacaaatggcgtattgatgagacgtatatcaaaataaaaggaaaatggagctatttatatcgtgccattgatacagagggacatacattagatatttggttgcgtaagcaacgagataatcattcagcatatgcgtttatcaaacgtctcattaaacaatttggtaagcctcaaaaggtagttacagatcaggcaccttcaacgaaggcagcaatggctaaaataattaaagcttttaaacttaaacctgactgtcattgtacatcgaaatatctgaataacctcattgagcaagatcaccgtcatattaaagtaagaaagacaagatatcaaagtatcaatacggcaaagaatactttaaaaggtattgaatgtatttacgctctatataaaaagaaccgtaggtctcttcagatctacggattttccccatgccacgaaattagcatcatgctagcaagttaa

SEQ ID NO: 412596 - DNA, 1227 bp, Staphylococcus aureus
atgtcttattccattgttagagtttcaaaagttaaatctggaacaaatacaacgggcatacaaaaacatgttcaaagagaaaataataattatgaaaatgaagatatagaccatagtaaaacttacttaaattatgatttggtaaatgctaataaacagaattttaataacttgattgatgaaaaaatcgaacagaattatacaggcaaaagaaaaattagaacagacgcgattaaacacattgatggtttaattacatcagacaatgatttctttgataatcaaacgccagaagatacaaagcagttttttgaatatgctaaagagtttttagaacaagaatacggtaaagataatttattatatgcaacagttcacatggacgaaaaaacaccacatatgcattatggcgttgttccaataactgatgatggtcgtttaagtgctaaagaagttgtaggtaataaaaaagctttaacagcgtttcaagatagatttaatgagcatgttaaacaacgaggatatgatttagaacgtgggcaatcaagacaagtaacaaatgctaaacatgagcaaataagtcagtataaacaaaaaacagaatatcataagcaagaatatgaacgtgagagccaaaaaacagaccatataaagcaaaagaacgataaattaatgcaagagtaccaaaaatcgttaaatacgcttaaaaagcctataaatgttccgtatgagcaagaaactgaaaaagtaggtggtttatttagcaaagaaatacaagaaactggaaatgttgtaataagccaaaaagatttcaatgaatttcagaaacagataaaagctgctcaagatatttcggaagattacgagtatataaagtctggtagagccttagatgataaagataaggaaatacgagagaaagatgatttattaaataaagcagttgagcgtattgaaaacgcagacgataattttaaccaactttacgaaaatgcaaagccacttaaagagaatatagaaatagcgttaaagcttttaaaaatcttactaaaagagttagaacgagttttaggaagaaatacctttgcggaaagagttaataagttaacagaagatgaaccaaaactaaatggtttagcaggaaacttagataaaaaaatgaatccagaattatattcagaacaggaacagcaacaagaaggttctgttgcaaagttgaatttataa

SEQ ID NO: 412597 - DNA, 1380 bp, Staphylococcus aureus
ttgtttagtttatataaaaaatttaaaggtttgttttatagcgttttattttggctttgtattctttcattttttagtgtattaaatgaaatggttttaaatgtttctttacctgatattgcaaatcattttaatactactcctggaattacaaactgggtaaacactgcatatatgttaactttttcgataggaacagcagtatatggaaaattatctgattatataaatataaaaaaattgttaattattggtattagtttgagctgtcttggttcattgattgcttttattggtcacaatcacttttttattttgatttttggtaggttagtacaaggagtaggatctgctgcattcccttcactgattatggtggttgtagctagaaatattacaagaaaaaaacaaggcaaagcctttggttttataggatcaattgtagctttaggtgaagggttaggtccttcaatagggggaataatagcacattatattcattggtcttacctacttatacttcctatgattacaatagtaactataccttttcttattaaagtaatggtacctggtaaatcaacaaaaaatacattagatatcgtaggtattgttttaatgtctataagtattatatgttttatgttatttacgacaaattataattggacttttttaatactcttcacaatcttttttgtgatttttattaaacatatttcaagagtttctaacccttttattaatcctaaactagggaaaaacattccgtttatgcttggtttgttttctggtgggctaatattttctatagtagctggttttatatcaatggtgccttatatgatgaaaactatttatcatgtaaatgtagcgacaataggtaatagtgttatttttcctggaaccatgagtgttattgtttttggttattttggtggttttttagtggatagaaaaggatcattatttgtttttattttaggatcattgtctatctctataagttttttaactattgcattttttgttgagtttagtatgtggttgactacttttatgtttatatttgttatgggcggattatcttttactaaaacagttatatcaaaaatagtatcaagtagtctttctgaagaagaagttgcttctggaatgagtttgctaaatttcacaagttttttatcagagggaacaggtatagcaattgtaggaggtttattgtcactacaattgattaatcgtaaactagttctggaatttataaattattcttctggagtgtatagtaatattcttgtagccatggctatccttattattttatgttgtcttttgacgattattgtatttaaacgttctgaaaagcagtttgaatag

SEQ ID NO: 412598 - DNA, 840 bp, Staphylococcus aureus
gtgtgcatatctgatccaaaattaagttttgatgcaatgacgatcgttggaaatctcaaccgagacaacgctcaagccctttctaaatttatgagtgtagagccccaaataagactttgggatattcttcaaacaaagtttaaagctaaagcacttcaagaaaaagtttatattgaatatgacaaagtgaaagcagatagttgggatagacgtaatatgcgtattgaatttaatccaaacaaacttacacgagatgaaatgatttggttaaaacaaaatataataagctacatggaagatgacggttttacaagattagatttagcctttgattttgaagatgatttgagtgactactatgcaatgtctgataaagcagttaagaaaactattttttatggtcgtaatggtaagccagaaacaaaatattttggcgtgagagatagtaatagatttattagaatttataataaaaagcaagaacgtaaagataatgcagatgctgaagttatgtctgaacatttatggcgtgtagaaatcgaacttaaaagagatatggtggattactggaatgattgctttagtgatttacatatcttgcaaccagattggaaaactatccaacgcactgcggatagagcaatagtttttatgttattgagtgatgaagaagaatggggaaagcttcacagaaattctagaacaaaatataagaatttgataaaagaaatttcgccagtcgatttaacggacttaatgaaatcgactttaaaagcgaacgaaaaacaattgcaaaaacaaatcgatttttggcaacatgaatttaaattttggaaatag

SEQ ID NO: 412599 - DNA, 675 bp, Staphylococcus aureus
atgaaccatttcagatataaacaatttaacaaggatgttatcactgtagccgttggctactatctaagatatgcattgagctatcgtgatatatctgaaatattaagagaacgtggtgtaaacgttcatcattcaacgatctaccgttgggttcaagaatatgccccaattttatatcaaatttggaagaaaaagcataaaaaagcttattacaaatggcgtattgatgagacgtatatcaaaataaaaggaaaatggagctatttatatcgtgccattgatacagagggacatacattagatatttggttgcgtaagcaacgagataatcattcagcatatgcgtttatcaaacgtctcattaaacaatttggtaagcctcaaaaggtagttacagatcaggcaccttcaacgaaggcagcaatggctaaaataattaaagcttttaaacttaaacctgactgtcattgtacatcgaaatatctgaataacctcattgagcaagatcaccgtcatattaaagtaagaaagacaagatatcaaagtatcaatacggcaaagaatactttaaaaggtattgaatgtatttacgctctatataaaaagaaccgtaggtctcttcagatctacggattttccccatgccacgaaattagcatcatgctagcaagttaa

SEQ ID NO: 412600 - DNA, 744 bp, Staphylococcus aureus
atgactagagaagaaagaatgaagattgttcatgaaattaaggaacgaatattggataaatatggggatgatgttaaggctattggtgtttatggctctcttggtcgtcagactgatgggccctattcggatattgagatgatgtgtgtcatgtcaacagaggaagcagagttcagccatgaatggacaaccggtgagtggaaggtggaagtgaattttgatagcgaagagattctactagattatgcatctcaggtggaatcagattggccgcttacacatggtcaatttttctctattttgccgatttatgattcaggtggatacttagagaaagtgtatcaaactgctaaatcggtagaagcccaaacgttccacgatgcgatttgtgcccttatcgtagaagagctgtttgaatatgcaggcaaatggcgtaatattcgtgtgcaaggaccgacaacatttctaccatccttgactgtacaggtagcaatggcaggtgccatgttgattggtctgcatcatcgcatctgttatacgacgagcgcttcggtcttaactgaagcagttaagcaatcagatcttccttcaggttatgaccatctgtgccagttcgtaatgtctggtcaactttccgactctgagaaacttctggaatcgctagagaatttctggaatgggattcaggagtggacagaacgacacggatatatagtggatgtgtcaaaacgcataccattttga

SEQ ID NO: 412601 - DNA, 510 bp, Staphylococcus aureus
atgcgtgcaacggaagtgacaataaataataaagataattcttataatcagcacatgcatgtattggtatgtgtggaaccaacttattttaagaatacagaaaactacgtgaatcaaaaacaatggattcaattttggaaaaaggcaatgaaattagactatgatccaaatgtaaaagttcaaatgattcgaccgaaaaataaatataaatcggatatacaatcggcaattgacgaaactgcaaaatatcctgtaaaggatacggattttatgaccgatgatgaagaaaagaatttgaaacgtttgtctgatttggaggaaggtttacaccgtaaaaggttaatctcctatggtggtttgttaaaagaaatacataaaaaattaaaccttgatgacacagaagaaggcgatttgattcatacagatgatgacgaaaaagccgatgaagatggattttctattattgcaatgtggaattgggaacggaaaaattattttattaaagagtag

SEQ ID NO: 412602 - DNA, 486 bp, Staphylococcus aureus
atgaaaaataataatgtaacagaaaaagatttattttatattttagatttatttgaacacatgaaagtaacttattggttagatggtggctggggggtagatgtattaactggaaaacaacaaagagaacacagagatatagatatagattttgacgctcaacacactcaaaaagttatacaaaaattagaagatataggatacaaaatagaagttgattggatgccttcacgtatggaacttaagcatgaagaatatgggtatttagatattcatcctataaatctaaatgatgatggatcaattacccaagcaaacccagaaggtggtaattatgttttccaaaatgactggttttcagaaactaattacaaaggtcgaaaaataccatgtatttcaaaagaagctcaacttctttttcattctggttatgatttaacagaaaaagaccattttgatataaaaaatttaaaatcaataacataa

SEQ ID NO: 412603 - DNA, 846 bp, Staphylococcus aureus
atggatttagttgagaattgtaatacatttttgtcttttgtgacgaatagaagaatggacaaaaagaaattatataaatctaatccatgtaaaaatcgtttttgtccgatgtgtgcatggcgaaaggcgagaaaagatgcattaggtttgtcattgatgatgcagcatattaagcaagcagaagataagcaattcatctttttaacacttacaacgccaaatgtaacaagtgaacatttggaaagtgaaataaaacattataatcaatcattcagacgattaagtaatcgtaaacattttaagtctatagctaaaggttatgttagaaaattagaaattacttataacaaaaagcgtgatgattataacccacattttcatgtattgattgccgttaataaatcatattttaaagatactaaagcttatattactcaaaaagaatggctagaaatgtggcgtgatgtcacaggaaattctgaaattacacaagtacatatacaaaaagttaagcaaaataataataaagaactttacgaaatggctaaatattctggtaaggataatgactatttaattaatcaaaaagtgttcgacgcattttataaagcgttaaaaggaaaacaagttcttgtttattctggactgtttaaagacgcaagaaagaaattaaaaaatggagaattagattacttaaaagaagttgatccgaccgaatatatttatcaaattttttatacttggaataaaaaagagtatttagcgagtgaaatttttgatttaacagaaagtgaaaaacaagaaattaatcatcaaatgattgatgaaattgaagaagaaaaataa

SEQ ID NO: 412604 - DNA, 360 bp, Staphylococcus aureus
atgaagaagatgttacgtatatcgattttcataatagtggtctccatatttattgtttttaaatactcttatcaaattgagggaattctagaagaatatccaaatattttaaaagcatttgtagcattattcactctccttacaactgttatcagtcttgttatcgcatataaatcatatgataatagcgttaagcaacaagaaaaagataaagaagaaaaaaacaaacagttcgaagaaaatagcgataggattattaatagtttgaaatctgatttagcaaaatatactaggaaaataaatgtttttagattaggatatacgaattcaggttctgttgcaaacttgaaaatcatataa

SEQ ID NO: 412605 - DNA, 537 bp, Staphylococcus aureus
atgatatcgaataaattaaaatctgcgagattagcaaaggaattaacgcaatctgaggtagctaaaaaattatacgttactagacaaactgtttctcgatgggagcaaggtaaaacgttgcctaatatttatgtaattcaagaattaagcgatctttatgatatttctttagatgaattagtagtaaatacagcattagaaaataaggaggctaaaagtatgaaaaatgtaaatccttttgctttatttggagcgatattatttaatgtgtttttattttctttaatagttatattttttggtggctttttgttattatctttattcatttctttagctatgttatttagtcctttgattttagcaatctttgttttaacgggtgtacaagagtttaatgtaattcaactagttatgactgttattttcgttgttattggtttgttatcaattcctttattgaaaaaagtcagtgtatttttatttaaatttttcaaacgatatttgaaatttaatcataaagcaattttttattga

SEQ ID NO: 412606 - DNA, 903 bp, Staphylococcus aureus
atggcactagatttaacacccatctatgccattttaacagctgtagtcacaattgaaccaactgccaaggcatcacttattaaaggttatcgtagattacctgctacggtaattggtgcaggctttgcagtattatttacatatttattcggcgatcaatcaccttttacatatgcattgagtgcaacgttcacgattttattctgtacaaaactcaaattgcaagttggtacgaatgtcgctgtactaacatcattagctatgattccaggtattcatgatgcctacatattcaactttttgtctcgaacattgacagcaattattggactcgtgacatcaggtttaattaacttcatggtgtttccacctaagtattatggtcaggtcgaagaaaaattaagtaagacagatgccttgatgtataaattattttacaatcgctgccaagaacttatcttatcaagactgcaatctgataaaagcgaaaaagcatataaaaatattttcaatttaaataatcaagttgaaacgttaataagttatcaacgtgatgaattaagctatcataagaaaaaagaatgtgattggaaattactcaatcaattaactaaacgtgcatatacgaatcgtttgtttatcactcatttatcaaatatcatttacttgcctaaaaatactcgtgttaacttttcaggtgacgaaaaaatggcattgctaaaaattagtagtagcatcaaagatatattttatgatggttcttttaagagagaagatgattctgtagaaactttacgttcgactataaaagcacttgaaattagtggtgaaaatcaaattaaaagtcatatactatacgaagttctaatgatttatcgactgctagacagcagatatgcttaa

SEQ ID NO: 412607 - DNA, 492 bp, Staphylococcus aureus; identical to SEQ ID NO: 410111

SEQ ID NO: 412608 - DNA, 1194 bp, Staphylococcus aureus; identical to SEQ ID NO: 405533

SEQ ID NO: 412609 - DNA, 171 bp, Staphylococcus aureus
atgccgtataattacaagaaacaaaatggagagttaatgtctgtaatgagccaaggtgaaaagtttattcatcaatcacccgttaatgatgaacttagtgcattgattaagttattaatttcaaaaattaacggttgtcattattgtgttgatatccataaaaagaattaa

SEQ ID NO: 412610 - DNA, 231 bp, Staphylococcus aureus
atgaaaattgatgaagtcttgagttttagacatttagatttatttactgatcaagaaaaagtgacgcttgaatttgcagaaatgttaaattcaatcaaagactttaagaagtttgaaattattgaccggctaaaatcattttatgatgaagaacaaattattgatcttgtctttgttgtaaaccaaattaacggttggaacaggctaaatattattagtgataaactataa

SEQ ID NO: 412611 - DNA, 225 bp, Staphylococcus aureus; identical to SEQ ID NO: 410345

SEQ ID NO: 412612 - DNA, 342 bp, Staphylococcus aureus
ttgaattattacacatatatccctagagagtataatgtctctgaaaaagtattttatgatttgtggacggatttatatagattgtttaagaagttaagaaacgcatttaaagaagaagatttagaaccatggacatcatgtgaatttgattttacaagagagggtaatttgaaagtatcgtttgattatatagattggattaaattaggttttggtccatcaggaaaggaaaactactatatgtataaaaagtttggtgttataccagaaacggaatatgaaattaataaagttaaagaaatcgagcaatttattaaagagcaagatgaagctgaactatag

SEQ ID NO: 412613 - DNA, 633 bp, Staphylococcus aureus
atggaaggtaatttattacagcaattattcaattattatgttacgaactttggctatctatgggacttatttttcaaacacttattaatgtctgtctatggtgtgctgtttgcagctttaattggtattccattgggaatcttgcttgcaagatacacaaaactttctggatttgtaattacaattgcaaatataattcaaacagttccagtcattgcaatgttagctattttaatgttagtcatgggcttaggctcagaaacagtagttttaacagtgtttttatatgcgttacttccaattataaaaaacacttatactggtatagctagtgttgatgcgaatattaaggatgctggcaaaggtatgggaatgacacgcaatcaagtgctacgaatgattgaattaccgttatctgtttcggttattatcggtggcattcgtattgccttggttgttgcgataggtgttgttgccgttggatcatttataggagcacctacgcttggtgacattgtgattcgtggtacaaatgcgacggatggcacaacgtttattttagcaggtgcgattccgattgctatcattgcaatcgtcattgatgtactattaagatttttagaaaacgattag

SEQ ID NO: 412614 - DNA, 339 bp, Staphylococcus aureus; identical to SEQ ID NO: 410839

SEQ ID NO: 412615 - DNA, 864 bp, Staphylococcus aureus; identical to SEQ ID NO: 410749

SEQ ID NO: 412616 - DNA, 168 bp, Staphylococcus aureus
atgagcttttacgaatatatacaaacatttaaagatgattcattcccaaaacaagagaagctaacagaaaacattttgtcttattttcatcaaatgtccaatatagatcatgagtttttagaaattgtaaaaagatcactttctctgtatgatcaattaaaatcgtaa

SEQ ID NO: 412617 - DNA, 249 bp, Staphylococcus aureus; identical to SEQ ID NO: 409148

SEQ ID NO: 412618 - DNA, 1149 bp, Staphylococcus aureus
atgtcaaatattaaaattgtaactttgattggctttttcacaatgtttattgttggtgtttcagacttaattgttgtaggaatgttaaatgaaatgagtaaagaatttcatgtaagtaatgctttaataggtcagttggtaacattgtatgctgttgctttttcaattctaagccctctcttaacaaaggtaactagtcaaattaatgacaaaaaattattagtatcctgtttaatactttttattattttcagcatgcttacaactgtaatgaccaattatttctttctatgtattgttagaatctttatggcgggcatcgcttcattaatcactgtaaaattaatgtctactggagcaaatattgttccagtagaatacaaagcatcagttatcgctaacatatacgtaggctttagtgcagcaaatatacttggtatacccataggtacattaattgcttcccattacaattggaagattccgttttatatcattgcgattatcacttttttatgtctactaggtattatgttatttatcccgaataaatcacattatagtattaataatcattctaaataccaattagtaaatttcagaggcacattaatcatgttgggctttttattaatcatgatgatatctaatagcatgttatttacatatatagagcctttagtaaaaagtaaaggtcatagcatctggatagtaagtttgtgtttatttttctcaggtattgcaggtgttttaggttcaaaattaggaaataatttaactgaaaagaaaggctataggattgctggaaatatcattataattgtctatattatttctattatgagcatcttattgactggacaaaatgtcatacttttaattttatctatatttacatggaatttatttcattggggaacaaatccaacagttcaatatgctttacttaaatttttaaaaggcgatccaagtcaaatattgagctatgatatttcaatattaaatttaggaatcggattaggatcattaattggtggtatattattttctatcgataatcagttcaacttatcaattgttgttgctatgatattagcaatggtttcatctatattattaaaaacagctgttcatacagagaaaaattaa

SEQ ID NO: 412619 - DNA, 372 bp, Staphylococcus aureus; identical to SEQ ID NO: 408362

SEQ ID NO: 412620 - DNA, 162 bp, Staphylococcus aureus
atgagcaacatttataaaagctacctagtagcagtattatgcttcacagtcttagcgattgtacttatgccgtttctatacttcactacagcatggtcaattgcgggattcgcaagtatcgcaacattcatgtactacaaagaatgctttttcaaagaataa

SEQ ID NO: 412621 - DNA, 423 bp, Staphylococcus aureus
ttgtctactagactgggtgcagttcatgctgatataattaggctcatttcatatttaagtataccagtattaagtttttataatatgttaagcatctttcaaatttatgtagttgcaatcatttcaggtattggattagtatttcacagtatttctgaggtttcgataatcccaagtattgtaaaagaagaagatttggcgagcgcaaacagttatatatacgctactcaaaatgtttcggaatttttgggccctataattggaggtttactttatacatatatgggatattcaatattgatttttatagattctatgacttttttactctcatttttcagtttgatattaattaaaattgaaacaaagagtatattcaatcaagaaaagttgagtggaaaaaaattttttgagcgatgttaa

SEQ ID NO: 412622 - DNA, 291 bp, Staphylococcus aureus
atggatgaaactgaggatgaactaagtaacttcagaatattaaaacgcataggctttacgcacacagatatgcttaaaggattattactaaaaattactttcaacttcggtttaccattattgattgctatattacatgcagtattcgccgcaatagcatttatgaaattgatgggtaatatatccttcatgccggttattatagtaatcattgtatacacactcatttacattgtttttgctttaatcgcttttgtacattcaaataaattgattaagaaaaccatttaa

SEQ ID NO: 412623 - DNA, 342 bp, Staphylococcus aureus
atggataaacagcaaataaaaggcttcgtttgtgattatcatgagcgaactagaagtgatgtattaatagatgatgatataaatactgatgaattcttttcaataggtgatgaaaattctaatgaatggatggcagacgataacattgatgatcatattgtaaagaatcacttagaaatgattgttgaccaagtagctaatgataaagagttttatattttcgattctttaatacaaggacgtagttataaagatattagtagtgtcttagagtgttcagaacaatctgtaagattatggtatgaaaccttattagataaaattgtggaggtgatagaatga

SEQ ID NO: 412624 - DNA, 537 bp, Staphylococcus aureus
atgcacaacaaaaatgaattcaacaaaaaactgaaagattttataggtagcgataaacggatggctttagtaaagggttatattaacgagtataaattaacaattgttttaagagctttaaataattccgattacacaaaagggacgatacacactcgttcaataggcaacctaaaacaaatagtagataatcgaattattcctaaaaatataactcaaaacacaatcttcaaattgagtaatttaaccttagaggttaacctctatgaaagaaacacaatttatcacggagactttgctatttactatcctgtagaatctgctctaataatagaaacagatactcctaggctaattaatcatataaataacaacccagtccaaaaaatatttataataacaacaaatgactggagctttaatacacttgaattagaaaaaatagtagacgaaactataatttatgatttaaaacaagaagatcctaaacaatatgaaattttatataaaaataaacacggaaaattgccttattga

SEQ ID NO: 412625 - DNA, 237 bp, Staphylococcus aureus
gtgacgcaatacttagtcacaacattcaaagattcaacaggacgcaagcatacacacataactaaagctaaaagcaatcaaaggtttacagttgttgaggcagagagtaaagaagaagcgaaagagaaatatgagtcacaaaatacacctattgtttactacactaataattctaaagtgaccttattcgaaagacctagtgaagaagtattaggttctttgttcgaaaagaaataa

SEQ ID NO: 412626 - DNA, 306 bp, Staphylococcus aureus
atgagacttcaaaaagcacctctagtaacgtcaggactagtcttaggattattaggcctgggtaatctattaaaagacttatctcttactttaaacgctgtttgcggaatctttgctttcttgatttggattcaccttttatgtactatgatcaaatattttaataatgtgaaagaacaattaaacagtcctctagtttcatcagtgttcacaacatttttcatgtctggctttttaggtactacttatttaaatacattttttagtaacataacttttatcaatagcttaataacgcctatttga

SEQ ID NO: 412627 - DNA, 612 bp, Staphylococcus aureus
atgattattttttcaataaaatatttaaaagatttttcacttgaaaatgtttatccttcgtggactgtactttttattggtattgctatcgcaggattgacggcacccgttagcggatattttttcataggtcaattaacagtaatatatggctttgtagctacttgtattgtcttacctatagttttcaagcgattaaaagcatttccattgcagacgtcaatcaaaccgaacacatcgacaatttgtgcaccattttctttagtcgctgcagcatatgttatagcctttcctaaggcgaatgcttttatcgtaattatatttttaatattagctcaaatattttatttttatatcattatacaattgcctaaattactaaaagaacctttttcgcccgtattttcagctttcacattccctttagtaatctcagcaactgctttaaagaacagtttgcctgtacttatgtttccagacatttggaaaggtcttttgtttatcgaagtgttattagccactgtaatagtacttagagtctttataggatatcttcacttctttttaaaaaaggaaaaacaagataaatttcttcgtaatgcgtctcagtaa

SEQ ID NO: 412628 - DNA, 1446 bp, Staphylococcus aureus
atgcaagcaaaattaactaaaaaagagtttatagaatggttgaaaacttctgagggaaaacaatttaatgcagatttatggtatggatttcagtgtttcgactatgccaatgctggctggaaagttttgttcggattactcctaaaaggtttaggcgcaaaagatattccattcgctaacaacttcgacggattagctactgtataccaaaatacaccggacttcttagcacaacctggcgacatggttgtattcggtagtaactacggtgctggatatggtcacgttgcatgggttatcgaagcaactttagattatatcattgtatatgagcagaattggctcggcggtggctggactgacggaattgaacaacccggttggggttgggaaagggttacaagacgccaacacgcttacgacttccctatgtggtttatccgtcctaactttaaaagtgaaataacaccacgatcagttcaatctcctacacaagtacctaaaaaggaaacagctaagccacaacctaaagcggtagaacttaaaatcatcaaagatgtggttaaaggttatgacctgcctaagcgtggtggtaatcctaaaggtatagttattcataacgatgcaggaagcaaaggagcgactgctgaagcatatcgtaatgggttagttaatgcgcctttatcgagattagaggcgggtattgcacatagttatgtatcaggtaacacagtgtggcaagccttagatgaatcacaagtaggttggcataccgctaaccaagcaggcaataaatattattacggtattgaagtgtgtcaatcaatgggagtagataatgcgacatttttaaaaaacgaacaggcgactttccaagaatgcgctagattgttaaaaaaatggggattaccagcaaacagaaatacaatcagattgcacaacgaattcacttcaacatcatgcccacatagaagttcagtattgcacactggctttgacccagtaacgcgtggtttattaccagaagataaacgactacaacttaaagactactttatcaagcaaattagagcattcatggacggtaaaataccggttgccactgtctctaatgagtcaagcgcttcaagtaatacagttaaaccagttgcgagtgcatggaaacgtaataaatatggcacttactacatggaagaaagcgctagattcacaaacggcaatcaaccaatcacagtaagaaaagtaggaccattcttatcatgtccagaagcttatcagttccaaccaggcggatattgtgattatacagaagtgatgttacaagatggtcatgtttgggtaggatatacatgggaggggcaacgttattacttgcctattagaacatggaatggttctgccccacctaatcagatattaggcgacttatggggagaaatcagttag

SEQ ID NO: 412629 - DNA, 1215 bp, Staphylococcus aureus
atgcatattctaattgggattatcggaattatcttctttttagcacttgcgtttctatttagctcagacaggaaaaatattcgctggaaatatgtaggaattttacttgcaattcagcttatctttgcatttatcttgcttaaaactacaatgggaatcaaggttattggtggtatttcaaacggttttaactacttattattaaaagcagcagatggtgttaactttgtattcggtggtattcaatatatcgatcctaagcaaccaccattcttcttcagtgtattattacctatcgtatttatttcagcgattatcggtatccttcaatacacaaagattttacctttaatcattaatgttttaggattcttaatttctaaaattaatggtatgggacgtttagaatcatacaatgcagttgctgcagcaattttgggacaatctgaagtatttatttcaattaaaaaacaattaccatacatacctaagcaacgtttatacacattaacagcttcagcaatgtcgactgtttctgcttcaattatcggtgcatactttaccttaattgaacctaaatatgttgtaacggctgttgtcttaaacttatttggtggtttcatcatcgcttcaattattaacccttataaagttaatgaagaagatgacaaattattagttgaagaaactgaagaaagacaacaatcattcttcgaaatgctaggagaatatattttagatggatttaaagtagctgtcattgtaggcgcaatgttaatcggatacattgccattatcgctctattaaatggaattgtaagcaatatctttagtacagtttcaggtggcgctatttcttgggatttccaaacattaattggttttgtctttgcaccatttgcattcttagtcggtgtgccatggcaagatgcagttcaagccggttcagttatggcgacaaaactattatctaacgaatttgtagctatgcaagcacttggtaaacttagtgatttatctgaacacgcaaaaggtgttacatctgtattcttagtatcatttgctaactttagctctattggtattatttcaggtgcgattaaatctcttaatgacaaaaaaggagatacagttgcccgctttggtttgaaactattattcggtgcaacactagtatctttcatttcagctgcaatcgctggattctttatttaa

SEQ ID NO: 412630 - DNA, 561 bp, Staphylococcus aureus
atgaaaataggtgtattagcattacaaggtgcagtacgtgaacatattagacatattgaattaagtggtcatgaaggtattgcagttaaaaaagttgaacaattagaagaaatcgagggcttaatattacctggtggcgagtctacaacgttacgtcgattaatgaatttatatggatttaaagaggctttacaaaattcaactttacctatgtttggtacatgcgcaggattaatagttctagcgcaagatatagttggtgaagaaggataccttaacaagttgaatattactgtacaacgaaactcattcggtagacaagttgacagctttgaaacagaattagatattaaaggtatcgctacagatattgaaggtgtctttataagagccccacatattgaaaaagtaggtcaaggcgtagatatcctatgtaaggttaatgagaaaattgtagctgtccagcaaggtaaatatttaggcgtatcattccatcctgaattaacagatgactatagagtaactgattactttattaatcatattgtaaaaaaagcatag

SEQ ID NO: 412631 - DNA, 888 bp, Staphylococcus aureus; identical to SEQ ID NO: 411030

SEQ ID NO: 412632 - DNA, 390 bp, Staphylococcus aureus; identical to SEQ ID NO: 409396

SEQ ID NO: 412633 - DNA, 204 bp, Staphylococcus aureus
atggactcgaattgtaaagacacaaatggaatggaaactattggagtggaatcaaaaagactggaatcgaatggaaagggattgaatggaattgaatggaatggaaaggattggaatagaatggaatggaaaggaatggaatggaatggaatggaaactacccgaatggaatggaatgtaatggagtgtaagggaattgaatag

SEQ ID NO: 412634 - DNA, 981 bp, Staphylococcus aureus
atgttaaagttaaatccttacaagattggatttagaacaataaaaacagcagtgggtatgactttaggtgtaattattagtaagctgttaggtttagataattatgcttcaagcgccatattagtcgtattatgtattaaacatacaaaagtacattcgctacaagcgattatttcaagattagtatcatgttttttagtattgtttttaggttcagcaatatttagtttattaggtcagagtccaattgtactcggtattatcgtattgttatttataccattaactgtcgtattaaaagtacaagaaggtgtcattacgagttgcgttatattacttcatgtttttaatgcaaaatcaattgatgcacatttaattgttaatgaaacattattactgttaattggactgagcattgcatttacaatgaatttaatgatgccaagtttagacaaacaactagacgaatacaaatgtaaaattgagcaacaaattgctgatatttttagtaaatatagttatatttgtgaaaaatatgaagataccattgcgattgaatttgaagtgttacttttaaatattaaaaaggcgaagtctatcgcgttccgagatgttaaaaatcattttgttagaaacgaaaattcatactatcattattttgatatgcgagaagagcaagtggaattgttaatgagaatgaaaccgctcatcgaaagtatctgtcataaagatccacttttaaatgatgtttcgtcactgctgaaagaaattggtctaaatgtgaatagtaatgactatacagcaatgcgtttacacaatttgtatgagacgcgtttgaaattggatgaactgccattgccaacaacacacaaagcgcttaactcgagagcaagtattattcaaatattaaatgaattagaagaatatttacaaatcaaatcgcaatttggttcattgaaaatgcatagtgaagtagcttaa

SEQ ID NO: 412635 - DNA, 438 bp, Staphylococcus aureus; identical to SEQ ID NO: 405973

SEQ ID NO: 412636 - DNA, 405 bp, Staphylococcus aureus
atgagtgaaaaacaacaaattctcgattatatagaaacaaataaatatagttatatcgaaatcagtcatagaattcatgaacgtcctgaacttggtaatgaagaaatatttgcgtctcgaactttaatagatcgtttgaaagagcatgattttgaaattgaaaccgagattgctgggcatgcaactgggtttatagcgacatatgattcaggtcttgatgggccagctataggttttttagcagaatacgatgctttgccagggttgggtcatgcttgtggtcataatatcattggaactgcaagtgtgcttggtgcaattggtttgaagcaagtgattgaccaaattggtggtaaagtagtcgttcttggatgtccagctgaagaaggtggggaaaaatggtag

SEQ ID NO: 412637 - DNA, 1383 bp, Staphylococcus aureus
atggattaccaacgacctagattaaaagtgttaagtgattattacgaaggtaaaactaagaatctggttgagttaacacgacgcaaagaagagtacatggcagataaccgtgtagcgcatgattacgcatcttatattagcgattttattaacggttatttcttaggtaatccgattcaatgtcaagatgatgataaagatgtattagaagctattgaggcgttcaatgatttaaatgatgttgagtcacacaatagatctttaggattagatttgtcaatttatggcaaagcttatgagttaatgattagaaaccaagatgatgaaacgcgtttatacaagagtgatgcaatgagtacttttgtcatatacgacaatacaattgaacgtaatagtatcgcaggcgttagatatttaagaactaaaccaatagacaagactgacgaagatgaagtgtttacagttgatttatttacttctcacggtgtttatagatatcttaccagtagaacaaatggattgaagctcacaccacgtgaaaacggttttgaatcacactctttcgaacgtatgcctattacagaatttagcaacaacgaaagaagaaaaggggattatgagaaagtaatcactttaattgatttgtatgataatgcagaatcagatactgctaactatatgagtgatttaaatgacgctatgttacttattaaaggtaatttaaatttagatcctgtagaagttagaaaacaaaaggaagctaacgtgttatttttagagccaaccgtttatgagaatagggatacaggtatcgaaacagaaggttcagttgacggcggttatatttataaacaatacgatgtacaaggtaccgaagcttataaagaccgtttgaacagtgatatacacatgtttaccaacacgcctaacatgaaagatgataactttagtggcactcaatcgggcgaggcaatgaaatacaaattattcggattagaacaacgtactaaaactaaagaaggattgttcactaaagggttaagacgtcgtgctaagttgttagagacaatacttaaaaatacacggtcgattgacgctaacaaagatttcaatactgttagatacgtatacaacagaaacttacctaaatcattaatcgaagaattaaaagcttatattgattctggcgggaagattagtcaaacaactttaatgtctctattctcgttcttccaagaccctgaattagaagtcaagaaaatagaagaagatgagaaagaatctattaaaaaagctcaaaaaggtatttataaagaccctagaaacatcaatgacgatgaacaagatgatgatacaaaagatactgttgataaaaaggaatga

SEQ ID NO: 412638 - DNA, 783 bp, Staphylococcus aureus
atgaagtctataaaaaggattggattgtgcataagtctgttgattttaatcatttttgcaacatcttgtggtagtaataagattactggagactcaaaagaagaacaaatcaaaaagagttttgcgaaatctttagacaagtatcctactgaaaatctagaagagttttatgataaagaaggatatagagatggagaatttgaaaaagatgataaagggacttggctaattagatctgaaatgaaaatccaattaaaaggagaaaatctggaatctaggggagcagttatagaaattaacagaaatactagaacggctaaagggaattatattgttagagaagttgttgaagatagcgatggaatgacacacaatcatacaaaaaggtatcctgtgaaaatggaaaataataaaatgattccattaaaatcaattgatgatgaaaaagtaaaaaaagaaattgaagaatttaaattctttgtacaatacgggaatttcaaagaattggaaaactataaagaggacgaagtgtcatataacccagaagtaccaatatactctgcacaatatcaattgaaaaacagtgattataatgtagagcaattacgtaagcgatataatatcccgacgcaaaaagcgcccaaattattattgaaaggctcaggtaatttaaaaggttcatcagtcggatataaaaatattgaatttacctttgttgaaaataaggaagaaaatatttacttcacagatagtgtctactttaatccaagcgaggataaataa

SEQ ID NO: 412639 - DNA, 477 bp, Staphylococcus aureus
ttgtctgatatagttgatacaacttgtgtgaatatgcttacaactttattccaaattgtcgttaatatactagataagaaactccaaatcgtattccatatattagaaataaaactccatgccgcttgtaatgcagtagatatagctgtagtgatagcgttccaaaccttagttgccacagtaactatagtgttccacaacgtttgtaagaacgtccaaatagcgttccaaattgtcattgcgatagtcataattgtggtaaatactgtagttattacagtgactaacaaattccaaatcgtagtagcgattgtaattatcgtgttccagattgtacttaagaatgtccaaatagctgtccatatcgtcataactattgtcattatcgtcgtgaaaacagttgtgatgattgtaactaaaaggttccataccgttgttgcaatagcgataattccattccataacccttgtaaataa

SEQ ID NO: 412640 - DNA, 264 bp, Staphylococcus aureus
ttggcgggcgtagatggtaggttacaaacgcggaactatgaaaataaggaaggtcaacgtgtatacgttacggaagttattgctgatagtattcaatttttagaaccgaaaaactcaaatgacactcaacaagatttatatcaacaacaagtacaacaaacacgtggacaatcgcaatattcaaataacaaaccagtaaaagataatccgtttgcgaatgcaaatggtccgattgaaatagatgacaatgatttaccattctaa

SEQ ID NO: 412641 - DNA, 165 bp, Staphylococcus aureus
atgccagttgatgatccactgaatgcattcatcaaattgttaattccaacgaaaacatttttgaaaatattaccaatgataggtaagtttgtttttgtatattcaataaaacgagttatcgaattttctccagctgcactattagcccatttagagaaagattga

SEQ ID NO: 412642 - DNA, 432 bp, Staphylococcus aureus
atgactggttggataaaacttcatagaaaactattagattcgcctatttttcagaacgaaaagttattcaaagtatttgcatattgtcttatgaaggctagtcataaggatcatacacagcttgttggcagacgagttgttgaattagaaaaaggtcaatttgtgttcgggagaaagcgagcaagcgaagagttgcgtctcaaagaatccacagtaagagactacataaagcttttagaaaaccttggaactatcgtcgtaaagtccgacaacaaattttctgttataaccgttgtcaattgggcgatttatcaaagtatggaagaaaattccgacagcaaaaacgacaacaaatcaacaacaaatcaacaacaaatggacaacaaatcaacaacaaatcaacacaaacaagaatgtaaagaatggggataa

SEQ ID NO: 412643 - DNA, 264 bp, Staphylococcus aureus
ttgacgggcgtagatggtaggttacaaacgcggaattatgaaaataaggaaggtcaacgtgtatacgttacggaagttgttgccgatagtattcaatttttagaaccaaagaacacaaatgactctcaacaagatgtatatcaacaacaagtacaacaaacacgtgggcaatcgcaatatccatataacaaaccagtaaaagataatccgtttgcaaatgctaatggtccgattgaaatagatgacgatgatttaccattctaa

SEQ ID NO: 412644 - DNA, 378 bp, Staphylococcus aureus
atgaaaatcacagtaaacgataaaaacgaagttatcggattcgttaatactggcggtttacgcaatagtttagatgtagatgataacaatgtgcctattaaatttaaagaagagttcgaacctagaaagtttgttttcacaaacggcgaaattaaatacaatagcaatttcgaaaaagaagacgtaccgaatgcatcaaaccaacaaagtgcgtcagatttaagtgatgaggaacttcgcggaatggttgcgagtatgcaaatgcaggtggcacaagtaaacgtattaacaatggaattagctcaacaaaacgctatgttaacacaacagttgactgaactgaaaactaacaaaacaagtactgagggggacgtttaa

SEQ ID NO: 412645 - DNA, 174 bp, Staphylococcus aureus
atgagcaatactgacaaataccttagagacatagcaagagagttgaaatgtatacgtaaagagttacaaaagcggaatgagatgattgaagataacaatcaaaaattagaagaaagtttgggaaaactttttactgaattaacaggtagtaatatggaaattaaacttcagtag

SEQ ID NO: 412646 - DNA, 171 bp, Staphylococcus aureus
atgagcaatactgacaaataccttagagacatagcaagagagttaaaaggtatacgtaaagagttacaaaagcgaaacgaaacagttattattgatgcaaacttagacagcgtaaggtcggcagtattagccaataaagaaaaaccgaaatataacgaaccactcttttaa

SEQ ID NO: 412647 - DNA, 474 bp, Staphylococcus aureus
gtgtctgcaggtgctgatatgatccgtggtttaattagaggtattggacaaatggctggccaattagtagatgcggctaaaaatgttgctaagaaagctttagatgcagctaaaagtgctttgggtattcactcaccttcacgtgaattcatggatgttggtatgtattcaatgctaggtttcgttaaaggtatagataatcattcaagtaaagttatccgtaatgtttctaatgttgcagataaagtagttgatgcatttcaacctacattaaacgcacctgacatttctagtattacaggaaacttaagtaatttaggtggaaatataaatgcgcaagtacaacacacacattctattgaaacatcaccgaacatgaaaactgttaaagttgaattcgatgttaataacgatgcgcttactagtattgttaacggcagaaatgctaaacgcaattctgagtattacttataa

SEQ ID NO: 412648 - DNA, 333 bp, Staphylococcus aureus
ttgttcgacggtggcgcaaatggtgtaggtacaacaatcaatctaactgaaccgtacacaaactattctattttgttggtaagtggaacttatccaggtggcgttattgagggattcggactaactgcattacctaacgcgattcaattgagtaaagcgaatgtagttgactcagacggcaacggtggcggtatttatgagtgcttactatccaaaacaagtagcactactttaagaatagataacgatgtgtactttgatttaggtaaaacatcaggttctggagcgaatgccaacaaagttactataactaaaattatggggtggaaataa

SEQ ID NO: 412649 - DNA, 675 bp, Staphylococcus aureus
atgaataattgtttgagttgtggtgctaagttatatgaaaatataaccatttataatttgttcaagaaacctaatagattatgtgacagatgcaaagagaattgggacaatattaaacttgatattaaagcaaggcgatgttcaaggtgcttaaaatacttagatcaaaatgaagcgtattgtttagactgcaagtttctatcggcacactttaatttaatggaacaattatattgtcaatttcaatatgacggtttaatgaaagagatgatacatcagtataaattttcgaaagactattatttatgtgaattattggcacatttgattgaaataccacaaacatcttatgactatattgtgccaattccttcttcgccggcacatgatttatctagaacatttaacccggtagaagcagtactaaaagcaaaagggattcgctttgataagattttaaagatgtcaaatagaccaaaacagtctcatttaactaagaaagagcgtctggcagatgaaaatccatttattattgatacggaattagatttaaatggtaaggaaatattactcgttgacgatatttatacaactggattaacaattcatcgtgcagggtgtaaattatatgctaaaaatatcagaaaattcaaagtgtttgcgtttgcacgatag

SEQ ID NO: 412650 - DNA, 321 bp, Staphylococcus aureus
atgaattgggaaattaaagatttaatgtgtgacattgaagtgataaaacaaaaaattaatgatgtagctaccaaacatgcttggtttgttgaagatagatttgtaaaaagtgaattagaaacaaaacgggaacatattaatttttctgctagctatttagaacatcgtatacaaaatgaacatacagttgagttattacatgtgtacttaaaagaattcagtgaacttatacaaaaatttcatgaaatagaaaaagcgtcatcagagaactttgacgaggaatcagatgacgcaaagaattcaataaaagtagcagagtaa

SEQ ID NO: 412651 - DNA, 360 bp, Staphylococcus aureus
atgaataaattaactaaacaggaatacaaaaacattgaaaataaattgaattacgatcatatggtaaatggtaaaaaacgcactaataaaataaacaaactcttacaaagagaacatgatagagatgcttcaattattaaaagtgaataccctagactaagtgatagtgagatatcagaagttattgtggattatagaacttataaggagcttgtaatagcaacagaaacttttgttgatttccctataaattatgaggattcaaatgtatgtcagttcattactaaggaagatattgaagatctgaaatcagcaattgaagaaatgacaagtttcgttgaaaatttggaggaattataa

SEQ ID NO: 412652 - DNA, 213 bp, Staphylococcus aureus
atgaataatgaacaaaaagaagtgattaaagatatttatagcagtttggaatcagtagctaataacaaatcagaggtatacatccatgaatttaaatgtggtgagaaagaacggacagagacagtaaaccgtgagcaacacttacaagcgattatcgagtggacattgcaacaaatagaaaataattttgaatttgaagaggagaatgaataa

SEQ ID NO: 412653 - DNA, 213 bp, Staphylococcus aureus
atgaaaaataatttgagtatgcttatggggcgtaatcgcatttctgcatcaaagctaagtgcaaaaactggtatttccagaacatcaatacatggcttgtatcacgaacgtactgaaaatccagatacaaaaacagttatgaagttatgtgaatatttcggtgtgacacctaatgaattttttggaattaatgaaaaaaaggaggttaaataa

SEQ ID NO: 412654 - DNA, 720 bp, Staphylococcus aureus
atgtattttggagaacttttaaaaaaagcacgtgaatcagccgaattatctataaataaattgtcaatgttaaccgatatttctcctacttatataagtaggattgagaagcaaaaagataaattgccttctaatgaaattgcttttaccttaattagttggttaagtggtatgcaaaaagataatagtgaatttaaaaaagtagctgtcaaagaaatagatgacatgttcttagcatctttaatacagacgaaataccataaagaaattaaaaaaaaggaaatgtcacaagaggaaatagaattaaaattcgaaaaaataagctgtgattactatgattttttaaaacgttttaatgacagtttaagaaatgaaagaaatgaagctttagaaaaggtatataaaaatcactttttaaccaatagtaaagagggttctttagtaatagatcaagaaaatataaatgaaagaattaaaaatttacctatattagatttaaaatggatattaacacaaaaaaaattcgaagtattttttggcagagattatctttttgaaaataataaaaaagaattttattacaacacaatatcagatgaagataagaaaattattttttcaataataactgcgtactttaatgaaaagtacgaaaagataaataaaccaagagagtttttcttcaataaatttaaatatataaaagatttctttaagtaa

SEQ ID NO: 412655 - DNA, 981 bp, Staphylococcus aureus
ttgacactaaaattagaaaaagctgtattttcaatggagataaaaaaagatttgaagttattaatgaaaaaggataattaccacaatattttcgctttgatttttgactggttggtaattctcgggagtgcatgtataagtatctatatgagtaatctcattatttatattataagtattattttaattggaagtcgaatgagggcgtttgataacttaatgcacgaagcatgtcatcgttcattatttacaaataagttttataataaatggattgcttgtcttttagtagcattccctatatttacaagctttactacatattgtaattctcattttaaacatcatagaaatttatgggatgaggaaaaagacccagatactaaacgatatcgcattgtaggtttagataagccgcaaaaagatgtgaaaaaatttataattaatcacattgtaaaggtactatttttattccatgtgcctaaatatgttttaggtacagtttcagctaacttatacagtagggatacacctaaatcagaaatatggactagaaatattttctgggtaacaattattacgttatcaattatgtttaatttttggttatatgttattctttattggtttataccacttttaacaacttttcagattattcgttattgggcagaaatggctgaacactctggattgaataatgatagtgagttaacagcaagtcggaatacttttggtatgccttggacaatatttttatttcatcctcaccatgataattttcacttagttcaccatttattcccagcaattccacattataatttgaaaaaagcacatattatattaatgaaagatcaaaaatatagagaagcacaccattgtactgggttcttcaagacgacactaccgggtttttatagtgtagtaaaagatgtttgtacaccgaacattgttgggaagggggaggatgcgaattga

SEQ ID NO: 412656 - DNA, 411 bp, Staphylococcus aureus; identical to SEQ ID NO: 408361

SEQ ID NO: 412657 - DNA, 255 bp, Staphylococcus aureus
atgaacaaccgcgaacaaatcgaacaatcagttataagtgctagtgcgtataacggcaatgacacagagggattactaaaagaggttgaagacgtgtataagaaagcgcaagcgtttgatgaaatacttgagggtttacctaatgctatgcaagatgcactcaaagaagatattggtcttgatgaagcagtagggattatgacggggcaagtggtctataaatatgaggaggagcaggaaaatgaaaaaatttaa

SEQ ID NO: 412658 - DNA, 756 bp, Staphylococcus aureus
atgtataaggactattcttcgttagtacaatttcagttagacaaaattactaaagtgcctgatattaaagtaaatatacctactccagctctaaaactgactaacatcgagcatttaacaactcttagtcgtactataaatactttggagcgccaaattaaagttgctacaagcttttctaacagcccttaccttagaaaaaatattgagattgctcgtaaaatttcagagcgtagttccgttattcaaaatttacctaagttaaatatagagaagataaaaagcgcaaccgaattaaaacccattaatataaaaatccctgaattttcaaactcattattttctgaagaaacctctgactttgttaaaaaatctatagatgtagatagcaatactatagatacggctttcagccttttgcgttacgaatatgtcaaaaacacgcttattaacgctaaatctatccgtcgaatcaaatgggaacctgtaacggccgggttcggaaaacacatgacacaagtacagacctataatgttcaaagtgattctaataagaacaaagaaatccaagagttatcacacccgctttctgaattaataacattgttatttttagataatttatgtgaagatttaaagccttttataacttttcttgcaaatgaacttttgccttttatgccttccggaattcgaaacaccatgttgttattcataatttttatagttgctcgtaataagttagacaaaggttaa

SEQ ID NO: 412659 - DNA, 162 bp, Staphylococcus aureus
atgagtaaaacttataaaagttacctattagcagtactgtgcttcacaatcttagcgattgtactcatgccgtttctatacttcactacagcatggtcaattgcaggattcgcaagtatcgcaacattcatattctataaagaatacttttatgaagaataa

SEQ ID NO: 412660 - DNA, 210 bp, Staphylococcus aureus
atggaatacatcggatatgcagacgcaaatgcgtttgtaaaaataagtggcatttcaaaagatgatctagagaaaaaagtctactcgaacgaagagtttcaaaaagaatgcatgtacagatttggtcgaggacaaaagcgttatataaaaattgacaaagctattcaatttatcggtaccaatttaatgattaatgaatacgaattatag

SEQ ID NO: 412661 - DNA, 726 bp, Staphylococcus aureus
atgcaagaattacaaacatttaattttgaagaattaccagtaaggaaaattgaagtggaaggagaacccttctttttaggtaaggatgttgctgaaattttagggtatgcacgagcagataacgccatacgcaatcatgttgatagtgaagataggctgatgcaccaaattagtgcgtcaggtcaaaacagaaatatgatcatcatcaacgaatctggattatacagtttaatctttgacgcttctaaacaaagtaaaaacgaaaacattagagaaaccgctaggaaattcaaacgttgggtaacttcggaagttttaccaatgttaagaaaaacaggagcgtaccaaacacctagcgacccaatgcaagcattgagattaatgtttgaagctacagaacaaactaaacaagaaattaaaaacgtgaaagatgatgttattgatttgaaagaaaatcaaaaactggatgcgggagattacaatttcttaactagaactattaatcaaagagtagcgcatatccaaaggctacatgcgataacaaaccaaaaacaacgtagcgaattattcagggatattaattcagaagtgaaaaagatgactggtgcgagttcaagaacgaacgtaagacaaaaacatttcgacgatgtaattgaaatgattgctaattggttcccgtcacaagctactttatacagaatcaagcaaattgaaatgaaattttaa

SEQ ID NO: 412662 - DNA, 210 bp, Staphylococcus aureus
atgccagaaaattttaaagagttctctgtaaaggtctggagaactaattcgaatatgacacaacaagatgtcgctgataaattaggcgttactaaacaatctgtaataagatgggaaaaagatgacgcagaattaaaaggcttacaattgtatgctttagccaaattattcaacacagaagttgattatataaaggctaaaaaaatttaa

SEQ ID NO: 412663 - DNA, 327 bp, Staphylococcus aureus
atggaatataagagtgctagaaaaattttatcagagaacttagagcaacttatgaaagagaacaacattactcaagtagaattgtctgaagcaatcggggtaagtcaatcaacaatctctaactggcttaaagaacttaaatatcctagaatatcaaaagtccaacaattagcagattactttaatgtacctaaatcgagaattacagaagaaagaagtattcatcaagaaactatagccggtcatgcaaataaagatgaatttactcccgaagaatgggaagaaatcgaaaattttatgcaatgggttagagatagaaagaaataa

SEQ ID NO: 412664 - DNA, 207 bp, Staphylococcus aureus
gtgacacaatacttagtcacaacattcaaagattcaacaggacgtaaacatacacacataactaaagctaagagcaatcaaagctatacagttgttgaggcagagagtaaagaagaagcaaaagagaagtacgaggcacaagttaaaagagatgcagttattaaattaggtcagttgtttgaaaatataagggagtgtgggaaatga

SEQ ID NO: 412665 - DNA, 123 bp, Staphylococcus aureus; identical to SEQ ID NO: 412320

SEQ ID NO: 412666 - DNA, 312 bp, Staphylococcus aureus
atggacgaaaatgaaaaacttaatgttgaattaaataaaagtaatgattatatttttggtgaaagctatgaaatattttatgctaacgctttagatgtgcaggtaagcatcacagatcttatggtggatttcaaacaacatacccctagcggatttttaagtaataaaaaaattattatgaaccctagtctagcaaagcaattaaataaagctttagaacaagctttatcacaatatgaaaatatgcacggaacaattaaagatattgatactcttcaaaatgaaatgagcaaaatttatggcgatgaataa

SEQ ID NO: 412667 - DNA, 384 bp, Staphylococcus aureus
atggcgatgaataatatcgttaaaatcaataatcatcaacgatatgataggtatagtgtaggtggtagtgagttttatacaagtgatagtattggtggaaacctagcctttaaaaaagtggagggtggtaatatgagttatgaatacattactagaccggaatttgaggaacacaaaaggcacttagatactagatttgataaagttgaagacagtataaaaaagtcacaaatttcgttgagtaaagacatagacttagcaataaaaaatttgaaagatgaaatcaacgataaaaaattaactagtaatcgcttttggataggtatagcagcacctactgttgtaagtattatcggtattataataggtgtattttttaaataa

SEQ ID NO: 412668 - DNA, 204 bp, Staphylococcus aureus
atgagtgaaattaaaactattataggtgaagtggaaaaattgctagctaataatacaccatacagtatttcaaaaaaatctggtataccacgtcaaactgttacggatttaaaggtgggtaacactaaaatacacgacgctaaatttaaaacaataataaagttatacgagtatcaaagatcgcttgagaacgaagaagattaa

SEQ ID NO: 412669 - DNA, 183 bp, Staphylococcus aureus; identical to SEQ ID NO: 407358

SEQ ID NO: 412670 - DNA, 960 bp, Staphylococcus aureus
atgaataaaacaatcaaaaatgctactggtatgttgaagttaaacttacaacattttgctaacaagtcagtagagcctggacaaacgttattgaaaaataagcacgttggaattttagaaagagtcacagcggttaatgcctattcaacaccggcattaattagtaatgacgccatttttatggaaggtcgttctttcacagttatgaaaggagatacaacagagttaaaggattacaaacgtaatgctactaatgaatttgaccatccaaaaattgaagaaacaacatacttcttagatcaagaaaaatactggggtcgtttcgtagatgctttagacagaaaagacacagaaggtaatattgatattaattacgtagtggcacgtcaaggtgcggaagttgtagcaccatatttagataatttacgtttcgctacactagcacgtaataaagctaaacatttaacagttggtactggttcagatgcacagtatgatgcggttttagatgtatctgttgaattagatgaaatcaaagcgccagaaaaccgtgtgctattcgtttctcctacattctacaaaggtattaaaaagtttgttattgcattacctcaaggagatacgcgtcaacaagtattaggcaaaggtgtacaaggcgaattagacggttttgttatcgttaaagtaccaacgaaattattacaagggttacaagctatcgcagttgtaggcgaagttttagcttctccaattcaagctgatttggctaaaacaaattcaaatattcctggtatgttcggaacgttagcagaacaattgctatatactggtgcatttgtacctgaacacttacaaaagtacattttcactattggtggtacagaagttgctacaaaacgtgatggtgttgatgcacatgctgacaatgtagctaaaccgtctggaagcttagaaatgtaa

SEQ ID NO: 412671 - DNA, 525 bp, Staphylococcus aureus
atggatttatacacattgttaggacaatttaaagacggagaaatcgacaagcaaaaggtaattgatgcgattgacgaatcaaaatcgggaatggtaccacgttcaagattgaacgacaagaataccgaaattgaagagttaaaagaagagatttctaaacgtgatgaacaaattgtcgaattgaaagactctgtaaaagatgagagcgagcttcagaaagcactcgaagaagaacaaaataaaaacgcagagttagaaacaaagtataaagatttacaacttaatagcgcagtgaaattagcggttaatcatgaagctaatgacgctgacgacattctaacattcatcaataaagatgaactggaattagcagacgacggcactgtaaaaggtttagatgaagcgattggaacgcttaaagagtctaaaccttatttatttgcaccgtctaagcctacaggtaacacaccgcaagacggagacccaccaagcccgcatgaagcgtggacagaatttttaaattag

SEQ ID NO: 412672 - DNA, 441 bp, Staphylococcus aureus
atgatttcacacttgataacggatacttcgaagaagaaacatcagacagtgactcagacagtgattcagattcagatagcgattcagactcagatagcgattcagactcagacagtgaatcagactcagacagcgactcagattcagacagcgactcagactcagacagcgattcagactcagatagcgactcagattcagaaagcgactcagactcagacagcgactcagattcagacagcgactcagactcagatagtgattcagattcagacagcgactcagattcagacagcgactcagactcagaaagcgactcagattcagacagcgattcagaatcggatagcgactcagacagcgactcagactcagatagcgactcagattcagacagtgactcagatagcgactcagattcaggaaaacatacacctgtga

SEQ ID NO: 412673 - DNA, 261 bp, Staphylococcus aureus
atgagtggtttatttagttttttggttttaggtgctgaccgtccatctattgatggacttggggattggataggtaatgaagttggtactggtattggtttgatagtattaattgttggtattgtacattgggctactggtaagtatggacgaatgattgcattgtttattgttggtggtcttttattcttagtttctaaaggtcctgaacaagtgtttaatgcaatttctggtatttggaaaatgatttttggcggttga

SEQ ID NO: 412674 - DNA, 258 bp, Staphylococcus aureus
gtgtttgagtacctagaaaatggatttgatactgatacacttgagggcattcaatcgggtaatactgatgtgatagcgaatattgaaatgttgtatcagatagctacgggaatcaatgaaccagcaccagagttagttgagggattaaaattagtaactgagtttgtacaagatgagaaggctacacaagaggattacaaggctttagaacgtaagttaactgagttgaagtcatcttattacagtttgaataagtaa

SEQ ID NO: 412675 - DNA, 174 bp, Staphylococcus aureus; identical to SEQ ID NO: 408723

SEQ ID NO: 412676 - DNA, 846 bp, Staphylococcus aureus; identical to SEQ ID NO: 412554

SEQ ID NO: 412677 - DNA, 675 bp, Staphylococcus aureus; identical to SEQ ID NO: 408718

SEQ ID NO: 412678 - DNA, 714 bp, Staphylococcus aureus
atggctaaactaaatgtagaagtatttgcggacggtgcagatattgaagaaatgaaagcagcttataaaaacaaacaagtggatggttttacaacaaatcctagtttaatggcgaaagcgggcgtaacagattacaaagcttttgctgaagaagctgtgaaagaaattccagatgcttcaatttcatttgaagtatttgcagacgatttagaaactatggaaaaagaagcagcaattttaaaacaatatggcgaaaatgtatttgttaaaattcctattgtaaatacaaaaggtgaatcaacgattcctttaattaaaaaactttcagctgacaatgtgagattaaacgttacggctgtttacacaattgaacaagttaaagaaataactgaagcagtaactgaaggtgtgccaacatatgtttcagtatttgcaggacgtattgcagatacaggcgtagatccattaccattaatgaaagaggctgtaaaagttacgcatagtaaagacggcgttaaattattatgggcaagttgccgcgaattattcaatgtgattcaagctgatgaaattggtgcagatattattacatgccctgcagatgttgtgaaaaaagtgaatacaaacttaggtcgcgatattaacgaattatcagtagatacagttaaaggctttgcgaaagatattcaatcttcaggtctttctattctataa

SEQ ID NO: 412679 - DNA, 636 bp, Staphylococcus aureus
atgcaaaaattcaaagactttttttacgatgatttatcggttacacgaggaaattattttttaactttaatggcagcattttttattactatcattttatttatcggcatagttgtcagtgaagtacatttactttatagcatgctaattgtattagtaggtttaattctattgaggctattcaaaatcaatttattctcttttaaaaaattaacattgtctcaagttatttatattataggcggtgcactattaatttatgggttagataatctttatttatattttcatgacgtaccggcaaatgaactacaattagagcaagaaatacgaaatacaccattctatatttctattttcactgttaccatcatccccgctattgtggaagaaattgtttttcgcggtatgataataagggttatattcagaaaacacttatttttagggttacttgtgtctagtttagtttttgcatcattacacgaatctgacacttggattggttatttaccttacttatattctggtttgatttttggtctaatttatataaaaacaaaacgattagaagtggtaatattcatgcacttcttaaataacttgttagctctgctctttataatatggggataa

SEQ ID NO: 412680 - DNA, 768 bp, Staphylococcus aureus
atgattgatattcataaccatatattagttgatatagatgatggtcctaaaacaattgaaaagagtattgcactattaaagcaagctaaggatgaaggtgtaacaagtattgtagcgacacctcatcatttgcatccgagatatgataatacatttcaacaagtgcttgtgaaattggcggagttaagaacgcatccagaagttcaagcattggatattaaattatttcccgggcaagaaattagaattacagattcgattctgaaaggcttagataatggtagtattcaaggtattaatcgttcgaaatatttattaattgaatttccaacgggcgaagtaccacattatacaaaacaattgttttttgaaatacaatcgagaggctacataccaatcattgcacatcctgaaagaaatagaagtatcgccaaaaatccagaaatattatatgaattggttgcaaatggggcattgagtcaattaacatcgagttctttagttggtggatttggtaaaaacattcaaaagttatcattacaatttatagaatgtaatttggctcattttgtagcttcagatgcacattcatgtgaccaaagaccatttttgatgcaagaattatttcacaatcataaattgaagaaatattcgaatgatattgaagcattacttcgaaatgccagttcagtaatcaatgataattttgtttatttagacagaccgactaagccaggaaaagtgaagtcgtttttgaaatggttttaa

SEQ ID NO: 412681 - DNA, 360 bp, Staphylococcus aureus
atgattttgcgttacgcaacaaatttaaaacttgcgaaagagctataccaagccagtaaacctaaattgcaagaagataagggtatgattgaactgtttgaacatacttttggcttgcaaaaagaacttgtaaaatacgtcggcattgcagaagcaactactgctgctttatactcagctagctttatcaataaaaacatttctcgccttgcatcactatcaacgataggcattttaagtgtagctgcttacaaacatttcgaagctggccaaggtaaaaaaggtgcacaacatgcattagatttattaggtcttgctactttaagtttactagatacattttcttgtaataaaaaatag

SEQ ID NO: 412682 - DNA, 429 bp, Staphylococcus aureus
atgagcgaaaaacttcaagtaaaacaagaatttaacggcgttacaaggcaatacttgaatttcagaacagatagtatcgatgatctggataagttcaaaaaagaattcaaacctgttatgcacttaaaaggtgatgcattcaatcaacagttacaatctttgattaacaaatatccacaaatacaaaaaaatatgaaatcagagttcattgcttattatgataaagaaaaaaatagagaaacagtaaaaaactatgcttggaaccttcaaaaatctataaatgacattatgcaatcatatcctagcacaaaatttgtacagttttataaagatgatgtttccccgtcaatggtagatggaaatggccgtttaaaatcggatactaatgtaatttccatcgagggaggaaagtatgatgagaacaaataa

SEQ ID NO: 412683 - DNA, 693 bp, Staphylococcus aureus
atgaattattcgccaaaacaaggtgtaagaagtcatggtttaccgcacgacccatttaaaagtagtacagtacctcgtccaataggttggatttctactgtatcgaaagatgggaaagataatttagcgccttatagtcagtatcaaaacttaacttgggatccgcctatggttatgttcgcagcaaatcaatctgttcttggtgatcatgagcgtaaagatacagtaaaaaatgcagaagagacagggtggtttgtatggaacatggccacgtatgatttaagagaagctgttaatttatcgtcgaaggcactaccacctgaagaggatgaatttgaatatgcaggtgtgacgaaagaagcatgtatagaagcaccaggttatcgagtcaaagaatcgccagtacattttgaatgtgagtacgttcaaacgattcgtattccgacaggagacccagtatctaccgtagatattgttataggaagagttgcccaagttcatattgacgataaggttattcttgataatggtaaattggacattaagtcgattaaacctattgccagattaggatattacgattacacagtagtgaatgagatatttgaaatgaaagcacctgcagcttctaaagaagagttagcaggtttagaaggaagaaatttcgataatcaatcagatgaaaagagataa

SEQ ID NO: 412684 - DNA, 243 bp, Staphylococcus aureus
atgctatttcttgttacttcatatttaaaagttgtcgtcgttttgttaccgctcgcatctgtagaaacgattgatatagtacttgtaccaatgtttgttggtgtaccactaatagtattatttgtactatcaaatgttagtccggatggcaatccagtcactgtattcgtcaccgcatttccactgttatcttgcgtagcaattttaatcggggatattggtgaatacacttctgatgattga

SEQ ID NO: 412685 - DNA, 525 bp, Staphylococcus aureus
atgctatttgaaatactgatagagtccgaggtgctagctgactcgctcaatgatgttgatgtactaattgcattcgatgtactgtcacttaatgatgctgatgtactagacgaccctgatatactcgttgataagctttgtgacttagacaagcttcctgatgtactcatacttaatgagtcactgagtgatgttgatgtacgcaatgaatcagatgtacttgttgatagactttcggatttttcagtactgttagagttcgaaatcgaatcgcttaatgatgttgatttactaactgaacctgacatgcttgatgatacactttgtgaattcactaaacttgtgcttgttgagcttgatacactattactttcagatgtgcttaatgacttagatgcactcacagaatcagataggcttacacttgtcgatttcgaggtactagctgatgtagataccacaatcgatcctgatgtactcgttgatgcactttgtgagtcagctttacttgttgagacactttga

SEQ ID NO: 412686 - DNA, 729 bp, Staphylococcus aureus; identical to SEQ ID NO: 410088

SEQ ID NO: 412687 - DNA, 1347 bp, Staphylococcus aureus
atgcaagcaatccttaattttatagtcgatattttaagtcaaccagccattcttgttgcactgattgcctttataggtttaatcgttcagaaaaaacctgccgcaacgatcacttcaggaaccattaaaacgatattaggcttcttaattttaagtgcaggtgctgatgtcgtcgttcgatctcttgaaccattcggcaaaatattccaacacgcatttggtgtgcaaggtatcgtacctaacaacgaagctatcgtctcactagccttaaaagattttggaacaacagctgcactcatcatggtctgtggcatgattgttaatattttaattgctcgcttcactaatttaaaatatatctttttaacaggtcatcatacattttacatggctgcgtttttagcaatcattttaacagtcagtcatattaaaggctggctaacaattgttatcggcgcactcgtattaggattaatcatggcagtattacctgcattactccaacctacgatgcgaaaaattacagggaatgaccaagtagcgttaggtcattttggctcaatcagttactttgccgcaggtgctgtaggtcaattattcaaaggtaagtctaaatcaacggaagagattaaatttccaaaaggcttaagtttcttacgagaaagtacaattagtatctcgattacaatggcattactttacttcatcgcatgcttatttgcgggcgttagttatgtacacgaatctattagtgatggtcaaaactttattgtcttttctttaattcaaggtgtgacatttgctgctggtgtatttattattttaacgggcgttcgtttaatcttagctgaaatcgtcccagcatttaaaggaatttctgaaaagcttgtaccaaattctaaacctgcattagactgccctattgtgttcccttatgcacaaaatgcagtattaattggattctttgtcagctttattacaggtgtcatcggtatgtttatcttattcttatttggtggcgtcgtcattttacctggcatagttgcacacttcttcttaggtgcaacggctgctgtattcggtaatgcaagaggcggtattaaaggtgctgttgctggcgccgctctaaatggtatcctaatcacgtttttaccattattattcttgccatttttaggcgaattaggtggtgctgcaacaacattctcagatacagactttttaactgtcggtatcgtgttcggtaacgcagtaaaatatatgggattatttggtgcgattctatttattattatcgtaggtgcgacagcaattttattaaaaggccgtcaaaagccacagcaatag

SEQ ID NO: 412688 - DNA, 771 bp, Staphylococcus aureus
ttgcgtaaagagaaagacaaggatgataaatcaatctatgataagttgattaaagcttataacgtcaaatcgttaacgacagatggtcaaaaagtaaataataaagacggtatttatcaaattgttaaaattacgacagatcaatcgatgcctcgagaggtaaattacttaacacactcttcggcaggcattttatctaaaaaatttgttaatcaagtaaatcaagaatatccaaaaggatatggggatagcagtacaattcctgcaaattcagatggaaaaaatgcgctttatgcaagtggcgcatacattatgacacagaaaaatgcatatcaagcaacgtttcaacgtaatccaggattcaacgaaacagaaaaaggtagttatggatcacctaaaattaaaaatattacattgaagtttaatggtgatccgaataatgcattgtcagaacttagaaatcattcaattgatatgttggcagatgtgaatcaaaaacattttgatttaattaagtcggataaaaatttaagcattattcgcaaaaatggacgcaagtcagtctttttaatgctaaatattaaaaaaggtatatttaagacgcatccaaacttgagacaagcagtagttaatgcgatagatcaggatcaatttattaagttttatcgtggcgataaatttaaaattgcatcaccgattacaccacttgtcgatactggtaacgagcaacgtcaagatttagaaaaagtagaaaaagccattaatcaataa

SEQ ID NO: 412689 - DNA, 387 bp, Staphylococcus aureus
atgatacttgaccatttgcatgtgttgttacgttgtatgcatttgtttcgcttggcttcttgtatgtcgggcgagctccgtatgatacttgaccatttgcatgtgttgttacgttatatgcatttgttttgcttggctttttttgtgtcgggcgagcgccatatgatacttgaccatttgcatgtgttgttacgttgtatgcatttgttttgcttggctttttttgtgttgggcgagcaccgtatgatacttgaccatttgcatgtgttgttacgttatatgcgtttgtttcacttggcttgttttgtgttgggcgagctccgtatgatactgtgccatcttgatttgtcgttacgttgtatgcatttgtttcacttggcttgttga

SEQ ID NO: 412690 - DNA, 1203 bp, Staphylococcus aureus
atggctaaaattccagttacggtattaagtggttatttaggctcggggaaaacaacattgttaaatcatattttacaaaatcgtgaaggtcgacgtatcgcggtaattgtaaatgatatgagtgaagttaatatcgataaagatcttgtcgcagatggtgggggactatcgcgtacagatgaaaaattagtcgaactctctaatggttgtatctgttgtacacttagagatgatttattaaaagaagttgagcgtttagtgaaaaaaggtggcatcgatcaaattgttattgagtcaacagggatttcagagccagtacctgttgcacaaactttctcatatattgatgatgaacttggcattgatcttacagcgatttgccgtttagatacaatggttacagttgttgatgctaaccgcttcgtacatgacatcaactcagaagatttattgatggatcgtgatcaaagcgttgatgaaacagatgaacgttcgattgctgatttattaattgaccaagttgaattttgtgatgtattgattattaataaaattgatttaattagtgaagaagaacttgcaaagttagaaaaagtgttaagcgcattgcaacctattgctaaaattattaagacaacaaattctgaagtagatttaaaagaagtcttaaatacgcagcgttttgattttgaaaaagcgagcgagtcagcaggatggatcaaagaacttgagtcgggtggtcatgcatcgcatacgcctgaaacagaagaatatggcatatcatcatttgtatataaacgtcgtctacctttccatgctaaaaggttcaatgattggttagaaagcatgtcaaataatgtcgttcgatcaaaaggtatcgtatggttagcacaatacaatcatgtagcatgtttattatctcaagcagggtcatcttgcaatattcacccagttacatattgggtggctagtatgtctgaagcgcaacaaacacaaatattagcagaacgtcaagatgtcgcagctgaatgggatccagaatatggcgatcgtcatacacaatttgtcattattggtacagaattagatgaagaaaaattaacaaaagaactcgatgcatgcttagtcaatgcgcaagaaattgatgcagattggcaacaatttgaagatccatatcaatggcaaattagaccagcacgataa

SEQ ID NO: 412691 - DNA, 753 bp, Staphylococcus aureus
atgaaatataataaccatgacaaaattagagattttataatcattgaagcatatatgtttcgttttaagaaaaaagtcaagcctgaagtcgatatgactataaaagaatttatattactgacttatttatttcatcagcaagaaaacacacttccatttaagaagattgtttcagatttatgttataaacaatcggatttagtacagcatataaaagtacttgtgaaacattcatatattagtaaagttcgaagtaaaattgatgagcgtaatacttacatttcaatatctgaagaacaacgagagaaaattgcagaacgtgttacattgtttgatcaaatcattaaacaatttaaccttgcagatcaaagtgaatcacagatgataccaaaagatagtaaagaatttctaaacttgatgatgtatacaatgtatttcaagaatattatcaaaaaacatctaacattaagttttgtagaattcacaattctagctattatcacttctcaaaataaaaacatcgttcttcttaaagatttaattgaaacaatccaccataaataccctcaaactgttagagctctcaataatttaaaaaagcaaggctatctaataaaagaacgctcaactgaagatgaaagaaaaattttaattcatatggatgacgcgcagcaagaccatgctgaacaattattagctcaagtgaatcaattattagcagataaagatcatttacatcttgtttttgaataa

SEQ ID NO: 412692 - DNA, 999 bp, Staphylococcus aureus
atgaccgaaaagattaataaaaaagacaattaccatctcatcttcgcgttaatctttttagccatcgtttcagtggtaagtatgatgattggttcaagctttataccattacaacgcgtactgatgtactttataaatccaaatgacagtatggatcaattcactttagaagtattacgcttacctcgcattacacttgcgattttagcaggtgccgcactaggaatgagtggtttaatgttgcaaaatgtattaaaaaatccaattgcctcacctgatattatcggtatcacaggtggtgctagcttaagtgctgttgtctttattgcatttttcagccatttaacgatacatttacttccactatttgcagtattaggtggcgcagttgcaatgatgatactattagtgtttcaaacgaaaggacaaatacgcccgacaatactcataatcatcggtatttcgatgcaaacgttgtttattgcgcttgtccaaggattactcattacaacgaagcaattatctgctgccaaagcttatacatggctagtcggaagtctttacggtgctacgtttaaagatacaatcattttgggtatggttattttagctgttgtgccgttgttatttcttgttataccaaaaatgaaaatatctatacttgatgaccctgtagcgattggcttaggcttacatgtacaacgtatgaaactaatccaattaatcacttctactatactcgtatctatggcaatcagtttagtaggtaacattgggtttgtcggtttaatcgcaccacatatcgcgaaaacaatcgttcgcggaagttatgctaaaaagttactaatgtcagcaatgattggtgccatatcaattgttattgcagacttaattgggcgtaccttattcttgcctaaagaagtgccagcaggtgtatttattgctgcttttggtgccccattcttcatatacttattattaaccgtgaaaaagttataa

SEQ ID NO: 412693 - DNA, 2523 bp, Staphylococcus aureus; identical to SEQ ID NO: 410918

SEQ ID NO: 412694 - DNA, 1386 bp, Staphylococcus aureus
gtgatatttacggtttctgaagggacaaaagaggatgcagaacgtgcaatcttagctgcaagacgtgcgtttgagtctggtgaatggtcgcaagaaactgctgaaaaaagaggtaaaaaagtacgtgccatcgcggacaagatcaaagaacatcgcgaagcgttagcacgattagaaacattagatactggaaaaacgttagaagaatcatatgcagatatggatgatattcataatgtgtttatgtattttgctggattagcagataaagatggtggcgaaatgattgattcaccaattccagatacagaaagcaaaattgttaaagaaccagtaggtgtagttacacaaattacaccttggaattatccgttattacaagcatcatggaaaattgcgccagcgcttgctacgggttgttcactagttatgaaaccaagtgaaattacaccattaacaacaatacgtgtttttgaattaatggaagaagttggtttccctaaaggaacaattaatcttattctaggtgcaggttctgaagttggtgacgtaatgtcaggtcataaagaggttgaccttgtatcatttacaggtggcattgagactggtaagcatattatgaaaaatgctgctaataatgttacgaatattgccttggaacttggcggtaaaaatccaaacattatctttgatgatgctgattttgaattggcagtagaccaagcgttaaatggtggatattttcatgcaggtcaagtttgttcagcaggatcaagaatattagtacaaaacagtattaaagacaaatttgagcaagcacttattgatcgcgtgaaaaaaatcaaattaggtaatggttttgatgctgatactgaaatgggaccagtgatttcaacagaacatcgtaataagatcgaatcttatatggatgtagctaaagcagaaggcgcaacaattgctgttggtggtaaacgtccagatagagacgatttaaaagatggtctattcttcgagccaacagtcattacaaattgtgatacgtcaatgcgtattgtacaagaagaggttttcggacctgtcgttactgtagaaggctttgaaactgaacaagaagcgattcaattagcgaatgattctatatatggtttagcaggtgctgtattttctaaagatattggaaaagcacaacgcgttgctaacaagttgaaacttggaacggtgtggattaatgatttccatccatattttgcacaagcgccatggggtggatacaaacaatcaggtatcggtagagaattaggcaaagaaggcttagaagagtaccttgtttcaaaacacattttaacaaatacaaatccacaattagtgaattggtttagcaaataa

SEQ ID NO: 412695 - DNA, 1536 bp, Staphylococcus aureus
atgtttattactttgattatcattgctgtattaatgggcatgctacttatattcaacttgttcagtattaattttcaacggccgataacttatcaacatcgttccgattctagtgtcatatcacgatggttgcgttacgttttaattgttataggaagcgcagcactatatttaggttactttattgcattacaacaagatacgacgtttggtgccttttttaaaatatggattgtcataggattagttattatcggtacttatgcattttttgtaggtataagtgaaataattattagtatattgcagcaggtatcaaaagtttactatcatccacggtatttttttgtggtagttgggatgcgtgtacgtcttaaaatgaatgcagtcagtcttgcaacaatcactttgctgtgtacatttttgattgtaacgctcacaatgacattaacaacctatcgtgatatgaatcataccattacgaaattgattacgaatgattatgatttgtcatttagcgacaattctaagtcacaaatagaacgtcaacaaacaattgagaatattaaacgtgatatacagggttcggttaatgcaaaagacttcaaagtatatgaaacgacattatttagagcttctttagaaaagaatcgtgcttattacaagttaaaacaggctagtgatgatattccaatagacttcattggtaatgaaggcgcgatattttcaagacaatcagtaatgattacagcttttactgcacaagattataatcgatatcaccaaaacaaattacacttagacaatcaaagtataggtatgattacgaatgtacctatttttaaaaagcagtctaaggtcggtcttaataatgaagtctttaaagtgaaacaacttgacgcacatgcgttaaatttgatgatgattcaagatagtatggttttaattgttaaagataacaatcaattacaaaaagtaaaaggattttatgcacatgaacaaaagaattcgacaatatcgataaactttaatgtatttggaaagacgaaattaacaacatcacaaatacaaaagctatcgaaaaaatacgatgcgtcaataaattctaaatcagaaatgctaatggtttgggatcgtttgacaggtggactaatatttgtaggtggcgtagtatcaattgtacttgtcattggaatatttctaatgatgtactataaacaagtctcagaagcctatgcaaatcagcacaattatgacattatgaaaaaacttggtttagataatggaagaatagcaaagataacacgaaatcaaatgactttcttgttcgcaataccaataacagtagcactgattcacacattaatttctagtaacattgtatatacgttactaaatatgataggtattaataaccatcatatatttttaacaagttacgtactagctgtcattataatttcgtttctatatatggcgatgtacaaaataacttcctatatttatgctaaagttattcatcaacaacgtaattaa

SEQ ID NO: 412696 - DNA, 198 bp, Staphylococcus aureus; identical to SEQ ID NO: 408081

SEQ ID NO: 412697 - DNA, 1542 bp, Staphylococcus aureus
atggaaatggcaaaagaacaagagttaatccttgtcttagactttggtagccaatacaaccaattaattacacgccgaattcgtgaaatgggcgtttatagtgaattacacgatcatgaaatttcaattgaagaaattaagaaaatgaatccaaaaggtatcatcttatcaggtggtccaaattcagtttatgaagaaggttcatttacaattgatccggaaatatataatttaggaattccagtacttggtatttgttacggcatgcaattaactactaaattattaggtggtaaagttgaacgtgccaatgaacgtgaatacggtaaagcaatcattaatgcgaagtcagatgagttattcgctggcttaccagcagaacaaactgtttggatgagtcattctgataaagttattgaaattccagaaggctttgaagttatcgctgatagcccaagcacagactatgcagcaattgaagataagaaacgtcgcatttatggtgtgcaattccatccagaagtacgtcatacagaatatggtaatgatttattaaacaacttcgtacgtcgtgtttgtgattgtaaaggacaatggacgatggaaaactttatcgaaattgaaattgaaaagattcgtcaacgcgtaggcgaccgtcgtgtattatgtgcgatgagtggtggcgtagattcatctgttgttgctgtattattgcataaagcaattggggatcaactaacatgtatctttgtagaccatggcttacttcgtaaaggtgaaggcgacatggttatggaacaattcggtgaagggttcaacatgaatattattcgtgttaatgcgaaagatcgttttatgaataaattaaaaggtgtttcagatcctgaacaaaaacgtaaaatcattggtaatgaatttgtatatgtatttgatgatgaagcatcaaaacttaaaggtgtagacttccttgcgcaaggaacactatatacagacgtcatcgaatcaggtactaagacagcacaaacaatcaaatcacaccacaatgttggtggattaccagaagacatggaattcgaattaatcgaaccaatcaatacattgtttaaagatgaagtacgtaaattaggtattgaattaggtattccagaacatttagtgtggagacaaccattcccaggacctggtcttggtattcgtgtacttggagaaattactgaagataaactagaaatcgttagagaatcagacgcgattttacgccaagtgattagagaagaaggtcttgaaagagaaatttggcaatacttcacagtgttaccaaacattcaatcagtaggtgttatgggagactaccgtacgtatgatcacacagtaggtatccgtgcagtaacatctatcgacggcatgacaagtgacttcgcacgcatcgattgggaagtcttacaaaagatttcaagtcgtatcgtaaacgaagtagaccacgtcaatcgcgtagtctatgacattacatcaaaaccaccaagcacaattgagtgggaataa

SEQ ID NO: 412698 - DNA, 771 bp, Staphylococcus aureus; identical to SEQ ID NO: 408548

SEQ ID NO: 412699 - DNA, 2862 bp, Staphylococcus aureus; identical to SEQ ID NO: 408048

SEQ ID NO: 412700 - DNA, 759 bp, Staphylococcus aureus
atgacaatattatcagtgcaacatgtttcaaaaacatacggtaaaaagcacacatttcaagcacttaaagatattaactttgacatacaaaaaggcgaattcgttgcgattatggggccttctggatcaggtaagacaaccttattaaatgtactaagttcaattgaccaaatttctagcggtagcgtgattgctaacggacaagagcttaataaacttaatcaaaaagcacttgccaaattccgtaaagaatcattaggtttcatcttccaagattacagtattctgccgacattaactgtcaaagaaaacattatgttacctttatctgttcaaaaaatgtcgaaagcaacaatggaagaaaattataaagcgattactacagcattaggtatttatgacctaggaaataaataccctagcgaattatctggtggtcaacaacaaagaactgcagcagcgagagcatttgttcacaaaccacaaatcatatttgcagatgagccaacaggcgcactcgactcgaaaagtgcaaatgacctattacaacgtttggaagaaatgaataaatcgtttgatacaactattgtcatggttacacatgatccggttgcagcaagttttgcagaacgtgtcatcatgctaaaagatggccaaattcatacacaactttatcaggaaggacgttctaaacaggccttttatgaagacattgtacatcttcaatcagtattaggtggtgtctcaaatgacatttaa

SEQ ID NO: 412701 - DNA, 447 bp, Staphylococcus aureus
gtgaacgttgcaggtgtgctatggggtattcaagccgcacatgaacaatttaaaaaattcaatcatggcggtaaaattatcaatgcaacatctcaagcaggcgttgagggtaacccaggcttgtctttatattgcagtacaaaattcgcagtgcgaggtttaacacaagtagccgcacaagatttagcgtctgaaggtattactgtgaatgcattcgcacctggtatcgttcaaacaccaatgatggaaagtatcgcagtggcaacagccgaagaagcaggtaaacctgaagcatggggttgggaacaatttacaagtcagattgctttgggcagagtttctcaaccagaagatgtttcaaatgtagtgagcttcttagctggtaaagactctgattacattactggacaaacaattattgtagatggtggtatgagattccgttaa

SEQ ID NO: 412702 - DNA, 786 bp, Staphylococcus aureus
atgtcaatgagtgctagtacatcgtcatcacaaagcacatcggtgtcgacatcattatcaacatcagacagtatcagtgattctacttcaataagtatcagtggttcacaaagtacagtagaatcagaatcattgagtacatcagattcagactcgacatcgacaagtacatcggactcaacaagtggttcaacttcaacaagcatatctgaatcattaagtacgtctggttcaggttcaacgagcgtatctgactcaacatcaatgagtgaatccgattcaacaagtgtttcaatgtcacaagacaaatccgactcaacatcaattagcgactcagaatcagtgtcaacaagcacatcaacgtcattgagcacatccgattcgacaagcacatccgaatcgctgagtacatctatgtctggttcacaaagcatttctgactcaacatcaacaagtatgtccggctcaacaagtacatctgaatctaactcaatgcatccgtcagactcaatgagtatgcatcatactcacagcacgagcacatctcgcttatcaagtgaagcaacaacgagcacgagtgaatctcagtctacattaagtgcaacatctgaagtgactaaacataatggcacgcctgcacaaagtgaaaaaagattgccagatacaggtgactcaataaaacaaaatggattactaggtggcgttatgacattattagttggtttaggtttaatgaagagaaagaaaaagaaagatgaaaatgatcaagatgattctcaagcataa

SEQ ID NO: 412703 - DNA, 1503 bp, Staphylococcus aureus
ttgaaaaataaattgctagttttatcattgggagcattatgtgtatcacaaatttgggaaagtaatcatgcgagtgcagtggtttctggggagaagaatccatatgtatcaaaagctttagaattgaaagataaaagtaataaatccaattcttacgaaaattatagagatagtttagaaagtttgatttcatcattatcttttgctgattatgaaaaatatgaagagccagaatatgaaaaggctgtaaaaaaatatcaacaaaaatttatggctgaagatgatgcattaaaaaattttttaaatgaagaaaagaagataaaaaatgcagatattagcagaaaatcgaatgatttattaggtttaacacatgaaagatattcttatatttttgatacattaaagaaaaataaacaagagtttttaaaagatattgaagaaatacaactgaaaaatagtgatttaaaggactttaacaatacagagcaacataatgccgacgtagaaataaacaatttagaaaataaagtattaatggtagggtatacattctataatacaaataaggacgaagttgaagaattatatagtgagttagatttgattgttggagaagttcaagataagtcggataaaaaaagagcagtaaatcaaaggatgttaaatagaaaaaaagaggatttagaatttattatagataaattttttaaaaaaattcaacaagaacgtccagagagtataccagcattaactagtgaaaaaaatcataatcagactatggcattaaagttaaaagcagatacagaagctgctaaaaatgacgtatcaaaaagaagtaaaagaagtttaaatactcaaaataataaatctacaacacaagaaatttctgaagaacaaaaagctgaatatcaaagaaagtcagaggcattaaaagaaagatttataaacagacaaaaatctaaaaatgagtctgtggtttcactaatcgatgacgaagacgacaacgaaaacgacaggcaacttgtggtttctgcgccatcaaagaaaccaacaacaccgactacatatactgaaacaacgactcaggtaccaatgcctacagttgagcgtcaaactcagcaacaaatcgtttacaaaacaccaaaaccattagctggattaaatggtgaaagtcatgatttcacaacaacgcatcaatcaccaacaacttcaaatcatacgcataataatgttgttgaatttgaagaaacgtctgctttacctggtagaaaatcaggatcactggttggtataagtcaaattgattcttctcatctaactgaacgtgagaagcgtgtaatcaagcgtgaacacgttagagaagctcaaaagttagttgataattataaagatacacatagttataaagaccgattaaatgcacaacaaaaagtaaatactttaagtgaaggtcatcaaaaacgttttaataaacaaatcaataaagtatacaatggcaaataa

SEQ ID NO: 412704 - DNA, 1023 bp, Staphylococcus aureus; identical to SEQ ID NO: 410917

SEQ ID NO: 412705 - DNA, 522 bp, Staphylococcus aureus
atgaaaaggaaagtactagtactaacaatgggtgtaatttgtgcaactcaattatggcattctaatcacgcaaacgcattagtgacagagagtgttgaaactaattttgttgtaaaagattcggataataaaaatattttacaaacccatactgaaattactactgaggagaaattttcaatagtagaaaagagtcaattaaataaattaaaagcactatctaatgacaactacatagaatatgatttacatactaatcaaacaggtattaaaaaaggttggttatatggttatagtgaaattgactcatcacatttcacagaccgtgacaaacgcgttattagacgtgatcatgttaaagaagcacaaagcttaattaacgattataaagatacacaaagctatgaagatctcgctaaggcaactgcaaaagtaagtacacttagtcagtctcaccaaaattatttaaataaacaaattgataaagtgaataataaaatagagaaaactgaaaaacgctaa

SEQ ID NO: 412706 - DNA, 1056 bp, Staphylococcus aureus
atgaaaataataagcaagtacattttaacacgattttctaaaaacggaaagcattttgatattcctaaagaacaacgccgagtaattccaaaatttaaaaatcgtcgtaagatgattgtaatttgtttttactcattattagctattttgttaattcttttattagcttcttttattaaagctacaagagcaaataatgatagtaaagaagcagttaataaaacgaatatgatccaaaaaaagtatgaagataatgcgaatacagttcagtatagtcctaaattaaagttatatgctgataaatttattgatacgtatatgaatatttctaaagactcaaaagaattagaatctagagaaaaagagttattgaaatattttccatcagattataaaaaacctgatgaaaaaatttcagatacagaacgaaaattgaatagtaaagaattttataatattaaacgtaaagataaacaaacaattatacagtatattgttaattatgatgtgaatattactgaaaagaaagaagttaaagttaagaagaaaaagaaaagtgaaaaagataaagatgagtatgaaacaaaaacagaagaaaagcaacgtaaagtaaatcaaaacattttaataaatatacctattaagagtgaaaataataagtatgttgttgttgaatatccttattttacgccaatccctgatagtcaattgaataaagctaaaatggttgaggataatttgaaagacaataaacgggaagacaatccgaaagcaaaagcttttattgaagatttctttaataaatatgcttctagtaagtctgatgatatggcctatttaatggataaccctgagggcttagaaggaactagagaagtttctcaaataagagaaattagattatatccaaaaggcgatgattatgttgctaaagttgaaattttgatgaaagataaagattctcctttggagaatttggaacattacacattagatataacgaaaaaagatggtaaatattacgttaaaaatatgactaattctattggaggttaa

SEQ ID NO: 412707 - DNA, 1026 bp, Staphylococcus aureus
gtggaggcagttgttgactgggttcaggtcactttccatataacccctatttcagcagtaattgaggacgttatcggtttgcctataacgttgttcaaaaaacgaaatagtggcatttacttttataatcgtggttatgaattttcaaacattaaattgtattattcaagtgatgatgaatcaatgggcattcacttacagttaactggtacaggttgtagagagtttgaacatcatttacaacagttgaataaaacttggcaagatttttttgataaatgtttatcagttaatgcaaattttacaagaattgatattgcaattgatgattataaaacatatttaaaagtgcctttattaattaaaaaggctgaaaaagctgagtgtgtttcacgttttagagctggaagcgcaataaacggttttaatttgtcagacggaagaagtaaaggcgctactttttatattggttctaaacaaagcaatttatattgtcgtttttatgaaaagaattatgaacaagcgtttaaacgtcattgtgatgtcgaagacattgggttatggaatcgttatgaaatacaaatgcgaaaggcatatgcagttaattgtgcgaaagttttgagtagaacagataatataagcgaaattgtaaagtctatattgcataataatttgcgttttatctcccctcctaaagatggaaatgataaaaatcgtaagcggtggccattatatagaccttgggcgttatttattaaagatactgaaaaattgaatttaactactagaccaacattaaaatccattgaggataatcttgattggttatgtaaacaagttgctactactttagatacagtgttaactgccgaaagtatggcgcaatctgaggggttgcttacagatactgattttttagataaaattttagcgcattcacaatttaatgatgagcatacgaatagaattaatcattatttggaggctttaaaacaaaaaaagcacttatcaaaagataagtgttaa

SEQ ID NO: 412708 - DNA, 660 bp, Staphylococcus aureus
atgtttggttctgatttagacagtgcacagttattacaagcattgtacgaaacgttatatatggtatctattgctttatttttaggagcagtgattggtattccattaggtgtcttattggtaattactcgaaaacaaggcatatggcccaatatagtgatacatcaagttttaaatcctttaatcaatattttaaggtcactaccatttattattttgttaattgcgattgtgccattcacaaaattagtagtaggtacttcaattggtacgactgctgccatcgtgcctttaactgtatatgtggcaccttacattgcaagacttgttgaaaactcattattggaagtagacgaggggattattgaagcggcgaaagcgatgggcgcttcaccactacaaatcattagatattttttaattcctgaagcgttaggttcattagtattagcaattaccactgcgattattggacttattggaagtacggcgatggcaggagctgttggcggtggtggtataggagacttagctttagtgtatggttatcaaagatttgatacgacggtcattattattaccgttattgtattagtcattattgtccaagtgattcaaacgctagggaatgtcctagctagattcatacgtagacattaa

SEQ ID NO: 412709 - DNA, 1026 bp, Staphylococcus aureus
atgattgagtttcgacaagttactaaatcatttcataagaaaaagcaaacaatagatgctttgaaggacgtatcatttacggtcaatcgcaatgatatttttggtgtgattggatatagtggtgcaggaaaaagtacgttggtaagactcgtgaatcatcttgaagctgcctcgaatggacaagtgattgtagatggacatgatattacgaattatagcgaaaaaggcatgcgagaaattaagaaagatatcggtatgatatttcagcatttcaatttattaaattcagctacggtatttaaaaatgtagcaatgccactcattttaagtaagaaaagcaaaacagaaattaagcaacgagtaacggaaatgcttgaatttgtaggattgagtgataaaaaagaccaatttcctgatgaattatctggtgggcagaagcaaagggtggctattgcaagagcgcttgttactaatccgaaaatactcctatgcgatgaagcaacaagcgcattggatccagcaacgactgcttcgatattgacgttattaaagaatgtcaatcaaacctttggcattacaattatgatgattacacatgaaatgcgcgttattaaagacatttgtaatcgtgttgctgtaatggaaaaggggcaagtggttgaaacaggaactgttaaagaggtgtttagtcatcctaaaacgacgattgctcaaaattttgtgtctacagttatacagactgagccaagtacatcattgattcgtcgattgaatgacgaacaagttggcggttttaaagattataaaatcttcgtcgaggaaactcaggtgacacaaccgattataaatgacttgattcaaatttgtggcagagaggttaaaattttattttcatctatgtcagaaatacaaggtaacaccgtatgttatatgtggcttcgatttaatatagatcaacaatttgatgacacggcaataaatcaatatttcaaagagaaaaatattcaatttgaggaggtgcattaa

SEQ ID NO: 412710 - DNA, 282 bp, Staphylococcus aureus
atggctcaagcggatggccatacaggtgtgattgcatttgaagtgaaaaatacagaaagtgccaaacaattgattaaagcaacatcgtattacacattagctgaaagtttaggtgcagtggaaagtttaatttcagtacctgcattgatgacacatgcatccattccagcagatattcgagctaaagaaggtattacagacggacttgtaagaatttctgtaggtattgaagatactgaagatttagtcgatgatttaaaacaagcactagatacgctataa

SEQ ID NO: 412711 - DNA, 948 bp, Staphylococcus aureus
atggctttaaagatacggtatcaaactacatatgaaccgtttaaagtagttgatgatatcaaagagataccaaaagatgcgactattgtttggtatgattttgatgaaccgaatgaacaagaaaatgaatggtttaaagcacattttaattttaatgatttagaagtggatgatgcaattaacggtatgccacgagctaaatataaatcttataaagattatcaatacttagtatttcatagtattatggggtcaaactattcaccaatagcactaaatatttttatacaagacaatgtattagtaacatatcatcatcaaacgttggaatcattaaataaagtagtctataagtatatgaatacattagatgcagaattagattgtgcagatgtcgtcatattaattttagatatgatggttgataaatatttcaactttgtatatgcacttgaagatagtgtttatcattttgaagaccgccatgtagatgatcgctttaataaaatggtcatggatagtgtctttaagttacgttcggatttgattaaagtaaaacgtgtactgtttcctatgcaagagctaattgatacaatgaaacaaaatggtgatttgattatagataataaacattcgctatacattcaacatatcgatgaccacttgattaagcaacgtaatatcattcgtactgctcaagaaatgacaaacgaaatacgagaaaattttgagtcatacacgtcatttagaatgaatagtattatgcaagtattaacgttagtatcagttatattttcaccgttaacattcatagctgggatttatggtatgaactttgtaaatatgccggcattacatttacattatggatattatatttgcttagctgtaatgtttgttatagctgtcgtattaatcatctttttcagacgtaaaaaatggttttaa

SEQ ID NO: 412712 - DNA, 1050 bp, Staphylococcus aureus
atgagtgattttcaaagagaacagagaaaaaatgaacatgttgaaatagcaatggcccaatctgacgcaatgcattcagattttgataagatgcgttttgtgcatcattctatcccatcaattaatgtaaatgatatcgatttgacatcacagacgcctgacttaacgatggcatatccgatttatattaatgcaatgacgggtggtagcgagtggacgaaaaacatcaatgaaaagctagctgtagttgcaagagaaactggcttagcgatggcagttggatcaacacatgcggcattgagaaatccacgcatggctgagacgtttacgattgcgcgaaaaatgaatcctgaaggcatgatttttagcaatgttggtgcggacgtaccagtagaaaaggctttggaagcagttgaattacttgaggcacaagcgttacaaatccatgttaattctcctcaagaattagttatgcctgaagggaatcgtgaatttgtgacttggttagataatatagcgtcgattgtatcacgagtgtctgttccagtcattataaaagaagttggatttggtatgagcaaagaattaatgcatgacttacaacaaataggcgtcaagtatgtcgatgttagtggcaaaggtggtactaactttgtagatattgaaaatgaacgtcgtgcaaataaagatatggattacttatcatcatggggacagtctacagttgagtcattacttgaaacaacggcttatcaaagcgaaatttcagttttcgcgagtggtggtttacgtacaccactcgatgcaattaaaagtttagcacttggtgcaaaggcaactggtatgtcacgtccgtttttaaatcaagttgaaaataatggcattgcacatacagtagcttatgtagaatcatttattgaacacatgaaatcaataatgacgatgttagatgctaaaaatattgacgacttaacacaaaaacaaatcgtatttagtccggaaataatgtcatggatagaacaacgtagcttgaatatacatcgaggataa

SEQ ID NO: 412713 - DNA, 153 bp, Staphylococcus aureus
atgccacctgttgaatttgaaataaatgctaaacgttctgcaagcttgtcatccgatgttgcaactaaaccagcaacgacatcactatgtccacctaaatatttcgttgcagaatgcaagacaatatcgatgcctaaatctaatggattctga

SEQ ID NO: 412714 - DNA, 213 bp, Staphylococcus aureus
gtgttatcaacgactgaaatcaaaccgtgttctttcgcaatttcagcagactttttaatgtcagtaacacgtaataatggattagaaggtgtttcaataaacaacatctttgttgttgggcgtatcgcttgtacaattgaatctgtatgcgttgtatctacaaaatccacttcaatgccaaatcgtgtaaatacttttgtcaatgcgcgataa

SEQ ID NO: 412715 - DNA, 906 bp, Staphylococcus aureus
atgattacttatgatttaattggcaatacaccattagtactgttagaacattatagtgatgataaagttaaaatttatgccaagcttgaacaatggaatcctggaggcagtgttaaagacagactcgggaaatatttagtagagaaggcaattcaagaagggcgtgtgcgtgcaggtcaaactattgttgaagcgactgctggtaatacaggcatagggttagctattgcagcgaatagacatcatttgaaatgtaagatctttgcgccgtatggtttttcagaagaaaagattaatattatgatagcgcttggtgcagatgtttcaaggacgagtcagtctgaaggtatgcatggggcacaattagctgcacgttcctatgctgaaaaatatggtgccgtttatatgaatcaatttgaatccgaacataatccggatacatattttcatacattgggacccgaattgacttcagcattacagcaaattgattattttgtggctggtattggctctggcggtacatttacaggtaccgcacgttatttaaagcaacatcacgtgcaatgttatgccgttgagccagaagggtccgtgttaaatggagggccagctcatgcacatgacactgaaggtatcggttctgagaaatggccgatatttttagagagacgtcttgtagatgggatatttacgattaaagatcaagatgcctttcgaaatgtcaaaagtttggctataaatgaagggttgttagtaggcagttcttcaggtgcagcattacaaggtgcattgaatttaaaagcgcaattatctgaaggtacgattgttgtcgtatttccagatggtagcgatcgatatatgtctaagcaaatatttaattatgaggagaatgattatgaataa

SEQ ID NO: 412716 - DNA, 525 bp, Staphylococcus aureus
atgattacagcatatattttctatagttatgaacgtgccaaaggtcaaatgaatttcattaaagatgattatagtagtaaaaaccatctttggaataatgtcattacgtcaggtgttattggtacaactggtttggtagaaggattaattgtcggtttaattgcaatgaataagttccatgtattagctggctatagagcgaaattcatcttaatggtgattttaactatgatggtctttgtacttattaatacgtatttactaagacaggtaaaatctatcggtatgttcttaatgattgctgcattgggtctatactttgtagctatgaataatttgaaagcggctggacaaggtgtgactaataaaatttcaccattgtcttatatcgataacatgttcttcaattatttaaatgcagagcatcctataggcttggcactagtaatattaacagtacttgtgattattggttttgtactgaacatgtttataaaacactttaagaaagagagattaatctaa

SEQ ID NO: 412717 - DNA, 1038 bp, Staphylococcus aureus
atgattgaagatgtcattgttggtacggcttttccagaaggattacaaggacaaaacattgcacgaacgattgcattgcgtgcgggattatctgacacggtaccgggtcaaacagtgaatcgctactgctcatcaggattacaaaccatcgcgattgcagccaatcaaattatggctggtcaaggagatatacttgtagctggtggcgttgaattgatgagtgccgtaccaatgggtggcaacgagcccacaaacaatccaaccttacaatatgatgatataggtgcgtcatatcctatgggtttaactgctgaaaatgtagcatcccaatttgacgtatcacgcgaagatcaagatgcttatgctgtcagaagtcatcaacgtgcctatgacgcacaacgtgatggtcggttcaaagatgaaattattccaatacgggtaaactcagttgaatatacaaacgcaggaccaaaagtacacacaaatatctttgaccaagatgaatttatacgccctgacaccacgatggaggcattagccaaattacgtacagtatttaaagctgacggcactgtgactgcgggaacatctgccccactttctgatggtgcaggatttgtagttttaatgtctggagataaagtgaaagaactaggcgtgacacctattgcacgattcgttggttataaggcagtaggcgttgacccgaaaattatgggtattgggcctgcatatgcgattcctgaagtattgtcactcagcaatctatctgttgaagacattgatttgatcgaattgaacgaagcatttgcttctcaaacgattgcatctattaaagaagtaggtctagatatatcacgtacgaatgtgaatggtggcgctattgctttaggtcatccattaggtgctacaggggcaatgttaaccgcgcgtttacttaatgaaatgggtagacgtcccgatagccgttacggcatggttacgatgtgtattggtgtcggcatgggtgcagctgctatatttgagtatgtgcgttag

SEQ ID NO: 412718 - DNA, 213 bp, Staphylococcus aureus
atgattttaccgttacctaatgctaaaggtttaccgtcagcagtctttgctttgtcattaaattcggcgatttgtaattcgtcatacaattcgtctaaatcgatgcctgtaataagccctttgttatcttttgaaaaagcgttatttaattcatcgtcattgtcttcgacattcggtattgctggtgtcaaaggattgcttggtgacgtttga

SEQ ID NO: 412719 - DNA, 294 bp, Staphylococcus aureus; identical to SEQ ID NO: 405170

SEQ ID NO: 412720 - DNA, 519 bp, Staphylococcus aureus
gtgctttttgaaaagttataccatgatttattgaatcaagtagcagattctaaacaaatcgttgtaatgggtgactctgcgggcggtcaaattgctttatcatttgctcaattgttaaaagaaaaacatattgtgcaaccaggacatattgtattaatttcaccagttttagatgcaacgatgcagcatcctgaaattcctgactacttaaagaaagacccaatggtaggtgtggatggcagtgtgttcttagctgaacaatgggcaggggacacacctttagataactacaaagtatcaccaattaatggtgacttagatggtttaggtcgtattacattaactgttggcacaaaagaagtactgtacccagatgctttgaacttatcgcaattgttgagtgcaaaaggtatcgaacatgactttatacctggatattaccaattccatatttatccagtatttccgataccagagcgccgacgctttttataccaagtgaaaaatattattaattaa

SEQ ID NO: 412721 - DNA, 186 bp, Staphylococcus aureus
atgatcaaacctggtcaagaacttgttgttgataagaagcaaccagcaaaccatgcagatgctaacaaagctcaagcattaccagaaactggtgaagaaaatccattcatcggtacaactgtatttggtggattatcattagccttaggtgcagcgttattagctggacgtcgtcgcgaactataa

SEQ ID NO: 412722 - DNA, 537 bp, Staphylococcus aureus; identical to SEQ ID NO: 410845

SEQ ID NO: 412723 - DNA, 174 bp, Staphylococcus aureus
atgattaaacaaatattaagactattattcttactagcgatgtatgagctaggtaagtatgtaactgagcaagtatatattatgatgacggctaatgatgatgtagaggcgccgagtgacttcgcaaagttgagcgatcagtctgatttgatgagggcggaggtgtcagagtaa

SEQ ID NO: 412724 - DNA, 531 bp, Staphylococcus aureus
atgagtaacacattaacagtagatcaattacaagagttattacaaatacaaaaggagtttgacgatagaattccaacacttaatttacaagatagtaaggttgcgtatgttgttgaattctttgaatggtttaatacattggaaacgtttaaaaactggaaaaagaaaccaggtaagccattagatgtgcagttagatgagttagcagacatgttggcgtttggattgagtattgcgaatcaacaatcagacgatatggaagaaattttggattatgtagaagatggcatttttaccgattgtatagatagtgttgaaattgattttaatgacagtgatatagttgatgaatttatgtccgatatagacgaattatacaacggttggtttagtattaatttattcttaccattcgctattgcaatccaatactacactatcgacaaactcatctcagcttataaaaagaaaatggagcgaaatcatgcaagacaagatggaacagcagacacagaaaaaggttacgtgtaa

SEQ ID NO: 412725 - DNA, 198 bp, Staphylococcus aureus
atgactgtagataaaaaaagcgttgaaaaatttaaaaaacatatcaaagagctggagaagaaagcaagcgcatgggataggtattgcaagagcgttgaaaaagatttaataaacgaatttggcaatgatgatgaaagagttaaatttggaatggaattaaacaataaaatttttatggaggaagacactaatgaataa

SEQ ID NO: 412726 - DNA, 243 bp, Staphylococcus aureus
atgacagatagcggacgtaaagaatacttaaaacattttttcggctctaagagatatctgtatcaggataacgaacgagtggcacatatccatgtagtaaatggcacttattactttcacggtcatatcgtgccaggttggcaaggtgtgaaaaagacatttgatacagcggaagagcttgaaacatatataaagcaaagtgatttggaatatgaggaacagaagcaactaactttattttaa

SEQ ID NO: 412727 - DNA, 255 bp, Staphylococcus aureus
atgagcataatcagtaacagaaaagtagatatgaacaaaacgcaagacaacgttaagcaacctgcgcattacacatacggcgacattgaaattatagattttattgaacaagttacggcacagtacccaccacaattagcattcgcaataggtaatgcaattaaatacttgtctagagcaccgttaaagaatggtcatgaggatttagcaaaggcgaagttttacgtcgatagagtatttgacttgtgggagtga

SEQ ID NO: 412728 - DNA, 675 bp, Staphylococcus aureus
atggctcaaatcaaaaactatatcactcaagatgacggcacaacaacagtcgttatcgagggtgccgagctaggagacaaagaaacattattacttgataacggctacgaagtcgaatgtgatttgcgaatcgaagacccattcaaaataacagacaagcaacgaagaaaaatattcgcgctctgtaacgacatagagagccacacaggccaaccacgtgactatatgaggtatttgttccaagaatatgtaacggttctgtatgactatgacaagagtatttcgttaagtgactgtacacggatgcaagcgaatcaaattatcgaggtaacactcgattggatatttcacaacgacataccgcttagttataaaacaagcgacttgctgaaacaagataaatcattcttatactggtcaactgttaaccgcaactgtgtaatatgcggaaagcctcacgctgacctagcacattatgaagcagttggcagaggcatgaacagaaataagatgaatcactatgacaaacatgtattagcgttatgtcgcgaacatcataacgagcaacatgcgattggcgttaagtcgtttaatgataaataccacttgcatgactcgtggataaaagttgatgagaggctcaataaaatgctgaaaggagagaaaaaggaatga

SEQ ID NO: 412729 - DNA, 1587 bp, Staphylococcus aureus
ttgataattagcgaaaggaacggggaagggaaatctagccttataaaatcaatacagtattgtttaggatcaaatttaaaagcgtttccaaaaggatgggactacaaaaattatgtttttcaattagaaatagttattgataaaaataagatattgattcagagatataataatataataacagttttagatgatgggaaaattaaaaagtttggatacttaaaagactattctgattggtttcaagataagatggagatgaatttaaaattagttagtaagaataaaaatacttctagtttagcttcactggaagctattttgagcccattgtatattgatcaagataaatcatgggatggaattctatataagaactcatttgagggtttagcacaatataaaagtcaaagttttcctaaagaagtatttgaatactatttaggtatttctaataatataatgaatgataaaataaataaactcaataaatataaagagaaatcgaaagaaaaaaaagtgaaaattgaacaagtagattctgtatataaaaattatagttctcaaaaaaacatttcgaaaacgataccaaaagaatttgaagagtttaaaaaacaagtagatttctatattaaagaaacagatcgattttctcaaatgatcactcaaaaaacagacaagttatctaaagaaaaaatgaagcttgatattttacaacaagacagggaagaattgagaaaattattaacaaaaacaaaaaaaagattatcagaagtaagttatgaatgtacttattgtcattcagtactaacaagaggccaatccttaacaaggatggaattagatgataataagatagaaatattattacgaaaagatagtataaatcaagaaataataaaaacagaaaacaatattcaaaagaaattaatagaaattcaaaatcttgagaatcaatttgaactttatcatgaacgtctttcagaattaaagcaattatcgaatattgataattatgtaaatcaaaaagtattacaagaattagaaatattaaaaattgaagaagttattgaattgaaagaaatagatcaggaaataaaaagcttgaaaaatgaaatttcaaagcttaaaaagagtttaaaaactgatttagaaaatattaatcaaaaatttaaaaaactaaaaaataaaatatcactacaaatggaaactacgggactgtctgaaaaaaaagtattaaactttaataaattaaatggtagcggaacatttctaaataaagatttattaacattatatctggtttatatgaaccttctagatagtatggaagattttggtttgccatttgctattgattcatttgtaaaaaatgagacagactcaatagcattagaaaaaatgtttggtgcaattgataaatattttttgacattaaataaccaaacatttttttcaataataaaagaaaatttaaagtttatagaaaatcctgttaatgagataaaaatagagagacctttattaaaagagaaatttttttctgatatagagaaagaactaattcaaaatttaaatattttatag

SEQ ID NO: 412730 - DNA, 429 bp, Staphylococcus aureus
ttgtcctattcaatagaatgggggggtacatacataaaaagtggttatggtgctgacacgtctggcattcaatgggcagataacgcgacatttgaaacgaaaattaataatggtagcttaaatttacaagtacaagatgagtataaagattactatgataaaaaagttgaagctgttaaaaatttattggctaaagctaaaacggatagtaacaaagacaatgtatatgtgaatttcttgagtgtagcgtctggaggcagcgcatttaatagtacttataactatgcgtcacatataaatcctgaaattgcaaaaacgattaaagaaaacgggaaagctagaactggttggctgattgttgactatgcaggatatccgtggcctggatatgatgatatcgtaagtgaaattatagatagtaataaataa

SEQ ID NO: 412731 - DNA, 3354 bp, Staphylococcus aureus
atgaatttattcagacaacaaaaatttagtatcagaaaatttaatgtcggtattttttcagctttaattgccactgttacttttatatctactaacccgacaacagcgtctgcagcagagcaaaatcagcctgcacaaaatcaaccagcacaaccagctgatgccaatacacagcctaacgcaaatgctggtgctcaagctaatcctgcagcacagccagcaaaccaaggtggacaggctaatccagcaggaggagcagcacaaccaaatacacaaccagctggacaaggtaatcaagctgatccgaataacgctgcacaagcacaacctggaaatcaagcaacaccggcaaatcaaacacagccagcgaatgctccagcagcagcgcaaccagcagcacctgtagcagcaaacgcacaaactcaagatccaaatgctagcaatactggtgaaggcagtattaatacgacattaacatttgatgatcctgccatatcaacagatgagaatagacaggatccaactgtaactgttacagataaagtaaatggttattcattaattaacaacggtaagattggtttcgttaactcagaattaagacgaagcgatatgtttgataagaataaccctcaaaactatcaagctaaaggaaacgtggctgcattaggtcgtgtgaatgcaaatgattctacagatcatggtaactttaacggtatttcaaaaactgtaaatgtaaaaccagattcagaattaattattaactttactactatgcaaacgaatagtaagcaaggtgcaacaaatttagttattaaagatgctaagaaaaatactgaattagcaactgtaaatgttgctaagactggtactgcacatttatttaaagtaccaactgatgctgatcgtttagatttacaatttattcctgacaatacagcagttgctgatgcttcaagaattacaacaaataaagatggttataaatactattcattcattgataatgtaggtctattctcaggatcacatttatatgtcaaaaatagagatttagcaccgaaagcaactaacaataaagaatatactattaatactgaaatcggtaacaatggtaattttggtgcttcattaaaagcagatcaatttaaatatgaagtaacattaccacaaggtgtaacttacgttaatgattcattaactacaacattccctaatggtaatgaagacagtacagtattgaaaaatatgactgttaattatgatcaaaatgcaaataaagttacatttacaagccaaggtgtgacaacggcacgtggtacacacactaaagaagttttattcccagataaatctttaaaattatcatataaagttaatgttgcgaatatcgatacacctaaaaatattgattttaatgaaaaattaacatatcgtactgcttcagatgttgtaattaataatgcgcaaccagaagttacactaactgcagatccattttcagtagcggttgaaatgaacaaagatgcgttgcaacaacaagtaaactcacaagttgataatagtcattacacaacagcatcaattgcagaatacaataaacttaaacaacaagcagacactattttaaatgaagatgcgaatcacgttgaaactgcaaatcgtgcatctcaagcggatattgacggtttagtaactaaattacaagctgcattaattgataatcaagcagcaattgctgaattagatgctaaagctcaagaaaaggttacagcagcacaacaaagtaaaaaagttacgcaagatgaagttgcagcgcttgtgactaaaattaacaatgataaaaataatgcaatcgcagaaattaataaacaaacaacatcacaaggtgtcacaactgaaaaagataatggtatcgcagtgttagaacaagatgtgattacaccaacagttaaacctcaagcgaaacaagatattatccaagcagttacaactcgtaaacaacaaattaaaaagtcaaatgcatcattacaagatgaaaaagatgtagcaaatgataaaattggtaaaattgaaacaaaggcaattaaagatattgatgcagcaacaacaaatgcacaagtagaagccattaaaacaaaagcaatcaatgatattaatcaaactgcacctgcaacaacagccaaagcagcagctcttgaagaatttgatgaagttgtacaagcacaaattgatcaagcgcctttaaatcctgatacaacaaatgaagaagtagcggaagctattgaacgtattaatgcagctaaagtttctggtgttaaagcaattgaagcgacaacgactgcacaagatttagaaagagttaaaaacgaagaaatctcaaaaattgaaaatattactgactctacgcaaacaaaaatggatgcctataatgaagttaaacaagctgcaacagctagaaaagctcaaaatgctacagtttcaaatgcaacaaatgaagaagtagcagaagctgatgcagcagtagaagcagctcaaaagcaaggtttacatgacatccaagttgttaaatcaaaacaggaagttgctgatacaaaatcaaaagtattagataaaatcaatgcaattcaaacacaagcaaaagttaaacctgcagctgatacagaagtagaaaacgcatataatacacgtaaacaagaaattcaaaatagcaatgcttcaactacagaagaaaaacaagcagcatatacagaattagatgctaaaaaacaagaagcaagaacaaatcttgatgctgcaaatacaaacagtgatgtaacaacagctaaagacaatggtattgctgcaattaatcaagtgcaagcggcaacaactaagaaatcggatgctaaagcggaaatcgctcaaaaagcaagtgaacgcaaaactgcaattgaagcaatgaatgattcgactactgaagaacaacaagcagcgaaagacaaagttgatcaagtagtagttactgcaaacgctgatatagataatgctgcagcaaatgcagatgtagataatgcaaaaactacaaatgaagctacaatcgcagccattacacctgatgcaaatgttaaaccaacagcgaaacaagcaattgctgacaaagtacaagcacaagagacagcaattgatgctaataatggtgcaacaacagaagaaaaagaagctgctaaacaacaagttcaaactgaaaaaacggctgctgatgccgcaatagatgcagctcattcaaatgtggaagttgaagcggctaaaaatgcagaaattgctaaaattgaagcgattcagccagcaacaacaactaaagataatgcgtaa

SEQ ID NO: 412732 - DNA, 918 bp, Staphylococcus aureus
atggcgacaaaaaacgaggaaatattacgtaaaccggattggttgaaaataaaattaaataccaacgaaaactatacaggacttaagaagatgatgagggaaaaaaatcttaatactgtatgtgaagaagctaaatgtcctaatatacatgaatgttggggtgcacgtcgtacagcgacatttatgattttaggtgccgtatgtacaagagcttgtcgtttttgtgcggttaagacaggtttacctaatgaacttgatttaaatgagcctgaacgtgtagctgaatcagttgaattaatgaacttgaaacacgttgttatcactgctgttgcgcgtgatgatttaagagatgctggttcaaatgtttatgctgagacagtacgtaaagttagagaaagaaatccatttacaacgattgaaattttaccatcagatatgggcggggactatgatgcgttagaaacattaatggcttcaagacctgacattttaaaccataatattgaaactgttcgtcgattaacaccgagagttcgtgcgcgtgcgacttacgacagaacattagagtttttacgtcgttcaaaagaattacaaccggatatcccaactaaatcaagtattatggttggattaggtgaaactatagaagaaatttatgaaacgatggatgatttacgtgcgaatgatgtagatattttaacgattggtcaatatttacaaccttcacgtaaacatttaaaggttcaaaaatattacacgcctttagagtttggtaaattaagaaaagtggcaatggataaagggtttaaacattgccaagctggacctttagtacgtagttcttatcatgcggatgagcaagtaaatgaagctgctaaagaaaagcaacgccaaggtgaggcacagttaaatagttaa

SEQ ID NO: 412733 - DNA, 276 bp, Staphylococcus aureus; identical to SEQ ID NO: 409377

SEQ ID NO: 412734 - DNA, 546 bp, Staphylococcus aureus
atgtatgaaattaaaactaaaaatgtaggtggatggtttcataaagagaagcaagaaacaggcaatattgtaattactaaaactgattttgaaaaatacactaaacaaattaaagcagcacagatgatattagatgattatgaatgtattaaaagtgggaagtcattaaaaaaagcagagaaacaaaatgaaagtttagttaatgaattgactagtgtccatatggaaaatgaaaagctggttgaagaatttaatgatttagcacaacgttataattatttgttgtcagagaatgaaaagaaagataaagaactaaattatacgcttaagttattcaatcaagtttttaaaatcattaaaagtatgatgaaagaagagcgttatcatacactaataaatcatattgataatcatttagacaattctaaaatacgtgaagtaatgacgatagataacaatgatgaacagttctttaagaagaaatatcaagcacaagaacgagaaatcatttttaaagaagatagagaagatggttatacattataa

SEQ ID NO: 412735 - DNA, 696 bp, Staphylococcus aureus; identical to SEQ ID NO: 404955

SEQ ID NO: 412736 - DNA, 1854 bp, Staphylococcus aureus
gtgcatgacatgacaaaagatattgaatatctaacagctgattatgacaatgaaaagtcatctatccaaagtgtaatagatgcaatagagggtcaagacttcttagatgtagatacaacaatggatgatgcggtaagcgatgtcagttctttagacgaagatggcgcaatatcattaacaagtagtgtagtaggtccacaaggatctaaattaatggggtattatcaaaatgagttatatgattatgcatctcaattagattcgaaaatgaaagaaattattgacacgccatttatagaagatatagataaagcattcaaaggtataacgaatgttaaattggaaaatatactaattaaaaatggtggtggacatggtagagatacctatggggcttctgggaaaattgcaaagggagatgccaagaaaagtgacagcgatgtttatagcatcgatgaaatattaaaatcggatcaagaatttgtaaaagtaattgatcagcattacaaagaaatgaaaaaagaagataagaaattatctaaaagtgattttgaaaaaatgatgactcagggcgcttcttgtgattacatgacagtagctgaagcggaagagctagaggagcaaaagaaaaaagaagaagctatagagattgcagcactagctggtatggtagttttatcttgtattaatcctgttgctggagcagtagctattggtgcttattccgcttattcagcagcaaatgcagccacaggaaaaaatattgtaactggaagaaagctatctaaagaagaacgaatcatggaaggactttcgcttattccattgtcaggtatgggcttcctcaaaggtgctgggaaaagtttaatgaaattaggcttcaaaggcggagaaaaatttgcagttaaaacaggattgcaaaagacaatgcaacaagcagttagtcgtatttcacctaaaatgggaatgatgaaaaacagtgtgttgaatcaatctcgtaactttgctcaaaatactcatgttggacaaatgctgagtaacatgcgtggtcaagcaactcatactgttcaacaaagtagaaattggattggacaacaagcacaaaatgtcaaacgaatagtgaataatggacttgataaagaaatagcacatccatttaaacaacaacttgcaccagcgggaatgggtggtataaaatttgctgaaacaactactttgagaaacatgggtcaaaacataaagcgtgctgttacaccacaaaatcacgtgacacatggtccaaaagatagtatggtgagaagtgaaggcaaacatagtataagtagccatgaaatgaattcatcaaagtatgttgaatcaccaaactacaccaaggttgaattcggagaacactatgcaagacttagacctaagaaactaaaggcgaatattgaatacacaacacctactggtcacatatatcgaaccgatcataaaggtcgcataaaagaagtttatgtagacaatctctctctaaaagatggggatcgtaatagccatgcacaaagaactgtggggggagaggatagattaccagacgatgatggaggtcacttaatcgctagaatgtttggtggttcaaaagacattgataaccttgtggcacaaagtaaatttatcaaccgtccatttaaggagaaaggtcattggtataatcttgagaaagagtggcaagagttcttaaactctgggaaagaggtgaaaaatattaaaatggaagtaaaatatagcggtaatagtcaaagaccgactatatttaaagttgaatatgaaattaatggtgaaagaaatattagaagaatattaaataagtag

SEQ ID NO: 412737 - DNA, 423 bp, Staphylococcus aureus
gtggagaatccgcatatcgcaacgagtgattggggttgggcgattgatccagatggcttaagatatacattgaatgtgttatatgatcgttatcagttaccactttttattgtggaaaatggttttggtgcagttgatgaagtggtagatggacatattcatgatgattatcgcattgaatatttaaaagcacatattacagcagcgatagaagcagttgatcaagatggtgtagatttaatcggttatacaccgtggggaatcattgatattgtttcatttacaaccggtgaaatgaagaaacgctatggtttaatatatgttgatcgagataatgatggtcatggcacgatggaacgcttgaaaaaagattcgttctattggtatcaacaagtgatagcatcaaatggagataaattataa

SEQ ID NO: 412738 - DNA, 801 bp, Staphylococcus aureus
atggatctatttactagaaaagatggaacatcgatacattacagtacattaggtgaaggctatcctatcgtattgattcatactgtacttgataattattctgtgtttaataaattagcagcagaattagcaaaatcatttcaagttgtgttaattgatttacgtggacatggctattctgataaacctcgtcacattgaaataaaagatttttctgatgacattgttgaattacttaaatatttatatattgaagaagttgcatttgtatgccatgaaatgggtggaatcattggtgcggatatttcagtacgttatcctgaatttacatcatcacttacgttggtaaatccaacatctattgaaggtgaattaccggaagaacgtttatttagaaaatatgcccatattattcgaaactgggatcctgaaaaacaagataaatttttaaataagcgtaagtattatcgtccgagaaaaatgaatcgattcctcaaacatgtcgtagatacaaatgaaatatcaactaaagaagaaattcaagcagttaaagaggtattcaaaaacgctgatatttctcaaacttatagaaatgtcgtagtaccgacaaaaattatcgcaggagaattcggtgaaagaacaacaagattagaagctaaagaagtagctgatttaatccaaaatgcggactttgaagtatatcaagaatcaagtgcattcccatttgttgaagagcaagaaagattcgtcgaagatacagctgcatttatcaacaaacatcacgatgaaaagcatgtttaa

SEQ ID NO: 412739 - DNA, 855 bp, Staphylococcus aureus
gtgtatgtagctgctaaaatttttattactggtaataagatacacaatccgttagatcgcaatcattcagaattaagagataaaaaagtgagtttaaacgatggtgatccattcacaatcgctttatttggtgtcgattcagatgctgatcgtaagaaaaagggtggcggagagcgtagtgatagtattatgattttatctatcaaccctaaaacgaagaaaactgaaatagtaagtataccgcgtgatacaagagcggaaattgttggccgtggtactactgaaaaaattgcacatgcctatgcatatggtggaccaaatatggctgttaaatcacttgaaaaattaatgaatgtgccaattgatcattatgcgacaatcgatatggatggtttgcataatatgatagatagcatcggcggtgttgatgtagtaagtaatgatacattcactgttgatggtgttcgttttacaaaaggacagcagacacatgtaaatggtgatcaagcattgaagtttattagaagtcgtaaagaagaaggtgctggtggtgactttggtcgacaacaacgtcagcaaattgtgcttgaagcgatggccaataagattgcaagcccatcatcgattacacattttaatagtctaatgaatgaaattcaaaataatgttaaaacagatttaacattaggtgatttgaatacgattagaagcaattataaagatgctaatgacacgattaataaacatcaattgagtggtcaaggcggcattcaaagtgacggattgtactacttcattcctagtgagcagtcaaaagctgaaagtactaagttattaaaagataatctagagtag

SEQ ID NO: 412740 - DNA, 642 bp, Staphylococcus aureus; identical to SEQ ID NO: 405734

SEQ ID NO: 412741 - DNA, 1644 bp, Staphylococcus aureus
ttggatggcattaaacatgcgcatgatatgcgtattgtacatagagatattaagccacaaaatatattaattgacagcaataaaacgttgaaaatatttgattttggaattgctaaagctttaagtgagacgtctttaactcagactaatcatgtgttaggtactgtgcagtacttttcgccagaacaagcaaaaggtgaggcaacggatgaatgtacagatatttattctataggtattgtgttatatgaaatgcttgttggtgaaccaccctttaatggagaaactgcagttagcattgcgattaaacatattcaggattctgtgccaaatgtgacaacagatgtacgtaaggatattccgcaatctttaagtaatgtcattttacgcgctacagaaaaagacaaagcgaatcgttacaaaacaattcaagaaatgaaagatgatttgagtagtgttttacatgaaaatcgagcgaatgaagatgtctatgaactcgataaaatgaaaacgatagcggtacctttgaaaaaagaagatctagcaaagcatattagtgaacataagtcgaatcaacctaaacgtgaaacgacgcaagtacctattgtaaatgggcctgctcatcatcagcaattccaaaagccagaaggtacggtgtacgaaccaaaacctaaaaagaaatcaacacgaaagattgtgctcttatcactaatcttttcgttgttaatgattgcacttgtttcttttgtggcaatggcaatgtttggtaataaatacgaagagacacctgatgtaatcgggaaatctgtaaaagaagcagagcaaatattcaataaaaacaacctgaaattgggtaaaatttctagaagttatagtgataaatatcctgaaaatgaaattattaagacaactcctaatactggtgaacgtgttgaacgtggtgacagtgttgatgttgttatatcaaagggccctgaaaaggttaaaatgccaaatgtcattggtttacctaaggaggaagccttgcagaaattaaaatcgttaggtcttaaagatgttacgattgaaaaagtatataataatcaagcgccaaaaggatacattgcaaatcaaagtgtaaccgcaaatactgaaatcgctattcatgattctaatattaaactatatgaatctttaggcattaagcaagtttatgtagaagactttgaacataaatcctttagcaaagctaaaaaagccttagaagaaaaagggtttaaagttgaaagtaaggaagagtatagtgacgatattgatgagggtgatgtgatttctcaatctcctaaaggaaaatcagtagatgaggggtcaacgatttcatttgttgtttctaaaggtaaaaaaagtgactcatcagatgtcaaaacgacaactgaatcggtagatgtaccatacactggtaaaaatgataagtcacaaaaagttaaagtttatattaaagataaagataatgacggttcaactgaaaaaggtagtttcgatattactagtgatcaacgtatagacattcctttaagaattgaaaaaggaaaaacagcaagttatattgttaaagttgacggtaaaactgtagctgaaaaagaagtcagctatgatgatgtataa

SEQ ID NO: 412742 - DNA, 273 bp, Staphylococcus aureus
atgaaagttcaaaaattacatgtagaaccaacaaaagaaaatacaattacagaaccaaagcaagttgtagtaaatccgttatttgctaaaccgtcggcattaagcgaaatatttggtattagctattcatcaactagacgaatattaaaagagtgggaaaaagattctaaaggtgttgatgatttatattactcgttatcatcaacaatgattgttatcagtattccacgattcgaggagtacatgaaggcacgtcataaaaaatggatgtag

SEQ ID NO: 412743 - DNA, 213 bp, Staphylococcus aureus
atgattaataaagtgagtaactataggaagtttatgggtttgacacaacaagaaatggcagattatttatcgatttctgttcaagcgtatcgaaaaaaagaaaagaattttactccttttaaagacgcggaaaaattattgataagggataaagtaaaaaaatatggattcttagatattacaatagatgatattttttttacatctaagtag

SEQ ID NO: 412744 - DNA, 696 bp, Staphylococcus aureus
ttgaaaatcaataaaaaaagagtagctaacaatatacaaaaaatcagaaaatcacaaggtttaactatggaacagttcggcaacttatttgatgctcataaatctttagtttcaaaatgggaaaaagctatgtcagcaccctcacgagaaagattgaaggaaatagctgaatatggaggaatgaccctacccgaaatacttggaattagtttagaagaaagagtaaaagaatattaccttaatataatgtatggtgaatatgatttattctatggatttatagaaaatgacgaagattttttaaataatgtaattaattatatttctagtttaaacttatcaatcgaaaatgttacacatgaattagttagagaaactatattgtctctaatttcgcaaaaacaatcaaatttaagcgatttggaaacatatagaataaacgagttctcgagaattatatcggatcaaagaaaactgcttaatgagttagcaataaaacttaatattaaagaatacgatccaaaccctgaaatgttaatacaagctctttcagatttagattcattaaaaattaatatttattccataacagaaagattagagacctatttaactaaagatattgaagatataattaatgagagaatagagaaagtgaaaaacgaatatgatgtagattacgatagttatatctag

SEQ ID NO: 412745 - DNA, 522 bp, Staphylococcus aureus
ttgaatgtattaatcgaatatttaaaaagcttgaacttgccaatttggataattattagcatttttacaatttattatttattaaagttttctttctctttttttaataactttagtgtttttgaaataattaaaaaaacattttcaaaagcgaagaaaaacttaattatacttacttcaatattgctttttacacttgctgttactatcgtcaattatctgtttttaaatctggcaattcataatcaggagcacttatataagtatttatccttttatttatttgtatttttggtttgtttaattctgcttgctatcacattatccttttcaacctatcaacttgccaaaatatcaaataacctaactcaaaagtttaaatatgattataaattgaataaaaaaatagccattaaggaaaacgcactaattaataaactttctattgattttaacgattctgtacatctaaatagaccaactatatacactgattcgaaggcaaaggaaaaatcagtataa

SEQ ID NO: 412746 - DNA, 468 bp, Staphylococcus aureus
atgaacgaaaagttacactcagttattgttttcattgaaaattttttaatagattttctaaatatattcggaattaaccaagaagactattatctatgcaagtcgcaattaattttatatatccaaaagttatatcatttattattagacatatgcataacttttatttgtatttctcttattgtgtcgatagttggttacataatagataaaaacaaaaactatgacgctaaaaaaatccacaacaagattagactcgtctatcctagcaatagcaaaagtggtggggaaatagtttgtaaatattgggtctggcaacgcaagaaaaagaaacttatagaatcactcattacccatctaacaatacacgggaacaaaaattcgagacatgcacgaattaataccagttcaaagccgataccgttcccatttttaagagaagtatacggcttatcaaaatcatcataa

SEQ ID NO: 412747 - DNA, 831 bp, Staphylococcus aureus
atggataaaattaatgcaatcggacaacagatcactttatttaaaaatgaaaacgatgattatataagtttgacagatatagcaaaatataaaagtgaagacccaaacgatgttataaaaaattggttgagatctaaagacactatagaatttttaggagtttgggaaaatataaataatcctaattttaaacccgtcgaattcgacgggtttagaaatcaagctggtagaaatgcttttacaatgtcgccaactaaatggataaacacaaccaatgcaattggcttagtaaccaaatctggtcgatacggaggcacatttgctcaaaaagatatagctttcgaatttgctagctggatttcagcagaattcaaattatatattattcaagactatcaacgcttaaaagaaagagaagaagatcctgaaaaattaaactgggatttaaaacgtttacttagcaaaacaaactattcaattcatacagatgctataaaagacaatttaatcaattctaaattatcacaacaacagattggatatacttatgctaatgaagccgatgttctaaatgtcgcgatatttggtttaaccgccaaacaatggagagaaaataaccctgacaaaaaaggaaaccaaagagattatgccactatcgaagaactgatagttatcagcaatttagaaagcagaaatgctgaactaattgataaaggtattgatcaaaaatcaagactaaaacttttaaacgagttagccagaaaacaaatgaaatcattattaaattctagaaccctcaattattccaaaaatcaaatatttttagaataa

SEQ ID NO: 412748 - DNA, 396 bp, Staphylococcus aureus
ttgtctgagtcggaatcgctcgctgagtcggaatcgcttgctgaatctgaatcactcgctgagtctgaatcacttgctgaatctgaatcactcgctgaatctgaaccactatctgatgtagaatcactacccgaatctgaaccgctatctgaattagaatcgctgccagaatctgaacctgggtcagaatctgaatcctctggaattggttcaatttcaccaggctcatcaggttgttcaggaacaactggtttatcgataccgtcaccagaacctgatccgttattaaatgctacttcgttgtcccatgacatagagcgccaaattatattcgagttatacccatataaagttgaacgtaaagctaaatcacctttgctattcggatcaatatga

SEQ ID NO: 412749 - DNA, 732 bp, Staphylococcus aureus
atgatagctaaaatcaagggattaaaactcacgtgtgttgttgatcctaaaatatcaccaacaaatttgaaaattattaaaagttatggtgccaatgtagaaatggttgaagaacctgatgcacatgggggttatttaatgactcgtattgcaaaggtgcaagaactgttagccactattgacgatgcatattggattaatcaatatgcgaatgagttaaattggcaatcccattatcatggtgcaggcacagagattgttgaaacaattaagcaacctatagattattttgtcgcgccagtcagcacgacaggtagcattatgggtatgagtagaaaaataaaagaagtgcatccaaacgcacaaattgttgctgttgatgcgaaagggtcagtcatttttggtgacaaacctattaatagagaattacctggtatcggtgctagtcgtgtacccgaaatattgaatagatcagaaattaatcaagtgatccatgtagatgattatcaatctgctttgggctgtcgaaaactgattgattatgaaggcatatttgccggaggttcaacaggttcgattattgcagcgattgagcagttgataacgtcaattgaagaaggtgcaacaattgtcacgattttaccagatcgaggcgatcgttacttagatttagtttattcagatacatggttagaaaaaatgaaatcaagacaaggagttaaatcagaatga

SEQ ID NO: 412750 - DNA, 573 bp, Staphylococcus aureus
gtggaagtcattagagcgagacgtctattagacggacaggcgtctaccacaggttactttgacaatatagaacattgtattgatgaagagtttggacaatgtagtatagctagcaatgacaaattattgttagttggttcaggtgcatatccaatgacgttaattcaagtagcaaaagaaacaggtgcttcagttatcggtattgatattgatccacaagccgttgacctagggcgcagaatcgttaacgtcttagcaccaaatgaagatataacaattacggatcaaaaggtatctgaacttaaagatatcaaagatgtgacgcatatcatattcagctcgacaattcctttaaagtacagcattttagaagaattatatgatttaacaaatgaaaatgtcgtagttgcaatgcgctttggtgatggcatcaaagcaatatttaattatccgtcacaagaaacagcggaagataagtggcaatgtgtgaataaacatatgagaccacagcaaatttttgatatagcactttataaaaaagcagctataaaggtaggtattacggatgtctaa

SEQ ID NO: 412751 - DNA, 1014 bp, Staphylococcus aureus
atgacagaaaaaaagaaaaagttagttacttttaatatttttagacctacattattagaatatagtggtataaatagaaagaatcaagaaagatttgattttaatattttattagaatatataaaagatcaatctaaaaacttttctattttatataaaaacgaagaattggcgatatatagtatagttaaagaaaatttggatgagggtttatttcatatacgtatagttaaatacagaaaatatgatgttcctaatgcttatactagactagatgctacaaatataaatattaatgatggagaaaatgatttcttattgcctgatcacaatgaggaagaaatacctttatcagacaatacgtcaattggtgaatcaattagtatattatatgattcgataacaaatacttttgtcatccaatcaaacttacattgtacaacaactagaggaataattacattatttgatagtatacatagtaaaatgttaagtgaaaatttggagaataaagaagagaatatagaaaaaggaaccgaatatcaatttcatctagcaataatcccacctaagaaagtatttgaaaaagttaatgattttgactatattacagaagttgaatttgtatacgaagataatgatatgcaagacgatgtagcagacatattaggagtaaacaatgacgttaaagccggaaagatacaagcaagatatcacatagatacttctaaagataaaaagaaatcattaaacaagtcatacattgataaaattctgaaattatttaaaaatgataaaacgaaatttaaaaaattggatttaaaaggaagaaataacgaagaaagtaacattgatttagttgaactgataaacgctagattatattttcaacattcatttacctatactgttgaaaagccatatttagatcatgaatcggtatattatgaaatggaaatgaaatatttaggtaaagagggaaaaggagattatagaagcaaagctaattattga

SEQ ID NO: 412752 - DNA, 468 bp, Staphylococcus aureus
atgaagctgattaaaagccaatttaatattattactataataatcagtgctgtgttgaccttaataatttgtcattataaatttttaattaatttagaagatataaaaaatgcactgtcatcaattattacacttgcatcagtgaactttgctttgtatggagtaacattaagtataattgctggaattcatgaacgtgcaattataaaaaaattattacgtaacggttctaaatctaaaaaagaactagaagataatgacagtaaagttttttattctacattgttttcgattatattcattattgtatttcaaatgttatatacgacgattactagtaatattttttcattaactatttttatcttcttatctatcaactctattattttaacaatttattatacacaaaattattttaaacaaatatcaaaagcgctatttgatcattcaaaatttaatgaataa

SEQ ID NO: 412753 - DNA, 606 bp, Staphylococcus aureus
gtgattgaagaaagtggtcaaaaggcagtgttaattcctggtgatataagagatgaacagttcaactatgaccttgttgaacaagcatatcaacaattaggtggcttagataatgttactttagttgctggacatcaacagtatcatgatgatattcatggatttacaactgaggcatttacagaaacatttgaaacgaatgtctatccgctattttggacagttcaaaaagcattggaatatttaaaaccgggtgcgtcaattacaacgacatcatctgtacaaggttataatcctagtcctattcttcatgattatgccgcttcaaaagcagcaattatttcattaactaaaagtttttcagaagaattaggaccaaaaggaattagagtgaactgtgtagcgcctggtccattctggtcaccattacaaatttctggtggacaacctcaaagtaaaatcccaacatttggtcaaaaaacacctttaggtcgtgcaggtcaacctgttgagttatgtggaacttatgtgctattagcgtcagaagaatcaagttatacaaccggacaagtgttcggtgttagcggtggagtgcaaatagattag

SEQ ID NO: 412754 - DNA, 447 bp, Staphylococcus aureus; identical to SEQ ID NO: 408745

SEQ ID NO: 412755 - DNA, 513 bp, Staphylococcus aureus
atggaggcattagccaaattacgtacagtatttaaagctgacggcactgtgactgcaggaacatctgccccactttctgatggtgcaggatttgtagttttaatgtctggagataaagtgaaagaactcggcgtgacacctattgcacgattcgttggttttaaggcagtaggcgttgacccgaaaattatgggtattgggcctgcatatgcgattcctgaagtattgtcactcagcaatctatctgttgaagacattgatttgatcgaattgaacgaagcatttgcttctcaaacgattgcatctattaaagaagtaggtctagatatatcacgtacgaatgtgaatggtggcgctattgctttaggtcatccattaggtgctacaggcgcaatgttaaccgcgcgtttacttaatgaaatgggtagacgtcccgatagccgttacggcatggttacgatgtgtattggtgtcggcatgggtgcagctgctatatttgaatatgtgcgttag

SEQ ID NO: 412756 - DNA, 2250 bp, Staphylococcus aureus
atgttagaaacaaataaaaatcatgcaacagcttggcaaggatttaaaaatggaagatggaacagacacgtagatgtaagagagtttatccaattaaactacactctttatgaaggtaatgattcatttttagcaggaccaacagaagcaacttctaaactttgggaacaagtaatgcagttatcgaaagaagaacgtgaacgtggcggcatgtgggatatggacacgaaagtagcttcaacaatcacatctcatgatgctggttatttagacaaagatttagaaacaattgtaggtgtacaaactgaaaagccattcaaacgttcaatgcaaccattcggtggtattcgtatggcgaaagcagcttgtgaagcttacggttacgaattagacgaagaaactgaaaaaatctttacagattatcgtaaaacacataaccaaggtgtattcgatgcatattctagagaaatgttgaactgccgtaaagcaggtgtaatcactggtttacctgatgcatacggacgtggacgtattatcggtgactatcgtcgtgtagctttatatggtgtagatttcttaatggaagaaaaaatgcacgacttcaacacgatgtctacagaaatgtcagaagatgtaattcgtttacgtgaagaattatcagaacaatatcgtgcattaaaagaattaaaagaacttggacaaaaatatggtttcgatttaagccgtccagcagaaaacttcaaagaagcagttcaatggttatacttagcataccttgctgcaattaaagaacaaaacggtgcagcaatgagtttaggtcgtacatcaacattcttagatatctatgctgaacgtgaccttaaagcaggcgttattactgaaagcgaagttcaagaaattattgaccacttcatcatgaaattacgtattgttaaatttgctcgtacacctgattacaatgaattattctctggagacccaacttgggtaactgaatctatcggtggtgtaggtattgacggacgtccacttgttacgaaaaactcattccgtttcttacactcattagataacttaggtccagctccagaaccaaacttaacagtattatggtcagtacgtttacctgacaacttcaaaacatactgtgcaaaaatgagtattaaaacaagttctatccaatatgaaaatgatgacattatgcgtgaaagctatggcgatgactatggtatcgcatgttgtgtatcagcgatgacaattggtaaacaaatgcaattcttcggtgcacgtgcgaacttagctaaaacattactttacgctatcaatggtggtaaagatgaaaaatctggtgcacaagttggtccaaacttcgaaggtattaacagcgaagtattagaatatgacgaagtattcaagaaatttgatcaaatgatggattggctagcaggtgtttacattaactcattaaatgttattcactacatgcacgataaatacagctatgaacgtattgaaatggcattacatgatacagaaattgtacgtacaatggcaacaggtatcgctggtttatcagtagcagctgactcattatctgcaattaaatatgcacaagttaaaccaattcgtaacgaagaaggtcttgtagtagactttgaaatcgaaggcgacttccctaaatacggtaacaatgacgaccgtgtagatgatattgcagttgatttagtagaacgcttcatgactaaattacgtagtcataaaacatatcgtgattcagaacatacaatgagtgtattaacaattacttcaaacgttgtatacggtaagaaaactggtaacacaccagacggacgtaaagctggcgaaccatttgctccaggtgcaaacccaatgcatggccgtgaccaaaaaggtgcattatcttcattaagttctgtagctaagatcccttacgattgctgtaaagatggtatttcaaatacattcagtatcgtaccaaaatcattaggtaaagaaccagaagatcaaaaccgtaacttaactagtatgttagatggttacgcaatgcaatgtggtcaccacttaaatattaacgtatttaaccgtgaaacattaatagatgcaatggaacatccagaagaatatccacagttaacaatccgtgtatctggttacgctgttaacttcattaaattaacacgtgaacaacaattagatgtaatttctcgtacattccatgaaagtatgtaa

SEQ ID NO: 412757 - DNA, 1557 bp, Staphylococcus aureus; identical to SEQ ID NO: 405110

SEQ ID NO: 412758 - DNA, 657 bp, Staphylococcus aureus
atgacgaaatgggagatctttaaaaaatatatcctgggaaatcctgttatatggattctatgtgtttcaaacgtctttgtatacattgtacgaatcggtattgataactgggcaccgttatatgtgtcagagcatttacactttagtaaaggcgatgcagttaatacgatattctactttgaaattggtgcattagttgcaagtttattatggggctacgtatcagacttattaaaaggtcgtcgtgcaattgtagctattggctgtatgtttatgattacatttgttgtcttattctacacaaatgctacaagtgtcatgatggttaacatttcattgtttgcattaggtgcgttaatctttggtccgcaattattaattggtgtatcattgactggttttgttcctaaaaatgccatcagtgtagcaaacggaatgacaggttcattcgcgtatctattcggtgactcaatggcgaaagttggtttggcggctattgctgatccaacacgtaacggtttaaacatctttggatatacattaagtggatggacagatgttttcatcgtcttctatgttgcattattcctaggcatgattctattaggaatcgttgctttctatgaagaaaagaaaattagaagtttaaaaatttaa

SEQ ID NO: 412759 - DNA, 519 bp, Staphylococcus aureus; identical to SEQ ID NO: 407141

SEQ ID NO: 412760 - DNA, 1755 bp, Staphylococcus aureus
atgacagagtcatatccaattataaaggaaggctcacaagtcggaagctactttctatttttcatcataattgcatttttgttatatgccaatgtgttatttattaaacgacgaagttatgagcttgcattatatcaaacattaggtttatctaaattcaacattatttatatactaatgctcgaacaattactaatatttataattacggcaatattaggtattattattggtatttttggttcgaaactgttattaatgattgtctttacattattaggaattaaagaaaaggttccaattatttttagtttgagggcggtatttgaaacattaatgttaatcggtgtcgcttattttttaacatctgctcaaaattttatattagtgttcaaacaatctatttcacagatgtcaaagaataaccaggttaaagaaacaaatcataataaaattacatttgaagaggttgttttaggcatcttaggtatagtattgattaccacaggatactatctatctttgaacattgttcaatattatgattctatcggtacacttatgtttattttattgtcaactgtgattggggcatacttattttttaaaagctctgtttctctagtttttaaaatggtgaagaagtttagaaaaggtgttataagtgtaaatgatgtcatgttctcatcatctattatgtatcgtattaagaaaaatgctttttcacttacggtcatggcaatcatttcagcgattactgtttcagttctttgctttgctgctataagtagagcgtccttatcaagtgaaataaaatatactgcaccacacgacgttacaattaaagaccaacaaaaagctaatcaattagcaagtgaattaaacaatcaaaaaattcctcatttttataattataaagaagtaattcatacgaaattgtataaagataatttatttgatgtaaaagcgaaagaaccatacaatgtaacaattactagtgataaatacatccctaatactgatttgaaacgtgggcaagctgatttatttgtagcggaaggttctatcaaagatttagtgaaacataagaagcatggtaaggcaattataggaacgaaaaaacatcatgttaatattaagttacgtaaagatattaataaaatctattttatggcagatgttgatttaggtggaccaacgtttgtcttaaatgacaaagactatcaagaaataagaaagtatacaaaggcaaagcatatcgtctctcaatttggattcgatttgaaacataaaaaagatgctttagcattagaaaaagcgaaaaataaagttgataaatctattgaaacaagaagtgaagcgataagctcaatatcaagtttaaccggaatattattatttgtaacatcatttttaggtattacattcttgattgctgtatgttgcattatatacataaagcaaatagatgaaaccgaagatgagttagagaattatagtattttgagaaagcttggatttacacaaaaagatatggcaaggggactaaagtttaaaattatgtttaattttgggttacctttagttattgcactatcacatgcatattttacatcattagcatatatgaaattaatgggtacaacgaatcaaataccggttttcatagtaatgggattatacatttgtatgtatgctgtttttgcagtgacggcttataatcattccaagcgaacaattagacattccatataa

SEQ ID NO: 412761 - DNA, 831 bp, Staphylococcus aureus; identical to SEQ ID NO: 406890

SEQ ID NO: 412762 - DNA, 180 bp, Staphylococcus aureus
atgttaaataaaatcttacttttattgctctctgttacttttatgttgttatttttctctttacattcagtaagtgctaaaccagatccaagacctggagaattgaatagagttagtgattataaaaaaacaaaggtactatggggaatgttgaatccttatataaggataaagcggtaa

SEQ ID NO: 412763 - DNA, 1095 bp, Staphylococcus aureus; identical to SEQ ID NO: 405739

SEQ ID NO: 412764 - DNA, 1590 bp, Staphylococcus aureus
atgctacataatggatttgaaataggcaacgcgaatgtaacttcaccaaaatcaatacaaactgcatcagcgcagcttgtacaaattatagccaatgtttctagcagtcaatatggtggctgtacggttgaccgcgttgacgaattacttagtacatatgcacgacataatgaagaacaacataggaatatcgcaaagcaatttgtcaaagaatctgaaattgatcgttatgttgatcaacaagtcactaaagacatcaatgatgcgattgaaagtttagaatatgaaattaataccttatatacatctaatggacagacaccttttgtaacattaggattcggcttaggtacagatcatttaagtcgcaaaattcaacaagctatcttaaatactcgtatcaaaggcttaggaaaagaccgcacgacagcgattttcccgaaacttgtattttcaattaaaaaaggaaccaactttagtccgcaagatccgaactatgacattaaacaactagcattaaagtgttcaacgaaacgtatgtatccagatattttaaattatgacaaactcgtagaaatattaggtgatttcaaagcgccaatgggttgtcgttcatttttaccaagttggaaagatgcggaaggtcattttgaaaataatggtcgttgtaatcttggtgttgttacacttaatttacctagaatggcattagaatctgccggtaatatgacgaaattctgggaaatcttttatgaacgtatcgatgtgttacatgatgcattactttatcgtataaatcgtttgaaagatgctgtaccgaataacgcaccgattttatataaaagtggcgcatttaactataaattaaaagaaacagatgatgttgctgagttatttaaaaataaacgtgcaacgatttcaatgggctatatagggttgtatgaaacagctactgttttctatggtccagactgggaaacatctcaagaagcaaaagcatttacgcttgaaattcttaaagaaatgaaacgttatcaaacgaaatggacagaattatatgacatttggttcagtatttacagtacgccgagtgaatcgctaacggatcgtttttgtcgtttagaccaagagagatttggagatattaaagacattacagataaaggatattatcaaaactctttccattatgatgtacgtaaagatgttacaccttttgaaaagttagattttgaaaaagattatccttattatgcgagtggtggtttcattcactattgtgagtatccgaaattgcaacacaatttgaaagcactagaagcggtatgggactactcttatgacaaagttggttacttaggtacaaatattccgattgatcattgttatgaatgtgattacgatggagattttgaagcaactgaaaaaggatttaaatgcccgaactgtggcaatgataatcctaaaacagttgatgtcgttaaacgaacatgtggttacctaggcaatccagttcaacgtccagtaattaaaggccgtcataaagaaatttgcgcacgagtaaaacatatgaaagcgcctaaagaatga

SEQ ID NO: 412765 - DNA, 1773 bp, Staphylococcus aureus
atgaagagtaaaaaaagaatggaaagattgtacgatgatttatttagtactaattttttaattaattatggttattttgatattactcctaaaaataatcaagatttaacagaattaaacagctacggtaaatcagatgcattttatttgaaaatatttaatatgagtaaattagctgaatatattacttataatccattttacattaaaaaattttttaatgatagaaacatacgtagtactgaaccaataatatttactattccgaaaaataatacatcaagaagagaatataagattcctaatatttatagctatttaaatttgatgtttttcatgcaagaaaataaaaaagaatttaaagaagtttttctaaccaataaattttcaacatctaaatttttttcacttccagattttgattttaaatttactgacaatttaaaaaagactttactttacggtggtaatcatatattaaacgttgatttatctaatttttatcattctctttatacacatagcataccttgggtaataatgggaaagaagaatgctaaaaaagaaagaaagaaaggtttttcaaatcaattagataaattaattacatcctgtcaatataatcaaactcatggaatacctactggcaacatattaagtcgtattattagtgaattatatatgtgttatattgattctgaaatggaaaataaagggtatagatatgcgagatatgtggatgacatatcattctcatttaattttgaagaagagaaagataaattttacagagattttaacaaactatgtatgaaatatgaattaaaaattaatgacaagaaaactgaagtaaatgattttccatatatacatccacaaaacaaagactttatatttaattatttcaaaaattattcctcaaatagtaaagatgaaacttggattataggtattaagaactttattgatttatgtatagatgaagaaagaaaaggaaataaaggggcaataaaaagtattttcccagtaatagaaaatactttaaagaagaaaaaaataaataaacatcaaataagtaagatatttggatataggaataatattactaaattcaatatcttgcaattcatattagatttatcactaaaagactctaaattaacaaatagatgcctatctttattaaactatttgactattaaaatggacgataaaaaaatagtctcaaaacaagttaaacagtattttaaaaatagaaacgaagaaattagaaaattgttagtattttataataaaaataattatcatcaagaagcataccaaattcttgtttatattgttgaatatgatgtagatattcttttaaaaaatgatgttttgagtttgctaaatgaaaatacagataacttatctctatcgttattgacaataatatatctaagaaagtcttggaaaatagaaaatttattaaaaaaaattgataatctatttaaaaattctaaggatgattatcctgcaacagtaggtgtaatgtcgcaaaatttatggtatttcagatactttatttactatttaataaaagaaaatgtgatttcaaaaaaagaaattaatagttattgcatgagtcaaaaatatggttcaaatcagaaaggatataagagcgatttaaactggaattatattaattcaaaagataatgtggatgaattttttagtgaattattagaagaaaaagtaccactcatagatttaaattatgtaaatttaatataa

SEQ ID NO: 412766 - DNA, 1002 bp, Staphylococcus aureus
atgaagcgacatgcagatatcattgtggtttgttaccatggtggatttgaaaaggatttagaaagtggtacgccgaccgaagtattaacgggtgaaaatgaaggatatgccatgttagaagcgttttctaaagatatagatatctttattacgggtcaccaacatcgacaaattgctgaaaggtttaagcaaacggctgtgattcaacctggtacgagaggtacaactgtaggcagagtagtcttgagtactgatgaatatgaaaatctatccgttgaatcatgtgaattacttcctgttatagatgattccacatttactattgatgaagatgaccaacatttacgaaagcagttagaggactggttagattacgaaattactacattgccatatgatatgacgattaatcatgcatttgaggcacgtgtggcaccgcatccttttacaaattttatgaattacgctttattagaaaaaagtgacgcagatgttgcctgtacagctttgtttgattctgctagtggtttcaagcaagtcgtgacgatgcgagatgttattaacaattacccatttccaaatacatttaaagttttagctgtaagtggtgccaaacttaaagaagccattgaacgatcagcagaatattttgacgtgaaaaatgatgaagttagtgtgagcgcagacttccttgaacccaaaccacaacactttaattatgatatatatggtggcgtaagttataccattcatgttggaagaccaaagggacaacgtgtgagcaatatgatgattcaaggtcacgcagttgatttaaagcagacatatacaatttgtgtaaataattatcgtgcagtaggcggtggtcagtatgatatgtatatcgacgcgccagttgtaaaagatattcaagttgaaggcgcacaattacttattgattttttatcaaataataatttgatgcgcatcccgcaagttgttgattttaaagttgaaaagtga

SEQ ID NO: 412767 - DNA, 693 bp, Staphylococcus aureus; identical to SEQ ID NO: 407139

SEQ ID NO: 412768 - DNA, 762 bp, Staphylococcus aureus; identical to SEQ ID NO: 407138

SEQ ID NO: 412769 - DNA, 1392 bp, Staphylococcus aureus
atggcaaaagatatggatacaattgtttcattagcaaaacacagaggttttgtgttccctggtagtgatatttacggtggtttatcaaacacatgggattatggtcctttaggtgttgaattaaagaataatgttaaaaaagcttggtggcaaaaattcattacacaatcaccgtttaacgttggtatcgatgctgcaatcttaatgaatccaaaagtatgggaagcttcaggacacttaaacaacttcaacgacccaatgattgataataaagatagtaaaattcgatatcgcgctgataaattaattgaagattatatgcaagatgttaaaggtgatgaaaacttcattgccgatggtttaagttttgaacaaatgaaaaaaattattgacgatgaaggtattgtttgtcctgtaagtaaaactgctaactggactgaaattcgccaattcaatttaatgtttaaaacattccaaggtgtaactgaagattctacaaatgaaattttcttacgtcctgaaacagcacaaggtatttttgtaaactataaaaacgtgcaacgttcaatgcgtaaaaaattaccatttggtatcggtcaaattggtaaatcattccgtaatgaaatcactccaggtaacttcattttcagaacaagagaatttgaacaaatggaacttgaattcttctgtaaacctggagaagaaatcgaatggcaaaattattggaaaacttttgcaagtgactggttaacaagcttaaatatgagcagtgaaaatatgcgtttacgtgatcatgatgaagatgaattatctcattactcaaatgcaacaactgatattgaatataaattcccatttggttggggtgagttatggggtatcgcaagtcgtacagacttcgacttacgtaaacatgctgaacactctggtgaagatttcagataccatgatccagaaacgaacgaaaaatatattccatattgtatcgagccatcacttggtgcagatcgtgtaacattagctttcttatgtgatgcatatgatgaagaaggcgttgaaggtagtaaagatgcacgtacagttttacacttccatcctgcattagcaccatataaagcagcgattttacctttaagtaagaaattatctggcgaagcgattaagatttttgagcaattaagttctaaattctcaatcgatttcgatgaatcacaatctatcggtaaaagataccgtcgtcaagatgaaatcggtacaccttattgtgtaacattcgactttgattcattagaagataatcaagttacagtacgtgacagagattcaatggaacaagttcgtatgccaatctcagagttagaagctttcttaactgaaaaaacaaaattctaa

SEQ ID NO: 412770 - DNA, 636 bp, Staphylococcus aureus; identical to SEQ ID NO: 406133

SEQ ID NO: 412771 - DNA, 243 bp, Staphylococcus aureus
atgggattagctagaattactgaagcgattttcagaaatgaagatgccgtattgactgtatcagcattattagaaggcgaatatgaggaagaagatgtttatattggtgttccagcagtcatcaatagaaacggtattcgcaacgtcgtagaaatcccattaaacgacgaagaacaaagcaagttcgcacattcagctaaaacattaaaagatattatggctgaagcagaagaacttaaataa

SEQ ID NO: 412772 - DNA, 669 bp, Staphylococcus aureus
atgttcggcttatgtggtgccgcacttgcaatttatcacacagctaaacctgaacataaaaaagttgtcggcggtttaatgttatccgctgcactcacttcatttttaacaggtattaccgaacctttagagtttagtttcttgtttgtcgcacctattctttatgtaatccatgccttctttgatggattagcatttatgatggcagacattttcaacattacaattggtcaaaccttcagtggaggctttatcgatttcttactctttggtgtgctacaaggtaatagtaaaacaaactacctatacgtcatacctattggaattgtgtggttctgtttgtattacatcgttttcagattcttaattacgaaatttaatttcaaaacacctggtcgagaagataaagctgcagcacaacaagttgaggctactgaaagagcacaaactattgttgctggtttgggaggcaaagataacattgaaatcgttgactgttgtgcaacgagactacgcgtcacacttcatcaaaatgacaaagtcgataaagtattactcgaaagtactggtgccaaaggtgtaatccagcaaggcactggtgtgcaagtaatttatgggcctcacgttacagttatcaaaaatgaaattgaagaattgctcggggattaa

SEQ ID NO: 412773 - DNA, 879 bp, Staphylococcus aureus
atgctaaacattcaagacgttagtcatctttctaaaaaggagcaaaaagcatataaccgtttcgtagaatctgtagaaaacggtaatttaccagtactaccatgtattgaaatggatctaaaagagatgcaagaagaaacattaaaccagagtaagattggtggaatgccatttttaaaatcttttaaagatataccattagatgaaaataatgtaccaatggtattgctagcacagattaatttggatgatcttccagaacaacaagaattatttcctgtaaaagaagggatattgcagttttggattagttcggaagatcaaatgtatggaatgtctgaaaatttaaagggaaacaatataaactcaaggcttgtttatataaaagagccaattacagatttatcactcgaaaatattcaagcgcatttgaagtcattagatgctgataatgaggatatcccgttcagtggagcattttctatagaatttagattgtcgaaacaaactattacatgtactgattataagtacgatgaggacgtgcttgcattgtggaataaagtcaatccatccttcgcgctaaaatcaatgtttggtggttatgatgaattgatggaacctgtgtgtaacacatttactgctaaggaaccatttaatcaacttggtggttatccatattttgaccaaatagatccaagaacgaacgatcaagaactgaaaatgtatgatagagtcttactgcaaattgattctacaagagatggtaattcttcgattatatggggtgatttaggtattgccaatatcttagtgaaatctactgaccttgaggctatgaagtttgatgattacatgtattcatgggattgcagctaa

SEQ ID NO: 412774 - DNA, 840 bp, Staphylococcus aureus
atgctagctttacaatataacggcggtgtaattagagattatcctatgattcctggtatagattttgcaggtattgttgaatcaagttcgaatgataagtttaaagaaggcgataatgtattagttactggttatgatgtcggcgtgacacatacaggtggattttcagaatatgcacaagtgcctggagagtggattgttcctattccccaagaaatgtctattaaagagtctatggtatatggcacagccggttttacggcagcattatcaatttttgaactagaaaaatatggaatgaatatcaaatcacaacctgaaattttagtgtctggggctacaggtggtgtgggcagtgttgctatacaaattttacgtaaaattggatatgaaaatatcactgctatcgtaagaaaagaaaagcaaatagaaatcgcaaaaaaattaggtgcaaaacaagtaataataattgaagatgataataaaccacttaaaaaaggtatttttgattatttcctagatacagtagggaataatgtaacattatacggtttaaaacgtctaaattatcaaggtgttgctactgtatgtggaaatgtagcaggaaattcacttaacgctaatatattaccgtttattcttagaggtattaaattaattggcattgattctgtatgtgttgatcataatatccgtgaagatatatggagtaagttagcaaatgaatggaatataggaaattcacttctatacaatgaaattggatttgaagaattctataaaacgatagatcagcttttaaaaggacaacacttaggaagaactattttaaaagtataa

SEQ ID NO: 412775 - DNA, 330 bp, Staphylococcus aureus
atggacttttatattaaatttgatgacacacaacatatgacactcccaatgctgttttccgacattttaatttattgtacagaacgaaatgtgatgttagtagatcatagggttgatgataatattaaagctgaaaacgttatatttattggccttttgtgtaaacatggacattggcatgcagtcatttatgacattgctcaagacaaaactgccgaactcgaaattgaaaatattatagatatttcgtattcattcggtaagacgattcaaaccagagacatatccattgataactatcatcaatttttaaaccccatcgattcctaa

SEQ ID NO: 412776 - DNA, 330 bp, Staphylococcus aureus
gtgatttcttcttttggttcacctttactaataattactccagttaatggattttttagtgttggtgtcgttattgtcttctcacctttttgtccttctcttgttactttttctgtccctggtgctaaatcaggattaaatttacgttctttctcgaatggaatctcttctttttctacaatcgagtctccttttacaggtccatattttgttacgctatcgaccggcggtctaactacgtctcctgtttctggattcttaattcctggtttacctggaacttcctctttctctcctgttggtaacttcggatcaaattcgtctcgatga

SEQ ID NO: 412777 - DNA, 480 bp, Staphylococcus aureus
atggacgaagttggcgttgacgctgcacgttatttcttaactatgcgtagtcctgatagtcactttgattttgatatggaattagcgaaagagcaatctcaagacaatccagtttactatgctcaatatgcacatgcgcgtatttgttcaattttaaaacaagcgaaagagcaaggtattgaagtgactgctgcgaatgattttacaacgattactaatgaaaaagcgattgaattgttgaaaaaagtagctgatttcgaacctacaattgaaagtgctgctgagcatagatcggcacatagaattactaattatattcaagatttagcttctcatttccataaattctataatgctgaaaaagtgttaacagatgatattgaaaaaacaaaagcacatgttgctatgattgaagcggtcagaattacattgaaaaatgcattggcaatggtcggtgtaagcgcacctgaatcaatgtaa

SEQ ID NO: 412778 - DNA, 330 bp, Staphylococcus aureus
gtgatttcttctttcgattcacctttactaataatttctccagttaatggattttttagtgttggcgtcgttattgtcttctcacctttttgtccttctcttgttactttttctgtccctggtgctaaatcaggattaaatttacgttctttctcgaatggaatttcttctttttctacaatcgagtctccttttacaggtccatattttgttacgctatcgaccggtggtctaactacgtctcctgtttctggattcttaattcctggtttacctggaacttcctctttctctcctgttggtaacttcggatcaaattcgtctcgatga

SEQ ID NO: 412779 - DNA, 468 bp, Staphylococcus aureus
atgccacaagcccatcgtgttgtgccaacaacaattaatatgggtaatcattcatggaaagcaatagaaattatttatgaaacatatgtacattatgtgattccagttaaacaagtaacaacagaaattcaacatttggttgaagcgtttgtgcgtgagcaacaatggagtcacaaatataaaacagtaggtatgatgctttttgatgaacaacgtcaatttttacagccattaatctatataccagaaattcaaagtttaatttgggaaaatagctgtggttctggtacagcatcaattggggtttttaataattatcaacgtaatgacgcatgcaaagattttacagtacatcagccagggggcagtattttagtgacatcaaagcgatgtcatcaattgggatatcaaacttcaattaaaggacaggttacaactgtagctacaggaaaagcatatatagaataa

SEQ ID NO: 412780 - DNA, 189 bp, Staphylococcus aureus; identical to SEQ ID NO: 407433

SEQ ID NO: 412781 - DNA, 189 bp, Staphylococcus aureus; identical to SEQ ID NO: 407433

SEQ ID NO: 412782 - DNA, 147 bp, Staphylococcus aureus; identical to SEQ ID NO: 407426

SEQ ID NO: 412783 - DNA, 975 bp, Staphylococcus aureus
atgagtaatactaaaattaaatatcaaatttttatttcatcaacttatttagatttaatagaagagcgtcaagcagtagtagaagcagttttaaacagtaataatattccagcaggtatggaactttttaactcaagtagtaaaagccaatgggaaataataacacaatggatcaatgaatcagatgcagtgatattattgttaggttctagttatggaacaattgatagtgaagaaaatattagctatacagaaatggagtacaattttgctaaatctttaggtaaacctatatatgtttttgagatgaataaagcatctaccgaatccgcggaaaagtctaaaaaattagatgagtttaagacaaaagttaaagaaaatagactaattagtccaaatattaatgatatttcggaattaaaaagtaaagtatctcagactttaatgcaaagtgtacctagtgaaattaaagaaaatagtggatggataagagtacaggattgtggtaaaaatgtaaaaaaattaaaaaaattggatgctatacaaagagatttagatacatatgattttttgaaagaagaactttataaaatattcatgtatgtaaaaactttttatttccagcacacaccatttgatgatagttatattgaagatatagaaaactacctgctaaattatgaaaataatccacataaatcattcatgaaaataaaagtttatgattataaaaactttttaaaacatttaaaaaacatattgattttaattaaacaaggaaaaaagccattagctcaagccggtcattttaaattaagcttttacgaagaggatttaaaattgttacaaaaaaattataaggctacgctagtcgatattaaaggattgaataaacatttttataaggaatgtgataggtgcttaaaagcatataatatttttattgagggtataaataaacatttatatgaatga

SEQ ID NO: 412784 - DNA, 501 bp, Staphylococcus aureus; identical to SEQ ID NO: 407671

SEQ ID NO: 412785 - DNA, 261 bp, Staphylococcus aureus
atgtttgatgagttaagagaaacttttaaaaaagaagggcttgaaccatggacatcatgcgaatttgactttacaagagacggtaaattgaatgtatcttttgattatattgattgggtgaatttagaatttggaccattagcaaaagaaaattactatatgtataaaaaatttggggttataccagaaatggaatatgaaattaataaagttaaagaaatcgagcaatatgttgaagagcaagatgaagctgaaatatag

SEQ ID NO: 412786 - DNA, 330 bp, Staphylococcus aureus
atgtctgaacatttatggcgtgtagaaatcgaacttaaaagagatatggtggattactggaatgattgctttagtgatttacatatcttgcaaccagattggaaaactatccaacgcactgcggatagagcaatagtttttatgttattgagtgatgaagaagaatggggaaagcttcacagaaattctagaacaaaatataagaatttgataaaagaaatttcgccagtcgatttaacggacttaatgaaatcgactttaaaagcgaacgaaaaacaattgcaaaaacaaatcgatttttggcaacatgaatttaaattttggaaatag

SEQ ID NO: 412787 - DNA, 252 bp, Staphylococcus aureus
atgaataatcgcgaacaaattgaacaatcagttataagtgctagtgcgtataacggtaatgacacagagggattactaaaagagattgaggacgtttataagaaagcgcaagcgtttgatgaaatacttgagggaatgacaaatgctattcaacattcagttaaagaaggtgttgaacttgatgaagcagtagggattatggcaggtcaagttgtctataaatatgaggaggaacaggaaaatgagcattag

SEQ ID NO: 412788 - DNA, 267 bp, Staphylococcus aureus
atggggaagcttattaaatatatttcaatacttcttattgtcgttttagtgttgagcgcttgcggaaaaagcagtaataaagatgaaggagtaaaagatgctactaaaacagaagcgtcaaaacataaaggtggtactctaaatgtagcgttaacagcaccgccaagtggtgtttattcttcgttattaaatagtacacatgcggatgctgtagttgaaggatattttaatgaaaacttattaacaattgttgatttgtcaatttaa

SEQ ID NO: 412789 - DNA, 501 bp, Staphylococcus aureus; identical to SEQ ID NO: 408346

SEQ ID NO: 412790 - DNA, 450 bp, Staphylococcus aureus; identical to SEQ ID NO: 411795

SEQ ID NO: 412791 - DNA, 195 bp, Staphylococcus aureus; identical to SEQ ID NO: 408775

SEQ ID NO: 412792 - DNA, 222 bp, Staphylococcus aureus
gtgccaattaagccaagtgatcgtttaaaagctcgtgatatgttgggtaaataccataagttatttacagataagcatgatattaacgggaatgtgcctatattcattaatattggtgaatgggatggcgatgatgaagatttagataagacggtacaagaggtatctaacgctaatcctaatcatactgtgattgtggatgatataccgttagaggattga

SEQ ID NO: 412793 - DNA, 1062 bp, Staphylococcus aureus
atgaccaaagaacaacaacttgcagaacgaattattgctgcagtaggtggtatggataatatagatagtgtcatgaactgtatgacacgtgtgcgtattaaagtattagatgaaaataaagtagatgaccaagaactaaggcacattgatggtgtcatgggtgttatacacgatgaacgcattcaagttgtagttggacctggtacagtcaataaagtggctaatcatatggctgagttaagtggtgttaaactaggtgacccaataccacacaatcacaatgatagtgaaaaaatggactataaatcatatgcagctgataaagcaaaggcaaataaagaagcacataaagcaaaacaaaagaatggtaagttgaataaagtattgaaatcaattgccaatatctttataccgttgattcctgcatttattggagctggattaattggtggtattgcagcagtactgagtaacttaatggtggcaggctatatttcaggtgcttggattacgcaacttataacagtatttaatgtcattaaagacggtatgttagcatacttagctattttcactggtattaatgcggctaaagaatttggtgcgacaccaggacttggtggcgtgattggtggtacaacgttattaacgggtattgctggtaaaaatattttaatgaatgttttcactggagaaccattgcaacctggacaaggtggaattattggtgttatttttgccgtttggattttaagtattgtcgaaaagagattgcataaaattgtgccaaatgcgattgatattattgtaacgccgactattgcattgttgattgtaggactattaactatctttatctttatgccattagcaggttttgtttcagacagtttagtttcagtagttaacggaattattagtattggtggcgtatttagtggatttatcattggtgcaagcttcctaccgttagttatgttagggcttcatcatatttttgcgccaattcatatgttgatttgtcaatttaagtgcaacagttcatcacataaaacttcataa

SEQ ID NO: 412794 - DNA, 417 bp, Staphylococcus aureus
gtgacgcaaacacaaccaaaatttttaacgatttataatacgttatataaagaaattcaaataggaaaatatccgagtggccatgcattacctactgaaaaggaactttgtgcgcgctttgatgtcagtcgtatgactttgcgccaagctataaaattgttagccgaagatggcatcgtagagagtacaagagggaagggacactttgttattccacaaacaaatgcccaacacgcttcaagtatggatcaatttaagcatccacttgatcaaatattattagatcgtgtatctatgtcatcaattaattatcgtgttgatttagaaagtgaatatacaaatcatttgtttgcaaaccatccttctgccgtcattgcaatggaacgctattatcaaaaaaaaggacaaccattctaa

SEQ ID NO: 412795 - DNA, 579 bp, Staphylococcus aureus
atgttacaagtaactgatgtgagtttacgttttggagatcgtaaactatttgaagatgtaaatattaaatttacagaaggtaattgttatggattaattggtgcgaatggtgcaggtaaatcaacattcttaaaaatattatctggtgaattagattctcaaacaggacatgtttcattaggtaaaaatgaacgtctagctgttttaaaacaggaccactatgcttatgaagatgaacgcgtgcttgatgttgtaattaaaggtcacgaacgtctttatgaggttatgaaagaaaaagatgaaatctatatgaagccagatttcagtgatgaagatggtatccgtgctgctgaacttgaaggtgaatttgcagaaatgaatggttggaatgctgaagctgatgcagctaaccttttatccggtttaggtatcgatccaactttacacgataaaaaaatggctgaattagaaaacaaccaaaaaattaaagtattattagcgcaaagtttattcggtgaaccagacgtactattactggatgagctaacggtctcgatattccagcaatcagttggttag

SEQ ID NO: 412796 - DNA, 435 bp, Staphylococcus aureus
ttgggcgcacatcaaaccatcaattcaaaagaagaaaatcttgagaaattcatcgaaaatcattacgccaatcaaatcgatatagctatagaatcatcaggtgctaaagttacgattggtcaaatattgacgctacctaaaaaaggtggcgaggtggtattactcggaataccatatgatgatattgagattgatcgcgttcattttgaaaaaattctgcgtaacgagttgacagtatgtggctcttggaactgtttgtccagtaattttccggggaaagagtggacggcaaccttacattatatgaagacgaaagatattaatgtaaagcctattatttctcattttttaccgttagaaaaaggcccggagacatttgataaattagttaacaagaaagaacgatttgataaagtcatgtttacgatttattag

SEQ ID NO: 412797 - DNA, 798 bp, Staphylococcus aureus
ttgtcggtgcgatttttgttattagttatttatattggtactgtaaaaaaaattaaaaaagatcctaaagcgtcatattcttatgaagacaaagatgcttttgaacagcaatggtctgtgttaaaagatgacgatagtgcccattttactttgcgtaagaagataatccttacattatttgtactaccatttccaattatggtatggggagttatgacgcaaggttggtggttcccagttatggcttcagcatttttaatatttacaattataataatgtttattgctgggacaggtaaatctggattgggagaaaaagggactgtagatgcatttgtcaatggtgcatcaagtttagtaggtgtatctttaattattggattagctcgaggtattaatttagtgttgaatgaaggtatgatttcagatacaatcttacacttttcatcatctttagttcaacatatgagtggaccattatttatcatcgtattactatttattttcttctgtttaggttttatcgtgccatcatcttctggattagcggtattatcaatgcctatctttgcaccactagctgatacagtaggtataccaaggttcgtcatcgttacgacatatcaatttggtcaatatgctatgttattcttagcgccgactggacttgttatggccacactacaaatgttaaacatgcgatattcacattggttccgatttgtatggccggtagttgcttttgtattgattttcggtggcggagtactaattacgcaagtactaatttattcataa

SEQ ID NO: 412798 - DNA, 786 bp, Staphylococcus aureus
gtgaaaaatgcaccgcaaacgttagaagaagttgaagctaatgctgccaaactaactgatagtaaaaagaaacaatacggtatgctatttgatgctaaaaatttctattttaattatccgtttttattcggcaatgatgattatattttcaagaaaaatggcagtgaatatgatattcatcagctaggactaaattcaaaacatgtcgtcaagaatgctgaacgattacaaaaatggtacgacaaagggtatcttcctaaggcagcaacacatgatgtcatgattggtctttttaaagaaggaaaagtaggacaatttgtcactggaccatggaacattaatgaatatcaagaaacgtttggtaaagatttaggagtaacaacattgcctacagatggtggcaaacctatgaaaccatttctcggtgtacgtggttggtatttatctgaatatagtaaacataagtattgggctaaagatttaatgttgtatatcactagtaaagatacattacaaaaatatacagatgaaatgagcgaaattactggacgtgttgacgtaaaatcatctaatccaaatttaaaagtgtttgaaaagcaagcacgtcatgctgaaccgatgcctaatattcctgaaatgcgacaagtttgggaaccgatgggcaatgcaagcatatttatctcaaatggtaagaatcctaaacaagcgttagatgaggcgacgaatgatataacgcaaaatattaagattcttcatccgtcacaaaatgataagaaaggagattag

SEQ ID NO: 412799 - DNA, 333 bp, Staphylococcus aureus
atgcttactcatttttatgccgatcatattgagcatcgacgctggggcgcaccattccctgtcattgaaattgtaaaacttggaattaataaagcaagaggcattgaacaagttagacaatttttaaatattgaacgaaataatattattgcattcggtgatgaagataatgatatagaaatgattgagtacgcgcgtcacggtgttgctatggaaaatggtttgcaagaacttaaagatgtagcgaacaatattacattcaacaataatgaagatggaattggtcgatatttaaatgatttctttaatttaaatattagatattactgttaa

SEQ ID NO: 412800 - DNA, 525 bp, Staphylococcus aureus
atgtctaaaattttaaaatatatcacgttagccgtggtaatgttattaatcgtaactgcatgtggccctaatcgttcgaaaaaagatattgataaagcattgaataaagataattctaaagacaagcctaaccaacttacgatgtgggtggatggcgacaagcaaatggcgttttataaaaaaattacggatcaatatactaaaaaaactggcataaaagtaaagcttgtaaatattggtcaaaatgatcaactagaaaatatttctctagacgctcctgctggaaaaggtccagatatctttttcttagcacatgataatactggaagtgcctatctacaaggcttagctgctgaaatcaaattatcaaaagatgagttgaaaggcttcaataagcaagcacttaaagcgatgaattatgacaataagcaattagcattgccagctatcgttgaaacaaccgcacttttttataagttgatttgtcaatttaagtgcaacagttcatcacataaaacttcataa

SEQ ID NO: 412801 - DNA, 438 bp, Staphylococcus aureus
atgattaaccaatctggtgctacttacttattgccaattgcagcgatggctggtgctggacaagtaggtgccgcattagcactttgggtaagatgtaaacgcaacacaacattacgtaatactttaaaaggtgcattgccagttggtttcctaggtattggagaaccattaatctatggtgtgactttgccattaggtcgacctttcttaactgcttgtattggcggtggtattggtggcgctgtaataggtggaattggacatattggtgccaaagcaataggcccaagtggtgtgtcactattaccattaatctcagataatatgtatttaggttatattgcaggattacttgctgcgtatgctggtggattcgtttgtacatatttatttggaacgacaaaggcgatgcgacagacagatttgttgggtgattaa

SEQ ID NO: 412802 - DNA, 1638 bp, Staphylococcus aureus
atggataaagaattatggatagaaagagctaatgatagtttagttaaacatttttatgagcagcaatctgacattgaacagcgagaaggttttgaaagtaaattaacgtttggtactgcgggtatacgcggaaaattcggtcttggtgaaggtcgacttaataagtttactattgaaaaattggcattaggtttagcgcgttatttaaatgcccaaacaaacaatccaacaatagtcattcattatgatattagacatctttcaactgaattcgcccaaattattgctaatgtattagcaaaccatcaaataacagtttatttacctgatacatataaaacgacaccggaattatcgttcgcggtgcgcaatcttaatactactgctggcattatgattacagcaagtcataatccgaaagactataacggcattaaagtatatggttctgatggcgcgcaactatcaacagatgcatcagaacttgtaagtcgctatattgaagacgttggcaatccattacagattgatatatctttttcaaaacacaattcatcatatatcaaaccattacctaaatctgtaacagaaaattacattaaacatgttcaaaatatgattggttatattcctaaatctgatttacaagttgtgttcactagtttgcatggtacaagtgttccgattgtacctaagttattaaaatctttgaatttcaatcaatttaatcttgtagaagcacaatgtaaacctgatccgaatttcagctcagttcaaagtgctaatcctgaagatcatcgcgcttttgatcaagcagtcgaacttgcaaataaaagtcatgcagacttattaatatcaactgaccctgatgcggatcgacttggtattgctgaacgtgatgcacatggtcatatcacgtattttaatggcaaccaaattggtgcgctgttacttaattatcgtattcaacaaacgtctcaattacgtcaccgcttaatgattcaatctattgtaagtagtgagttaacaaagtcattagcacgctataataatgttgaatacaaagaggtgctgacgggctttaaatttattgctcaggaaataagacaactggacgatcatcaaaatatgattttcgcctttgaagagagttacggttttctatcagaaccttttgtacgtgataaagatgccgtacaaattgtgccactcattataaaatacgcttctgagttaaaattatatggcaaaacattgaaagatgaattagaacagatttatcaaactgttggtagacatgaggatacattattctcgcatacgctagaaggattagaaggtaagaaaaaaattgaatcaattatgacacatttccgttcaaatccaccgcaagagattcaaggactgaaagtgaaagcaattgaagattatttaactagcgaggtttatcagttggataaagatacaacgtcgcagattaattctcctaaatcaaatgttattcgtgtcttatttgacgaaggatttatcgctttacgtccttctggtactgaacctaaaattaaattatatgtgtcgttaaaatgtccgaattttgatgatgtagctcaaaaaattaatgcgatgatttttagctaa

SEQ ID NO: 412803 - DNA, 327 bp, Staphylococcus aureus; identical to SEQ ID NO: 409291

SEQ ID NO: 412804 - DNA, 288 bp, Staphylococcus aureus; identical to SEQ ID NO: 404919

SEQ ID NO: 412805 - DNA, 171 bp, Staphylococcus aureus; identical to SEQ ID NO: 408472

SEQ ID NO: 412806 - DNA, 423 bp, Staphylococcus aureus
atgaccaaaaaacatgtttttataattattggtgttattttatgtatatgtatagttgctacagtcatttatttaaaagtgaaatatgacgaaaaagaaaagcaaaaagcaatttattataaagaacaacaagagcgtattacactttatctcaagcataacactaaagaaccgaatacgatcaaatctgtacacttcacaaagttggaaacaagtcctatgggaagtgcagtgattgaaggatacatcaatgaaaacaaaaaagctgattttgttgcatatgggtcactagaacatcattatcaatttggtggaagtttgatcaaaagtaaaaatttaagcacgttattaaaaccagcacatcaaaccaaaacacctgatgagataaaaaaggaattagagtctaaaaagaacgaccgctaa

SEQ ID NO: 412807 - DNA, 696 bp, Staphylococcus aureus
atgacagtattaacagataaagtagcagtagttacaggtgcaggtagtggtattggagaagcaattgcaactttgctacatgaagaaggtgcgaaagtcatcttagccggtagaaataaagataaactacaaaatgtggcgaatcaattagctcaagatagtgtgaaggtagtgccaacagatgtaacgaaaaaagaagaagtcgatgaattgataaaaattgcacaacaaacattcggtggtttggatattgttatcaatagtgcggggcaaatgttatcgtctaagattactgattatcaagtagatgagtgggatagtatgattgatgcgaatatcaaaggcactttatacacggcacaggctgcattaccaactatgttagaacaatcaagtggccatcttattaacattgcatctatttctggctttgaagtaacgaaaagcagtacgatttatagtgcgacgaaagcagcagttcacactattactcaaggattagaaaaagagttggcaaagacaggcgttaaagtaacaagcatttctccaggaatggtagatacagcaataactgccgcatacaatccaacagatcgtaaaaaacttgaaccacaagatattgcagaagcagtattatatgcattaacacaaccaaagcacgttaacgtgaatgaaattacagtgcgtcctgtataa

SEQ ID NO: 412808 - DNA, 282 bp, Staphylococcus aureus
gtgacatatcatgagcgtgtgttagcactgagagcagaaagtaaaagaactgcatttgattttagatttgaggatttatttagcaaagaagaatggctaagtatgtcgcttgcagaaagacaaaaagctgaaaaagcatttcgacacgaagttaaaaatatggacgatgtaagaatgcccttctcaagtgtccatgacgcccaagtaaaattatataatgttgtatattcttataacggcattaaacgtaattttaaacaagttgaaaatgaaggattctaa

SEQ ID NO: 412809 - DNA, 504 bp, Staphylococcus aureus
ttgtttaattatgctttgttattctttttatttctacgtaataatgctaaacctagaatgctgaataatcctccgaacaacatacctttgtttgttgattcttctccacctgtttcaggtagttcagatttcttagattgtttttgtttagttggtgccactgctttaaccttttcattgatttcaataacaggtgttactactttaccttgttccactggtttagaaggttttttaggttcttcttttgcgggtggtactggtttaccaggttcagctggtacctctggtgttggtggtactggtgtgcctggctcacttggtacttctggcgtcggtggtgttggtgtttctggctcacttggtacttccggtgtcggtggcgttggtgtttctggctcactcggtacttccggtgtcggtggcgttggtgtttccggctcacttggtacttctggcgtcggtggtgttggcggcgttgtatcttcttcaatcgtttgttga

SEQ ID NO: 412810 - DNA, 501 bp, Staphylococcus aureus; identical to SEQ ID NO: 405187

SEQ ID NO: 412811 - DNA, 846 bp, Staphylococcus aureus
atgaagcaactggttggaattcccgaatcaatgttaattcctttgatagctcgagcaaaagagtacgaaaacgaaaaaccaataataaaagacgcactatcaaaaaaaatatttgatggtttagatgatatgtacaaaaatgttacatgtgatgacatgtctcaaattggaattagtatacgtactgtgataatagattgtgttactaagaggcttatcaaggataataaagatttaatcgtggtcaatataggttgtggcttagatacaaggtttcaaagatttaataaagaaaaaatatcatggatagatttagatgtaccagaatcaatagaaatacgaaaaacattttttaaagaaagtaatagttataagatgatatctaaatctatgctagattacagttggattgatgatgtcaaaaattataaattttttaatagtaagtcagatatattgtttattattgaaggtgtattgatgtattttgatgagagtgtaatgactcaattattggacactattatcaaaaagatgggagatcataatttgacatttgcgattgaattttgctcaaaaacaattgcgaataatacaaagagacatcaatcggtatcaaagttatcctcacaacctgtttttaaatatggttataatgatttaaaaaaattgaatgaaattttaccaaatacaataagagtaatacatgaatataattattttgactattataagaatcgatggggcttatttggatattgtagatttataccttatttaaaaaaaaggttaaacaataaaatagtacttatgaaatataaagttccaaagagacagagacattaa

SEQ ID NO: 412812 - DNA, 153 bp, Staphylococcus aureus
atggaaattaaacaattaagatattttatcgaggtcgctaaaagagaacatatctccgaaacagcacttgaactaaacattgctcaatcagcgataagccgtcaaattacattattagaacaagaacttaatgtgtctttatttaaaaagtaa

SEQ ID NO: 412813 - DNA, 204 bp, Staphylococcus aureus
ttgaaacgatcaacgaatcaagaaaaatttcttgatacactaattagacttaatactaagattgaagaactaggaaagataaatattttaaataatcatatatattccgaatatttttttagagacctgttaaatattgtatatgggtattcacttgagaatcataataaaaaacaaaaaatgcaccagcatttgatcttatag

SEQ ID NO: 412814 - DNA, 861 bp, Staphylococcus aureus
atgggcaaggacttcatgtctaaaacaccaaaagcaatggcaacaaaagccaaaattgacaaatgggatctaattaaactaaagagcttctgcacagcaaaagaaactaccatcagagtgaacaggcaacctacaaaatgggagaaaattttcgcaacctactcatctgacaaagggctaatatccagaatctacaatgaactcaaacaaatttatgagaaaaaaacaaacaaccccatcaaaaagtgggcaaaggatatgaacagacacttctcaaaagaagacatttatgcggccaacaaacatatgaaaaaaagctcatcatcactggtcattagagaaatgcaaatcaaaaccacaatgagataccatctcacaccagttagaatggcaatcattaaaaagtcaggaaacaacagatgctggagaggatgtggagaaataggaacgcttttacactgttggtgggagtgtaaactagttcaaccattgtggaagacagtgtggcgattcctcaaggatctagaactagaaataccatttgacccagcaatcccattactgggtatatacccaaaggattataaatcatgctgctataaagacacatgcacacgtatgtttattgtggcactattcacaatagcaaagacttggaaccaacccaaatgtccaacaatgatagactggattaagaaaatgtggcacatatacaccatggaatactatgcagccataaaaaaggatgagttcatgtcctttgcagggacatggatggagctggaagccattatcctcagcaaactaacacaggaacagaaaaccaaacactgcatgttctcactcataagtgggagttga

SEQ ID NO: 412815 - DNA, 582 bp, Staphylococcus aureus
atgaatgcaattcaaaacagtatatcactaagaaagattttagtagtatctttaagtattttaaccatactttcaatggtcttggattttaatttcaaagaagctcaagcccaaaacaaaaataacattgcagataaaaacgttgaaactttaaacgaaaaagaaattgaaaaagaactaaaatacatatatggcaaaattattattttagataaagacggaacagctaaagatgttaatctagaaaatgccaaatctcgatatggatatgttcctgaaggattccaaaaactaaaaaacgacatagagaataaaaagaaaactagttcaatatcacctagagcagttggtgggaactacaaaaatagcggtgactgtttctattctgaagttttaaactcatatggagaacttttaactggaaacataatcacagcagtttttgaagatgttaaagccaaaaacttaaagggcgtagcaaaaaaattagctaaaattgggataaaaggaaacctagctggaatcgcagctactatggtttcgaaggatgtacaatgtaatcttaaatacgggttactttag

SEQ ID NO: 412816 - DNA, 189 bp, Staphylococcus aureus
atggaatcatctaatggaatggaatggaataatccatggactcgaatgcaatcatcatcgaatggaatcgaatggaatcatcgaatggactcgaatggaataatcattgaacggaatcgaatggaatcatcatcggatggaaatgaatggaatcatcatcgaatggaatcgaatagaattatggaatga

SEQ ID NO: 412817 - DNA, 291 bp, Staphylococcus aureus
atggactggaatggaatcattgaatggactcgaaagggatcattattgaatggaattgaatggaatcatcgaatggtctcgattggaatcattatcaaatggaatcgaatggaatcaccgaatagaatcgaatggaacaatcatcgaatggactcaaatggaattatcctccaatggaatcgaatggaattatcgaatgcaatcgaatggaattatcgaatgcaatcgaatagaatcatcgaatggactcgaatggaatcatggaatggaatggaatggaacagtcaatga

SEQ ID NO: 412818 - DNA, 1344 bp, Staphylococcus aureus; identical to SEQ ID NO: 410065

SEQ ID NO: 412819 - DNA, 1065 bp, Staphylococcus aureus; identical to SEQ ID NO: 410066

SEQ ID NO: 412820 - DNA, 243 bp, Staphylococcus aureus; identical to SEQ ID NO: 411711

SEQ ID NO: 412821 - DNA, 351 bp, Staphylococcus aureus
atgaaaaatgggtcagttattattgacattgctattgatcaaggtggtatttttgaaacaactgataaaattacgacacatgatgatcctacatatattaagcatggtgtggttcattatgcagttgcaaatatgcctggtgcagtaccgcgtacttcgacgttagcattaaataatgctacgctaccttatgcgctcatgctagctaataaagggtatagagaagcatttaaatcaaatcaaccattatcattaggtttaaatacttacaaaggtcacgtaaccaataaaggcgttgcagaggcatttgaaatggaatataaatctgtagaagaagcattacacttataa

SEQ ID NO: 412822 - DNA, 867 bp, Staphylococcus aureus
ttgaaaaaaataaaaaaggcaatcattcccgctgctggtttagggactagatttttaccagcaactaaagcgatgccaaaggaaatgcttcctatcttagataaacccacaatacaatatatcgttgaagaagctgcaagagctggaattgaagatattattatagtgacaggtcgccacaaacgcgcgattgaagatcattttgatagtcaaaaagaattagaaatggtgttaaaagaaaaaggtaaatctgaattactagaaaaagttcagtattcaacggaacttgcgaatattttttatgtaagacagaaagaacaaaagggtttggggcatgcgattagttctgcgcgtcaatttatcggcaatgaaccatttgcggtgttattaggtgacgatattgttgaatctgaagtaccagcagtgaaacagttgattgacgtttatgaagaaactgggcactcagttataggcgtccaagaagttccagaagcagatactcatcgttatggaattattgatccattaactaaaaacggacgtcagtatgaagtgaaaaagtttgtggaaaagccagcacaaggtacggcaccatcaaacctagctattatgggacgttatgtattaacgcctgaaattttcgattatttaaaaacgcaaaaagaaggcgcaggtaacgaaattcagttaacagatgcgattgaacgtatgaataatgataaccaagtgtatgcatatgacttcgaaggcgaacgttatgacgttggagaaaaattaggcttcgttaaaacaacgatagaatatgcattgaaagatgacagtatgcgagaagaattaacacgatttattaaagaattagggttataa

SEQ ID NO: 412823 - DNA, 153 bp, Staphylococcus aureus; identical to SEQ ID NO: 411673

SEQ ID NO: 412824 - DNA, 768 bp, Staphylococcus aureus
atgaaacgtttaaataaattagtgttaggtattagtttcttatttttagtcattagtatcactgctggttgtggcataggtaaagaagcggaaataaagaaaagttttgaaaaaacattgagtatgtatccgattaaaaatctagaggatttatacgataaagaaggctatcgtgatgatcaatttcataaaaacgataaaggcacatggattattaattctgaaatggttgttcaacctaaaggggaacgtatgaaatcaaaaggtatggttctatatatgaatagaaacactaagactacaaccgggaagtatatagtgagtgaaacacttcatgatgaagatggtagacctaagagtaaagataaagaatatcccgttaaaatggtcgacaataaaattataccaactaaagatatcaaagacgaaaaaataaaaaaagaaatcgaaaactttaagttttttgttcaatacggcgattttaaagatttgtcgaagtacaaagatggagatatttcatacaatccagaggtaccgagttattcagccaaatatcaattaactaatgatgattataatgtaaaacaattaagaaaaagatataatataccaacgaataaagcaccaaagttattgttgaaaggtacaggtaatttaaaaggctcatcagttggatataaagatattgaatttacttttgtggagaaaaaaggtgaaaatatatactttagtgatagtctacatcttgaaccgagtgaggataaataa

SEQ ID NO: 412825 - DNA, 1026 bp, Staphylococcus aureus
atgtattttattagattaaatttcccagataaagtaagtgttggagataaagctaaaagcgttattaagcaagcgactacaaaaaaagaggcagtaattaaacctaaaaaaattatgcttgtagccggtcatggttataacgatcctggagcagtaggaaacggaacaaacgaacgcgattttatacgtaaatatataacgcctaatatcgctaagtatttaagacatgcaggacatgaagttgcattatacggtggctcaagtcaatcacaagatatgtatcaagatactgcatacggtgttaatgtaggcaataaaaaagattatggcttatattgggttaaatcacaggggtatgacattgttctagaaatacatttagacgcagcaggagaaagcgcaagtggtgggcatgttattatctcaagtcaattcaatgcagatactattgataaaagtatacaagatgttattaaaaataacttaggacaaataagaggtgtgacacctcgtaatgatttactaaatgttaatgtatcagcagaaataaatataaattatcgtttatctgaattaggttttattactaataaaaatgatatggattggattaagaaaaactatgacttgtattctaaattaatagccggtgcgattcatggtaagcctataggtggtttggtagctggtaatgttaaaacatcagctaaaaaccaaaaaaatccaccagtgccagcaggttatacactcgataagaataatgtcccttataaaaaagaacaaggcaattacacagtagctaatgttaaaggtaataatgtaagagacggttattcaactaattcaagaattacaggggtattacccaacaacacaacaattacgtatgacggtgcatattgtattaatggttatagatggattacttatattgctaatagtggacaacgtcgttatatagcgacaggagaggtagacaaggcaggtaatagaataagtagttttggtaagtttagcacgatttag

SEQ ID NO: 412826 - DNA, 297 bp, Staphylococcus aureus
gtgccagcaggttatacacttgataagaataatgtgccttataaaaaagaggctggtaattacacagttgccaatgttaaaggtaataacgtaagggacggctattcaactaattcaagaattacaggtgtattacctaataacgcaacaatcaaatatgacggcgcatattgcatcaatggctatagatggattacttatattgctaatagtggacaacgtcgttatattgctacaggagaggtagacaaggcaggtaatagaataagcagttttggtaagtttagcacgatttag

SEQ ID NO: 412827 - DNA, 192 bp, Staphylococcus aureus
atgagtaataaagttcaacgttttatagaagcagaaagggagttaagtcagttaaagcactggttaaaaacaacacataagatttcaattgaagaatttgtagtattttttaaagtgtatgaagctgaaaagattagcggtaaagaattgagggatacattacattttgaaatgctatgggatacaagttaa

SEQ ID NO: 412828 - DNA, 531 bp, Staphylococcus aureus
atgagatttgattttaatgcgaaaaatggtgagatttctgacaataatatttatacaaatataattataggtactggagttggacattctaaagttatatttgataacgggaaagaaattaatttttctaatgcaacgccaattatcttcgcacaatatttgaaaattgaattgaaaaagagaaatataattgtagatattaataattattttaatagcactgttatttcatttgcgcatgataaaaaatatagatataaggatatgtatattgaaaaatacaatgaaattattaaagtgatgagtgaagaagatttaaatgaggcatcggttttagaagctaaagagttagccaagaaagacatgaattataattttaaaattagtgagtacagagctactatgaaattcatggaattatttagtgactatacattttcttttaaaaagttgatttctgatttatggatttttgatcaaaagaatttggaagtatttaaaaaatatatgctaattacgaaaattgtttga

SEQ ID NO: 412829 - DNA, 216 bp, Staphylococcus aureus; identical to SEQ ID NO: 405670

SEQ ID NO: 412830 - DNA, 261 bp, Staphylococcus aureus
atgcattatagtgatatatattcattatttaaaaggctaaaacataaaacatctataaatgttcacccccatttatttcgccatacacatgcaactgttttttataatgaaactaaggatattaaacaagttcaagaaagactcggtcatagtaatatacaaacgactattaatttatatgttcatcccactgaagaagatatacgtgaagattggaataaagttaagcatcaatttcaagtttttaataaaggggaataa

SEQ ID NO: 412831 - DNA, 648 bp, Staphylococcus aureus
atgatttcacacttgataacggatacttcgaagaagatacatcagatagcgactcagattcagatagcgattcagaatcagatagcgactcagactcagacagcgactcagattcagatagcgactcagattcagacagcgactcagattcagatagcgattcggactcagacagcgattcagattcggatagcgactcagactcagatagcgattcagattcagatagcgattcagactcagacagcgattcagattcagacagcgactcagactcagatagcgactcagattcggacagcgattcagactcagatagcgactcagactcagacagcgattcagactcagatagcgactcagactcagatagcgactcagattcagacagcgattcagattcagacagtgattcagattcagacagcgactcagattcagatagcgattcagactcagattcagatagcgattcagactcagactcagatagcgattcagattcagacagcgactcagattcggacagcgactcagactcagacagtgattcagattcagatagcgactcagactcagatagcgactcagattcagacagtgattcagactcagatgcaggtaagcacacacctgttaaaccaatga

SEQ ID NO: 412832 - DNA, 249 bp, Staphylococcus aureus
atgcctaaaaccgatagcgcatgtaaagaatacttaaaccaatttttcggatctaagagatatctgtatcaggataacgaacgagtggcacatatccatgtagtaaatggcgcttattactttcacgggcatattgttccaggttggcaaggcgtgaaaaagacatttgatacagcggaagagctcgaaatatatataaagcaacatggtttggaatatgaggaacagaagcaactaactttattttaa

SEQ ID NO: 412833 - DNA, 801 bp, Staphylococcus aureus
atggttaaggctattgcggtagatatggacgggacgtttttagattcgaaaaagacatacgataaaccaagatttgaagcgatttttactgaacttagaaatagagatattacatttattgctgcgagtggcaatcaatatgcgaagttgaagtctattttcggggatagagatatgtattttatttctgaaaatggtgcagttatttataaaggcaatgagttatataattataaaagctttaatcgtcaggtgtttcaacaggttgtcgattacttaaatatgaaccaaggtattgatcaactcgtcatctgtggtttgaaaagcgcgtatattttgaaacatacttctgaagcatttaaagaagatacgagattttattatcatcagttaaaagaaattgatagtctacaacaattacctgaggatgattatgtcaaaatagcatttaatattaatcgtgagacgcatccgaatgttgacgaagaagtagcaacgcaattcagcaatgatattaaacttgtctcaagtgggcacgatagtattgatattattatgccaaacatgactaaagggcaggcattaaaacgattgttagataaatgggaaatgtctccttcagagctcatggcctttggagatgcgaataatgataaagatatgctagcgttcgctaagcatagttatgtgatggaaaatagtcatgatgaagaattgttcaatattgcctctgctgtcgctccaagtaacgataagcaaggtgttttaacaattatcgaacaagaagtattgaacaagtag

SEQ ID NO: 412834 - DNA, 264 bp, Staphylococcus aureus; identical to SEQ ID NO: 406010

SEQ ID NO: 412835 - DNA, 354 bp, Staphylococcus aureus
atgaaaccattattaccaaaaagcataactatggatagaggtaaggagttcgctctatttgaacaaatagaagatgaattgaattgtagtatttattttagtgatttgggttgtccatatcaacgtggttccattgaaaatgtaaatggacttttaagacagtattatcctaaaggtacggattttgcaaatataacacaaaagtcattagatgaagctgttaaacaaattaatacacggcctcgaatgatatttgactataaatcgagtgaggaaatgctaaagtaccatgtaagcacacaaaattgtgaacctatattaaatgactgtgtgaggcacgaacccgtcaattaa

SEQ ID NO: 412836 - DNA, 504 bp, Staphylococcus aureus
atgaaaaaaagaaaaaaacgtaaagaattagattataaaacacgtctagctatcgcaaagtatttaaatgatggtttaaacatcattcagatttctaagattttaggtcgtgatgatgcggttctttatagagaagtaaataagcgttctgttgatggtgtttataatcctttattagctgaggaagatgctataaaatcgcgtagtatttcagatgaacaagttgctaaacgtagacgtttgaatgatgaaacaaaagcatatattgaagaaaaactttcattaaaatggtctcctagacagatagcaagtcaaattgaaaaagatacagggcattatataagttatcctactatatatagatatattcgcaatggattggtaaaagttgatgttaagcgtgatatgagacaagcaggcaaaaaatataataagtcttctgaaaagcgtggcaaattagacgtagggtctcgtgttataaagtatcggctcaaaaaatattaa

SEQ ID NO: 412837 - DNA, 216 bp, Staphylococcus aureus
ttggcaggtggtactggtttaccaggttcagctggtacctctggcgttggtggtgttggtgtttccggctcacttggtacctctggtgttggcggtgttggtgtttccggctcacttggtacttctggtgtcggtggtgttggtgtttccggctcacttggtacttctggtgttggtggtgttggcggcgttgtatattcttcaatcgtttgttga

SEQ ID NO: 412838 - DNA, 339 bp, Staphylococcus aureus
atgtggttgactacttttatgtttatatttgttatgggcggattatcttttactaaaacagttatatcaaaaatagtatcaagtagtctttctgaagaagaagttgcttctggaatgagtttgctaaatttcacaagttttttatcagagggaacaggtatagcaattgtaggaggtttattgtcactacaattgattaatcgtaaactagttctggaatttataaattattcttctggagtgtatagtaatattcttgtagccatggctatccttattattttatgttgtcttttgacgattattgtatttaaacgttctgaaaagcagtttgaatag

SEQ ID NO: 412839 - DNA, 150 bp, Staphylococcus aureus; identical to SEQ ID NO: 411733

SEQ ID NO: 412840 - DNA, 261 bp, Staphylococcus aureus
atgactaaatttcaatataaaaaaattattgatgatattattaataaaattaacaacggtattttatctcctggagataaattgtactcgcaaagaaaattagctaagtactataatgtaaataaatccacagttatacaagctttagatattctaaaaagctatggcatcttagatacaattgaaaaaaaggtatttatgtatcccagtataaatggaattcttatattaccaataatattcattggcaagattatatag

SEQ ID NO: 412841 - DNA, 522 bp, Staphylococcus aureus
atgaaggaaaaacgaactaacgtaaggtggatgttcgcgcttgcgttcttctttattggggttattgcgtatatggatagagcaaacatttcatatatcgctaagcaaatgatggatgatttagggatgacaaaaccacaatttggtttattggcatcattcttctctctaggttatgcattaatgcaagtaccatcggggatgttggctgaaaaattcggtccacgtaagatgattacaattgcattagtttggtggagtgcatttacaatcttaacgggtatgattaagaaccacggtttaatttatttagtgagattcttatttggtgtaggtgaggcgccaatgtacccttctaatgctgtgtttaactcattttggttctctaaaaatgaaaaaggtagagcatcaagtgcattattagcaggatcatatttcggacctgtattagcaccaatagttacaattgctattgttaacgcatttaactggcaagcagtattttatattttggtgcagtag

SEQ ID NO: 412842 - DNA, 432 bp, Staphylococcus aureus
atgatgacaaatattttatatcgcattgataagcagttgagtgattttacgaagacagaaaagataatcgctgattacattttaaagaatccacataaaatcattgatatgactgtgaatgatttagcagatgttacgaatgttagtacagcatcaattgttagatttagtcggaaaatgacacatcaaggttttcaagagctaaagattgcgatatctcgatacttacccgaagatattgcaaccaatccacatttagaattgattgaaaatgaatctgtagaaactttgaaaaataaaatgattgctagagcaacgaatacgatgcgatttgtagctactaatattatggatgcgcaaattgatgcaatttgtgatgtgttgaaaaatgcaggacaatatttttatttggatttggcgcatcgagtttga

SEQ ID NO: 412843 - DNA, 201 bp, Staphylococcus aureus
atgcaagaaataaaaagagtagtaaatccgcaacttcatagcattgaaacaggtaataatttacttaacaaagagcaaaagttattaaaagataacttaaacgcagaaattaaaaatactaaactttcatacgctgaaataaatgaagttctctacctaattgatagagaacaacattacttagctaatcatcgtcgctaa

SEQ ID NO: 412844 - DNA, 255 bp, Staphylococcus aureus
atgaaaaactactatcatcttttgtctttcgatgatgatttagctaatgaatctgctaataacctcctcaaagatggttgggagcttgttcacgttgggacaaaattgactcggattttggataacggacaagcttattacaatactgaatatgttcttggtggaactaaggaacagtatgaaaaatacattgctgattctgaaaaagctgacaaggatttatttagccaatttcaacttagcgacgatgattag

SEQ ID NO: 412845 - DNA, 363 bp, Staphylococcus aureus
atggatggagttacaagagaaatatttgacaatataaatatttttattattgaaaatttaagtgacgatttgaaaagagaaataaacaagcaaattgtatatatatgttatggaaataaaataaataaaacctacaaaatgtatagtgtaaattctactataaaagaacttttagaaagatatccaaatgatattgataaacagaaaggatttataggagaattgttagtgaatgttttagtaagaatatttctaaaaaatttttcaatagtttcacctttttttaataaagaagaaagagcttcagcaaaaaaggttttgatattatacttagagatagtgaaacttgtaatatgtggataa

SEQ ID NO: 412846 - DNA, 399 bp, Staphylococcus aureus
atgtggataatagaatcaaaagcgggtacagtaagtaaaagaagtgacataaacaagaaaattaaagaacgcctaagagttgctaaaaatgatttgagtagaagactatgtgaatcagataatactcaactttggaataacgcaattaatgatgttgaaatttgtatgaatgacagcaacgaaaaagacgcattcttagaaattcttcatgatagctatgaaaatggtaccacttctgataaaaatattattctagctgggacggtttttcataaaattgatgaaaaatttaattctgatgaaatattaaaatattatattaattgtaaaaacgaagatatttttaatgatattcaaataatagctattcaaaaaagcactttcaaaaaaaataattaa

SEQ ID NO: 412847 - DNA, 1449 bp, Staphylococcus aureus
ttgaataaatttttccttataaaaaataatcattatataaatgaagttgacgttattaaaaataatcactcaaataaaaatatagtctatttaaataaaccgaagctagtacaaaatttcgctttaaaattagcgaaaaacttagatgatatcaataataaagctattgatagagcaattgaagatttaaagaaatttgtgcataccgactatgatttaataaattgtttgaaaaaaggaatagtttatcatcatggatctgtaccagaaaatgttagaaaatatatagagtacttatataacgaagaaccagcaattaaatatatagttactacttcaacgttactagaaggtgttaatctacctgccacaagtttatttattttagagccgagaaaaggtaggaaaaaccttaatgctagtaattttaaaaatttagtaggtcgagtttgtagatttaatgaaatatttaacaacagtagtggtgatttagcgtatttattgcccaaaatacacattattaaaggagaatattgttcttctaagtttaacataagaaattttgcaaataatgtaatttatattgaaaaagaaagaaaagatatagttgaaaatcctttattaagaaataatcaaaacgagaataaagaattaaaagaaaaagctaatgagtttttgactaatataagtgataatagaatattgaaagggaaaattgctaaaacttttatcggaaaatccatgtttagaaataacattaaatcaataaatatattaaaatatgaatatgatatctcagaaaaaattgagcaaattaatgaaattgctaatattaatcagctattagaagtaattgatgatttatttattagatatattgaagaaaattctaattatgatatgttgaaaagacttaaatataaaaaagctagaaacttttattcaatgctttatgattggaggattaataaaaaccctttatataaaggtgtttattctatagtcagttattgggaaaaaaatgaagaaaatttagtttatgtaggtaaatggggagatgaaacaaggtatgggtataataaattttggacacgcataaacactaaatccaaggaacaactcataaatttagctatagttcgtttaaaagaagaatatgatttcattgataatgaattaattaaatatattgaagttttatttgagaataatgtactaagtacaggcttttatgaattattaaaatatggaacaaataaccaaaatgaaatattattaataaattttggtttttcattcgatttaattatattgttaagaaagtatgttaaatatattaattttaattataatgaaaaagaagttagtattaataagaatatattgaaaaagatgttaatcaataaagaaaatactatattgattaacgagttgaaaaactttgtataa

SEQ ID NO: 412848 - DNA, 390 bp, Staphylococcus aureus; identical to SEQ ID NO: 410768

SEQ ID NO: 412849 - DNA, 456 bp, Staphylococcus aureus
atgaaccaccaattaatacatttttaccagacagtacttaattggaaagataaaaatgatgacattgtgcatcaaattttaacagaaggcttagaaaaaggtatgaaaacatttggtgaaacattaaatatcgcaccaattgatgcaaaaatgatgtctcaacctgctgatactgaagaaggacgtatagaacagtacaaacgtacgatgttctggtcaaaatttgaaattagacaatatacgcattcagatattactttggatgatttcacaaaatacagcgataaaatcaccttactaaatgggacagattctagaggctccttcccacaagatgttaacttttatataaataaagaaactggcatacctattgtagatattccaggcggtcacttaggttatattcaaaaacctgaaggctttgctgatgtattattaaatatgtggggttaa

SEQ ID NO: 412850 - DNA, 546 bp, Staphylococcus aureus
atgacagagatttggaaagatgttataaattacgaaggttattatatggtttcgaatatgggcagagttaagtccttaaaaagagttgttaaacatggaggttctgtgacaagaacttacccgactgtgattttaaaaccaaataaagtagcatttgattattttcaagtcactttaaataaaaatagcataagaaaatcaagatacgttcacaatttggttatggaagcatttgtcggagagaagaagttaggttatgaagttaatcataaaaacgaagataaaagtgataatcgtctagaaaacctagaatatataacttctaaagaaaataataattatggaactagaatcgaaagatctattaaaaaatctacaaatggtaaaagaagtaagaaaatcaaaggaactcatataattactggagaagaagtttattttccatctattgctgaagcaaaaagacagggatatggtaatcatattagcgacgcaatacgtggtaaaagaaatcactgttataaatataaatgggaattcatttaa

SEQ ID NO: 412851 - DNA, 138 bp, Staphylococcus aureus
atgaatattgtattattgtcaggctccacagtaggttctaaaacgagaattgctatggatgatttaaaaaatgaactagaagtcatcaatgagggacaccaaatagcattgatggatttacgagatctcgaattataa

SEQ ID NO: 412852 - DNA, 642 bp, Staphylococcus aureus
atgaatatagaaattatcgcaaatcaatttgtaacaagagcaggcacgctattaaggtactacacgggattattagaacatagtaaagtgcaaccatgttgctttaagttatacaatgatccatttgatatggtttatgtgatgatgaatgggaagttattcggtcatgtatatattaaagattgtaaagtaaggcaatcatttgaattagcgtcacctaagcacactgaggggcttataagaagcatagaaggtcattatgtaggttatgaattacatgacggtaaacagctttctattagtgatatgatggccagtcaattatttgaagatgagtattttatgtatggattacaaacatatgcagaatcaaataatagtgatgtgtttgagtacctagaaaatggatttgatactgatacacttgagggcattcaatcgggtaatactgatgtgatagcgaatattgaaatgttgtatcagatagctacgggaatcaatgaaccagcaccagagttagttgagggattaaaattagtaactgagtttgtacaagatgagaaggctacacaagaggattacaaggctttagaacgtaagttaactgagttgaagtcatcttattacagtttgaataagtaa

SEQ ID NO: 412853 - DNA, 144 bp, Staphylococcus aureus
gtgtataagaaagcgcgagcgtttgatgaaattcgcgaagctattaatgcgcaatgggttgagtatccagaagactgggcgtcagaggttttgagagaagtaagagagcttgaatatgaggaggaacaggaaaatgaaaattaa

SEQ ID NO: 412854 - DNA, 267 bp, Staphylococcus aureus
atgaaaggtattaaaccaaattatgctgagcttggtcgacaatataattgcgatccaagaacagttaaaaaatattatgaagcaggaaaagaaaatgaattagaacgattgaagaaaagacaacaaaataagaaagcatcaaaactagatccatttaaagaaattattaataaaaaaattgaattaggatgtacagctatggccatttttaaatatatagagaaaaagagttatgaaggtaaatatactattctacgagaatactga

SEQ ID NO: 412855 - DNA, 525 bp, Staphylococcus aureus
atgaatgaattaagaacgacgaatcaacctttatataataagtttaaaagatatgcgaaattactattaaaacctgaagaagatttagaggcatttgaatatcgtaaagtagctttatttaaagaatggaagacacaaaagggtatcgcaaagtatttattaaatcaagatgactcgttaaatgacgcctaccaatatatcaatcagctacgattcaaacttaaacataatgattatgaaggctttatttacgaattaaaacatatgcgattatcccaaacgcattcagttgtccaacgagcaattgagacacttaacaaacatgtatactttataaaaaatacatttgattattacaatttgtcaaatggtcctttagaaggtataaataacaaaataaaattaattaaacgtacatcttttggttatggaaattacaatcatttgcgcaatcgaatattattatgttcaaaactttacgctccaaaaagtaaaaaggaagttaagcaatgtttagttgcctaa

SEQ ID NO: 412856 - DNA, 396 bp, Staphylococcus aureus; identical to SEQ ID NO: 412020

SEQ ID NO: 412857 - DNA, 882 bp, Staphylococcus aureus
atgcttatagatatcaataaggtaactgtcggcaaacgcataagaaaagattacggagatataacatcacttgctgatgatattgaagacaggggtttaattaatccgccggttgtcacgccggattatgaattaatagctggagaacgaagattaaaagctatgaagaaacttgattataggcaaatagaagtgaggattatgtccgtagaagattatgaacatcaactcaaaatagaaattagtgaaaatgaagagcgaaaagcttttacttattcagaaagaatggattacgcgaaacaattagaaagaattgaagctaaaaaagctaaagatagaaagacttctaagctaaaacaaaacaaagacaccgttacggaccaaggaccggaacggaaaggagaaactcgagatatcgtcggtaaggcttctggttttggcagtggacgaacatatgcaagagctaaatacatctatgaaaacgcagacgaagaaactataaaagaagttgatgaaggtaaaaaaagtattcgcaaagcgcatgatgaacttcgtgctaaagaaaagcaaaatgaggcaaataaagtgaaagtgacaacaaaagaaaaacctcaaacgacagtagtagatcgaagagaacggatgaacgcagaagttgaagctatgagtgaaacagaaacaaatttagctttgtctgaagctgcagctgcaaacatagtaaatgtctgttctaacttattatacgcggtaaacaacattgaagatttagagttaactttgaatttcttgaaatcaagagatgctgaagaattatcaaaagttctcaaggcttctaaagctttaaacaaaattatagaaaaaggagattttataaatgtataa

SEQ ID NO: 412858 - DNA, 768 bp, Staphylococcus aureus
atgtataaccagcaattaccagttcacagattacagacagatatgagttatcaatcaccggtgcaagaaagacaagtaagaaagatagttaataaatttgattcaaaaaaattacacacaattgtagttagtaaaagaaaagatgggtcattttatatcatcgatggtcaacatagggtggaagcgttgaaagaattgaatatttcatttatagaagcgacagtgcacgaaaacttaactattgaagaagaagctgagatgtattacggagttaatgatagaccttcgaaaaacgcaaactctaaaggtaaatcgcgacttagatttaaagagccggtagctgtagctatagatgaaacggtaaaaagtgtcgggttggaaattgattatgaaaaaagcgcatcaacaaaaggatatatcaaagcttatgatgcgttgcaatcaatatacaaaggaaatggtgctaaccatttaggtttagttttggaaataattaaagattcttttggagaggatacaaggaattatcaatcatttattttaagaggattctctaaattattgaaagtatacctgcatgaagtggatttaaattttttggttaaaaaacttcagaacattggttacgaaggttttattttagagattaataagaaacatgctggatttaaaacaaaaaaagaatgcctaccatttgtagtagtagacatttacaacaaaaatcgtcgccaaaaaaatcaattggacaaaatgaaattacatgtttaa

SEQ ID NO: 412859 - DNA, 672 bp, Staphylococcus aureus
atgcaatacattacaagataccagaaagacaatgacggtacttattccgtcgttgctactggtgttgaacttgaacaaagtcacattgacttactagaaaacggatatccactaaaagcagaagtagaggttccggacaataaaaaactatctatagaacaacgcaaaaaaatattcgcaatgtgtagagatatagaacttcactggggcgaaccagtagaatcaactagaaaattattacaaacagaattggaaattatgaaaggttatgaagaaatcagtctgcgcgactgttctatgaaagttgcaagggagttaatagaactgattatagcgtttatgtttcatcatcaaatacctatgagtgtagaaacgagtaagttgttaagcgaagataaagcgttattatattgggctacaatcaaccgcaactgtgtaatatgcggaaagcctcacgcagacctggcacattatgaagcagtcggcagaggcatgaacagaaacaagatgaatcactatgacaaacatgtattagcgttatgtcgcgaacatcacaaccagcaacatgcgatgggcgttaagtcgtttgatgataaatatcacttgcatgactcgtggctaaaagttgatggaagattaaacaaaatgttgaaaggagagaaaaatgaatga

SEQ ID NO: 412860 - DNA, 762 bp, Staphylococcus aureus
atgactgaccaaccaagttactactcaataattacagcaaatgtcagatacgataaccgacttactgacagcgaaaagttactttttgcagaaataacatctttaagtaacaaatacggatactgcacagcaagtaatggttactttgcaactttatataacgttgttaaggaaactatatctcgtagaatttcgaaccttaccaactttggttatctaaaaatcgaaattatcaaagaaggtaatgaagttaaacaaaggaagatgtaccccttgacgcaaacgtcaatacctattgacgcaaaaatcaatacccctattgataattctgtcaatacccctattgacgcaaatgtcaaagagaatattacaagtattaataatacaagtaataacaatataaatagaatagatatattgtcgggcaacccgacacgcatcccatataaagagattattgattatctaaacgaaaagactggcaagaagtttagtcataaatctaaagctaatcaaaaactgatacaagctagatttaatgaagataattcaaaagaagatttctttacagtaattgataacatgactgctcaatggaaaggtaatccgaaaatggatgagtatttgcgtcctaaaacgttatttagtggaaactttgataattataaaaaccaaacagcgaaaattaataacgaatctaatcaatatgtagatgcattccagcgtgcatcgcaatcaagtatagaaaatttaccgttttaa

SEQ ID NO: 412861 - DNA, 186 bp, Staphylococcus aureus
atgcaacaacaagcatatataaatgcaacgattgatataagaatacctacagaagttgaatataagcattttggtgatgtggataaagaaaaagaaacgctggcagattacttatataacaatcctaacgaaatactagagtatgacaatttaaaaattagaaatgtatatatagaggtggaataa

SEQ ID NO: 412862 - DNA, 186 bp, Staphylococcus aureus
atgacggaggttaaaattaaaactatttcaggtgaagtttattttgcgaaaataagaagaccttttgaagattacgttaaaggcgcgatgagttgtaacggttacatttatgcggaaaatttaatcaaacaggtatcatgtgttaaagcgaatgcaattgaagcaatcacacttattgaggagtag

SEQ ID NO: 412863 - DNA, 495 bp, Staphylococcus aureus
atgaacaaattaactaaaaagcaacgtttgtttgcagaagtatatacaatacccggcactgaatgttatggcaatgctactaagtcagctgtgcatgctggatatagcgaaaagacggcgtactcacaaggacagcgtatgttgaagaatgttgaaatacaaaattatatcaaggaggttgaaacgaaactctttgatgagaatatcatgtcgggtaaagaagtgttgtacagactaactagaacggctagaggagaacactcagaagttgaagctatcgtaacaaaaacaggagactacaaagagaatccagacactggcaaaatgcaattagtatacgatgaacatatacaccttgtttctaagtcgcctaaaatcagtgaccaaaaccgagccttagagatgttaggtagacatcataaattatttacagacaaacaagaggtcgactacaaaataccgatgtttgtcgataatattccggaagatgattag

SEQ ID NO: 412864 - DNA, 1290 bp, Staphylococcus aureus
atgtatgaaatacttgatctaaaaaataaaatcggtggtggctacaataagttttggcacaataaaagtttttaccgtgttgtaaaaggttctaggggtagcaagaaaagtaaaactacagctattaattatatttatagaataatgaaatatgattgggcaaatatacttgtggtcagaagattcagtaatactaacaaacaatcaacatatacagatttaaagtgggcaactaatcaattaggcgttgctcacttatttaaattcaatgaaagtttgccggagataacatataaacctaccggacaaaagatactgtttagaggtttagacgatccattgaaaataacatcaattactgttgatactggcattttgtgttgggcttggtttgaagaggcttatcaaatagaaacattcgataagtttagtaccgttgttgagtcaatacgtggtagctacgatagtccggaatttttcaagcaaatcacagttacttttaacccgtggtcggaaagacattggttgaaacctacgttttttgatgaagaaacaaaactaaataatactttttcagatacaacaacttatagagttaatgaatggctagacaaagtcgatattgaacgatatgaagatttgtatgtaaagaatcctagacgtgcaagaatcgtttgtgatggagattggggcgttgcagaggggcttgtattcgataactttaaagtcactgatttcgattggcgagagaagtttaagcgaacacaagaaattgcgcatggtatggattttggttttacatttgaccctaccactctaattaacactgtagttgatttaaaaaataaagagttgtggatatacgacgaacattcagaaaaagccatgttgacagatgacattataaatatgattaaacgtaaaggttatcaagatgcacatatagttgcggatagcgctgaaaaaaggttgataactgaaataagtagaaaaggtgtacctaatatcaaaccgtcagtaaaaggtgcgaatactataatgcagggtgtccaatttattcaaggctttaaagtgtacgtacaccctagttgcgtacatactatcgaagaattaaacacatatacttttgaccaagacagtgaaggcaattggattaacaaacctatagataaaaacaatcatttaatggatgcacttagatatagtcttgaaaaataccatattaaattaaaaaaacgcaagaagaatacagaaagcaaaacaaaagtaatcaaatctctaggattatag

SEQ ID NO: 412865 - DNA, 504 bp, Staphylococcus aureus
atgaatgatttaacagtagatcaattaaaagaacttttacaaatacaaaaggaattcgatagtagaatacctacacttaatttacaggatagcgagattgcatatgtagttgaattctttgaatggtttaatacattggaaacgtttaagaactggaagaagaagccaggtaagccgttagatgttcagttagatgaattagctgacatgttagcgttcggattaagtattgcgaaccagtcaggtgtaagtttaaagacattagaaaaattaatccctagtactttaggaaaagtatattttaatacgtcgtcaattatgaaagattttatggaagattttgtttacttcgggttaggcgaagaggactctttatcattacctcttaacattgcttacaacttatactctatcgaccaactcattgacgcatacaaaaagaaaatgaaaaggaaccacgaaagacaagatggaacagcagacgcaggaaaaggatacgtgtaa

SEQ ID NO: 412866 - DNA, 186 bp, Staphylococcus aureus
atgcaacaacaagcatatataaatgcaacgattgatataagaatacctaccgaagttgaatatcagcattttgatgatgtggatgatgaaaaagatgcactggcagattacttatataacaatccggacgaaatactagagtatgacagcataacaataagacacgcatatatagaggtggaataa

SEQ ID NO: 412867 - DNA, 342 bp, Staphylococcus aureus
atgaaattagctgaagctataaaagaacagagagaattaaaaggatggtctcaagaggaattagccaatatattaaaggtttccagacaaagtgtttctaaatgggaaagtgccaaaaactatccttccttagatattttgattgctatgagcgatttattcggaatctctttagagcatttaattaaaggagatgcacgttttaaaaaagttattttagagggaaattatagagagagtaacagggcaccttccatagttgattttctttatgatttttggtggcttttctttcctgttgccggatttttagtttgggccattcattcgttcatgggttga

SEQ ID NO: 412868 - DNA, 501 bp, Staphylococcus aureus
atgactttcgaagaaaaacaaagtgaaatgtacaataaaattgcaaatgagattagtggaatgataccggttgagtgggaaaaggtatatacaattgcttatgtagataatcaaggtggagaggtcatttttaattatactaaacctggaagtgaagaattgaattattattcagatattcctaaagatttcaatgtctcaaatgatatttttatggatttatggatgaaagtttatcggatgtttgatgagttaagagaaacttttaaaaaagaaaggtttgaaccatggacatcatgtgaatttgattttacaagagatggtaatttgaatgtatcttttgattatatagattggttaaatacagaatttgatcaattgagtcttgaaaattattatatgtacaaaaaatttggggttataccagaaatggaatatgaaatggaagaaattaaagaaatcgaacaatatattaaagagcaagaagaagctgaacaatag

SEQ ID NO: 412869 - DNA, 156 bp, Staphylococcus aureus
atgagtgctactaaagaccatgacaataaagcgaaagcattaccagaaacaggtaatgaaaatagcggctcaaataacgcaacgttatttggcggattattcgcagcattaggatcattattgttattcggtcgtcgtaaaaaacaaaataaataa

SEQ ID NO: 412870 - DNA, 492 bp, Staphylococcus aureus; identical to SEQ ID NO: 409368

SEQ ID NO: 412871 - DNA, 180 bp, Staphylococcus aureus
atgttaagttatggtggattgcttaaacaaaaacataaaattttaaacttagacgatgtcgaagatggtaatttgattaatgcaagtgatgaagataaaacaacagacgaagaagaaaaagcacattcaattaccgcaatttggaatttcgaaaagcaaaattattatttaagacattag

SEQ ID NO: 412872 - DNA, 135 bp, Staphylococcus aureus
atgaaatcaaaatcatgtaaatattttattttagggaaacgtgctgaattcacagcacgtttaaattttaattctgattggtattctatttctttttccgttaaatcaatcaatatttcagttaaagatttctaa

SEQ ID NO: 412873 - DNA, 351 bp, Staphylococcus aureus
atggctaaattaaaacgcaacattattcaattaatcgaagaccctaaagcaacagaaattaaactgcaaacttttttaacacctcatttcattccgttttcaatggtatacgaatctattgatttaattgacgacattgaaaatgaagaagtaaaaatgaaacctaaagaaatggctgataaattaatggatatggttgttagaatttatggcaatcaatttactatacaagatttaaaagaacgtttacatgcgcctgatggtatgcgagcacttcaagaacaagtggtgtttattactcaaggacaacaaactgaggaaacgcgaaattttatccagaacatgaaataa

SEQ ID NO: 412874 - DNA, 285 bp, Staphylococcus aureus
atgaatattgtaatgtggaaaactggatcaattaaattagataacgtagttttaaagttaatagtattgaaaaaaattaatattatgaatatgggagaaaaaaatatatataagtgggtggcaacgaaaaatagcaaaaaaagagcttctcctataaaggaaagctcaaagtttttgatgacatatgtactagaattaagtttcaagacaatatgtatcatcgtgtttatattaaatatggatgtagttgtagttacctgcttcacttgcagaaatagttcttga

SEQ ID NO: 412875 - DNA, 390 bp, Staphylococcus aureus; identical to SEQ ID NO: 408699

SEQ ID NO: 412876 - DNA, 912 bp, Staphylococcus aureus
gtgtcagctactacagtttctcgtatcattgatgaagccgctcaatcgcttcatcaatcgccgtattctgcatttcctgaacatatcatgatggatgaatttaaaagtgttaaaaatgtttctgggaaaatgagttttatatacgctgatgcacaaacgcatcatattattgatattgttgaagatcgtagattaagtgagttgaaaaagtatttttatcgtttttcacttaaagctagaaaacgtgtgaaaacagtttcgattgatatgcatgaaggctacatgacattgattaaagagatgtttccgaacgctaaaatagtcatcgatcgattccatattgttcaattattaaatcgtgccttaaatggtattcgagtcgctgttatgaatgaattaagaacgacgaatcaacctttatataataagtttaaaagatatgcgaaattactattaaaacctggagaagatttaggggcatttgaatatcgtaaagtagctttatttaaggaatggaagacacaaaagggtatcgtcaagtatttattagatcaagatgactcgttaaatgacgcctaccaatatatcaatcagctacgattcaaacttaaacataatgattatgaaggctttattcacgaattaaaacatataccattatcccaaacgcattcagttgtccaacgagcaattaaaacacttaacaaacatgcatactttataaaaaatacatttgattattacaatttatcaaatggtcctttagaaggtataaataacaaaataaaattaattaaacgtacatcttttggttatggaagttacaatcatttgcgcaatcgaatattattatgttcaaaactttacgctccaaaaagtaaaaaggaagttaagcaatgttcagttgcctaa

SEQ ID NO: 412877 - DNA, 516 bp, Staphylococcus aureus
atgaatgaattaagaacgacgaatcaacctttatataataagtttaaaagatatgcgaaattactattaaaacctggagaagatttaggggcatttgaatatcgtaaagtagctttatttaaggaatggaagacacaaaagggtatcgtcaagtatttattagatcaagatgactcgttaaatgacgcctaccaatatatcaatcagctacgattcaaacttaaacataatgattatgaaggctttattcacgaattaaaacatatgccattatcccaaacgcatttagttgtccaacgagcaattaagacacttaacaaacatgcatactttataaaaaatacatttgattattacaatttatcaaatggtcctttagaaggtataaataacaaaataaaattaattaaacgtacatcttttagttatggaaattacaatcatttgcgcaatcgaatattattatgttcaaaactttacgctccaaaaagtaaaaggaagttaagcaatgtttag

SEQ ID NO: 412878 - DNA, 303 bp, Staphylococcus aureus; identical to SEQ ID NO: 409298

SEQ ID NO: 412879 - DNA, 711 bp, Staphylococcus aureus
atggcttatttcaatcaacatcaatcaatgatatcgaaaaggtatttaacattcttttcaaaatcaaagaaaaagaaaccgtttagtgcgggacaacttattggactaatattaggtccattacttttcctattaacattattgttctttcatccacaagacttaccttggaaaggcgtatatgtcttagcgattactttatggattgcgacttggtggattactgaagcaattcctattgcagcaacgagcttattaccaattgtgttattaccattaggtcacatacttacaccagaacaagtatcatccgaatatggtaatgatattatctttttgtttttaggtggatttattttggcaattgcaatggaaagatggaatttacatacgagagtagctttgactattattaatttaattggtgcaagcacttcaaaaatattacttggattcatggtggcaacaggattcttatctatgtttgtatcgaacactgcagctgtaatgatcatgattccgattggtttagcaattattaaggaagcacatgatttacaagaagccaatacgaatcaaacaagtattcaaaagtttgaaaaatctctagttttagcaattggctatgcaggtacgattggtggcttgggtacattcatagttattccgaacttccaattaataaaactctatacccgtaatcttcaatga

SEQ ID NO: 412880 - DNA, 933 bp, Staphylococcus aureus; identical to SEQ ID NO: 411018

SEQ ID NO: 412881 - DNA, 315 bp, Staphylococcus aureus
atgtcagataaagacttgatggaaaaagttgacaagagaaggaaagaaaaagatttaacggtgagagaaataggatatttgctaggtttctctgatacttattttattaagttaagaaatggttcaagaagaattaccgatcggaagagagatagaattaatcgttatttaaacggtgaatacgacaatgtaaaaattcctaaatattcaagagattctgaacaagtagcatatgacaagggatataaacaagctttaaaagatttagaagaatttgtaaataataaaaaaactgctacttgcgacaacaagtaa

SEQ ID NO: 412882 - DNA, 1791 bp, Staphylococcus aureus
ttggacggatcaaccaaatcatttaaccctgtacctttaaacgaaaaaaacgaagaaaattatgagttaattccgactgttttcgcagaatttgaaatcgacggaaaaattacgacttttaaaaaagagtcacatcctaaatacacaataaatcaaaaaacgaatcgcaaggaatactcacgaagtcgaacgaagaaacaatatatcaatgatgaatcaataaaagtaaaggattataaagctcgtattgatgaactgattgatgaagatgtattcaagttaattacgaaccctcaagcatttaacttactagattggaagaagcgaagaagtttgttgtttgaaattgctaaaccaatcaatgatgaggatgtcattaaaacaaatgatgattttaaagaattaaataatattcttggagatcatgaaattgaaacaaagaaaaagattcttacggacaagataaaacagattaacaaagatatcaaagatattccgatacgtattaaccaaacacaacaaaataagcaggatgtacctgaattcgataatgatagatacgcaattatcaaacaagaaattgagcaacttgaaaatgagcgtatagatattcaaaacggtgcagaagaaattaatttgcgtaaccaattagctgataaacaatcagaattgcagcgcatagaagctaataatagcgcaagtaatgataacaaaatacatgctttaacaaatgagttacacgttgaaaatggaacggttgcgaaccttaaaacaagattaaagcaaaacaaacaacaaatcacgcatgaagaaaatagacgtaatcaattattagaaaatcataaaggattaaaaagtgatttagaaaaagctaaaaatcaaaaatttgaatatcttgatgacaatgtatgtagttgttgtggtcaacagttaccagctgaacaagtgaatgaggcaagagaaaaagcattgcagaaattcaatgctagcaaatcgaaagaattagaaacaatacaaacatctatcaatcacattatttcagagggcaagaaaataaagccaattatcgagaaattagaggatgacaacaataatctacaaattaaaatcaacgaagcagaagagcgttcagcaagaatacaaaacaaaattaataagttgaaaacaactcacgttgacgttacgcaaactgacgaatacaaagcagtaatgttagagataaatgagattaatcaaaaacgctctaacatcaggaaaactattcaagataaagtttcaggaatagatgacaaaataagcgaacttactcaagaaaaatcagaaattgaagtgtcaatatcaatcgaaaaatcaaataaacatctagatgatgttatttctgaattaagaaatgaagaagacagattattggatgaaaaagaaaagtattcacatgacctttatatcttaaaagaatttacaacaacaaaagtcaaaatgcttactgaaaacatcaataacgaatttgatattgctgaatttaagttattcaataccttagttaacggcgaattagaagaaacatgttccacaacggttaacggcgtcgaatacgacagcggtttaaataacgcctcaagaattaatgttggcttagatatcattaatacactgtcaaaacattttaaagttacagcgccaatatttattgataatgctgaatcagtaacagagcttatcaaaacagaatcacaacaaattcaattgatagtaaatgaacaagataaaaaattaagaatggagactatataa

SEQ ID NO: 412883 - DNA, 831 bp, Staphylococcus aureus
atgactaaaaaaaacaaaagcattttaatatcaaagttattattttttacagaaaacaataaattaattgaagaaaatttaagaattgcagatctgttttatgaacatgatatagcattggggattttagctcgatctacaacaataaatatattacgctccaaaattccaacagattatcaagagaaaataaattttttgagtagagatgataaaaataaaaaagattacataaagcaaaacaaagatttaattattgctgtaataggagtagttaatgaagatgctatatactcttttaactgtagattaccgttatttaatccagaaaaattaattagtaaagaattggatatatctgaaaaagtaaaacaatatggtttgcctatcaataagttcgaaaatgttattgattgtttaaaggcatatgaaattcatcaagaaaattattttaatataccatttaatcaaaaatttagtgtaataagtttgaataatgcaaatacatatcaaagtccgaaggatgaagaaaggataaagaatattttttctgcaaatttaaaaggtagcgtatctgagagggatcaagaaattttattaattttactttttcatttgattaacgaggtaagaacaaatagttattatgatagtgttaagtattggggtacatttccttcttctgatcccgaaaataaaaatacatctatttcatttttaaaggaatgcgttaggaaaattcttaatggtttgccaaaaaagggatcagaattgctaatcagacaaaaagaaatgcaatcaaaacatactactagaagtacatgtcaatag

SEQ ID NO: 412884 - DNA, 687 bp, Staphylococcus aureus
ttgttagccaatgattactataaatatagagaattcaaatattatttatttaacaaggatgaatttttcagagatagtaaaagtaaaatatattttaaatttgatgaaactaacataactaagctattaccagaaaaaataatgcctctctttatgtatacaaaagggaataattcacttttagatattaaaaaacaaagggtagctataataggtactcgtcatccttcaaatagagcaataaaaataacgaaaaaaataactcaaaaattcttggaagataactatgtaattgttagtggtttagcagaaggtattgatactatatcccataaaactgctattaaatataatggtaatacaattgcaatattaccaacaaatttcaaaaatatttatcctaaagaaaatatagagttagcaaaagaaatattggacaaaggattattgctcacatctattggaccaaatgaaaatacttataaatctagttttttagatagaaataaatatatagcaaatattagcgatatagtggtagtaactgaaacgaatttaaaaagtggaactatgaatacaatcagaagtgcgagtatagcagggaaaaagatcttgttcgtaaatcaaggagataatctaattaataacaaaatttatgaatttggtggggaaatgatagatgactaa

SEQ ID NO: 412885 - DNA, 243 bp, Staphylococcus aureus
atgacaggtagcgcacacaaagaatacctaaatcaattctttggatctaagagatatctgtatcaggataacgaacgagtggcacatatccatgtagtaaacggcacttattactttcacggacatatcgtaccaggttggcaaggtgtgaaaaagacatttgatacagcggaagagcttgaaacatatataaagcaacatggtttggaatacgaggagcagaagcaactaactttattttag

SEQ ID NO: 412886 - DNA, 243 bp, Staphylococcus aureus; identical to SEQ ID NO: 409872

SEQ ID NO: 412887 - DNA, 534 bp, Staphylococcus aureus; identical to SEQ ID NO: 407413

SEQ ID NO: 412888 - DNA, 171 bp, Staphylococcus aureus; identical to SEQ ID NO: 407414

SEQ ID NO: 412889 - DNA, 390 bp, Staphylococcus aureus
atgatgattaaaaaacttaaaaatatggattggttcgatatctttattgctggaatactgcgattattcggcgtaatcgcactgatgcttgttgtcatatcgcctatctatacagtggctagttaccaaaacaaagaagtacatcaagggacaattacagataaatataacaagagacaagataaagaagacaagttctatattgtattagacaacaaacaagtcattgaaaactccgacttattattcaaaaagaaatttgatagcgcagacatacaagctaggttaaaagtaggcgacaaagtagaagttaagacgattggatatagaatacactttttaaatttatatccggtcttatacgaagtaaagaaggtagataaacaatga

SEQ ID NO: 412890 - DNA, 237 bp, Staphylococcus aureus; identical to SEQ ID NO: 409858

SEQ ID NO: 412891 - DNA, 147 bp, Staphylococcus aureus
atgtgctttaatggcattgtgtatgagtcttttttgattaaagttgattttgccgtatgtattagattacgtaaaaaaaatcggacagctgaaaaatctttaagatttctcagttgcccgattttaaatatagctattagaatttag

SEQ ID NO: 412892 - DNA, 141 bp, Staphylococcus aureus
gtgttatattggcggatccccaacacagaagctggcgaaaatacagcttacaataatgtgcaagttggcgggggccccaacacagaagctggcgaaaagtcagcttacaataatgtgcaagttggggcaggacagaaataa

SEQ ID NO: 412893 - DNA, 324 bp, Staphylococcus aureus
atgagggaactaatccgaaaattatttgatagtgatttgagtagtttgcatatatctaagcaaacaggagtgccacaaagcacaatacacagaatgagaaaaaatgaacgatcattagacaatatgtcattgaaaaatgctgagctactctataacttcgctattgatatttttaatgacgaagataacaaaaggcaaagcctattaattaagagggcaagcattataggtatgttgcaaaatttagaactcacttcggaagaacgccatgagctcgaaaatgaattgaacgatattgaactgaaacttaaaaagaatgaataa

SEQ ID NO: 412894 - DNA, 2013 bp, Staphylococcus aureus
atgtacaaaataaaagacattgaaacgcgaataaataacaaaactgttgatatcggcgacataggttgtcgcttctacacagaagacgaaaacacagcttatgtcagaatcggaatcaacgacgaaaaaggcagaatcaacttcgaagaaagcaatttgacacctaagttacatctattcttggaagacggttctatattcaaaaatgaacctgttttaatcgacgataatgtaaaagggttccttacctacaagatacctaaaaacgtcattaaacacgtcggtatggtgcgttgtaagttgtttctggagaacgaccacgaaagaatacacgtcgcaaactttcatttctacattatcgatagtggtatagacgaagcagtgcaaaaagaggtgtctatcacattagttgaggacactgtaaaaagaattatccgtacaagcgctagcgagttactaggagacgacttcaaagaaacgttaaacacaactgctaagcaatacattgctgacaatgcagacaagtttaagggcgagcgtggagaacgtggggaaaaaggagaagcgggcgaacgaggtgcgcaagggattgcgggaaccagcgctgatataactgatgcaattggtaatttctctaatttgaaagacattgttaatttacctttacaaccaaattttgttgaagaggttaacaagttatctacaactaaaggagatatgacagtaagcgtagtgcatgcaccatctcaaacattccatgtagtacaaccaataagcagtagtcgcgctttaagagtttggttcaataaaaaccaaaaagatgactatatcatttttagagagacagaaataggagactacaccaacgaaaacaaatcgatcggctaccaaaatttagaaatggttgatagtagtatgtttaacacttcttatgcaccaaactactatgcaactactgtaggtgcaacacttaaaggcacagtaattgcagataaggttaatttcacatcttactgcaataatgttggtggtatttgggaagcgatacttgatgagggaacaattaacgaaaagagaaatacaatttctacgtatagcagtgtcaataaagttgataatgagcaactactttttgataacttagattataaaaaacatacactgaaattagtatacaaaggtcaagaccctagctatccggtttcatctcctagaggttggctatatttcggtggtacgcgtccacaagatgttaaaggtacaatcaacgtgtttaaattagttccggttgtaacaaatgtcacgcaatcactttatagctactctaacaaagacatcgcaatgcaaattagagacgctaacaattcaactggagagcaatttgtgccagaacataacggaatagcaacggcttttaaaaacaaagaggctaagttattaggagacaataaagaattgccatttatcactgatagagtttatacagatatcaaaaatgttagtttagttcaaaacgttaacggtagagtggacaacaacgatttagtaaatatcatcacaaaccactcaattaaaaacggcgcagtttccatatatggcaacgttaaatttttaaagaacacatatgtcaaaacagcatatgctggcatggttccatatttcactaaaaacgttaacaaaatcaaatcgtcattgaataacacatataaaccagatataagcggaacatatagaattgagaagatgcccgaaaaactgcaagctaaatcatatgtattaagtaatgatactaatgatgttattacggcttttgaatttgaaaatattatcaagacaaacagaattaacgataatgcgataaaaggcgatacatggatagagcaccgcaacgcagacatgggcaagatttataaccaacaatttaaagaagaaacaattgaatcgggttatgaatggcaattcaaactgaattacagaacaacagaaataccatacgcaaacacattaatttaa

SEQ ID NO: 412895 - DNA, 1824 bp, Staphylococcus aureus
atggtagtagataatttttcgaaagatgataatttaatcgagttacaaacaacatcacaatataatccagttattgacacaaacatcagtttctacgaatcagatagagggactggtgttttaaattttgcagtaactaagaataataagccgttatcaatcagtaagcataatgcgatgactagcattgtgctaaagacagataacttcgatgatgagcacggcgcttatattagtgatgaacttacaattgttgatgcaattaacggaagaatgcaatacgttatccctaacgagtttttaaaatacactggacgagtacatgcgcaagcttactttactcaaaacggtagcaataacgttattgtagaacgtcaatttagcttcaatatcgagaatgatttaattagtaattttgacggtaaaacaaagctagtttatatcaaatcaattcaggacttaacagaaagtgttaaagaagaagttgaggacttaaagaaaagtttgaacgacactaagtctctagttagcgaaattgatagccgtatcaatcaaggtattcaaagattagaaatcaaacaaaatgaagcggtacagatgattacaacaacgcaagataaagccgttcaatatataaatagtgagttccagaaaattgttgataaagagcaagcgatctataaaagagtgagcgaggttgaaaagcaaatcagtggcgctgaccttgtcaaaggtaactcaacaattaattggcaaaagtctaaaattactgatgattacggtaaagcaattgaatcgtctgagcagtccatagatagcgttttaagcgcaattaacacatctaggattgttcatattactagtgcgacagatgcgccctcatttgaggatataggtactgtcgatacacctaaagaagatggtgttgacgatggttcagatattccggtagctcctaacactttaggaaagtcgggcgtgttagttgtctatgttgttgatgatagtacggcacgtgcaacatggtatccagatgattcaaatgatgaatatacaaaatataaaattggtggcacatggtacccattttataaaaagaatgacagcgatttaactaagcaatttgttgaagaaacatctaacaatgctttaaatcaagctaagcagtatgtagatgataaattcggaacaacgagctggcaacaacataaactgacagaggcgactggccaatcaatacaagttaacttaaacaatgcgcaaggcgatttaggctatttaactgctggtaattactatgcaacaagagtgccagatttaccaagtagcgttgaaagttatgaggggtacttatctgtatttgttaaagacgaaacaaataagttatttaacttcacaccttataactctaaaaagatttacacacgatcaatcacaaacggcagacttgagccacagtggacagttcctaatgaacataagtcaacggtattgttcgacggtggcgcaaatggtgtaggtacaacaatcaatctaaccgaaccatacacaaactattctattttgttggtaagtggaacttatccaggtggcgttattgagggattcggactaaccgcattacctaatgcaattcaattaagtaaagcgaatgtagttgattcagacggcaacggtggcggtatttatgagtgcttactatccaaaacaagtagcactactttaagaatcgataatgatgtgtatttcgatttaggcagaacaacaggttctggcgcgaatgcaaacaaagttactataactaaaattatggggtggaaataa

SEQ ID NO: 412896 - DNA, 450 bp, Staphylococcus aureus
atgttgaaatttagagcatgggataaatatgaaaaaacaatgttagatgttcatggaattaattttgatgaatatggtgtatggactcgtgaattgattgatgacgaagatgatggtggttttattcttacagaagatgtaaaactattacaatacacaggacttaaagacaaaaacaacaccaaaatatacgacggcgatattgttgagtttgaagatggagtattagcaatagcaggcgatgatgaatctatagtaggaacaatcaatagagcagtgatatctattgatattgtaaatggcattcaattaaaagattttatgtttgagggcgcagtctccgaaaatgattactttgagtatatagacataaaatccttccttagatatgactgtgaggttaaaggcaacatatttgaatcatctcatttattggaggtaacagaatga

SEQ ID NO: 412897 - DNA, 438 bp, Staphylococcus aureus
atgataccgaaatatagagtatgggacaccgaaacaaaaaagatgtgtgaggttgtggcgttagatcttcacaatagcgaagttagttattcaacaaaagaaaatgaatacggcaaggttataaaggagtttataaagactgagaaaatggcagatgtagaacttatgcagtcaataggtataaatctttggggaagagaattattcgagggcgatatattaaaagtcgtatcaacgaaactgtggggcatcgaacgggataaaacatacatttatttagatgctgcaggcgtagtcactcgcgaccatattggcactatgattggcgacgtacagctattgagagtttttgatgctgaagaagttcgtgaaacgccaactattgaatacttaggcaataagtttgaaaatccggagttactggaggagatagaataa

SEQ ID NO: 412898 - DNA, 195 bp, Staphylococcus aureus
atgatgcaaacctataaagtaagtctttgtatcaagttcttagcatctaaatgtgattataaaataaaaaagcattattttgtgcaaagtacgaatgaggtagaaggcgcgtatatggcattaaaactgactcgtaaaaaactcccattcaaaactgcaagcatagaggtcgaaaaagtggaggtagtagaatga

SEQ ID NO: 412899 - DNA, 243 bp, Staphylococcus aureus
atgacagataacgcgcgcaaagaatacttaagccgatttttcggctctaagagatatctgtatcaggataacgagcgagtggctcatattcatgtagtaaatagcacttattactttcatgggcatatcgtgccaggttggcaaggcgtgaaaaagacgtttgatacaaccgaagagctagaaacgtatataaagcaacatggtttgaaatatgaggaacagaagcaactaactttattttag

SEQ ID NO: 412900 - DNA, 714 bp, Staphylococcus aureus
atgcaagaattacaaacatttaattttgaagaattaccagtaaggacattagaggttaacggcgaaccatattttatagggaaagatgttgctgacattttaggatatgcaaacggacgagatgctttgtcaaaacatgttgatgtagaagataagctggcgtcgcaaatcgcgacggcaggtcaaaacagaaatgtaacgatcatcaacgaatcaggattatacagtttaatcttttctagcaaattagaaaatgcgaagcggttcaaacgctgggtaacttcggaagttttaccaacgttaagaaaaactggtgcgtaccaagtacctagcgacccgatgcaagcattgagattaatgtttgaagctacagaagaaacaaaacaagaaattaaaaacgtaaaagatgatgttattgatttgaaagaaaatcaaaaactggatgcgggagactacaatttcttaactagaactatcaatcaaagagtagctcacgtacaaagactacatgcgataacaaatcaaaaacaacgtagcgaattattcagggatattaattcagaagtgaaaaagatgactggcgcgagttcaagaacgaatgtaagacaaaaacatttcgacgatgtaatcgaaatgattgctaattggttcccgtcacaagctactttatacagaatcaagcaaattgaaatgaaattcgaaaacgaaatatag

SEQ ID NO: 412901 - DNA, 606 bp, Staphylococcus aureus
atgactgaaataaacatctacaatattttactactaatatttatgttagttatcgcatataagttaacgcccgtcatttatagatttattaagaagaaaaaaattcaagcattatatagaagagcacatataattgatatagataaaatggacggcatagaattcgaatattatctcgaagcattgtttttaaagttaaaatataagccaattgtaacgaaagcttcaagggactatggtgcagacttaatattaaaaaaagagaataaaaaaatagttgtacaagcaaaacggagtaacagtaagataggtattaaagctgtgcaagaaatatacaccgcacaacgtttttacaatgccgatgaagcatggcttgtgactaatagtttttatactaaaagtgcagtcgagttaggtaaggcgtgcgatgtcgttatgaaagatagaacaagcttatctaaatggattattagtataaatcccgatttttcaaataatgaaaaatgtccaagatgcaatcataaattagtagttagaacaggcaaaaacggccagtttttaggctgttctaactatcctaattgtaagtacacaaaaaacatttaa

SEQ ID NO: 412902 - DNA, 1128 bp, Staphylococcus aureus; identical to SEQ ID NO: 408706

SEQ ID NO: 412903 - DNA, 228 bp, Staphylococcus aureus
atgtcaagtagttttatagtgaagtttaataataaatcgtatacattgccgctaattgaagtagttcgtagtatcttaacgccctatcgctttttattatatcgcttatttgaaatgaactcttttccacagtattttattgaaaactatacagaaggacaaattcaattgagcttttcttctcaatacaatctgaaatacacgaaaaaagctttttatatcagctag

SEQ ID NO: 412904 - DNA, 216 bp, Staphylococcus aureus
atgactgaaccaattatctcgttcaaagactttagttttcaatatcatagtcaagcaacacctacattacagaatataaatgttgatatttatccaggagaaaaagtattagtagttggtgcttcgggtagtggtaaatcgacttttgcaaattgcataaacggattaattccatttaaaactaaaggtaacataactggggaactatatatataa

SEQ ID NO: 412905 - DNA, 1530 bp, Staphylococcus aureus; identical to SEQ ID NO: 405642

SEQ ID NO: 412906 - DNA, 942 bp, Staphylococcus aureus; identical to SEQ ID NO: 405647

SEQ ID NO: 412907 - DNA, 480 bp, Staphylococcus aureus
atgacattatttttattagaagctaacaatcttgattttgcatcaacgaaagaagaactagaagcaaaggcagcatcactatctacgaagacaattccaacattaattgaagtacaagctactgaaaatttaactcatggttattttattgtggaagcaaatgacgaagcagaagctaaacaatttttaacagaagcagatattagtattcaattagtcaaagaagtacgcttagttggtaaagatttagatgaagttaaaaatggtgatgcacatgttgattaccttgtaacttggaacattccggaaggcattacgatggatcaatatttagcacgtaaaaagaaaaattctgttcattatgaagaagtgccagaagttgaatttaaacgcacatatgtatgtgaagatatgtctaaatgtatttgtttatacaacgcacctgatgaagaagcggtacgtcgcgcgcaaagcagttga

SEQ ID NO: 412908 - DNA, 225 bp, Staphylococcus aureus
gtgacagaaatagtattttataaaatttatttcgttgtcactccccaacttgcattgtctgtagaatttctttttgaaattctctatgttggggccccgcctataattgaaaaatgcttgttacatgggcattttcattcggtcaactactaccaatataatattgtagagcctaagacattgatttattatgtcttaggctctattccttcatttaatgattaa

SEQ ID NO: 412909 - DNA, 414 bp, Staphylococcus aureus
atgttgctatgcgaatctaaaatcatcaataaaaacccaaaatatagaattattaaatataatgatgaatacttaatggtcgatataataagcacttggattagtttattttttccttttattaattggttcatcccaaaagaatacgtcaaaattagtagagaagagtttgaaaacttaaatattgttaaacctgctaaaaagaatgttttttggccagttgcaggtagctctgctttgctgggagttgcattaagaaaatatacacatttacttgacattcaacttgataaaaaattagttattgccatatgttgcatcacatttatagggattttaatattttatgtacgcctaattaaaaaatcatctttaaatatttataatactggcagtgtgtcaatagaaaaatga

SEQ ID NO: 412910 - DNA, 405 bp, Staphylococcus aureus
atggacaataaaattgaaaagattcttgaagatattaataaattacaaggctataaagtaacatatcaatatgctactgctataaatataaaagataataacatgaacccttggtttgaaaaaattgaggaaattctattgaatgtaaaaggagttatacgcattttatctcctgacaatcccccggtaaattatgattattggattttacctggaagatataaaagacatacaaaagaatatcacgaaaaactagaaaaatttttagaaaaatttgctactaatgcaaatattaatgatggattgtttgatcaaaataatatacatggatacaaatataaaaaatatatattcactccacatattgaaattactcatgagaacactttgaatttatttttttaa

SEQ ID NO: 412911 - DNA, 1269 bp, Staphylococcus aureus
atgtatcaaacaattattatcggaggcggacctagcggcttaatggcggcagtagctgcaagcgaacaaagtagcagtgtgttactcattgaaaaaaagaaaggtctaggtcgtaaacttaaaatatctggtggcggtagatgtaacgtaactaatcgattaccatatgctgaaattattaagaacattcctggaaatgggaaatttttatatagtcccttttcaatttttgataatgaatccatcatagatttttttgagtctaggggtgttaaattaaaagaagaagatcacgggcgtatgtttccagtttccaacaaagcacaagacgtggttgatacattagtgacaactatcgaacgccaacatgtaacgattaaagaagaagaagctgttagtagaatcgaagttaatacagaccaaactttcactgtacatactcaaaataatagttatgaaagccattcgctagtgattgctacaggtggtacaagtgtccctcaaactggttcaactggtgatggttataagttcgcacaagatttaggtcataccattactgagttattcccgaccgaagttccaattacatcagctgaacctttcatcaaatccaatcgtctaaaaggtttaagtttaaaagatgttgaattgtcagtacttaagaaaaatggtaaaaaacgcatcagtcatcaaatggatatgttatttactcattttggtatcagtggtccagctgcattaagatgtagtcagtttgtttataaagaacaaaaaaatcaaaagacacagcacatttctatggcaatcgatgcatttcctgaattaaaccatgaacaattaaaacaacacatcacatcattattatcggacacaccagataaaatcattaaaaacagtttgcatggtctaattgaagagcgctacttactgttcatgctggaacaagcaggaatcgatgaaaataccacatcacatcacttatcaaatcaacaattgaacgacttagtaaatatgtttaaagggtttgtatttaaggtgaacgggacattacctatagataaggcatttgtcacaggtggtggtgtgtcacttaaagaaattcaacctaaaacaatgatgtctaaattagttccgggattatttttatgtggtgaagtattagatatacatggttatactggtggttataatattacaagtgcactcgtaacaggacatgtcgctggattatatgccggacattactcacatgcatcaatggaataa

SEQ ID NO: 412912 - DNA, 1215 bp, Staphylococcus aureus
atgaatagacaaatacaaacagaagcagatgaattaggtttcttcggtgaatacggagggcaatatgttccagaaacattaatgccagcaattattgagttgaaaaaagcttataaagaggcaaaagcagacccagagtttcaaagagaactggaatactatttatcagagtatgtaggacgcgcgacgccacttacatatgctgcatcatatactgaaagcctaggaggcgctaaaatatatttaaaacgagaggatctaaatcatacaggcgcccataaaattaataatgcgttaggtcaagcgttgcttgctaaaagaatgggcaagaagaagcttgttgctgaaacaggtgcgggtcaacatggtgtagctagtgctacggttgctgcattatttgatatggaacttgttgtctttatgggaagtgaagatattaaaagacaacaacttaatgtatttagaatggaattacttggtgcaaaggttgtggcagttgaagatggtcaagggactttatcggatgcagttaataaagcattgcaatattgggtaagtcatgtagatgatacacattatttattaggttctgcattaggtccagacccattcccaacgattgttagagattttcagagtgtgattggtaaagaaataaaatcacagatattgaagaaagaaggtcgacttccggatgcaattgtagcatgtatcggtggtggctcaaatgcaatcggtacattttatccatttattaaagatgatgttgcattatatggtgttgaagctgcaggtcaaggtgaggatactgataaacatgcacttgcaattggcaaaggctcaccaggcgtattacatggtactaaaatgtatttaattcaagatgaaggtgggcaagtgcaactagcacattctatttcagcaggacttgattatcctggtattggaccagaacattcttattaccacgacattggtagagtaacttttgaaaatgcaagtgatacacaagcaatgaatgctttaatcaactttacaaaacatgaaggtattatacctgcaattgaaagtgcacatgcactgagttatgttgaaagactagcgcctacgatgtcgaaagaagatattattgtagtaacaatttctggacgtggcgataaagatatggaaacaattagacaatatatggcagagcgaggtcttgcaaatggctaa

SEQ ID NO: 412913 - DNA, 1713 bp, Staphylococcus aureus
atgatgcaaaaattgatcgcacaaattgaaaaagggaagccatttttcgagaaattatcacgtaacatatatttaagagccatccgtgatggatttatttctgcaatgcctgtcatcttattctcaagtatctttctattaattgcatatgtgccaaatatatttggttttaaatgggataaaggcatggaagccattttaatgaaaccatataactatacgatggggcttgtagcatttttagtagcaggaacgacagcgaaatctttaacagattcatttaaccgtaagctagaaagtacaaatcaaattaactttatttctacaatgctagcagcgatgtgtggattcttgttcttagcttctgatccagccaaagatggtggattcttaagtgcatttatgggaactaaaggtttattaacagcattcttatcagcatttgtaactgttattgtttataacttctgtgtgaagcgcaatattacaattaaaatgccgaaagaagtaccgccgaatatttcacaagtatttaaggacttaattccattttcagcggtaatcatcattctttatgcattagatttagtcattcgcaacagcttcaaatcaaatgtagcggaaggtattttaaaattattcgaaccattatttacagcagcagatggatggattggtgtcacaattatttttggtgcctttgctttattctggtttgtaggtattcatggtccgtcaattgtagagccagcaattgcagccattacatatgcgaatatcgaagcgaacttcaagttgcttcaagctggtgaacacgcagataaaattattacatcaggtacacaaatgtttatcgttacatttggtggtacgggtgcaacattggtcgtgccatttatgtttatgtggatgacgaaatctaaacgaaacaaagcgattggacgtgcatcagttgtaccaacattctttggtgtaaacgagccgattttattcggggcaccactagtattgaatcctgtgttctttattccatttgtattagcgccaattgtgaacgtatggatatttaaacttttcgttgaagtgttaggaatgaacagttttagtgtgaacttaccatggacaacaccaggtccactcggaatcatcatgggtactggatttggtttatggtcattcgtactagcgattactttaattgttgtagatattattatttactacccattcctaaaagtttatgacagtgaaattcttgatgaagaagaaggacgtaaagaaagtaattcagatttaaaagaaaaagttgcagcaaactttgatacgaaaaaagctgattcaattttagcggcaagtggtgtatcagacgatgcagctaaagcttcaaatatcacagaacaaacaaatgtcttagtactttgtgccggtggtggtacaagtggattattagccaacgcacttaataaagcagctgaagaatatcatgtgccagtgaaagcagcagctggcggatacggcgcacatatggacattatgaaagagtaccaattaatcattttagcgccacaagttgcgtctaactatgaagatattaagcaagatacagatagattaggtattaaattagcgaagactcaaggtgctgaatatatcaaattgacacgagatggccaagcagcccttgatttcgtacaaaaacaatttgaaaattaa

SEQ ID NO: 412914 - DNA, 717 bp, Staphylococcus aureus
atgaaatacgctggtattctagctggaggtataggctcaagaatgggtaacgtacctttacctaaacaatttttagatttagacaacaaaccgattttaatccatacattagaaaaatttattttaattaatgattttgaaaaaattattatcgcgacgccacaacaatggataacgcatacaaaagatacacttagaaaattcaaaatttctgatgagagaattgaagtgattcaaggtggtagtgatcgtaacgatacaattatgaatatcgttaaacatattgaatcaacaaatggtattaacgatgacgatgttattgtaacgcacgatgcagtaagaccatttttaacgcatcgtatcattaaagaaaatattcaagctgcattagagtatggcgcggtagatacagttattgatgctatcgatacaattgttacatctaaagatgatcaaacaattgatgccattccagtgcgtaatgaaatgtatcaaggtcaaacaccacaatcattcaatattaatttattaaaagaaagctatgcgcagttaagtgatgagaaaaagagtattttatctgatgcttgtaagattattgtagaaacaaacaaaccggttcgacttgtaaaaggtgagttatataacattaaagtaacaacaccttacgatttaaaagtagcgaatgctattattcgaggtggtattgccgatgattaa

SEQ ID NO: 412915 - DNA, 696 bp, Staphylococcus aureus
atggctcaaatcaaaaattatatcactcaagatgacggcacaacaacggtcgttatcgagggtgccgagctaggagacaaagaaacgttattactagataacggctacaaagtcgaatgtgatttacgaatcgaagacccgttcaaaataacagacaagcaacgaagaaaaatatttgcgctttgtaacgacatagagagccacacagggcaaccgcgtgactatatgaggtatttgttccaagaatatgtaacggttctgtatggctacgacaagagcatttcgttaagtgactgtacacggatgcaagcgaatcaaattatcgaggtaacactcgattggatatttcacaatgacataccgcttagctacaaaacaagcgacttgctgaaacaagataaatcattcttatactggtcaactatcaaccgcaactgtgtaatatgcggaaagcctcacgctgaattagcacattatgaagcagtcggcagaggcatgaacagaaacaaaatgaatcactacgacaaacatgtgttagcactgtgtagacaacatcataatgaacagcacgcaattggcgttaagtcgtttgatgataaatatcacttgcatgactcgtggataaaagttgatgagaggctcaacaaaatgctgaaaggagaaaacaatgggagaagtatcgtggataaaacttaa

SEQ ID NO: 412916 - DNA, 438 bp, Staphylococcus aureus
atggaagattatgttcgttataggctagaagatcaaataaattggtatgatactaaaagtatatcttgccaaaagcaatacaattttaataaacatatacaaattattgccggtgcattaatcccagcaataacacctttttcgttagtgtttaattctatgagttttactattgttatatcaatactaggaatactgattgtaatatctcagtctattagtagtataaagaaatttcacgaaaactatattcaatatagaactacatgcgaagtgttaaaacatgaaaaatacttatatttaaataatgttgaaccttatgacaatgagaaagaaccgttaaaacttttagttttacgcgttgaatcaattatttctaacgagaatataaattggcaaacaatgagacaagatatcaaggaggaagaaaaatgttag

SEQ ID NO: 412917 - DNA, 408 bp, Staphylococcus aureus
atgttagggaaattatttgtaagctacagagcagatgacgaaggttcacgttataaaaatttattagtgggctggtctgaaaatccaaataaaaatttttttgatgtaaaatttgaagataccagtattggtataagtatcaattctacaaatgcttactatataaaaaggaaaatcaaagagaaaatcgaaagttctaataaggttatatgcattattggagaaaacactcatagctccgaatgggtgaattgggaattagtaactgctcacaacttaaacaaacctattgtcgcaataaagattgataaaagttacaaatcgcctatacaagtttatggaaagaatgtacattgggcatattcttttagttacgaagctatcaaaaaagcacttctcgaagtttaa

SEQ ID NO: 412918 - DNA, 198 bp, Staphylococcus aureus
atgtctcctaaagtaaaggttagaaaaaaaccagttatagttaatgcagaaaaagcagatagaactacctatattgaaactttagaaggtagaatgaaagctgaaaaaggcgattggattataacaggagttaatggtgaaaaatatcctgtaaaacccgatatttttgaaaaaacgtatgaagtacttcccgattaa

SEQ ID NO: 412919 - DNA, 459 bp, Staphylococcus aureus
atgtttaaagctaatgttgaaaataacaaaactataaagcctaattctgcaaaaatagaagaacttaaaaataaaataccagaatattttaatgcaaatggtgaatttaatattgaaaaattaaaatatgatttgcaggaaaataatgtagatgaattatcttccggatttcgtttagattttattggtaaagattattcgaaaaaacaagctggagaaaagccaacaagtgttattgttccagatcaaaaacataatactaaaatagaaaatcaaaatagtaaaaatttatttttcactggtgataatttagaagttatgcgtcatttgcattcaaattatcaagaagcaattgattgtatatacattgaccctccatataatacgggaggagatggttttgtttatccagatcatttcgagtataaagacgaacaattaaaagatatgtttggatga

SEQ ID NO: 412920 - DNA, 456 bp, Staphylococcus aureus
atgaataaaatcaataaaaggttactagaaagtgatattaattcaatattgatttatggagaaacacctaaagaagatagggtagagatgatcaataattttagggatggaaatgcacaagttctaatatctaatcctaatacattaggcgagtccatatctttacatcagacagtacatgatgcaatatattttgaatataattttaatttaacgtttatgttgcaatcacgtgatagaatacatcgtttagggttaaataacaatcaatatacaaggtattattatttaatgactgaaggggatagagcccataaaggttttatcgataaagcagtttataacagactgaaggaaaaagaagatgtaatgttaaatgctattgatggaaatactttaaagccaatgattgaagatgattacttagaagatgttaagaaaattattattgaatga

SEQ ID NO: 412921 - DNA, 192 bp, Staphylococcus aureus
atggcgggccccaacacagaaactggcggaaagtcagcttacaataatgtgcaagttggcggggccccaacacagagaatttcgaaaagaaattctacaggtaatgcaagttggggagagacagaaataaattttgcgaaaataacatttctgttccaatcccgtgatgttaaaattttaagaaaaaaataa

SEQ ID NO: 412922 - DNA, 183 bp, Staphylococcus aureus
atgttaagttatggtggattgcttaaacaaaaacataaaattttgaatttagacgatgccgaagatggcaatttgattaacacaattgatgaagataaaacgacggttgaagaagaaaaagcacattcgattacagcgatttggaatttcgaaaagcaaaattattatttaagacatcagtga

SEQ ID NO: 412923 - DNA, 150 bp, Staphylococcus aureus
atgccagaagtcggtattgatcccgatacggtggatcagggggctttaacacatgcatatcaaggtgatgtgtcagggatagaccatcatataagaaaggcatcagcacctattaaaaaagagacagaggatgacttagaattagaataa

SEQ ID NO: 412924 - DNA, 366 bp, Staphylococcus aureus
ttgtctatcatgaaacgatgtagtcatccaacatgtaacacattgattaatcataatgaaagttattgtgataaacacaaacgatatgtaaatgataattacaatgatgtgagacgtagaaacgatccagagtatgtaagattttataactcaagtcaatggaagagattgcgtggaatcgtactgatggaaaatgattatatttgtagattgtgtggacgacaagcgcaaatggttgaccatattattccaacaaaagttgattggtcaaaacggttggaaaaggaaaacttgcagcctttgtgctttgaatgtcacaacaaaaagacgaaaaaggaacgaagggaagtcccccgcatcaaataa

SEQ ID NO: 412925 - DNA, 453 bp, Staphylococcus aureus
atggagatatcaaagtatcaagggatagctacacgtacacacaatgatgaattgaatttaaatgaatctattacttgttacggtctaggattatctcaatctacaggtaatgtcacagatctaattaaacaacatatgttttgtaatgtgccgatagataaaggaattatgataaacgaacttagcgaatcgttatggaatatagctaacctagctaacgtgctaggtattaacttagatgcgatagctggtcatagtgttaacgctattatgatgaacaaacctaatcaatctatcgatgtggacaatggtataaagcaaggcgacaaagtattgttacatggtagtgagtattatgtcgatggagtaataggaaacttgttattaattagcaatgatgaagacgatagacaggtgaatatgcaagatgttaagaaagtgaacaaggagtga

SEQ ID NO: 412926 - DNA, 159 bp, Staphylococcus aureus
atggtaaccaaagaatttttaaaaactaaacttgagtgttcagatatgtatgctcagaaactcatagacgaggcacagggcgatgaaaataggttgtacgacctatttatccaaaaacttgcagaacgtcacacacgccccgctgtcgtcgaatattaa

SEQ ID NO: 412927 - DNA, 318 bp, Staphylococcus aureus
gtgaatatctcaacttttttagtactacataaagcctgtagcaaagaaaaaataaaactatctgatcagcataaagactttgaatacatgcttcgcaaagaatggattacacaagttgagaacgacctcgaaatttctgaagattcttcattctcgattctgtatatgaaatacagtggttacgtgtctataacatctaaaggtaaagatgtttatttttccgcgcgtaacagctggattagatggattcttggtacaatcatcagtatttctatagcaattgcatcactagtaataaaagcgttactagaatgctag

SEQ ID NO: 412928 - DNA, 240 bp, Staphylococcus aureus
atgagtgaaccaatcaaagaaaagttagaactactaattcttaaaacacttaaacataaagaaaattcaacatctatcatcagtaatgacgagttagaaaagctatttaatatgtataaatatttaaatgagcctaatcaaaaaagggtttggatagtagatttaatcccatgtgtagctttgatttgtgcaactagcattctagtaacgcttttattactagtgatgcaattgctatag

SEQ ID NO: 412929 - DNA, 774 bp, Staphylococcus aureus
atgagagaaaaagtttcaaacagactaaaacacatcatgaaaataagaaatttaaaacaagtagatatcattaataaatcgaaaccttatcaaaagcaactaggtatatctttaagtaaaagtactttgtctcaatatattaacgatgtacaatctcctgaccaagatagaatttacctactttctaaaactttaaatgtcggtgaagcgtggcttatgggatatgatgtaaattcttatcgcgtacccgatgaagaacgccaagaggaaactgtgatgtcaaaaattaataacatatcatctcaactcacgcctccaagacaaagcaatgtactaaaatatgcgactaatcaattagaagagcaaaataatgacagtgatgataatctggtagatttcaattcttacattcaagaaaaatccgaagtggatatatatggttgtgcgtctgctggtattggtgaaagattatataacgaacctatttcaaaagaattcgtaagaggttatgtccccgcacatgatatagctttaaaagtaaatggagactcaatggagccgttatttaaaaatggacaaattatattcattgaaaaatctcacactatcaaagatggacaaataggcgtctttattataaatggagatgcttacgtaaagaaggtttatgtagaagataacagattaacgttggtttctttaaataaaaagtataaagatttacatttttatgataatgaaagtgtgaggttagttggaaaagttattttatag

SEQ ID NO: 412930 - DNA, 1893 bp, Staphylococcus aureus; identical to SEQ ID NO: 408859

SEQ ID NO: 412931 - DNA, 1038 bp, Staphylococcus aureus
gtgctatttattgttttaatcttgattagcttcaacttattaggtgccagattatttggtgaactggagttttggttctctattattaaagttgttacaattattgcgatggttatcgttggtcttgtattaatctttttctcatttaaaacacattatggacatgcatcattcacaaacttaatcagtcacggcggcatgttccctggagggacatttggtttcttaatgtcattccaaattgctgtatattcattcattggtattgaacttataggtgtaactgctggcgaaacgaaagatcctgaaaagactttaccgaaagcaattaataatgtacctatccgtattttattattctatatcggtggtctattagtaattatgtcagtcataccttggaatgatatcgatccaaatagtagccctttcgttaaactctttacattaatcggcgtgccatttgcagcaggtgtcgttaactttgtcgtgctaactgccgcggcctctgctacaaatagtggaatctattcgaatagtcgtatcttattcggactgtcacaacaagggttaggtcctaaagttttaaataaaacgaatagtcatggcgtgccttatttatcaatgttagtttcatcaattgcattacttatagcagccttgttaaactacatttttcctaatgcaattcaactattcatatacgttacaacgttatcaactgtgttgtttttagttgtttgggcaatgattattgtcgcttatctaatgtatttgaaaaagcatcctgaggcacataaaaacagtaaatttaagttgattggtggtaagcctattgcttacattattttagctttcttcttctttgtattcattttattattctttagtgacgaaacaagagcagctatttatatttcgccattctggtttatatttttatttttcttttataaaaaatacaaaacgaatgctgaaaagctcgcatatgaacaacgacaaaatgacagcggtcatttcagatatgacaatcaataa

SEQ ID NO: 412932 - DNA, 354 bp, Staphylococcus aureus
atggcaagaaaattgcatagagagttgaataacagacacatccaattgatagcaattgggggcgcaattggaactgggttattcctaggatcaggtcaaacaatatccttaactggtccatcactgttattcacatacatgattattggggttgtactattcgcttttatgcgcgcattaggcgaattgttgttgagcaatacaagatttaattcatttgttgatattgcaaatgaatatttaggcccttttggtggctttgtcattggctggacttactggctatgttggattgtatcaagtatgtcagacctaactgcgatgggacaatactttgcattttggtatccataa

SEQ ID NO: 412933 - DNA, 144 bp, Staphylococcus aureus
atgttatattggcgggcccccaacacagaagctgacggaaagtcagatttcaataatgtgcgagttggcggggcccaacacagagaatttcgtaaagaaattctacaggcaatgagagttggggataacaaattaattttgtaa

SEQ ID NO: 412934 - DNA, 231 bp, Staphylococcus aureus
atggcaaataagatgaaagacgggtttataaataaaggctatcgtctttactttgattctccaaccaatcaacaattttttattttaagtaacgagaaaatagcagagttagaacaaaaagttaaatttgctgtttgggaaaaatacgatgatcaacatcgtgttgttagattcgcaaccagttgggcgacaaccgaagaaaatttaaataaactattagaattaatttaa

SEQ ID NO: 412935 - DNA, 147 bp, Staphylococcus aureus
atgaacagaaaaacacctaaaactactgatggtttaatgagacatataagagacaataaaggtatccaaataaatggtagcacgaaaaaaaccagttacgaaacatcggctattttcatggattcaaagggtataatttctttttaa

SEQ ID NO: 412936 - DNA, 288 bp, Staphylococcus aureus
atgactttcgaagaaaaactaagtcaaatgtataacgaaattgcgaatgagattagtgggatgatacctgtagaatgggagcaagtatttacaatagcttatgtaactgatcaagctggagaagtcatttttaattatactaaaccaggtagtgatgaattaaattattattcagacatacctaaagattgcaatgtctcaaaagatatttttaagaattcatggtttaaagtttatcgaatgtttgatgagttaagagaaacttttggtatgtcaacaattttttag

SEQ ID NO: 412937 - DNA, 732 bp, Staphylococcus aureus
ttgggtagaccaagaaaatggagagataagcttgtaaaaaaagttgacttccagactactgatgatataacttcgattatcgaaagttgttcattaactggtatagatgcacgtaaaggtgagttattgatatctttactaactggaagtatcaatgatattgatcgtgttgatggagaactccctggaaatacgttagaacaaattaagaaaaatattactctatttgatggagaacaaacaaggttcatttacaaacaaccagataaaaaagtagtaacaattcaaggtttagcaggcacgggtaaaacggaattactgttacataaacttaaggatatttacgttaacgaggaaaagtcaaaaatatttttcacctgttatagtaagattttagcacaagatttgaatgaacgaatccctgctttttttgatttcatgaaagttaatgagcaaattaaatggggcgagcgactttgggtagaacgtagctggggctctaaagttgataaaaattcaggtttatatagttttatttgtgattattacgaaattccttttcaaaggtacaactggtctatatcttttgaatcggtatgtaaagatgctttagaaaagctgaatcaacttgaatcagaagggatatttgagccgttctttgattacattctaatcgatgaaagtcaagattttaatgaagcttttttcgaattatgtaaaaagttacaataa

SEQ ID NO: 412938 - DNA, 408 bp, Staphylococcus aureus
gtgcaccgacatgtcgatgtatttatcgttttagaacaaaataaatatggcgtagacaaatactcggtcggtggtatcacaaaagcaaatagaaagaaagttgattacaaagcaggaatcagtattactaaagaagataaaaacggtacaatctcacatgatgtttcagaatacaagattacaaaagaagagatttccttgaaagagcttgattttaaattgagaaagcaactcattgaacaacataatctgtacggtaatattggttcaggaacaattgttattaaaatgaaaaatggtgggaagtacacgtttgaattacacaaaaaattacaagaacatcgcatggcagatgttattgatggtacaaatattgatagaattgaagtgaatctaaaatcatcgtga

SEQ ID NO: 412939 - DNA, 228 bp, Staphylococcus aureus; identical to SEQ ID NO: 408413

SEQ ID NO: 412940 - DNA, 339 bp, Staphylococcus aureus; identical to SEQ ID NO: 410839

SEQ ID NO: 412941 - DNA, 522 bp, Staphylococcus aureus
atgataccaggtgtgaatgcgccacctatgcatccttggtgtagaagtaccacagtgccacatgttggcaattggcgagacaagttctttaaagagcgtgaaggtaaatatcaagtagaagtaaaagaagcaaaattacaggaaaaagctaaaaaccagatgaaagaaatgattgaaagtggtaaaataaaaatagaaataaatcctgaaaaacagaatagacattctttaggtcataaattatatttaaaaaataaaatttatgcattgcagaatgatgagaggtttcctagctatacaatactctctatagaagaattaaatgatttattaaagaaatactcaatgactggcaaaatattagtggataaatttggatttaatcgtaaggaaataattaatttcgaaaaaactataggaaaagcttatgcaggtggaaaatatattaatactgcatatggtaaaatacattattctaaaactggttctcatatagtaccatttgtaagtaaggagaagtaa

SEQ ID NO: 412942 - DNA, 3489 bp, Staphylococcus aureus
ttgaaaaaagctatatccaattggggtaaagcgggtaaagacccaagagaagaatttaagaagacattagcagaaattgaaaggacaccggatatagctagcgcaacaagtttagcgattgaagcatttggtgcaaaagcaggtcctgatttagcagatgctattaaaggcggtcgctttagttaccaagagttcttaaaaactatcgaagattcgcaaggaacggtcaatcagacatttaaagattctgaaagtggctccgaaagatttaaagtagcaatgaataaacttaaattagtaggtgctgatgtatgggcttctattgaaagtgcgtttgctccagtcatggaagaattaatcaaaaagctatctgtagcagttgattggttttcaagtttaagtgatggatctaaaaggtcgattgttatattcggtggtattgctgctgcaattggtcctgtagtttttggattaggtgcattcataagcacaattggcaacgcagtaactgtattagctccattattagctagtattgtaaaggctggcggattgattagttttttatcaactaaagtgcctattttaggaacagtcttcacagcattagctggtccaattggtatcgtgttaggtgtactggctggtttagcagtcgcatttacaatagcttataagaaatctgaaacattcagaaattttgttaatggtgcaattaacagtgttaaacaaacgtttagtaatttcattcaatttatccaacctttcattgattccgttaaaaacgtctttaaacaagcggtttcagcaatcgttgatttcgctaaagatatttggagtcaaattaatggattctttaatgaaaacggaatttctattgttcaagcgcttcaaaatatatgcaattttatcaaagctatatttgaatttatcttaaattttgtaattaaaccaatcatgtttgcgatttggcaagtgatgcaatttatttggccggcggttaaagccttgattgtcagtacttgggagaatataaaaggagtaatacaaggtgctttaaatatcatacttggctttattaagttcttttcaagtttattcactggtaattggcgaggtgtttgggacggtattgtgatgatactaaaaggcactgtgcagttaatttggaatttaatacaactgtggtttgtaggtaagattctaggtgttgttagatactttggtggattgcttaaaggtttaatatccggtatctggggtgttatcaaaggtattttcacaaaatcattatctgcaatttggaatgcaacgaaaagtatttttggtttcttatacaatagtgttaaatctattttcactaatatgaaaaactggttatctagtacgtggaataatatcaaaagcaataccgtcggcaaggctcattcgttatttacgggtgtaaggtctaaattcacaagtttatggaatgcgacgaaagatatatttactaaattaagaaattggatgtcaaacatctggaactctattaaagataacacggtaggtatagcgggtcgcttatgggatagagtgcgtaacatctttggaagcatgcgtgacggtttaaaatctatcattagtaaaattaaagatcatatcggtggtatggtagacgctgttaaaagaggtcttaataaattaattgaaggtttaaactgggtcggtggtaagttgggtatggacaaaataccgaagttacacactggtactgaacatacacatactactacaagattagttaagaacggtaagattgcacgtgacacattcgctacagttggggataagggacgcggaaatggtccaaatggtttcagaaatgaaatgattgaattccctaatggtaaacgtgtaatcacaccaaatacagatactacggcttatttacctaaaggctcaaaagtatacaacggggcacaaacttattcaatgttaaacggaacgcttccgagatttagtttaggtactatgtggaaagatattaaatctggtgcatcatcggcatttaactggacaaaagataaaataggtaaaggtaccaaatggcttggcgataaagttggcgatgttttagattttatggaaaatccaggcaaacttttaaattatatacttgaagcttttggaattgatttcaattctttaactaaaggtatgggaattgcaggcgacataacaaaagctgcatggtctaagattaagaaaagtgctactgattggataaaagaaaatttagaagctatgggcggtggcgatttagtcggtggaatattagaccctgacaaaattaattatcattatggacgtaccgcagcttataccgctgcaactggaagaccatttcatgaaggtgtcgattttccatttgtatatcaagaagttagaacgccgatgggtggcagacttacaagaatgccatttatgtctggtggttatggtaattatgtaaaaattactagtggcgttatcgatatgctatttgcgcatttgaaaaactttagcaaatcaccacctagtggcacgatggtaaagcccggtgatgttgttggtttaactggtaataccggatttagtacaggaccacatttacattttgaaatgaggagaaatggaagacattttgaccctgaaccatatttaaggaatgctaagaaaaaaggtaggttatcaattggtggcggtggcgctacttctggaagtggtgcaacttatgccagccgagtaatccgacaagcacaaagtattttaggaggacgttataaaggtaagtggattcatgaccagatgatgcgagttgcaaagcgcgaaagtaactatcaatcaaatgcagtgaataattgggacattaatgctcaaagaggagacccgtctagaggattattccaaattatcggctcaacttttagagctaacgctaaacgagggtacactaattataataatccagtacatcaaggtatctcagcaatgcagtacattgttagacgatatggttggggtggttttaaacgtgctggtgattacgcatatgctacaggtggaaaagtttttgatggttggtataacttaggtgaagacggtcatccagaatggattattccaacagatccagctcgtagaaatgatgcaatgaagattttgcattatgcagcagcagaagtaagagggaaaaaagcgagtaaaaataagcgtcctagccaattatcagacttaaacgggtttgatgatcctagcttattattgaaaatgattgaacaacagcaacaacaaatagctttattactgaaaatagcacaatctaacgatgtgattgcagataaagattatcagccgattattgacgaatacgcttttgataaaaaggtgaacgcgtctatagaaaagcgagaaaggcaagaatcaacaaaagtaaagtttagaaaaggaggaattgctattcaatga

SEQ ID NO: 412943 - DNA, 309 bp, Staphylococcus aureus
ttggcgagtaaaaagtataaaaattgggattggaattatgggaagtcacctaaatatgaatataatcgaagtgaaagattatcatcaggtactgtagatattaccatttctgttgaacaaaatcgtattgcagattgtagaatttttggtgatttctttggacaaggtgatataaaagatgtggaacaagcattacaaggaacaaaaatgacaagagaagatttaacgcatcagttaaagcaattagacatcgtttattattttggtaatgttacggttgaatcattggttgagatgattttaagttaa

SEQ ID NO: 412944 - DNA, 225 bp, Staphylococcus aureus
atgtttgaatcaacaggaaagatattatccatcgatggtaatcaaatgacttcagatgcatttgctgaaggtggcaattcaggatccccagtgtttaattcaaatcatgaggtcattgcaattgcatatgctgtcgatgtcaaaaatgatgcaacaaaaaaatcatatttagtttatttcacacccgagatcaagaaattcatggcagataacacagaaaaataa

SEQ ID NO: 412945 - DNA, 345 bp, Staphylococcus aureus; identical to SEQ ID NO: 408518

SEQ ID NO: 412946 - DNA, 312 bp, Staphylococcus aureus
atgaatagagaagaagtccaattattaggttttgaaattgttgcatttgcaggggatgcacgttctaagtttttagaagcattaacagcagctcaagctggagattttgcaaaagcagatgcactgattgaagaagaaaacaattgcattgcggaagcacatagagcacaaacaagcctgttggctaaagaagcgcaaggtgatgatattgcatacagtgtaacgatgatacatggtcaagatcatttaatgacaacaattttactgaaagatttaatgaagcatttattagaattttataaaagagggtga

SEQ ID NO: 412947 - DNA, 171 bp, Staphylococcus aureus; identical to SEQ ID NO: 410802

SEQ ID NO: 412948 - DNA, 492 bp, Staphylococcus aureus
atgaaactattacattataagctttttaataataatgcaagtaaagttgaagctattaaaagaccattaaataaagattattataaatttgttcaagaaatacaagataaagactttaatcaaataattattacatcagatattatgattcagataattaaacagttctttacaaaatataatgctgaaattattgaaattgaattactagagcaatataaggaacacaatgattatattgatactttaataaaaaatttagctgacgacagagccaaaatagttgaactattggaaagtttagaatcttttcacaaatcatctgtcatagacattaaaaagattaatattaaattgagagaagatggaaaaatatataaattctatttgtatataaatggaatattagaaacgagcgacaatgaaattactgacaagtataataatattatttgttcaatagttgaaagcgaatacaatgaaaaagaatag

SEQ ID NO: 412949 - DNA, 300 bp, Staphylococcus aureus
atgaaaaacaaggagaagtatctaactaatttttctgaagccaaacgtaaaaaagctactcaaaagtacaatattataaaaccttttatcctaggcgaacaatctttatcaagtatttctaaaagtaaagggattgcgttaagcaccctttataggtggaataagtcatataaagaacaaggacttaaaggactaatctatgcgacaagagctgataaaggaacacgtaaaatagaaccaaagataattgataaagattgttcgcctaggataaaaggttttataatattgtacttttga

SEQ ID NO: 412950 - DNA, 744 bp, Staphylococcus aureus; identical to SEQ ID NO: 409376

SEQ ID NO: 412951 - DNA, 1242 bp, Staphylococcus aureus
atgtcttattccattgttagagtttcaaaagttaaatctggaacaaatacaacgggcatacaaaaacatgttcaaagagaaaataataattatgaaaatgaagatatagaccatagtaaaacttacttaaattatgatttggtaaatgctaataaacagaattttaataacttgattgatgaaaaaatcgaacagaattatacaggcaaaagaaaaattagaacagacgcgattaaacacattgatggtttaattacatcagacaatgatttctttgataatcaaacgccagaagatacaaagcagttttttgaatatgctaaagagtttttagaacaagaatacggtaaagataatttattatatgcaacagttcacatggacgaaaaaacaccacatatgcattatggcgttgttccaataactgatgatggtcgtttaagtgctaaagaagttgtaggtaataaaaaagctttaacagcgtttcaagatagatttaatgagcatgttaaacaacgaggatatgatttagaacgtgggcaatcaagacaagtaacaaatgctaaacatgagcaaataagtcagtataaacaaaaaacagaatatcataagcaagaatatgaacgtgagagccaaaaaacagaccatataaagcaaaagaacgataaattaatgcaagagtaccaaaaatcgttaaatacgcttaaaaagcctataaatgttccgtatgagcaagaaactgaaaaagtaggtggtttatttagcaaagaaatacaagaaactggaaatgttgtaataagccaaaaagatttcaatgaatttcagaaacagataaaagctgctcaagatatttcggaagattacgagtatataaagtctggtagagccttagatgataaagataaggaaatacgagagaaagatgatttattaaataaagcagttgagcgtattgaaaacgcagacgataattttaaccaactttacgaaaatgcaaagccacttaaagagaatatagaaatagcgttaaagcttttaaaaatcttactaaaagagttagaacgagttttaggaagaaatacctttgcggaaagagttaataagttaacagaagatgaaccaaaactaaatggtttagcaggaaacttagataaaaaaatgaatccagaattatattcagaacaggaacagcaacaagaacaacaaaagaatcaaaaacgagatagaggtatgcacttatag

SEQ ID NO: 412952 - DNA, 1206 bp, Staphylococcus aureus
atgttaactttttcgataggaacagcagtatatggaaaattatctgattatataaatataaaaaaattgttaattattggtattagtttgagctgtcttggttcattgattgcttttattggtcacaatcacttttttattttgatttttggtaggttagtacaaggagtaggatctgctgcattcccttcactgattatggtggttgtagctagaaatattacaagaaaaaaacaaggcaaagcctttggttttataggatcaattgtagctttaggtgaagggttaggtccttcaatagggggaataatagcacattatattcattggtcttacctacttatacttcctatgattacaatagtaactataccttttcttattaaagtaatggtacctggtaaatcaacaaaaaatacattagatatcgtaggtattgttttaatgtctataagtattatatgttttatgttatttacgacaaattataattggacttttttaatactcttcacaatcttttttgtgatttttattaaacatatttcaagagtttctaacccttttattaatcctaaactagggaaaaacattccgtttatgcttggtttgttttctggtgggctaatattttctatagtagctggttttatatcaatggtgccttatatgatgaaaactatttatcatgtaaatgtagcgacaataggtaatagtgttatttttcctggaaccatgagtgttattgtttttggttattttggtggttttttagtggatagaaaaggatcattatttgtttttattttaggatcattgtctatctctataagttttttaactattgcattttttgttgagtttagtatgtggttgactacttttatgtttatatttgttatgggcggattatcttttactaaaacagttatatcaaaaatagtatcaagtagtctttctgaagaagaagttgcttctggaatgagtttgctaaatttcacaagttttttatcagagggaacaggtatagcaattgtaggaggtttattgtcactacaattgattaatcgtaaactagttctggaatttataaattattcttctggagtgtatagtaatattcttgtagccatggctatccttattattttatgttgtcttttgacgattattgtatttaaacgttctgaaaagcagtttgaatag

SEQ ID NO: 412953 - DNA, 843 bp, Staphylococcus aureus
atgcattatggcgttgttccaataactgatgatggtcgtttaagtgctaaagaagttgtaggtaataaaaaagctttaacagcgtttcaagatagatttaatgagcatgttaaacaacgaggatatgatttagaacgtgggcaatcaagacaagtaacaaatgctaaacatgagcaaataagtcagtataaacaaaaaacagaatatcataagcaagaatatgaacgtgagagccaaaaaacagaccatataaagcaaaagaacgataaattaatgcaagagtaccaaaaatcgttaaatacgcttaaaaagcctataaatgttccgtatgagcaagaaactgaaaaagtaggtggtttatttagcaaagaaatacaagaaactggaaatgttgtaataagccaaaaagatttcaatgaatttcagaaacagataaaagctgctcaagatatttcggaagattacgagtatataaagtctggtagagccttagatgataaagataaggaaatacgagagaaagatgatttattaaataaagcagttgagcgtattgaaaacgcagacgataattttaaccaactttacgaaaatgcaaagccacttaaagagaatatagaaatagcgttaaagcttttaaaaatcttactaaaagagttagaacgagttttaggaagaaatacctttgcggaaagagttaataagttaacagaagatgaaccaaaactaaatggtttagcaggaaacttagataaaaaaatgaatccagaattatattcagaacaggaacagcaacaagaacaacaaaagaatcaaaaacgagatagaggtatgcacttatag

SEQ ID NO: 412954 - DNA, 816 bp, Staphylococcus aureus
atgaaactcgtattttatggagctggtaatatggcacaagctatatttacaggaattattaactcaagcaacttagatgccaatgatatatatttaacaaataaatctaatgaacaagctttaaaagcattcgctgaaaaactaggtgttaactatagttatgatgatgcgacattattaaaagatgcagattatgtatttttaggtaccaaaccacatgactttgatgctctagcaacacgcatcaaaccacatattacaaaagacaattgcttcatttcaattatggcaggtattccgattgattatattaaacagcaattagaatgccaaaatccagttgctagaattatgccaaacacaaatgcgcaagttggacactcagttactggcattagtttttcaaacaactttgaccctaaatctaaagatgaaattaacgatttagttaaagcatttggttcagtaattgaagtatcagaggatcatttacatcaagtaacagctatcaccggaagcggcccagcatttttatatcatgtattcgagcaatacgttaaagctggtacgaaacttggactagaaaaagaacaagttgaagaatctatacgcaaccttattataggtacaagtaagatgattgaacgttcagatttgagcatggctcaattaagaaaaaatattacctctaaaggtggtacgacacaagctggccttgatacattgtcacaatatgatttagtatctattttcgaagattgtctaaatgctgccgtcgaccgtagtattgaactttctaatatagaagaccaataa

SEQ ID NO: 412955 - DNA, 1485 bp, Staphylococcus aureus
ttgagtactaaaaacaaacacatcccttgtttaatcacaatctttggtgcaactggtgacttaagccatcgtaagttgtttccatcaatattccatctctaccaacaagacaatttagatgaacatattgccatcatcggtattggacgtcgtgacattactaatgatgatttccgtaatcaagtaaaatcatcaattcaaaagcacgtaaaagatacaaacaaaattgacgcgtttatggaacatgtcttctatcatagacatgatgttagtaatgaagaaagctatcaagaattattagattttagtaatgaattagacagccaatttgaattaaaaggtaatcgactattctatttagcaatggcaccacaattctttggcgttatttctgattatctaaaatcttctggtcttactgatacaaaaggatttaaacgccttgttatcgaaaaaccattcggtagtgatttaaaatcagccgaagcattaaacaatcaaattcgtaaatcatttaaagaagaagaaatttatcgtattgaccactatttaggaaaagacatggttcaaaatatcgaggtattacgttttgcgaatgcgatgtttgaaccattatggaataacaaatatatttcaaacatccaagttacatcttctgaaatactaggtgttgaagatcgtggtggttattatgaatcaagtggtgcgctaaaagatatggtgcaaaaccacatgttacaaatggttgcattattagctatggaagcacctattagtttaaatagtgaagatatccgtgctgagaaagtaaaagtacttaaatcactgcgtcatttccaatctgaagatgttaaaaagaactttgttcgtggtcaatatggcgaaggctatatcgatggtaaacaagttaaagcataccgtgatgaagatcgcgttgcagatgactctaacacacctacatttgtttcaggtaaattaacaattgataactttagatgggctggcgtaccattctatatccgtactggtaaacgtatgaaatctaaaacaattcaagttgtcgttgaatttaaagaagtaccaatgaacttatactatgaaactgataaactgttagattcaaacctattagtaatcaatattcaaccaaatgaaggtgtatctttacatctaaatgctaagaaaaatacacaaggtatcgaaactgaacctgttcaattgtcttattcaatgagcgctcaagataaaatgaatactgtagatgcatatgaaaatctattattcgattgtcttaaaggtgatgccactaactttacgcactgggaagaattaaaatcaacatggaaatttgttgatgcaattcaagatgaatggaatatggttgatccagaattccctaactatgaatcaggtactaatggtccattagaaagtgatttattacttgctcgtgatggtaaccattggtgggacgatattcaataa

SEQ ID NO: 412956 - DNA, 273 bp, Staphylococcus aureus
atgccaataattactagttatatcactcaagatgacggtacaacaacagttgtcatctcgggtgttgaattaggcaataaagaaacattactacttgataacggatttgatgtggaagtcgatgtaaagcgtcatagatccgtttcaaattaccggcaagcaacgacgaaaaatattcgcgcttgtcaaagacatagaagaatatacaggtcaaccaatggactatatgcgacatatgttcatcgagtatgtaaggacttactacggctatga

SEQ ID NO: 412957 - DNA, 1680 bp, Staphylococcus aureus
atgttacaaaccttatcaatcaagcaatttgctattattgaagagttagaaattcaattttctgatggtttaactgttttaagtggtgaaacgggttcaggtaagtcaattattatagatgcaattggacaattaattggaatgagagcttcatctgattttgtaagacatggtgaaaaaaaggctgtcatcgaaggtatatttgatattgacgagagtaaagatgctatacatatattgaaaaatatggatattgatgtagatgaagattttttattagttaaacgggaaattttcagctctggtaaaagtctttgtaaaattaataatcaaacagttactttacaagatttacgaaaagttatgcaagaattattagatattcatggccaacatgaaacgcaatctttgttgaaacaaaaataccatttaacattattggataattacgcagaatcacgttatcaagatttgttggataaatatcaccaaacttttcaaaattataaagccaaaaagcaagggttagaagatttagaatcagcagaccaagcattgctgcagcgtttagatttaatgaaattccaattagaagaattgtctgaagcacatctaaaagaaggcgaaatagagcaacttgaaatagatattaaacgcattcaaaactctgaaaaattaagcttagctcttaataacgcacatatgacattaacggatgaaaatgctatcactgatcgtttgtatgaactaagcaaccatttgttaacaataaacgatatagttccaaacaaatatgacaaattaaaagaagatattgatcaattttattacattttagaagatgcaaaacatgagttatatgatgaaatggctaatacagaattcgacgaacaagtgttaaatgagtatgaatctcgtatgaatttgctgaataatttaaaacgcaaatatggaaaagatatttcagaattaatcgcatatcaagaaaaacttaataatgaaatcaataaaattgaaaactatgaacaaagtacatcgcagttacgagaagaaataaatgcattgtataatcaagttatagaggttggacaagcgttatctaagcagcgtcgtatagttgctagggagttaagagaccacattgtatcggaaattcaaaacttacaaatgaaagatgcaaatcttgagatttcatttaaaaaattagaagaaccgaatattgatggaatcgaatttgtagaatttttaatcagtcctaataaaggggaaccattaaaaagcttaaataaaattgcgtcaggtggagaactttctagaattatgttagcgttaaaaagtatttttgttaaatcgagaggtcaaactgcaattttattcgatgaggttgactcaggtgtatctggacaagccgcacaaaaaatggcagagaaaatgcgagatatagcagaatatatacaagttatttgtatatctcacttgccacaagttgcatcgatgagcgaccatcatttattaatttcgaaatcatcaaaagatgatcgtacaacaacacaagttcaagagttaattggcgatgataaagtagatgaaattgcacgaatgatttcaggtgcaagtgttactgatttaactcgtgaaaatgcaagagaaatgatacaacacaatcaaagacatagataa

SEQ ID NO: 412958 - DNA, 807 bp, Staphylococcus aureus
atgaagatagggacaatcgccgatttacatattgatcgtcataataaaaaaacatccgaagattacttagaggcattggttgaaatagttaagtataaaaatttggatatattgttgattgcgggggatatctcaaatcattatcaattgacgcaccaatttataacgcaattgacaaaacaattagatatacctgtgaaatttgttcctggaaaccatgatttatgggaagttgaaagtatgactacgcaagacatttggaataattataagagtatgtcacagtgcttggtaggaaaaccatttatagtaaatgaagaatgggcaatcataggacatacaggttggtatgattatagctttgcagcacaacgattttcattagatgagttacaaagaggaaaacattatggtgcgacttggcaagataaagaacgaatatcttggggcacatcagatcaaaatttatctaaaatagcggctgaacaagtgaagaaagatctattagaagtaggaaatagaagagtgattttagtcacacatgttgtgacgcaccctgatttcattgttcctatgccgcatcgtatattcgatttttataatgcatttattgggacaagtgatttcaatcctttgtatgcgatgttcgatataccatatagtattatgggccatgttcattttcggaaaagtgtgatggatgatggcagatgttatctctgtccgtgtctaggctatccaagacaatggcgttcagaagatatttaccaggaaataaatgagacgatacaaataatagaaatttaa

SEQ ID NO: 412959 - DNA, 1059 bp, Staphylococcus aureus
atgtctgaacaacaaacaatgtcagagttaaaacaacaagcgcttgtagatattaatgaagcaaatgatgaacgtgcactgcaagaagttaaagtgaaatacttaggtaaaaaagggtcagttagcggactaatgaaattgatgaaggatttgccgaatgaagagaagcctgcgtttggtcaaaaagtgaatgaattgcgtcaaacaattcaaaatgaattagatgaaagacaacagatgttagttaaagaaaaattaaataagcaattggctgaagaaacaattgatgtatcattaccaggtcgtcatattgaaatcggttcaaagcatccattaacacgtacaatagaagaaattgaagacttattcttaggtttaggttatgaaattgtcaatggatatgaagttgaacaagatcattataacttcgaaatgctgaatttacctaaatcacaccctgcacgtgatatgcaagatagtttctatattacggatgaaattttattacgtacgcatacatcaccagtgcaagcacgtacgatggaatcacgtcatggtcaaggtccagttaaaattatttgccctggtaaagtgtatcgtcgtgactctgatgatgcgacacatagtcatcaatttacacaaattgaaggattagttgttgataaaaacgttaaaatgagtgatttgaaaggtactttagaattgttagctaagaaattatttggtgctgatcgtgaaattcgtttacgtccaagttacttcccattcactgaaccttctgtagaagttgatgtgtcatgttttaaatgtaaaggaaaaggttgtaatgtgtgtaaacacacaggatggattgaaattttaggcgctggaatggtacatcctaatgtattagaaatggctggttttgattcttcagagtactctggatttgcatttggtatgggaccagaccgtattgcaatgttgaaatatggtatagaagatattcgtcatttctatactaatgatgtgagatttttagatcaatttaaagcggtagaagatagaggtgacatgtaa

SEQ ID NO: 412960 - DNA, 1824 bp, Staphylococcus aureus
atgattattcctgcaatcatcggttacttatgtggtaatttccaatttggattattagttgcaaccggaactctagcacatatctacgtttttaaaggtccgtcgcgatctaagctgcgaactgtaataatttgtaatttagcgtttgcaatatgcatgatacttggtacgctaacagccacaacgccgctcgtttttggaatgacattattaattgttacggttataccattttatatatttaccgccttgaaaattgctggaccgtcatcgacattcttcattgtgacattcagtttacccattaacttacctatagcacctgaagaagcattatatagaggctttgcgattttagtaggtggtgtacttgccactatgatggtactcatcacaatcttattgtctaaaaacaaagctgaagaacaagccattcaaaacgattttaaactcatatctaagttattgcatgcttacaatgataaatctgcattttcacaagtagcaaaaacagcggtggatagttttaaagcgtcggataaactactcatcacttctaattcaagtagtgataaattaagcggacgtttccaaaaattattgttattacacacatcagcacaagggatatattctgaattattagagctgaatgctaaacaaatcagaccattgccagatgagttaattgaaatgatggatcatatcattacacagcgagatgatcgcaataaaaatgtgagatattggcgcaaagaagtaacagtaacagaggaatttcaaaacttattcaaccatatcttgaaaattgacgaaatggtgcatgcaaatgaagcacgtatcgcatatgaagctgaaatgcgaaaacctttatatagtaagcgtatttatcaaaatttaacattagattcaatcgtgtttagaaatacattgaggtatgcagcgattatgatgatagcgatatttatcgcgttaatgttcgattttgaaaaagcatattggatacctttatccgcacatacagtattattaggaacatcaactatacatgcaattgagagaggtatggcacgtggattaggcaccattttaggtgtgctagtactttcagttatattgttgttttcaataccaacacctgttgcagtcattttaatgggcattgcagcattatttactgaagcgttggtgggagcaaattatacaattgcagtagtttttattacaatacaagttattttaatgaacggattagcatcacagaacttaacaattaacattgcgtttccaagagttattgacgttgcaatgggtattgtgattgcaatcataggtttatttgtccttgggcaacgtaccgcatccgcattgcttccttatgtaatggctgaagttgttcgtaaagaagcaacgctcttccattatttattttctgaaaaccaatataaagatgatgtgtatcagaaaaacacggctatgaacctatctgtgaaattaaataatatgacgcaagtttataatgcagctaatggtgaattatttagtgataaaacattgattcaaaattattatcctagcttattcgcattagaagaaattagctttatgttaaatagagccatggctaatgaagatagacttacaataaatgaacaattaatgggcgagtatttagcaacatttgaaaacatcgctaagcatttagaattaaatacagaattagaaataaagatattaccagatttaccacagtataattatattcaatcagcaatgatgaatattcaacacaatggttttcgtgagagagacaagaacgtttaa

SEQ ID NO: 412961 - DNA, 1362 bp, Staphylococcus aureus; identical to SEQ ID NO: 408370

SEQ ID NO: 412962 - DNA, 1455 bp, Staphylococcus aureus; identical to SEQ ID NO: 408286

SEQ ID NO: 412963 - DNA, 972 bp, Staphylococcus aureus
atgaatgaatctgtaaaattaaaccatgctgaccatcgtctcattatttataaagatatacatgaaaacattgaagatggtatcacgttgttaattgttatggccgtagttcttgttttactagtaatatttggtttcattagtgcagataatatggctaaacgacaaacaaaagatatcgaaacgattattcaaaaaatttactatgccaaaaatcgtcatctaggtacatatacgcctttaaaaaacaacagtgaactagaagaaattaataattatatttacgatttatttgaatcaaatgagcaactgatccattctatcgagcatacagaacgtcgcttgcgtgatattcagttaaaggaaatagaacgccaattccaacctcatttcctattcaatacgatgcaaacaatacaatatttaattacgttatctccgaaattagcacaaactgtggtccaacaattatcgcaaatgttacgttactcattacgtacaaactcacatacagtggaattaaacgaagagttgaactacattgaacagtatgttgcgatacaaaacatccgttttgatgacatgattaagctccatatcgaaagttctgaagaagcgcgtcaccagacaattggtaaaatgatgcttcagccactcatagaaaatgctattaaacatggtagagatactgagtcattggacattactatacgcctgacattggcacgtcagaatttacatgttttagtttgcgacaatggtattgggatgtcgtcatctcgcctgcaatatgtacgccaatctcttaataatgatgtatttgatactaagcatttgggattaaatcatttacacaataaagcaatgattcaatatggttcacatgcacgactccatattttttcaaagcgtaatcaaggtacgttaatttgttataaaataccactttcaagggggaatgtagatgtttaa

SEQ ID NO: 412964 - DNA, 780 bp, Staphylococcus aureus
atgtgtggtcgacatggtaacaaaggtgtcatttctaagattgttcctgaagaagatatgccttacttaccagatggacgtccgattgatatcatgttaaatcctcttggtgtaccatctcgtatgaacatcggacaagtattagagctacacttaggtatggctgctaaaaatcttggtattcacgttgcatcaccagtatttgacggtgcaaacgatgacgatgtatggtcaacaattgaagaagctggtatggctcgtgatggtaaaactgtactttatgatggacgtacaggtgaaccattcgataaccgtatttcagtaggtgtaatgtacatgttgaaacttgcgcacatggttgatgataaattacatgcgcgttcaacaggaccatattcacttgttacacaacaaccacttggcggtaaagcgcaattcggtggacaacgtttcggtgagatggaggtatgggcacttgaagcatatggtgctgcatacacattacaagaaatcttaacttacaaatccgatgatacagtaggacgtgtgaaaacatacgaggctattgttaaaggtgaaaacatctctagaccaagtgttccagaatcattccgagtattgatgaaagaattacaaagtttaggtttagatgtaaaagttatggatgagcaagataatgaaatcgaaatgacagacgttgatgacgatgatgttgtagaacgcaaagtagatttacaacaaaatgatgctcctgaaacacaaaaagaagttactgattaa

SEQ ID NO: 412965 - DNA, 609 bp, Staphylococcus aureus
atgagtcattattacgatgaagatccaagtgtaattagcaatgaacaacgtattcaatatcaattaaaccatcataaaattgatttaataactgataacggagtgttttcgaaagataaagtagattatggttcagatgttcttgttcaaacttttttaaaagcgcatccacctggtccaagtaagcgaattgccgatgttggttgtggttacggaccaattggtttgatgattgctaaagtatcaccacatcattcaattacaatgctagatgttaatcacagagcgctagccttagttgaaaaaaacaaaaaattaaatggtattgataatgtgatcgtaaaggaaagtgatgctttgtctgctgtggaagacaaaagttttgattttattttaaccaatccaccaataagagcagggaaagaaaccgtgcatcgtatattcgagcaagcattacatagattagactcgaacggtgaactatttgttgtaattcagaagaagcaaggtatgccatctgcaaagaaaagaatgaatgaactttttggaaatgtagaagtggtaaataaagataaaggatattacattctgagaagtataaaagcttga

SEQ ID NO: 412966 - DNA, 228 bp, Staphylococcus aureus
atgctaaatcaacgaattattgatatttatagatttgttgagaagaaaattactccttcaaacttagctttggaggagttattttttatgtcaaaattaaaaatgataaaagataaagatatacataagaaaaaacccttcaaagagactgagaatagtcaaaattttgaaggggttaattcgatgttgatgtatttgttaaataaagaatccagcgattgcagctga

SEQ ID NO: 412967 - DNA, 1359 bp, Staphylococcus aureus
atgtttaacgaaatatggccgttaatcagtgttgttttaggtataattattttattagtattaatcattgggtttaaattaaatacatttatttcattaattatcacatcgatgattacagcgttaatgctaggtataccattgactaaaattatggagacgattgagaaagggatgggcagtacgctcggccacattgcactgatattcggtttaggtgccatacttgggaaattacttgctgatggtggtggtgcaactcgaattgcagacacgttgattcaaaaatttggtcaaaaacatgtacaatgggcaatgcttgttgcagcatttatcgtcgggattgcattgttctttgaagtaggtttagtcttactgattccattagtatttacagtagcaaaacgcgcaaatgtttcagtgttaaaactaggattacctatggtaacagctttatcagtgacacatggctttttaccaccacatccaggaccggtagtcatcgcaaaagaattaaaggcgaatgtaggagatgtattactatacggtatgattattgccattccagttacactcattgcaggacctatatttaacaaagttgcacaaaaaatgattccgtctgcgtatacacgagaaggcgatatttcagcgttaggtgcacaaaaagaatttacggatcaagagatgccaggatttggtatgagtttattaacagcaacattaccagtcatattaatgttagtgtctacgataacgcaacttgtaaccgggcacgacaaacctacaaatctatttgaatctatcatttatatgatcggaacagcagggacagccatgctaatagcagtattatttgcaatcgttacgatgggattaatgagaaaacgtaagatgaatcatattatggaatcagtgacgaatgcgatttatccaatcggaatgatgttattgattattggcggtggcggtacatttaaacaagtattaattgacggtggtgtcggaaatacaattgctaaaatgtttgaaggtacagagatgtctccgattttactagcttggattgttgcagctgtgctacgtatcgcattaggttcggctacagtagctgcgatttcaactacaggtattgtcttaccattattacaatcatcagatgtaaatgttgcattagttgtactagcgattggtgcaggtagtgtgattttgtctcatgttaatgacgcaggattctggatgtttaaagaatattttggtttaactgtaaaagaaacattcctaacatggtcattattagaaacgattatttccgtttcaggtatcatcttcattttattcatcagcttatttgtttaa

SEQ ID NO: 412968 - DNA, 378 bp, Staphylococcus aureus
atgaatttaaaagcaccgtatgcaggtttaagagataatttgttattaacgaaaactggcgaagtttgggcgtattatcgtgttcgttctgagtctatttcaacagcaaattatgatgcaaaagaagaatcaaaaaagcgtatgcgttattttttagagtcgattaaaggttatcaagattttcattttgaaatgtatgaccatgatttagatttgcgaaataaatttaaagaaattagtaaagattttgatgatgaagcttttaatgtagctgaatattattcaaaagaaactattgacgtattagaacaagaattacaaatgattacgcataattcttttgttatgggtgttaaaatatgtgaatttagacgataa

SEQ ID NO: 412969 - DNA, 354 bp, Staphylococcus aureus
atgaggcgatggtttgtattaattttaggattagttatattattatctgcatgtggtcagaagtatgataaagaaattgataaagtttcaaagttagaaaaagaaagtaaaaaagagactaaagactctaattctagaaaaattgaaagagagaattcatattttaaagtttatgatggtggtaaagttataactgtaacttatatgccttttaaagattctgatgtaacaacatcaaaaatttataaattaaatgaaactactgataaatatgaaaaagattataatcaagatgctgataaatatgaaaaaaataataagccagaatatgaagaaaataatatgaaaaaataa

SEQ ID NO: 412970 - DNA, 936 bp, Staphylococcus aureus
atgaataaaaataagccttttattgtagtaattgtggggccaactgcttcaggtaaaacagagcttagcatcgaactcgcgaagcgtatcaatggtgaaatcataagcggtgactctatgcaagtctacaaacatatgaatattggaactgcaaaagtaacacctgaagaaatggatggtattccacatcatttaattggtatcttgaatcctgatgatacattttcagcatatgaattcaagcgattagcagaagatttaattactgatataacgaatagaggtaaagttccaatcatagcaggtggaacaggcttatatattcaatcattaatatataattatgaattagaagatgaaacagttacacctgcacaattatcggtagttaaacaaaagttatctgcattagaacatttagataatcagcaactacacgaatatttagctcaatttgacgaggcttctgccaaaaatattcatccaaacaatcgacagagagtattgcgcgctatcgaatactattttaaaacaaaaaaacttttaagtaatcgtaagaaagtgcaacaatttactgaaaattatgatacattattaatagggattgaaatgtcgcgtaaaacattatattcaagaataaataaacgtgttgatattatgttggatcacggattatttagagaagtgcaacaacttgttgaacaaggctatgaatcttgccaaagtatgcaagctattggatataaagaattaatacctgtgattaacggacaaatgatttatgaagatgctgtcaatgatttaaagcaacattcacgccaatatgcaaaacgacaaatgacatggttcaagaataaaatgagtgttcattggttagataaagaaaatatgtcacttcaaatgatgttagatgagattacaacccagattaagtaa

SEQ ID NO: 412971 - DNA, 918 bp, Staphylococcus aureus
atgatgactgaaaaacaatttaaattaactgtacaagataatacgaatattgaagttaaagtgaattttacagatgtagattcaaaaggaattattcatatatttcatggtatggctgaacatatggaacgttacgataaattagcacatgcactttctaagcatggcttcgatgtgatacgtcataatcatcgaggacatggtattaatattgatgaatcaacaagagggcattacgatgatatgaaacgagttatcggtgatgcctttgaagtagcgcaaacagtgagaggcaatgttgataaaccatacattataatcggacattcaatgggatccgttatagctagattgtttgtagaaacatatccgcaatatgttgatggtctaattttaagtggtactggtatgtatccattatggaaaggattaccaaccgttaaggtgttacaactgattacaaaaatttatggtgccgagaaacgggttgaatgggttaaccagttagtatcaaatagttttaataaaaaaatacgtccattacgtacacaaagtgattggatttctagtaatccaactgaagtagacaactttattaaagatccatatagtggatttaatgtgtcaaatcaattattatatcaaacagcatattatatgctacatacatcacaattaaaaaatataaaaaagttaaatcatgccatgcctatattattagtttcaggatatgacgatcctttaggtgattgtggtaaagggattttaaaattggcgaatatatatagaaaagccggcattaaaaatgttaaagttaatctttatcatcataaacgtcatgaagtgttatttgaaaaagatcatgacaaaatttgggaagacttgtttaaatggttgaatcaattttataaaaaataa

SEQ ID NO: 412972 - DNA, 1332 bp, Staphylococcus aureus
gtggcaatagtagaacgacaactattaggaggtacttgtctccataaaggttgtattcctactaaatcgctgcttaaatctgctgaagtatttcaaacagtaaaacaggcagcaatgtttggcgttgatgtcaaagatgctaatgttaattttgaaaatatgttggcacgaaaagaagacattattaatcaaatgtatcaaggtgtaaagcatttaatgcaacacaatcacattgacatttataatggcacgggacgtattctaggtacatctatattttcacctcaaagtggcacaatatctgtcgaatatgaagatggtgaatcagacttattacccaaccaatttgtattaattgcaactggttcttcgcctgcagagttgccattcttatcatttgatcatgataaaattttatctagcgatgatatattatcattaaagacgttaccatcaagtgttggtattattggtggtggtgttatcggaatggaatttgcatcattgatgatagatttaggtgttgacgtaacagttatagaagctggtgaaagaattttaccaactgaaagtaaacaagcttcacaactattaaaaaaatcattgtcagcacgtggtgttaaattctatgagggaataaaactttctgaaaatgatatcaatgttaacgaagatggtgttacatttgaaatttcctcagacataattaaagtagataaagtgttgctatcgattggtagaaaacctaacacatcagatattggtttaaacaacactaaaataaaactttcaacatcaggacatattttaacgaacgaatttcaacaaactgaagataaacatatttatgcagctggtgattgtattggaaaattacaattggcacatgttggatcaaaagaaggtgttgtggctgtcgatcatatgtttgaagggaacccaatcccagtaaactataacatgatgcctaagtgtatttattcacaacctgaaattgcttctatcggtttaaacattgagcaagcaaaggcagagggaatgaaagttaaaagttttaaagtaccatttaaagcaattggtaaagcagtgattgatagccatgacgcaaacgaagggtatagcgaaatggtgattgatcaatcaactgaagaaattgtgggtattaatatgattggtccacatgtaacagaattgattaatgaggcatcactgttacagttcatgaatggctcggcattagaattaggactaacaacacacgcacatccttccatctctgaagtgttgatggaattaggattgaaagcagaaagtagagctattcacgtataa

SEQ ID NO: 412973 - DNA, 903 bp, Staphylococcus aureus
gtgttggcacctcatacaattgaaaatgcagcgcaaattacggattggttaaagcagatacagcaacaagatacgtatttaaaagatgaattaaagacagcttttctaggggaagtcttaggacagtcttatttaaatacacaactttcgccttataaacaaactcaagtttatggtgcgttaggtgttatatggcgtgaaaatatatatcatatgttaatcgatgaagaggatgcgataccatttaatgcactttatgcgagtgataaggatggtgtaccattcattgaaaattggattaaacaatatggttctgaagcttggacaaagcaatttttagctgtagcgattcgtccaatgattcatatgctttattatcacggtattgcctttgaatcgcatgcacaaaatatgatgctcattcatgaaaatggttggcctacacgtattgccttaaaagatttccatgatggtgttcgttttaagcgtgagcatttaagtgaagctgcttcacacctgacattaaagccaatgccagaagcacataaaaaagtgaatagtaattcatttattgaaacagatgatgaacgtttagtacgtgactttttacatgatgcatttttctttattaatatcgccgaaatcatcttatttattgaaaagcaatatggtatcgatgagaagctgcaatggaaatgggttaaaggcatcattgaggcgtatcaagaagcatttccagagctgaataactatcaacattttgatttgtttgaacctacgattcaagttgaaaagttaacgacacgtcgattattaagtgactccgagttaagaattcatcatgttacaaatccattaggtgtaggaggtattactgatgcaacaactatctctgaaacatag

SEQ ID NO: 412974 - DNA, 324 bp, Staphylococcus aureus
atgccacgtgcaatattaacaaaatctgcacctaaacctagtgcaatcgcaattttatctggtgtcactaacttaccagatgccgctaatttcactttatctcgaataccatatttttctaacatgccagacacaataggtagagctgtaaatagcggtaagccaacaccatcttgtaattcttggaatgttgcaccagtaccaccttcaccaccgtcaatcgtaataaagcttggatacttatctaattccaccatcgtacgtacaagtgtttcaatttctgaaactttgcttactacaattttgaatcctactggtttttga

SEQ ID NO: 412975 - DNA, 273 bp, Staphylococcus aureus
atgattggatttcctgtcttaattgcaatcatcgctttaaaaatagttgtcgacgtaggatttgttgttggcgtaacaccacaaataacaccaattggttccgctacatacgttaatcctttttctttatcttcaccaataatccctactgtcttattgtcttttattgaattccatatatattcagaagcgtataaatttttaatcgctttatcttcgtatatacctcttccagtttcttcatgtgctaattttgctagcaccatatgttga

SEQ ID NO: 412976 - DNA, 693 bp, Staphylococcus aureus
atgaaatctgtaggaccatctcttgcaccaacaaacgctaaaggtatatttgtcgttgctgatgtgacgattaaaaacaaaggtaaagaagcgttaacaattgatagttcaatgtttaagctaaaatccggtgataaaacatttgaagcagataatacaggttcaatgtctgctaatcaaagtgacaatggtagtatagaaaattcatttttcttacagcgtataaatccagatagcactgctcaaggtaaaattgttttcgatgtgtcagaaaacatagccaacgcaaaagataaaaaattagaagttatttctagtttatttagcgtcaagaagattacatttgatttatccgatgctaaaaaaacatcaaaagctaaaaaagacaagcaagatacagaagtagctgttgcgagttcaaatagcgataatgtaagttatgaagcttcggctactacacctgctacaacttctagtgcggatactgattctgaagatagcgaaaagtctagtaaagatgaggataagcagaatgcgtctaaaagtgataattctagtgtagaaaaaagtgaatctaatgaggaaactgctcctgtagagcccatgccccatagcaaacctaccactagtgaagcacctcctagccaaaatattcacaatgaagatagcatgtacgacgcttcaacagaataa

SEQ ID NO: 412977 - DNA, 771 bp, Staphylococcus aureus
atgttatatgagacggggtcatttcttgaattaagagaagaaacaattgtcttattgaaaactggcatacaacaatatgatgcattgatgatttattatgtgaaaagtttgataggtttggaacaatattttgaagcggtagaagtaattcatcaaattattgatgaggtcaaagatcacaaaacaagaatggcattacatcctcttaaagaatttgctaagtcaaaattaattgaagatgaaaaacgattgacacagtcattaactgattttgatacgttatcaatgagggaacagacgcacttgattttgaagttaatagacaatggtcattttcaatttcaagaaacggtattatatatattgaaatctaatatgtacagttataaactaattagtttaatgattgagtatttaaggttcgcaaattgtacacaagaactgacaattgaaaagtatggtatggatataacttttgtaccagctaatttaaaagggctagaacatacaacactgaaagaaaaagttatacctaacgttatggaaacattaaatgaaggtgctttacatatcgctgaagaagcacaccatattatgaataatcactctatcatgatttatccaattgatattgaaactttgtttgaaacgaataaatggattaatgcatacgaatgttatttcaaaaatatgttaggacttaaatgtgaattacaaagtatcgatgcatttaattttattcagcaattagatttgaataataatagttaa

SEQ ID NO: 412978 - DNA, 669 bp, Staphylococcus aureus
atgaagccagttgtagttatgacacaaacaaatgacatgcaaagtgatttagtatcaattattcacaaaccttttattgatataaagccactaaattttgatattcatttgttaaatcaacgctatgactggcttattttttcatctaaaaatgctgtgaaattcttttataaatatctaaaaggaattaatgttgataacattgctgtgataggaagtaagacagcgcaatattgtgaatcacttggcattcgagttgattttatgccaaacgacttttctcaagaaggatttttagaatcatttaatcaaactaaccaaaaaatacttttgccttcgagtgaattggcgagaccattgttatcagcagcgttatctgaagataatgaagttgttaaaatagatttatatacttcagtgcctaacaaacaaaatatacaagatgttaaagaaatgatagaacatcaacaaatcgatgcattaacattttcaagttcgtcggcagtacgttattattttaatgaaggatttgtaccaaaattcaagtcgtattttgctattggagaacaaacagcacggaccattaaatcatatcaacagccagtaacaattgcagaaattcaaacactcgaatcactaattgaaaagattttagaaagtaggggctaa

SEQ ID NO: 412979 - DNA, 912 bp, Staphylococcus aureus
atggataataatgaaaaagaaaaaagtaaaagtgaattattagttgtcacaggtttatctggcgcaggtaaatctttggttattcaatgtttagaagacatgggatatttttgtgtagataatctaccaccagtgttattgcctaaatttgtagagttgatggaacaaggaaatccatccttaagaaaagtggcaattgcaattgatttaagaggtaaggaactatttaattcattagttgcagtagtggataaagtcaaaagtgaaagtgacgtcatcattgatgttatgtttttagaagctagtactgaaaaattaatttcaagatataaggaaacgcgtcgtgcacatcctttgatggaacaaggtaaaaaatcgttaatcaatgcaattaatgatgagcgagagcatttgtctcaaattagaagtatagctaattttgttatagatactacaaagttatcacctaaagaattaaaagaacgcattcgtcgatactatgaagatgaagagtttgaaacttttacaattaatgtcacaagtttcggttttaaacatgggattcagatggatgcagatttagtatttgatgtacgatttttaccaaatccatattatgtagtagatttaagacctttaacaggattagataaagacgtttataattatgttatgaaatggaaagagacagagattttctttgaaaaattaactgatttgttagattttatgatacctgggtataaaaaagaagggaaatctcaattagtaattgccatcggttgtacgggtggacaacatagatctgtagcattagcagaacgactaggtaattatctaaatgaagtatttgaatataatgtttatgtgcatcatagggacgcacatattgaaagtggcgagaaaaaatga

SEQ ID NO: 412980 - DNA, 171 bp, Staphylococcus aureus; identical to SEQ ID NO: 408472

SEQ ID NO: 412981 - DNA, 744 bp, Staphylococcus aureus
atgaaaagtgtgaaaaagttgagtgaagaattaggggttagtaagcaaacgatttttaataatattaagcgattgaatatagagacaataaaacaggaaaacacttcgtttattaaagaagataccgatatagaaaaaatcattcaaagagtaaatgaaaataaaaagaaatatggttttgaaagtactactgaagacaaacaaaaaaaagggtcggataatattaattttgaatcgaaaagcgatgctcaaatagtagaaatccttaaaaatcagattgatactttaaataatcaaattgaaaaacaagaaagtcgtcatgaaacaacaattgaattttgcagaaaagagttgcaagaaagatcaaaattgcttgaaaatcagcaagttctggcattagagagtaataaaaagattcaaaaattagaaaatcaattagaaaaagaaaaacaccttaattatccctttgatacatctactaacactagacaaaacgttgatgcacaagaaaaaacatatactactaatcctgtaaatattaacagagatcaggaagaaaccaaagaaacagagattcaatataaggatatatctggaagtcaaagcgacgaaagtacacaaggtgaagaagcaaaaagagaagacgttccagctaatctaaatgacaatgatagtgatatagaagaaaagagtgaagaaacggaacctaaaaaggggttttggagtcgtttgtttggtagctaa

SEQ ID NO: 412982 - DNA, 651 bp, Staphylococcus aureus
atgattaaattaatacttaaaagattagggttaatgatcccgttactaattttaatttcaatagttgtattttcattagcaatcatacaaccaggagatccattttcagatctacaaaacggtaaaataaaacaagaagcaataaatgcacaaagggaaaaattaggtctcaacgactcaataccacatcaatacattagatgggtcaatcatgttatacacggtgatttaggggagtcaatcaaatataaaaggccggtaattgatgttattgaggaaagaattccaaatacaatattactcggtgctatgtcattaattattacttatattatctcatttgctttaggaataacgtcaggtagatattcttacagtttgacggattatactgtgcaaatatttaattatttgatgttagccattccatcttttattgcgggagtatttgcaatttttattttttcttttgaattacaatggttcccgtttcaaggttctgttgatattaaccttaaagaaggtacttttgaatattatatgagtaaaatatatcacacatttttacctgcattcactttaggtttactgggtaatttgatttctgatattacttatggatttatagatccaagaattagaagtaactag

SEQ ID NO: 412983 - DNA, 771 bp, Staphylococcus aureus
atggcgaaagagtcgaaatcagctaatgaagtttcacctgagcaaattaaccaatggattaaagaacaccaagaaaataagaatacagatgcacaagataagttagttaaacattaccaaaaactaattgagtcattggcatataaatattctaaaggacaatcacatcacgaagatttagttcaagttggtatggttggtttaataggtgccataaatagattcgatatgtcctttgaacggaagtttgaagcctttttagtacctactgtaatcggtgaaatcaaaagatatctacgagataaaacttggagtgtacatgttccgagacgtattaaagaaattggaccaagaatcaaaaaagtgagcgatgaactaaccgctgaattagagcgttcaccttctatcagtgaaatagctgatcgattagaagtttcagaagaagaagtgttagaagcaatggaaatgggacaaagttataatgcgttaagtgttgaccattccattgaagctgataaagatggttcaactgttacgctattagatattatgggacaacaagatgaccattatgacttaactgaaaaacgtatgattttagaaaaaatattacctatattatctgatcgcgaacgagaaatcatacaatgtacgtttattgagggtttgagtcaaaaagagacaggtgagcgtatcggtttaagtcaaatgcatgtttccagacttcaaagaacggcaattaagaaattacaagaagcagcacataaatag

SEQ ID NO: 412984 - DNA, 966 bp, Staphylococcus aureus
atgctatttgcgcatttgaaaaactttagcaaatcaccacctagtggcacaatggtgaaaccgggtgatgttgtaggtttaactggtaatacaggttttagtacaggaccgcacttacattttgaaatgagaagaaatggacgccattttgaccccgaaccatatttaagaaacgccaagaaaaaaggtagattatcaataggtggcggtggagttacttccggtagtggtgcaacgtatgccagcagagtaattcgacaagcgcaaaatatcttaggtggtcgttataagagtaaatggattcacgaccaaatgatgcgagttgcaaagcgtgaaagtaactatcaagcgaacgcagtgaataattgggatattaacgcaagaaggggtgacccttcaaaaggattgttccaaattatcggttcaacatttagagctaatgcgaagtctggttatactaacttcaacaatcctgttcatcaaggtatttcagcaatgcagtacattgttagacgctacggttgggatggatttaagcgtgcgggtgattacgcatatgctactggtggcaaagtctacaacggattgtatcacttaggagaagaagggtatccagagtggataattcctactgatccaagtagagcgaatgaagctcataaattattagctttagctgctaatgatattgacaatcgatctaaaaacaaaagacctaacaatctaccaaatccaagtataagtaatagtgatacaaactatattcatacattggagaataaactggatgcggttattaattgtttggttagtttggttgagtctaatcaagttattgcagataaggattatgaaccagttattaataagtatgtgttcgatgatgaagtaaacgattctatcgataagcgagagcgtcatgaagctacaagggttaaatttagaagagggggtacgataatctaa

SEQ ID NO: 412985 - DNA, 1491 bp, Staphylococcus aureus
atgcaagacacaattcaaatagacaataaaaccattgaatggttagttgtacaaagagggtttgagataccctcttttaattttgttactgaaaaggaaagtgtgaaaggtagagcaggttctattgctaaagctcgttatctaaatgatatcgaattcgaattacctctaataattagaaatgaagccttgtcgccaggtggacaaaaaaagcatgacgatatattggaagagttagttaaattttttgatatcgacaatttaaaaccgaaaaaattaaagttcaaatcgaaaaattggtattggtttgcatattttgatgggccattaaaattaccgaaaaacccaagaggttcagtgaagttcactataaaagtagtactaacagacccttacaaatattcagtaacaggaaataaaaatactgcgatttcagaccaagtatcggttgttaataacggcactgctgacacacctttaattgttgaagctcgagcgataaaaccatctagttactttatgatcactaaaaatgatgaagattattttatggttggtgatgatgaggtaaccaaagaagttaaggattacatgcctcctgtttatcatagtgagtttcgtgatttcaaaggttggactaagatgattactgaagatattccaagtaatgatttaggtggtaaggtcggcggtgattttgtgatatccaatcttggcgaaggatataaagcaactaattttcctgatgcaaaaggttgggttggtgctggcacgaaacgagggctccctaaagcgatgacagattttcaaattacctataaatgtattgttgaacaaaaaggtaaaggtgccggaagaacagcacaacatatttatgatagtgatggtaagttacttgcttctattggttatgaaaataaatatcatgatagaaaaataggacatattgttgttacgttgtataaccaaaaaggagaccccaaaaagatatacgactatcagaataaaccgataatgtataacttggacagaatcgttgtttatatgcggctcagaagagtaggtaataaattttctattaaaacttggaaatttgatcacattaaagacccagatagacgtaaacctattgatatggatgagaaagagtggatagatggcggtaagttttatcagcgtccagcttctatcatagctatctatagtgcgaagtataacggttataagtggatggagatgaatggattaggttcattcaatacggagattctaccgaaaccgaaaggcgcaagggatgtcattatacaaaaaggtgatttagtgaaaatagatatgcaagcaaaaagtgttgtcatcaatgaggaaccaatgttgagcgagaaatcgtttggaagtaattatttcaatgttgattctgggtacagtgaattaatcatacaacctgaaaacgtctttgatacgacggttaaatggcaagatagatatttatag

SEQ ID NO: 412986 - DNA, 627 bp, Staphylococcus aureus
atgagccgtattattgaaagtgttgaaaagcactatgataatggtattgaacttgaatttaatacactttatcaggtgttatgcactttacaaacgaatatgaaacaaaatgcggcaggcgttgatgtttctgggaaatggttctttgatcgctatagtccaaccacaaatattaaagcagttggtaatgccgatgtcacttatggattagcaattgacggtgataaagttacacgtaaagaacttactattgaagcaactgtcacaacgctatgcccttgttcaaaagaaataagtgaatattcagcgcacaaccaacgtggtgttgtcactgttaaaacatatattaataaagatcaagacatagttgatgactataaaaacaaaattttagatgcaatggaagctaatgcaagttcaattctataccctattttaaaacgtcctgatgaaaaacgtgtgacagagcgtgcatatgaaaatccacgctttgtcgaagacttaattcgtttaattgccgcggacttagttgaatttgattggttagaaggtttcgatatcgaatgtcgtaacgaagagtctatccatcaacatgatgctttcgctaaattaaagtatcgcaaataa

SEQ ID NO: 412987 - DNA, 1935 bp, Staphylococcus aureus
atggtgactgcattgtcagatgtaaacaacacggataattatggtgctgggcaaatacaagtattagaaggtttagaagcagtacgtaaaagaccaggtatgtatataggatcgacttcagagagaggtttgcaccatttagtgtgggaaattgtcgataatagtatcgatgaagcattagctggttatgcaaatcaaattgaagttgttattgaaaaagataactggattaaagtaacggataacggacgtggtatcccagttgatattcaagaaaaaatgggacgtccagctgtcgaagttattttaactgttttacatgctggtggtaaattcggcggtggcggatacaaagtatctggtggtttacatggtgttggttcatcagttgtaaacgcattgtcacaagacttagaagtatatgtacacagaaatgagactatatatcatcaagcatataaaaaaggtgtacctcaatttgacttaaaagaagttggcacaactgataagacaggtactgtcattcgttttaaagcagatggagaaatcttcacagagacaactgtatacaactatgaaacattacagcaacgtattagagagcttgctttcttaaacaaaggaattcaaatcacattaagagatgaacgtgatgaagaaaacgttagagaagactcctatcactatgagggcggtattaaatcttatgttgagttattgaacgaaaataaagaacctattcatgatgagccgatttatattcatcaatctaaagatgatattgaagtagaaattgcgattcaatataactcaggatatgccacaaatcttttaacttacgcaaataacattcatacgtacgaaggtggtacgcatgaagacggattcaaacgtgcattaacgcgtgtcttaaatagttatggtttaagtagcaagattatgaaagaagacaaagatagactttctggtgaagatacacgtgaaggtatgacagcaattatatctatcaaacatggtgatcctcaattcgaaggtcaaacgaagacaaaattaggtaattctgaagtgcgtcaagttgtagataaattattctcagagcactttgaacgatttttatatgaaaatccacaagtcgcacgtacagtggttgaaaaaggtattatggcggcacgtgcacgtgttgctgcgaaaaaagcgcgtgaagtaacacgtcgtaaatcagcgttagatgtagcaagtcttccaggtaaattagccgattgctctagtaaaagtcctgaagaatgtgagattttcttagtcgaaggggactctgccggggggtctacaaaatctggtcgtgactctagaacgcaggcgattttaccattacgaggtaagatattaaatgttgaaaaggcacgattagatagaattttgaataacaatgaaattcgtcaaatgatcacagcatttggtacaggaatcggtggcgactttgatctagcgaaagcaagatatcacaaaatcgtcattatgactgatgccgatgtggatggagcgcatattagaacattgttattaacattcttctatcgatttatgagaccgttaattgaagcaggctatgtgtatattgcacagccaccgttgtataaactgacacaaggtaaacaaaagtattatgtatacaatgatagggaacttgataaacttaaatctgaattgaatccaacaccaaaatggtctattgcacgatacaaaggtcttggagaaatgaatgcagatcaattatgggaaacaacaatgaaccctgagcaccgcgctcttttacaagtaaaacttgaagatgcgattgaagcggaccaaacatttgaaatgttaatgggtgacgttgtagaaaaccgtagacaatttatagaagataatgcagtttatgcaaacttagacttctaa

SEQ ID NO: 412988 - DNA, 1419 bp, Staphylococcus aureus; identical to SEQ ID NO: 408335

SEQ ID NO: 412989 - DNA, 141 bp, Staphylococcus aureus
atgttacaaaaatttagaattgcgaaagaaagaaataaattaaaactcaaattactaaagcatgctagttactgtttagaaagaaacaacaaccctgaactgttgcgagcagttgcagagttgttaaagaaggttaactaa

SEQ ID NO: 412990 - DNA, 246 bp, Staphylococcus aureus
gtgaattacatcattacattagttctaatatttgtattcatagttatatttaacaatttactcaacaaatatatggttttgtacaaagaattagatttatttacatgcagaattggaatgttattagtcttaatcgttatagtagattttgcaaagcaaaaaaatatgttggctacattgagtgttgtactaatacttttattcgtagaaaaacttagaatcattcaaaggagtgatgagaagtga

SEQ ID NO: 412991 - DNA, 819 bp, Staphylococcus aureus; identical to SEQ ID NO: 412136

SEQ ID NO: 412992 - DNA, 438 bp, Staphylococcus aureus
atgtctaagccagtagctgaaatgattagtacttatactacgcaaatagataatgcactggctttaaatgaagaatttgatttattagcattaaggaaatcagttatacgttggtgtgaattgttgcttactaataagccaatggcacttataggtattattgatttattgaaacaggctaaaaataaaaaactgcaatctttaactattgcagctgtgaatggtttcttcgaagatatcatacatacaaaggtaaatgtagaggataaacaaatatatagtgatttaaaaaatgatagtgatcaatatgcgcaaaagttgtcgtttaatcaattaattttgatgtttgatcaactgacggaagcacataagaaattgaatcaaaatgtaaatccaacgcttgtatttgaacaaatcgtaattaagggtgtgagttag

SEQ ID NO: 412993 - DNA, 708 bp, Staphylococcus aureus; identical to SEQ ID NO: 408312

SEQ ID NO: 412994 - DNA, 300 bp, Staphylococcus aureus
atggcatcagataatgaagcgtatactacagcgccaataccaattactaaaccggctaatgtcgcttgccaacttactgtcgttactgaaatgtttaagtcatcagcaatggctacagaaatcaatttgaatgagttgtctataaccaaactgaatacaaataagaataataaaataggtactgctttctttattttagaatattcaacattcataatcatctacaccaatgacagtgcaatttcaatcatatctgtaaatgcacgttccctttcctcaggtgttgttgacgtttcatga

SEQ ID NO: 412995 - DNA, 279 bp, Staphylococcus aureus
gtgctcatcgaactacttacggacattgatttactgtctgatgcagctaatgatccacttgtactcatagaatcgcttatcatttcagacgtgctcattgagtctgatgagcttgttgagacactttgtgatgttgctatgcttagtgatccagatactgaatcacttgtgctcgttgaatcgctcaatgattctgatgtactcatcgattttgaatcacttgtacttaatgatattgatgtactttgtgaatctgatttgcttgttgacgcactttga

SEQ ID NO: 412996 - DNA, 402 bp, Staphylococcus aureus
gtggatgaaggttcatatcagccaagtagatgttttgcgttaccagttattcaaaaaggacacatatttattaagcgagtgaatgactgtccaattatgaatgttgatatgctcgaacagtggtcgaaggagtttgaacaatcaaatgctagtcctaatgtcataggatacactcgacgcgatagtgagtactggcgcgagctatgctttggaacaaccgaaggcaatcgtaacaatgcactagctagcttaattgggcatttattaagatgtcacgttaatgattatattgtttattcatttgctttattatgggggcaattcgcatgtaaaccacctatgaaagaacaagaaatcaacgccacttttcaatcgatattaaataaacactataacaattag

SEQ ID NO: 412997 - DNA, 711 bp, Staphylococcus aureus
atgacaaaaggtacaccacatattcaaccaaatggagtaaaaattgctaaaacagtattaatgcctggcgatccgctacgcgcaaaatatattgctgataattttttagaaaatgttgaacaatttaacgatgtacgtaacatgtttggttacactggtacatataaaggtaaagaagtttctgtaatgggttctggcatgggtattccaagtattggtatttactcatatgagttatacaacttctttgatgtagatacaatcattcgtatcggttcttgtggcgcattacaagaaaatgttaacttatacgatgttattattgcacaagctgcatcaactaattcaaattatgtagatcaatacaatattccaggtcatttcgcgcctatcgctgacttcgagttagtaactaaagctaaaaatgtcgctgaccaaatcggtgctactacacacgtaggtaacgtattatcttctgatacattttacaatgccgatccaacattcaatgatgcttggaaaaaaatgggtattttaggtatcgaaatggaatcagctggtttatatttaaatgcgattcatgctggtaaaaaagcacttggtattttcacagtaagtgatcatattttacgtgacgaagctactacacctgaagaacgtcaaaattcatttacacaaatgatggaaatcgctttagaaatcgcagagtaa

SEQ ID NO: 412998 - DNA, 1143 bp, Staphylococcus aureus
atgttttctggcacagtgccagccttgatttattatggcttagatttattgaatccaagctattttttaatatcagccttttttataagtgctgttacatctgtagcaactggtacagcatggggctctgcatcaactgcagggattgcacttatttctatcggtaatcaattaagtatctcaccaggaatggctgcgggtgctattatagcaggcgctgtatttggcgataaaatgtcacctttatcagatacaactaatttagcggcgcttgtcactaaagtgaatatatttaaacacattcattcaatgatgtggacaacaatacctgcgtcaatcatcggtttattagtatggtttattgttggatttcaatttaaagggcattcaaatgataagcagattcaaacattgttatcagagcttgcacagatttatcaaattaacatatgggtctgggttcccttaattgtgatcattgtttgtttgctatttaaaatggctacagtgccagctatgctaatatcaagcttttctgccattatagtggggacttttaatcatcatttcaaaatgacagatggtttcaaagcaacatttagtggttttaacgactcaatgatacatcagtctcatatttcattcagtgtgaaaagcttgttagaacagggtggtatgatgagtatgacccaaatattagtaacgatattttgcggatatgcatttgcaggtattgtagaaaaagcaggatgtttagaagtcttattaactactatttctaaaggcatccattctgtaggaagtttaatatgtattaccgttatttgttgtattgcgcttgtattcgctgcaggtgttgcttcgattgtaattattatggtcggtgtgttaatgaaagatttgttcgaaaaataccaagtctctcgttccgttttatcaagaacacttgaagactcaagtacgatggttttacctttaataccatggggaacatcaggtatttactatacgaatcaacttcatgtctctgttggagaatttttcatatggacagtaccatgttatttatgcgcaattatagcaattatctatggttttacaggaataggtattaaaaagtcatcgaattcacgtttaacttaa

SEQ ID NO: 412999 - DNA, 993 bp, Staphylococcus aureus
gtgatatatgttgcaaagtatctttctaaagaggaccagaagacttaccttggcttaagtacgagcagttattccttgtcattagttatcggtacattatcaggtggatttatttctacgtatttacactggacaaatatgtttttaattgcattaatcgtagtatttacgttgccattcctatttaaattattaccaaaagaaaataatacaaataaagctcatttagattttgttggcttaattctagtggcaactatcgctacaacagttatgctgtttattacgaactttaattggttatatatgattggtgccttaattgcgattatcgtttttgcgctatatattaaaaatgcgcaacgtccattagtaaacaaatcatttttccaaaataaacgttatgcttcatttttatttatagtatttgtaatgtatgccatccaattgggttatatttttacgttcccattcataatggaacaaatttatcatcttcagctagacacaacatcactgctattagtaccgggttatattgtagcagtcatcgttggtgcactaagtggtaaaatcggcgaatatcttaattcaaaacaagcgattatcacagcaattattttaatcgcactgagcttgattttacctgcatttgtagtaggtaatcacatttcaatcttcgtcatttctatgatattctttgcaggtagctttgctttaatgtatgcacctttacttaacgaagccattaaaacaatagatcttaatatgacaggtgtggctattggtttttataatttaattattaatgtggcggtatctgtaggtattgcgattgctgcggctttaatcgattttaaagcattaaatttcccaggcaatgatgcattaagttcacatttcggtattattttaattattttaggtttaatgagtattgtcggattagttttattcgtcatcttaaatcgttggacacaatctgaaaaataa

SEQ ID NO: 413000 - DNA, 183 bp, Staphylococcus aureus; identical to SEQ ID NO: 408521

SEQ ID NO: 413001 - DNA, 696 bp, Staphylococcus aureus
gtgaatgggaaagtagatcctaaattaacaacaaaagaaggaaaaatacgtttgagacttttaaatggctccaatgctcgggatttaaatcttaagctaagtaataatcaaagttttgaatatattgcttcagaaggcggccatttagaaaagactaaaaagttaaaagaaattaatttagctccttcagcaagaaaagaaatagtaatagatttatctaaaatgaaagaagaaaaagtcaatcttgttgataatgatgaaacagtaattttaccaattattaacaaagaaaaaagtactaacaaagacactactccaaaagtagataaaaaaatcaaattagaaggtatggacgataatgttactattaatggcaaaaaattcgatcctaacagaatagatttcacacaaaaggtaaaccgtaaagaaacttgggaaattgaaaacgtcaaagataaaatgagtggtatgaagcacccgttccatatccacggaacgcaatttaaagttttatcagtggatgggaagaaaccttcagaagatatgagaggcaaaaaagacgttatatctctggaacctggacaaaaagccaaaatagaagtggtttttaaaaatactgggacatacatgttccattgtcacatacttgagcatgaagataatggaatgatgggacaaataaaagtaacaaaataa

SEQ ID NO: 413002 - DNA, 270 bp, Staphylococcus aureus
atgagaaatagaggactactagacgaccctgtcattgttaaaattgctgaaaaatatcataaaacaccagcacaagttgtattgcgttggcatttagcacacaatagaattattattccaaaatctcagacacctaaacgcattcaagaaaatatagatattttagattttaatttagaattaacagaagtagctgaaattgatgctttaaatagaaatgcaagacaaggtaaaaatccagatgatgtgaaaattggggatttaaaataa

SEQ ID NO: 413003 - DNA, 444 bp, Staphylococcus aureus
atgaattttaatttgcgtaattctttttcatctctaacatttcaaagaaatttattttctgaagaaacgataaaatcttttaaggaactctataggtttgatgatgagattgtacttcaagcacaacagaccattagagatttttatatcaatccaactgctatctctactttggctgaagccatcaattcgacctatccaataaatgagcaaagtacctacaagagacacgatgaatttgtcaaacgtatcgaaaatgattttccacatcctttcaaaaagttaataagatggtctaatggcattgcagcaggtgctgacattcaaatctttgtaacaaactatataaacgagaacgatttacatattcaaaattcattgatagttgctatagtttgtttattaagttttttatcgacctattgttcacattctaaaaagtaa

SEQ ID NO: 413004 - DNA, 273 bp, Staphylococcus aureus
ttgtcacaaaaatacgaagtaaaagcaggcttaacacctaataaattagatgagaaaactgagaaaaaaggcgataaactagctgaaaaaaatcgcaaagaaatcgctaaaatgaataaaaagttacaaaaaaatattgaaaaacgacacaaagaagaacaaaaacgccaacaagaagctgataaagcacgcatcaagtcatttaaaaaatataaagattatgttgccaaaagcgcctctcaacaaaataaagaaaacaatacagaggcataa

SEQ ID NO: 413005 - DNA, 162 bp, Staphylococcus aureus
atgaataaaaagttacaaaaaaatattgaaaaacgacacaaagaagaacaaaaacgccaacaagaagctgataaagcacgcatcaagtcatttaaaaaatataaagattatgttgccaaaagcgcctctcaacaaaataaagaaaacaatacagaggcataa

SEQ ID NO: 413006 - DNA, 579 bp, Staphylococcus aureus
atgggaatttatcatttaaataaagataaagatgtattgacagatttaaagtcaaatgaaaaacaagagcaggttgctacatttataaataaacatctttcagcaaataatttaacgatatttatcggttcaggatgctcgacaggtgctgttcctttaatgtctactacaatgaaaaacatattagaagaaaatgagagtgtcttaaattatgtaaaaaaatttctgaattctaaagggattaaagaatttataaagtatgtagaagaacaagaacaagaaaaaatacaagagaaagaaagaaaagcgttacatacaataatggatcaattagaggctgaaaattttaaaaatttagaagaatatagtggttggttagatatgcaagatagtgaatataaagaagaaatattgaattttttagattgttattatctaaattatagtaatattgaggaattactaaattggatacaaaatggacttcattatgacaataataatggagatttgaaagacgtgtttactactttaaaaagtgagtttataaaaactattcctaaagtgggtgataaataa

SEQ ID NO: 413007 - DNA, 1689 bp, Staphylococcus aureus; identical to SEQ ID NO: 409476

SEQ ID NO: 413008 - DNA, 762 bp, Staphylococcus aureus; identical to SEQ ID NO: 409485

SEQ ID NO: 413009 - DNA, 216 bp, Staphylococcus aureus; identical to SEQ ID NO: 405670

SEQ ID NO: 413010 - DNA, 330 bp, Staphylococcus aureus
atgtctgatcacttatggcgtgtagaaattgaacttaaaagagatatggtggattactggaatgattgttttaatgatttacatatcttgaaaccagattggacttcgccagaaaaattaaatgaacaagcaatggtttacatgttaattcatgaagaaggcaaatggggagaattgaataaaagaactaaatataaatataaaaatttaattaaagaaatatctccagttgatttaacggaattaatgaaatcgactttaaaagaaaatgaaaaacaattacaaaagcaaatagaattttggcagacaaaaaggaagaagctattttaa

SEQ ID NO: 413011 - DNA, 612 bp, Staphylococcus aureus
atggagttcttattattaattgtcgtagccggactgtattatattatatatttaactgctgtgatgtattctgaaaaaatagtagtattgcctataatcatctatgccattgtgtttgtaataattggtatcacttatatctttataggcgacagctatgatcaattaacaaatttcaatgtgattttgtatatggggagtttgttttatgcatggatggcttttagaaatctttggaacagaccattattattaaaatataagaatattacagatagttcaagtggaatagttaataaatctgaatacaattcagttgaaagcttacgtataaacattgaaatagctaagtataaagggattatttctttgatagtagctatagtactaacggtactaatgacattaaagtcaacacctcaaatcactgcagaaacacgtgacttaagtatctcatttttcatactcagcttatttatcattgttatatttgctgtttgggatttaattattagatttagaaaaggaacgtttgcttttgttgtaataaatctaatagttttcagttgttggttatttattctgaatatgattttatcaagatcgttataa

SEQ ID NO: 413012 - DNA, 3132 bp, Staphylococcus aureus
atgaataataaaaagacagcaacaaatagaaaaggcatgatatcaaatcgattaaacaaattttcgataagaaagtattctgtaggtactgcttcaattttagtagggacaacattgatttttgggttaagtggtcatgaagctaaagcggcagaacatacgaatggagaattaaatcaatcaaaaaatgaaacgacagctccaagtgagaataaaacaactgaaaaagttgatagtcgtcaactaaaagataatacgcaaactgcaactgcagatcagcctaaagtgacaatgagtgatagtgcaacagttaaagaaactagtagtaacatgcaatcaccacaaaacactacagctaatcaatctactacacaaactagcaatgtaacaacaaatgataaatcagcaactacatatagtaacgagactagtaaaagcaatttaacgcaggcaaaagacgtttcaactaagcctaaaacaacaactattaaaccaagaacattaaaccgtatggcagtgaatactgttgcagcaccacaacaaggtacaaatgttaatgataaagtacattttaagaatattgatattgcgattgataaaggacatgttaataaagatactggtaaaactgaattttgggcaacttcaagtgatgttttaaaattaaaagcaaattatacaatcgatgattctgttaaagagggcgatacatttacttttaaatatggtcaatatttccgtccaggatcagtaagattaccatcgaaaacacaaaatttatataatgctcaaggtaacattattgctaaaggtatttatgatagtgcaacaaattcaacaacatatacatttacaaactatgttgatcaatatacaaatattagtggtagtattgaacaagtttcatttgccaaacgtgaaaatgcaacaactgataaaactgcttataaaatggaagttacattaggaaacgactcttatagtaaagaagttattgtcgattatggtaataaaaaagcacaaccgcttatttcaagtacaaattatatcaacaatgaagatttgtcacgaaatatgactgcatatgtaaatcaacctaaaaatacatatactaaacaaacgtttgttactaatttaactggatataaatttaatccaaatgcaaaaaacttcaaaatatacgaagtgactaaccaaaatcagtttgtggatagtttcacaccagatacttcaaaacttacagatgttactgatcaattcgatattaattatagtaatgataataaaacagctacagtcgatttaatgaaaggccaaaaaagtagtaataaacaatacatcattcaacaagttgcttatccagataatagttcaacagataatgggaaaattgattatactttagacactgacaaaactaaatatagttggtcaaatagttattcaaatgtgaatggctcatcaactgcaaatggcgatcaaaaaaaatacaatcttggtgattatgtttgggaagatacaaataaagatggtaaacaagatgctaacgaaaagggtattaaaggcgtgtatgtcattcttaaagatagcaatggtaaagaattagatcgtacgacaacagatgaaaatggtaaatatcagttcacaggtttaagcaatggaacatatagtgtagaattttcaacaccagccggttatacaccaacaactgcaaatgcaggtacagatgacgcaatagattctgatggactaactacaacaggtgtcattaaagatgctgacaacatgacattagacagtggattctataaaacaccaaaatacagtttaggtgattatgtttggtatgacagtaataaagatggtaaacaagattcgactgaaaaaggaattaaaggtgttaaagttacattgcaaaatgaaaaaggcgaagtaattggtacaactgaaacagattcaaatggtaaatatcgttttgataatttagatagtggtaaatacaaagttatctttgaaaagcctgctggcttaactcaaacaggtacaaatacaactgaagatgataaagatgctgatggtggcgaagttgacgtaacaattacggatcatgatgatttcacactagataatggctactacgaagaagaaacatcagatagcgactcagattcagacagcgattcagattcagacagcgattcagattcagacagcgactcagactcagatagcgattcggactcagatagcgattcagactcagacagcgattcagattcagatagcgattcagactcagatagcgattcagattcagacagcgactcagactcagatagcgattcagactcagatagtgactccgactcagacagcgactcagattcagacagcgactccgactcagatagcgactcagattcagatagtgactcagattcagacagcgactccgactcagatagcgactcagattcagacagcgattccgattcagatagtgactcagattcagacagcgactcagactcagatagtgactccgactcagatagcgattccgactcagatagcgactcagattcagacagtgattcagactcagacagtgactccgactcagatagtgattcagattcagatagcgattcagattcagatagcgattcagactcagatagcgactcagactcagatagcgactcagactcagatagtgattcagattcagatagcgattcggactcagatagcgattcagactcagatagcgactcagactcagacagcgattcagattcagatagtgactcagactcagacagtgactcagactcagatagtgattccgactcagatagcgactcagattcagatagcgattcagactcagatagcgactcagattcagacagcgattcagacagtgactcagatagcgactcagatgcaggtaaacatataccggctaaaccaatgagtacggttaaagatcatcacaacaaagctaaagcattaccagaaacaggtagtgaaaataataattcaaataatggcacattattcggtggattatttgcggcattaggttcattattactattcggtcgtcgtaaaaaacaaaataaataa

SEQ ID NO: 413013 - DNA, 336 bp, Staphylococcus aureus
atgtttgatcatgtgaaaaaaggtgcaattttagttaacgcagcacgtggtgcagtcatcaatacacctgatttaatcgctgcagtgaacgatggtactttgttaggtgctgcgattgatacttatgaaaatgaagcagcatacttcacaaatgactggactaataaagacattgacgataaaacattattagagttaatcgaacatgaaagaattttagtaacaccacatattgctttcttctctgatgaagcagtacaaaaccttgttgaaggtggtttaaacgcagcattatctgtcattaacactggtacatgtgaaacacgtttaaattaa

SEQ ID NO: 413014 - DNA, 1080 bp, Staphylococcus aureus; identical to SEQ ID NO: 410196

SEQ ID NO: 413015 - DNA, 1965 bp, Staphylococcus aureus; identical to SEQ ID NO: 410197

SEQ ID NO: 413016 - DNA, 771 bp, Staphylococcus aureus; identical to SEQ ID NO: 410198

SEQ ID NO: 413017 - DNA, 696 bp, Staphylococcus aureus; identical to SEQ ID NO: 410199

SEQ ID NO: 413018 - DNA, 612 bp, Staphylococcus aureus; identical to SEQ ID NO: 410200

SEQ ID NO: 413019 - DNA, 417 bp, Staphylococcus aureus; identical to SEQ ID NO: 410202

SEQ ID NO: 413020 - DNA, 693 bp, Staphylococcus aureus; identical to SEQ ID NO: 410203

SEQ ID NO: 413021 - DNA, 1554 bp, Staphylococcus aureus; identical to SEQ ID NO: 410205

SEQ ID NO: 413022 - DNA, 1359 bp, Staphylococcus aureus; identical to SEQ ID NO: 410206

SEQ ID NO: 413023 - DNA, 3039 bp, Staphylococcus aureus
gtgaaaaacaatcttaggtacggcattagaaaacataaattgggagcagcatcagtattcttaggaacaatgatcgttgttgggatgggacaagataaagaagctgcagcatcagaacaaaagacaacagtagaagaaaatgggaattcagctactgataataaagtaagcgaaactcaaacaactgcaactaacgttaatactatagaagaaactcaatcatataacgcaacagtaacagaacaaccgtcaaacgcaacacaagtaacaactgaagaagcaccaaatgcagtacaagcaccacaaactgcacaaccagcaaatgtagaaacagttaaagaagaagagaaacctcaagttaaggaaacgacacaacctcaagacaatagcggaaatcaaagacaagtagatttaacacctaaaaaggttacacaaaatcaagggacagaaacacaagttgaagtggcacagccaagaacggcatcagaaagtaagccacgtgtgacaagatcagcagatgtagcggaagctaaggaagctagtgacgtttcagaagttaaaggcacagatgttacaagtaaagttacagttactgaaagctctatcgagggacataataatacaaataaagtagaacctcatgcaggacaaagagcggtgctaaaatataagttgaaatttgagaatggtttacaccaaggtgattactttgacttcactttgtctaataatgtcaacacgcatggtgtatcaactgtaaggaaagtaccagacattttaaatggttctctagtaatggcgactggaaaagttttgggagaaggtaagatacgatatacatttacggattatattaataataaagtaaatgtgactgcaaatttagaaataaacttatttattgacccaaaaacagtccaagataatggaaaccaaaaaattacttctatgataaatgatcatgaaactgaaaaaacaattccgatttcatacaatccaggagtaagcaatacttatgcgaatataaatggttcaatagaaacatttaataaagctgataacaaatttactcatgtagcttatattatacctaaaaatggtatgtctacagaaagtgcaacaattacaggaacattaatgaaaggtagcaactctaatggcaattcacctactgtaaaaatatttgaagtattagagagtaataaagagttgcctaaaagtgtatacgcaaatataaatgatacgaacacatttaaagatgtaactagtcaaatgaaagataatttaactgtaagtgaaaacggtagttattctttaaatattgaaaacttgaataaaacttatgtagtacattattctggtgagtatttaagcggctctcatgaagtggatttcagaacacaaatgacgggtcatcctaaacagcaaagcatttattattataaccacggctatacattaacatgggataatggattagttttatatagtaataaagctaatggtgatggaaaatatggtccaatcgtagactccaataacttcgaattctctgaagatagtggtaatggttctatcagtggacaatacgatgcgaagcaaattattgaaacagaagaaaatcaagacaatacaccgcttgacattgattaccacacagctatagatggtgagggtggttatgttgatgggtatattgaaacaatagaagaaacggattcatcagctattgatatcgattaccatactgcagtggatagcgaagcgggtcacgttggaggatacactgagtcttctgaggaatcaaatccaattgactttgaagaatctacacatgaaaattcaaaacatcacgctgatgttgttgaatatgaagaggatacaaacccaggtggtggtcaggttactactgagtctaacttagttgaatttgacgaagagtctacaaaaggtattgtaactggcgcagtgagcgatcatacaacagttgaagatacgaaagaatatacaactgaaagtaatcttatcgaactagtggatgaattacctgaagaacatggtcaagcacaagggccaatcgaggaaatcactgaaaacaatcatcatatttctcattctggtttaggaactgaaaatggtcacggtaattatggcgtgattgaagaaatcgaagaaaatagccacgttgatattaagagtgaattaggttatgaaggtggccaaaatagcggtaaccagtcattcgaggaagacacagaagaagacaaacctaaatatgaacaaggtggcaatatcgtagatatcgatttcgatagtgtacctcaaattcatggtcaaaataaaggtgatcagtcattcgaagaagatacagagaaagacaagcctaaatatgaacatggcggtaacatcattgatatcgacttcgacagcgtgccacatattcacggattcaataagcacactgaaattattgaagaagatacaaacaaagacaaacctaattatcaattcggtggacacaacattgttgattttgaagaagatacacttccaaaagtaagcggccaaaatgaaggtcaacaaacgattgaagaagatacaacgccgccaacaccaccaacaccaccaacaccagaagtaccaagtgagccggaaacaccaacaccaccgacaccagaagtaccaagtgagccggaaacaccaacaccgccaacaccagaggtaccaagtgagccggaaacaccaacaccaccaacgccagaggtaccagctgaacctggtaaaccagtaccacctgccaaagaagaacctaaaaagccttctaaaccagtggaacaaggtaaggtagtaacacctgttattgaaatcaatgaaaaggttaaagcagtggcaccaactaaaaaagcacaatctaagaaatctgaactacctgaaacaggtggagaagaatcaacaaacaaaggtatgttgttcggcggattattcagcattctaggtttagcgttattacgtagaaataaaaagaataacaaagcataa

SEQ ID NO: 413024 - DNA, 747 bp, Staphylococcus aureus; identical to SEQ ID NO: 409359

SEQ ID NO: 413025 - DNA, 351 bp, Staphylococcus aureus; identical to SEQ ID NO: 409358

SEQ ID NO: 413026 - DNA, 222 bp, Staphylococcus aureus
atgattgaaaacaatctgacacatttcatcggttcagatgcgcataacacagaaatcagaccgttcttaatgaaagacttatttaatgataagaaattacgtgattattatgaagatatgaacggatttattagtaatgcgaagttagttgttgatgataaaaaaattcctaaacgaatgccacaacaagattataaacagaaaagatggtttgggttataa

SEQ ID NO: 413027 - DNA, 1206 bp, Staphylococcus aureus
atgtggattgaaaaatttaaaaacaaaaataacgaaactaagtacagatactacgagaagtacaaagatccatatacagataaatggaagcgcgtaagtgttgtgttgaacaaggatacaaaacaatcacaaaaagaggcaatgtttcgtttagaagaaaagataaaagaaaaactaaacaacaagtcgtcaagcgaattaaaaactttaacttttcatgcactattagatgaatggcttgagtatcacattaaaacatcaggctctaaggtgacaactattaaaaatttcaagtcgagaatgaaaaacatcaaaaagaatattcccgaagatttacttttaaataaagttgatacaaaatatatgcagacatttattaacgaattatctaacacccgctctcaaaaccaattaagccgtcagctaggagatctgagagaatccataaaatatgctgttaaattttacgattacccaaacgaacatttgttaaccgccgtcaaactgcccaagaaaagtaagacaattgaagatattcaaaaagaagaagctaaaatgtataattacttagaaatgaaacaagtcctgcagatacgagatcatatactaaataatccacgcattaacaaaaggatgcgtgttttagttgctagcctaatagagttgcaagcactaacaggtatgagaatcggcgaactccaagctttacaaaaaagcgatatagatttagaaaaacaaattattcatattaacggtaccatacattgggttaaacatgaaggcggatatggttataaagacacaacgaaaactaaaggttctaaccgaaaaattacaataaacaaacgttctgtatccattttaaaaaatattatgttagaaaataaaaaactgtccttgtggaacgatggttatatagatcgcgaatttatatttactacaaaaacaggtaatccattatatacccataaaatcaacaatatattagctgacaccaccaaatcattaaaaattaacaaaaaaattacatctcatacttttagacatactcatatcagtttgctagttgagatgaatatatctttaaaagcaattatgaaaagagtaggtcatatagatgaaaaaaccactatccaagtatatactcatgtaacagaaaaaatggacagagagctgacccaaaaacttgaaaacattccaagttaa

SEQ ID NO: 413028 - DNA, 615 bp, Staphylococcus aureus
atgagaagattattcaacttattactagccagtacattaattttagtcgcatgtggaaatgatagcgatgaaaagaaggaaaagaataaaaataacgaaacaaagaaagagaataaaaaacttaatagtaacagtaaggaaaaagatgttacaaaagcacctgcaaataaaaacgttgataataatcaagttaatggtaatgaaaagaatatacagaaaataaactttaataacattacggatagaaatactttaaagtcaattatttatggaaattataatgaattagacaaaatcaatgcatataatagcgcagtagcaaacggtgtgattccgcaaggtaatgttatggagggtccagctattgcagctttcgaaagttccttaagagttgatagcggagcagaaaaatcaatatattcgtcatcccctgaaaagagagattacgataataatggtgtctatcgtactgagcaagagcaaaaggctcacgaaaattgggtgaatgatcaagttgagtgggcaaacgcttcagaagctgaaaaagaacaaattcgtaaacgagatgctgaaaaacatggatatgaatataatccggatgattataaagaataa

SEQ ID NO: 413029 - DNA, 630 bp, Staphylococcus aureus
atgactaaagaaaaagatttgaaatatcttatggaaaagaaatccggcagtgtaaaagctttttcagaagaaattggtttagcttatacaactgtaagatccattttagagcgtggcgtttttaatgctaaagtagaaaatgtaattaaaatttgtaatggtctaaatataaaacctgaagatataatggaaataaaaactacttcccaaaaaacatcaaaaattgaaactatgcctgtcaaaaaaattccggtactatcaaaggtttctgctggtttacctatctacagcgaggagaatttgattgattatatttatttcgcaaccaaaaatttaaattctaacaaagaggaatttgctcttaaggttactggagatagtatggataaaatttttcaggatggagatgttgttgtagtcgaaaaagactctaatgtagaaaatggccaactcggtgttgtgatgattaacggatataatgcaactgtcaaaagaatacgttataacaatgatcaaattattcttataccagaatcaaacaatcctagtcattatccacaagtatacggaaaagatgacgaaataacagttgtgggcagagttgtagcaagtcaaaaactattttattaa

SEQ ID NO: 413030 - DNA, 210 bp, Staphylococcus aureus
atgttgaaaaatttcaacgatataagaaaagacaagaaagtatctctggttgatttagcagatttgttaggtgtcagatatcaaacggtcgcagataagattaacggagtttctgattttaaattcggagaggcgttgcttatcaaaaacaaatttttcccagagtacgaaattgaatacctttttgaaaaagaaaaacaaacatcttag

SEQ ID NO: 413031 - DNA, 198 bp, Staphylococcus aureus
atgcaagttcaaaacaaaaaagtcatctattactactatgacgaagaaggtaatagacgacccgtaaatattcaatacaacgatgggtacgacttaatgatagaaccgcgttttattgaaatgacgcttgaaagacatccgcatttaaaaaataacttttatggattaatagatggaaaagaatttaagttagattaa

SEQ ID NO: 413032 - DNA, 756 bp, Staphylococcus aureus
atgcaagcattagaagaaatacaaatagaacataattcagaactcggcgcagtcgtatctagtcgagtagtagcaaaagaaattaatagacgtcacgacaatgttaagcgtgatttggagcaaattttaatatcctcaaatgtgagtacattaattattccaagtaactacaaagattcaagaggcaggaaccaaaaagaatatcttttaacaaaagacggtttcactttatacatgttcaatatacaaggccataacgaatttaaaatggcatacattaacaaatttaacgagatggagaatactctacaaaacagattgccagcaacatacaaagaagctttggcacaactacttgagacagtagaagaaaaagaaaagttagaactcgagaataacatgaacaagcagaaaatagctgaatacgaaccaaaagcatcttatttagacacgattttaaataataagagcttagtaacagtaggacaaatagcaaaagattatggaatgtcagcacaagcgttgaataaattacttcatgatctaaaagttcaatataagcaatcaggtcaatggttgttatattccaacttgcacgctgaaggttatacacattcatctactacagagattgagcataaagatggtagcacttcggttcgaatgaatactaaatggacgcaaaaagggcgcttattcatttatgacttacttaaagaaaatgacgttttaccggtaatagagcaagcaaattaa

SEQ ID NO: 413033 - DNA, 174 bp, Staphylococcus aureus
gtgagagaacgcactaaaattatatatcgtggttggaataaggagatatttattttacagggtaaaaatatgaatgttattggtttgcgccaaatatttgatgaactcaaaagatcgtatgaaggttataaaatcgttgttattccaatagaagttgattttgaaattaaataa

SEQ ID NO: 413034 - DNA, 1149 bp, Staphylococcus aureus
atgggaatcttaggaaaaatttttaatcgtcgcgaagatttaaagtggatgtttgactatgacgtaatcgaagatttatctaatcaagcatatgttaaaagattagcactagatagttgtatagaatttttagcaaaggcagtagcacaaagtcaattcaaagtattaaaaggttataaatcgcaaatgaatgacacatattacaaattgaatgttaaacctaacacagacatgtctagtgatacattttggcaacatgtcatgtataaattgatttacgacaatgaagttctaatcattgtatcagacaaaaaagaattattgattgctgatagcttttaccgcaaagaatacgctttatatgatgatattttcgaaagtgttgaagtaaaagaatatacatttaaccgttcttttaaaatggatgaagttatttatttgaaatttaacaacaatcaaatcatgcatttagtcgaatcattatttgaagattacggaaaaatattcggacgaatgattgacgcacaaatgaaaaattatcaaatacgaggcatagtcaaaacagaaagtagctctatggaaaaaggacaacgagagctaatgaatgcttttatgaaaaagatgtttaagtcatttagtgagaatcaaattgcaatagctccgttaactaaaggttttgattatgaagaactttcaaacggtaaatcaaacaatatggcatttaatgaaatgtcagacttattaaaagatgcaattaaaaatgttgcgctgattatcggcattccaccaggtcttatttatggtgaaacagcagatcttgaaaagaatatgaagatttttgaaaagttttgcttaaatccattacttaagaaaattgaaaacgaattgaatgcaaagctatacaaccgaaaagaatatttagaaggtaatcgagttgtagtaattggtgttaataaaaaatcgccacttgaacattcagaagcaattgacaagcttgtaagcagtggttcatttacacgtaatgaagtaagaataatgttaggtgaagaaccgtctgacaatcctgaattagacgaatatctagtgacgaagaactacgaaaaagcaaacgaaaatggtagtacattgaaaggtggtgatgaaaaatga

SEQ ID NO: 413035 - DNA, 723 bp, Staphylococcus aureus
atgaagataaacgttaaaggtgcaattattccaaatgatgacaaatggatttatgaaatgttagaaatggatgctacttctccaaaagacattgctgattcacttcctgatactaatgaagatattgacgttattatcaacagtggtggcggtgatgtatatagtggtagcgaaatttacacatcattaaaaacgtatcctggtaaagttaacattaaaattgttggtgttgcagcaagtgccgcctcagtaattgctatggcgggtgatcatattgaaataagtccgacagcacaaataatgattcataatgcttggacgatggcaatgggtgacataaacgaaatgcagaaaacagttgatatgttagatggtgtaaacagaggtattgctaatgcatacatcaataaaaccggtaaaacagaagatgaaatactaagtcttatgaacaaagaaacttggttcaacgcacaagacgcagttgaacacggatttgctgacagtaagatgtttgatgaagcagcaccgcggttggttgctaattcaggacaaatgctatcagatgatgtaataaatcgtgttactgcacttgtaagtaaaacaccagaaatgaaaatcgatattgacgctatagcaaataaggtaattgaaaaaatgaataatacaaatgagaaacctaaaaacactgttaacgaaagtggttttaataggtttcttttttaa

SEQ ID NO: 413036 - DNA, 1140 bp, Staphylococcus aureus
atgacagttaaattaagtgatgattttaaaaatgctcgtacagagtttttagaagcagtaaaaaatggtgagtctcaagaagtacaaggtcagttatattctgatatgattaacgaattatttgaagaagctagagcacaagctaaagctgaagcagaaggaattttaaatatgccgaatgccgataaaaagttgaatgctgaacaacgcaagtttttcaatgaaattaataaagaagtcggttacaaagaagagaaactaatcccgcaagaaacaattgatcgtatttttgaagatttaacaacggcacatccgttattacaagtcattgggttgaaaaatgttggattacgtttgaaattcttaaaatctgaaactaaaggccaagctgtttggggtaaaattcacggcgaaattaaaggccagttagatgcagcatttagtgaagaaaaagcaattcaaaacaagttgactgcttttgttgtaattccaaaagatttaaaagactttggtcctgcatggattgaatcattcgtgaaaattcaaattgaagaagcttttgcagttgcattagaagcagcatttttaaatggaacaggtaaagatcaaccaattggtttgattcgacaagttcaagagggtgtgtctgtttcaggtggcgaatatcctaaaaaggatattacatctacattaacttttaaagaccctaaaactactgttttagagttgacgaaagtatataaacaccattcaacaaatgaaaagggcaaagcagttgcagttaaaggcaaagtgcacatggttgttaatcctagtgatgcttttgatattcaagcacaatacacacacctaaatgctcaaggtgtatatgttactgcattaccatttaacttgaatattgttgagtcactagcacaagtttctggcgaagtaactacatttgtagaaggtcgttatcatgcatacttaggtggaggaattaacatcaagaagtttgatcaaacgctagctttggaagatttagaactatacactgcaaagcaatttgcttatggtaaagcttttgataacaaagctgcagcggttcacaaattgacgttagcaacatctgagcctgtcgatagtggcgaaacattataa

SEQ ID NO: 413037 - DNA, 279 bp, Staphylococcus aureus
atgagcgaagtaatgaaacatgctgtagtcagaccctatacagatatcgctcataaatatcataaatacaacatctatgatatttatccggctaagggatacgaggagactcgaattgacttgttaactaataacaaagtcaataaatacaatcaggtttatatcaaagctttagacaaattttctaaaaatgaactattagaaattgcagaaagaaataaagtggaaatacctaaaagcgcattgaaaaatgaaattattgatttattgaatgcgtag

SEQ ID NO: 413038 - DNA, 282 bp, Staphylococcus aureus
atggatgaacttgttcaagactttaaagatatggaaaaaattgaccatacaagtgaagacagctatattgaaaaacttttgaaaagatcatacgaaaagttacaaagagattatggcgagtttgatatcgataaaaacttgattggtagagaattggtattaaatcgtgcccgttacgcttatcaagatctactagaatactttaatgaaaactatagagttgatttaatcgactttggcattagccttgtggaggttgaggacgatgaggaaaccatttaa

SEQ ID NO: 413039 - DNA, 363 bp, Staphylococcus aureus
atgaggaaaccatttaaaaaacctaaaatcacgacaagacgactaaaaacacgtgttcacttttataagtacattgaaaatgatggtcctgaagctggagaaagcgaagaaaaacttttatatagttgttgggctagcgttgatggtgtatggttgcgcgaattagagcaagctattgcaaatggaacgcataacgacgtcaagttatacattcgtgacccacaaggcgattatttgcctaatgaagagcattatttagaaattgaatcaaagtattctacaaatcgattgaatattaagcagatatctccggacttagataacaaagattttattatgattcgtggagcgtatacatcatga

SEQ ID NO: 413040 - DNA, 1485 bp, Staphylococcus aureus
atgatagatactattaaagtaaacaacaaaacattaccgtggttatatatcaaaagagggtttgaaataccctcttttaattatgtagtaaaaacagaaaacgttgaagggcgttcagggtctgtttataaaggtaggaaattagagggatatagttttgagctgcctttatgtgtgcgtaatgattatttgtcatctggtggtgttaaaaatcatgatgaagttttacatgaactagtgaagttttttaattataaccaagctgttaagttacaatttggttcgaaaaaatggtactggaatgcttattttgaaggtccaataaacttacctaaagaattaactacacctgtacaatttacaataaaagttgttcttactgatccatataaataccatgaatcacgtaatgtaaacacagccatatctgaccaagtttctgttgttaatagtggaactgctgacacaccaattattgttgaagctcgagcgctcaagccaagtagttactttatgattactaaaaacgatgaagattattttatggttggagatgatgaagtcacaaatgaagcaaaagactacatgcctcaaatattccatactgaattcagggattttaaaggatggaataagatggaaactggtgatattccagataaacatctaggtgggaaagttggaggcgactttgtaatatctaatgtcggagaaagttataaagccactaacttcccaaatgaaaaaggttgggtaggagctggaacgaaacgagggcttccaagagcagtgagtgactttcaaataacatataagtgtattgtagagcaaagagacaaaggagcaggacgaacagcccaacacatctatgatactgataacaaactaatagctgctattggttatgaaaataaataccatgacagaaaaataggtcacgttgtagttacactatttaatcaaaatggtgatccgttgaagatttatgattatcaaaataaacctttgatgtataagaaagataggattgtagtttatataagattaaaaagaattggaacgacattctatataaaatcatggaaattcgaccatgtaaaagatcctgacagattgaagcctttagatgttaacgaaaaagtttgggttgacggagggaaattctatcaacgtaaaataagtgcaatttcgatttatagcgctaaatataatggctataagtggatggagatgaacggactaggttcatttaatacagagattctgccaaagccaaaaggtgctaaagaaatgataatacaaaaaggtgacttagttaaaattgatatgcacacaaaaaatgttgttataaacgaagagcctatgctctcacaaaaaacatttggtagtaacttctttaacattgcatcgggatattcggagttgattatacaacctgagaatatatttgacacaaaagtaaaatggcaagatagatatttatag

SEQ ID NO: 413041 - DNA, 309 bp, Staphylococcus aureus
atgtttgctattattgaaacaggtggaaaacaaatcaaagtagaagaagatcaagaaatcttcgttgaaaaattagacgtaaacgaaggagatacttttacatttgataaagtattatttgtaggtggagattcagttaaagttggagcgccaacagttgaaggtgcaacagttactgctattgttaataaacaaggtcgcggtaaaaaaatcactgtattcacatacaaacgtcgtaaaaattcaaaacgtaaaaaaggccatcgtcaaccatacactaaattaacaatcgataaaatcaacgcgtaa

SEQ ID NO: 413042 - DNA, 1239 bp, Staphylococcus aureus
atgtcttatatcaccaagcaagataaagttatcgcagaagcaatcgagagagaatttcagagacaaaatagcaacatagagttaatcgcatcggaaaattttgtatcggaagcggttatggaagcacaaggttcagtgttgactaataagtatgctgaaggctatccaggacgccgatattatggtggatgtgagtttgtagatgttactgaaagcatcgcaattgatcgtgctaaagcattgtttggagctgaacatgtcaatgttcaaccacattcaggttcacaagcgaacatggctgtttacttagttgcattagaaatgggcgacacagttttaggtatgaatttgagtcatggtggtcacttgacacatggagcgcctgttaattttagtggtaaattctacaatttcgttgaatatggagtagataaagacacagaacgaatcaattatgatgaagttcgtaaattagcgttagagcataagcctaagcttattgtggcaggagcatcagcatattcaagaacaattgacttcaaaaagtttaaagaaatcgcagatgaagtaaacgctaagttaatggtagacatggcacatattgcaggattagtagcggcaggtttacatccaaatccagtagaatatgctgattttgtaacaactacaacacacaaaacattacgcggaccacgtggtggtatgattttatgtaaggaagaatataaaaaagacatagataaaacaattttccctggtattcaaggtggacctcttgagcatgttattgcagcaaaagcagttgcttttggagaagcgttagaaaataatttcaaaacgtatcaacaacaagtggttaaaaacgcaaaagttcttgcagaagcattaattaatgaaggatttagaattgtttctggcggtacagataatcacttagtagctgttgatgtaaaagggtctataggacttactggtaaagaagctgaagagactttagattcagttggtatcacatgtaacaaaaataccattccgttcgatcaagaaaaaccttttgtaacgagtggtatacgtttaggtacacctgctgcaacaacgcgtggatttgatgaaaaagcttttgaggaagttgcaaaaatcatcagtttagcattgaaaaatagtaaagatgaagaaaaattacaacaagctaaagaacgcgttgcgaaattaacagctgaatatcctctatatcaataa

SEQ ID NO: 413043 - DNA, 195 bp, Staphylococcus aureus
atgaaggatccgatcgtggtcgaacatattactgttccttgtggaattgatattggtcaaacattaataggcatgcatattaaacatgtatgtgtacctgtaaggacttcagtaaagcaagtaggacaggcaattgtaactattgccacatctaggccgaaaaagattggtggcgaacgtgctaaataccaataa

SEQ ID NO: 413044 - DNA, 420 bp, Staphylococcus aureus
atgaagattttattcgtttgtacaggtaacacatgtcgtagcccattagcggaaagtattgcaaaagaggttatgccaaatcatcaatttgaatcaagaggtatattcgctgtgaacaatcaaggtgtttcgaattatgttgaagacttagttgaagaacatcatttagctgaaacgaccttatcgcaacaatttactgaagcagatttgaaagcagatattattttgacgatgtcgtattcgcacaaagaattaatagaggcacactttggtttgcaaaatcatgttttcacattgcatgaatatgtaaaagaagcaggagaagttatagatccatacggcggaacaaaagaaatgtatgtacatacctatgaagaacttgtaagtttaattttaaaattaaaagatattatttgctag

SEQ ID NO: 413045 - DNA, 138 bp, Staphylococcus aureus; identical to SEQ ID NO: 410800

SEQ ID NO: 413046 - DNA, 729 bp, Staphylococcus aureus
atgccagtgattaaaataaacaatcttaataaagtttttggagataatgaagttttaaaagatatcaatcttgaaatcaatcaaggggaagtagtagcaataataggtccatctggtagtggtaaaagtacattgttaagatgtatgaatttattagaagtacccactaaaggtcaagtgatttttgaaggtaatgacttaacggaaaaagggacacaagtagataaactacgtcaaaaaatgggtatggtatttcaaaacttcaacctatttccacataaaaaagttgtcgataatattattttagctcctaaattattaaagaaagataataacgatgaattacataaggaagcattgtcgttattagataaagtgggattaaaagaaaaagcagatgtatatccgaatcaattatcaggtggtcaaaagcaaagggtagcaattgcaagagctttagcaatgcatccagatgttattttattcgatgaaccaacttcagcattagatcctgaggtagttggtgatgtattaaaagtaatgaaagacctagccaaagaaggtatgaccatggtggttgtgacacatgaaatgggatttgccaaagatgtaagtgacaaagttatatttatggcagatggcgttgtcgtagagtcaggcacaccagtcgaaatatttgaacaaccgcaacatgaaagaacacaaaatttcttagcaagagtattataa

SEQ ID NO: 413047 - DNA, 606 bp, Staphylococcus aureus
gtggcaaaacttagcaatggtgatgattatgcttcaagtgtaaattcaccattaaagtatgataagaaaaaagcgttggaatattgggaaaaagcaaagaaagagttgaatataaaaaaattcacattttcaatgaatactgaagatacaccagattcaaaaatatcagcagaatatataaaggcccaaatagaaaaaaatttacctggtgtaaaaatgaaaattagacaactacctttcaaacagagattgagtgaagaatttaaaatgacatatgaatcttcattaactggatgggctgctgattatcctgatccaacaacctatttgtcaacaatgacaaaagataatcctcaaaataatactgactggggaaataaaaaatatgatgattatttaggagaaataaatggaaagttattaggggacgttagcgaaagagatagtaaaatgaaagaagatgaagagttattgttaaaagaggcacctctagctccaatttatcaaaagggagaagctcatttaaccaatcccaaagtaaaaggacttcaatatcatgtggttgggcctgatacaacattaaaatatgtatatatagaaaaatga

SEQ ID NO: 413048 - DNA, 501 bp, Staphylococcus aureus
atgactttcgaagaaaaattaagtgaaatgtacaacgagattgcaaataagattagcagtatgataccaatagactgggaaaaggtatatgtaattgcatatgtggacgatggaggtgggcaagttatattttattataccaagcccggaaatgatgagctgtgttattattcgagtatcgttgaagattataatgttttagaagaaatctttgatgatttatggatggaactttatagatcatttaaaaaattaagaaatatatttaaagaagaaagtcttgaaccatggacatcatgtgaatttgactttacaaaagaagataaattaaaagtttcatttgattatattgattggaagaatacagaatttgatcaattaggccaagaaaactactataactatagaaaattcggaattataccagaaatggaatatgaaatggaagaggttaaacaaatcgagcaatatattaaagagcaagaagaagctgaacaatag

SEQ ID NO: 413049 - DNA, 174 bp, Staphylococcus aureus
atgaataagtttttttactttttgattattttattatctgtatttttaatttttaattttgttaattcgattttatttgataatccttttgactttttagaaagttttatttattcattggttttcacattaatttatttaggtttagagggtcataaaaagaagaaggaatag

SEQ ID NO: 413050 - DNA, 174 bp, Staphylococcus aureus; identical to SEQ ID NO: 413049

SEQ ID NO: 413051 - DNA, 174 bp, Staphylococcus aureus; identical to SEQ ID NO: 413049

SEQ ID NO: 413052 - DNA, 174 bp, Staphylococcus aureus; identical to SEQ ID NO: 413049

SEQ ID NO: 413053 - DNA, 189 bp, Staphylococcus aureus
ttgaataaaaacacagtgttagatgaaggttacgttatagcaactattttaaatgttttctttttacttggattaatttttatatctcatttggaaaatttatatatattaattccgtatgttattttgatgggaataaatgctatttatttggttgttaaggttatgaatttcaaaaagaataattag

SEQ ID NO: 413054 - DNA, 504 bp, Staphylococcus aureus
atgctattttatttattttatttatttcattttacaatcagctttatatcaacagtacttttctctatcattttcaatgcacccaaacgcctcttagtagcatgtggatttgtgggtgccattgcatggacgatttaccaattaacggtagatttagagtttggaaaagttggcgcttcatttttgggaagcttaattttaggcttaatgagtcatactatgagtcgcagatataaacgaccggtaattatattcatagtgccaggcattataccattagtacctggtggtgcagcttatcaagcgactcgttttttagtatcaaatgattatacaagtgctgtaaatacatttttagaagttacactgatttcaggtgcgattgctttcggtatattagtttctgaaattctatattacctatacacacgtatcaaacaactgtatggtaaaatcaaaggtaagacatataaaaaatcttacaacatgaataatagagtttaa

SEQ ID NO: 413055 - DNA, 381 bp, Staphylococcus aureus
atgaaaatcaaagttaaaaaagaaatgagattagatgaattaattaaatgggcgcgagaaaatccggatctatcacaaggaaaaatatttttttcaacaggatttagtgatggattcgttcgttttcatccaaatacaaataagtgttcgacgtcaagttttattccaattgatatccccttcatagttgatattgaaaaagaagtaacggaagagactaagtttgattgtctagtagaactaaacgatattgaaggttttgaaatatatgaaaatgattcaatcagagagttgatagacggtacttccagagcgttttatatactaaacgaagataaaactatgacattaatttggaaagatggggagttgctagtatga

SEQ ID NO: 413056 - DNA, 777 bp, Staphylococcus aureus
atgcaagcattacaaatagtagaacagaacgaaacacattatgtagacagtagagaagttgcggaaatgataggaaagcgacacgacaatttagtaagagatattgataactatttaggtgtaattttacaaaactcaagtttgagggctgatgatttcttcgtagaaagttcataccaagcaggaacaggtaagcaatacaaacactacctactaaccaaaaaaggatgcgacatagtagcaaacaagatgataggtagtaaaggaattttgttcacagcaacatatgttgacgcattccataaaatggatgaacacattaaacaacaagcgcaacttaatgtaccacaaacaccaatgcaagcattagagatgatgttcaaagcgcaaaaagaccaagaacagtttaaccaacaaatgcaacaagaaatcacaggtattcgtcacattgtcggtatcgaaacgaaaaactggcgtaacgacacaaacaaaatgttgtctgcgattgcgcaacatttaggtggcggagcaatgcaccaaaaagttaagtctgaagcttacaaagcattagaagaaaaaggacgttgtaatttaaaaatccgtatgcagaatcgcaaaggtaaaatgctagcgaacggtgcgacgaagacacagattaacaagttgtcaaaattagatgtgattactgatgaacctagattgattgagatttacatttcagtgattaagaatatggcaattaaatatggtgttgacgttagtcaatttgaaatttga

SEQ ID NO: 413057 - DNA, 330 bp, Staphylococcus aureus
atgggtaagttttctaaaggttcaaactctctttcgaaaaagttgggtgatttagctgataaagctgaaaaactcgatgaaacaaattttgagttcaaccaagaggacctttttaacgattcgttcatgattgaaaatacaaaattcaagtgttttagtgattttattgaatcttctcctgtagatgtccaatcccaagaagattttgattcgttaaaaaataatgagtcattcaacaatttcgttagagaaaataccaaatacgaaaactggtctgatatgatcgaaaatgcaggttcaatccttattggaaagatgatttttgaataa

SEQ ID NO: 413058 - DNA, 159 bp, Staphylococcus aureus
atggaaggattgcaaataaaaaacatcgaagcaacaaacctcgacgaactcaaaaagttgattgaatcaaccttaaaagctgtcgaggcggttgaagaaaacttggagaagataaataactttgaaataaaagttattcaaaaatcatctttccaataa

SEQ ID NO: 413059 - DNA, 216 bp, Staphylococcus aureus
atgttgaccaatttagaaaaggtcagaaaacagaataaagtatctttggtggatatcgcagatttattagaagttcgatatcaaacagtatcagataagattaacggtatttctgatttcaaatttggagaagcgttacttattaaaaatactttttttccagagtatgaaattgagtatctgttttcgagagaaaaagaaaaagtcacatcttaa

SEQ ID NO: 413060 - DNA, 930 bp, Staphylococcus aureus
atgaaaaaatctgttagattatatcatatgattgaatactgtaataaaaaaaggaatttcaagttaaatgatttaatgtcagaatttaatatttctcgtagtactgctttaagggatataaaggaaattgaagcattaggagtgcctttatatagtagtacagggaaaaatggcggttatatgaccataggtaatcgaaaccaaacgaaaatagcaatcacagacgaagaattgaaagctttagtatttacactttcaagtatctccaatgttagtaagttaccttttcaaacagaatatcaagaaatattaaaaaagttatataataattcgaataaaaaagaattgataaaccagtataatgagatatttcaatattttaatgaagatacatatcagttcaaaagttataagatatttaatgaaatcattagattaacaattggtagtaagtcatttaaaatctgttattcacaaaactatttgaaagaacaatataaaggtattggtatcttatataaaaatcaacaatggtacttcgttgttgttaatatagcatcaaaattagtaaagttgttaaacatttctaaaataaaagaagtatatgaaatgggagaaactaaagaatgtaatgaaataactatgcagaattttcaacagtttatggttgaaaacgaaaatacgattgatatacaaattagaagtaatattattggattaaatatcttgaaaggatacttgtggagtgactatatgattgaaaatattaacgaagagacatatttgtttaaatcaaaagtgaacatgcaagatataaattttatagctaaattaatagtcacatgtggtgccaatgtcaaagtagaatttcctattagtttgaaaaaagctattaaaactgaactaaccaaaataataaacttatactaa

SEQ ID NO: 413061 - DNA, 429 bp, Staphylococcus aureus
atgaattttcaagtaagtccctattttttaattatagaaaatgcagatggtttgaaaaggttgtatgaagagctgtttggcgctaaaacactgtatatccaacgtatcaaggatagaccgatagataagcaacttaatatcgataaaaaagatttaaataaaattgatcaatgtgtacttcaatttggagatataaaaattatgattgcggatgataccgaaggtttacctataacccaaggtaataatatatcgctttgtattacttttgaccatgtagaagaaactaagcgtgtgtatgaccagttaatagaaaaaggcagtgaagtattaaaagcattcagcccagagttctatactgaaggttatggttatgtaagagatccttatggtatatctttacatttatttacgaaaaggaaaggttaa

SEQ ID NO: 413062 - DNA, 630 bp, Staphylococcus aureus
atgaatttaagaggtcatgaaaatagacttaaatttcttgagaaatatgatgtgacacctatatcacatttaaaattattagaaggtcaaaagaaagacggtgaaggcggtagactgacagatagctattattgtttttcatacagtttaaaagataattctaaaaaagttttaggtacgtttaattgtggttatcatattgctgaagatttactaaaattatcaaatcaagacaaattacctttatttaacccgtttaaagtaattaataaaggtaatcaattgcaaggcgtaacgaataaaggtaatttagatattaataggcaaagaaaacagtataatgaagtggctttacagctttcaaacgctattaatttaatcataatttgttatgagggtaatattaaagaaccactttcaacgataaaatacgaaaccgataaatattattatagtgaaccatatgatagtaaaattaaagcagtaaatactattataggtaatttgtttgataagaaattagttgagaagatatctgaaattaatgtaaatcaggaaattagaaaatttgatttttcattactcactaataaaattaaaaaatatgagatacaaaataattttgaataa

SEQ ID NO: 413063 - DNA, 639 bp, Staphylococcus aureus
atgaataaaatagaagtgtataagtttgttaaagtaaagcagttagtatatcaattgattaagttatatcgtacaaacgatatgaattcccataaaacacaaaaagattttttactaaatgaaattaatgatatctttaaagaaaaagatattgatatctcggactttattacatcgattgacgatgtaaaattaactaagaaaaaagcagaacatcttttaaatgaattaaaagtgtacatccaagattttgaaataccttcatcaagtcaactggagaaaatttttcgtaaagtaaaaaaattaaagagaccagatataaatttaattgatacaaaagaaatttcatatttaggatggaatgataattcttctaaccgaaaatatatcgtttataaaaatttagatgataaattcgaaggtatatatggcgaaatttcaccaaataaagtaaaaggattctgtaaaatttgtaatcaggaatctgatacatcactctttctcaataaaactaaacataataagagtagtggaacatatactaaaaaaggagattacatttgttatgacagttttaaatgtaatcagaacctagatgatataaataatctttacgaatttattgttaaaataaaatag

SEQ ID NO: 413064 - DNA, 279 bp, Staphylococcus aureus
ttgaagacagtttatcctgtaggtactgagttatcgattgatgagtatgaaatagttaaaaataaaataatggtgcttgggaaagaaaagtggactaatctattgaacgaaccccattattattacttaattgaagattttatagagacagactacaagaaaacatctaaaggtggattgatgggagttaagtattttaatgtgaatgaaattttgaatagggattgcttaaccaccgaacaaatcgctaaagaattatgtaataaagattgggaatga

SEQ ID NO: 413065 - DNA, 843 bp, Staphylococcus aureus
atgtcagtattagaaactaaattaaaaagtcaaatgtcaaaatctgcaaaaatagctagaaatatgaataagttaccagatgaaattgatagattaagaaaaaggatagaaagaataaataaaaaaagaaaacctacttccagtaatattagagatttggaaaaatctaataagcaattagttacaaagcagcaaaaacttgcagatttacaagttgagtatactaagattgagaaaaaaattaatgaaacaaaaattaatcttcaaaaagagcagtctaggaatcaaaagaaattatccagtatgttagataaaaatacaaaaggaaatgaagagattatggaaaaattattaactaattcagatcaaataaatgagatatcaaatcagataaaaaaagcagtgaatcaaaaagagataattgaatatgatgtctttctatcccattctagtttagataaagaagattatgtatctaagataagtgaaaaactaatagaaaaaggactaaaagtctttgaagatgttaaagtttttgaaatcggaaaaagtcaaacagaaactatgaatatgggtatactaaactctcggtttgttgtagtatttttatcccctaattttattgaaagtggttggagcaggtacgaatttttatcctttctaaacagagaaataaatgaagagcatgttattatattacctatttggcataaagtgagtgttgaagatgtacgtgcatacaacccatatttagtagataagtatgcattgaatacaagtgattttagtatagaagaaatagtagaaaaaatttatcaagtaatcgttaattctaagaattag

SEQ ID NO: 413066 - DNA, 705 bp, Staphylococcus aureus
atgaaaaggtcagtcgagtctttcagtgagttacatcaagttttaaagaattatagagataatagcttatggttatttagaggtcatagtaatttgaattggagtttagttccgaaagctggtcgagcaccttatgataaatatgatgatgaagaaacattttatgcttggaaacgtcaagcaatgatatttttaaaagagacttatagtgattgggatatgctaactatagcgcaacatcacggattagctactagactattggattggagttttaatcctttagttgctgccttttttgcggtgcaaacatatgaggattgtgatgctgttatttatgcctatttaaaaaaatcggatatgaatatgaaaggggctacgccttttaagagtaaagggataaaaaaagtaaagcctaacggtctagcttcgagagtggttagacaaagtggaatttttactattcatgagcctcctacaaattctatagaagctaatctttcagagaaagaagaactacacaaaatcatcataaagaaacattatcgcaaaaaattaagagaagagttatcttattatggtatcaacgaattatcattatttcctgacttagatggtttatctagccatgttaattggataatggagataaatccatacgcttcaaataatataacgcaagaattaaattcaattaatgaataa

SEQ ID NO: 413067 - DNA, 1515 bp, Staphylococcus aureus
atgattaaaaataaatggaaaatagaaatgtggtttcggaattttagttattttatacataaaattgattcagaatttatattagaagaatacttagaggattatttacctaaagaataccgaccaaattttatatgtggaaaagcccaacctagcgaaactatatatgtaagttattttataaatcaggatgaacaaactgtggagcaacatactgtggaatgtgacaaaactggtttttttatagatgaaatccctaaacattttataaaaaataaaatgcattattttattgatagtcaaagtaaaattgatattaaagagttattaaatgagtttattgatcaaggtacagccattttgaatatattagatttaaatgacctagaaacatattttaatgattacttagaaacaatcaaccatacaacagaattcgctaaaaaaatagctaacaaagctatgaaagaaattcgaaaaaatattgagttagagcaaattaaacagcaagtaagttatatgaaaaatgcagatcaagtctcttctttagaaagctttaaggatttaaagcatacgatattaaaacaacaccgagatttatcgttaaaaaatgttgatgatattataataagcgactttttaacaagatacctcatttataaagaaaaacaagattcgtatgtaaaaaaagatatctcaagtataaataaatctcagtattttaaaaagttagtaatcgaaggtttaattagagaaagaaagagtaactctcaatactttgaaatagctaatagtatcaaaccttcatctcacaataataatagcttaaatcaatctgatgaaatagatcaatttagacaggctgtaattggtatttctcttaatctatacgatcataatgatacttacttcaaatttatccgtagtattatgaaaaaaagttcacgtaaagttaatttaacaatagacgatattattaaatctaaaaataatatagataaatttatgaagaaaaataagttaattagtaataatgagttattttatttaacaacaattgaggatacatttcattttacattattcactgctataactgatttaattgataaagtagtcaatgtttcaagtcgtattatcgaagaagcatctcaatacgatatattaattgccttacacagtttgaatagtttaaaaaatgagttgaatacaataatagataaacacgaagaaaatttaattcgtttcgaaagtcttattaatggttatgtaagaaatactcaattaaaaatattagttcgcaatacaattgaacagcacccagaactaacaatgaaaatagaagattcattaatttcaaaccttaatgattataatattagtgaaatatatagtagggagacttttaataacgattacaatggtattcttgataaattaatgattcaggtaattaatgatttttataaattacgcttaaaaaaattgaatagtgcatctaaattatattattaa

SEQ ID NO: 413068 - DNA, 297 bp, Staphylococcus aureus
atgacttacgagcaagaagatgattttaaactgttgaaaagaagaattttaggaattggattcgttttaccggagggacaagtatttactttccatgacttgaaccgtcgtgcaaatgtacaatgctcaaaagctgtacaacaaaatgttggacgttggttcgcatattttgttaaaaatgcgccaagtgttccatttattattatcggtaaaaataccaatggtcatttagtatatatgaaagtcggacctaatccactccaagatagcaacccttcgaaaggaggtgttcgctaa

SEQ ID NO: 413069 - DNA, 1350 bp, Staphylococcus aureus
atgaaacaagcaataggttacttacgacagagcactacaaagcaacaatccttagcagcacaaaaacaaaccatcaaggcattagccgaaaaacataatattcaacacattaccttttatagcgataaacaatcaggacgtactgataagcggaatggttatcaacaaattactgaactgattcaacaaggacaatgtgacgtattatgttgctatcgtctaaatcgacttcatcgtaatctaaaaaatgcattaaagctcatgaaattatgtcaaacgtatcatgttcatatcttaagcgttcatgatggctacttcgacatggataaagcattcgatcggctcaaactcaatattttcatcagcttggccgaactagaatctgataatataggcgaacaagtcaaaaatggaatcaaagaaaaagcgagacaaggtaaactaattacaacacatgctccctttgggtatcactatcataatggtactttcacgatagacacagtaaagtcaccaacagtaaaagctgtgttcaattattaccttcaaggttatggttataaaaaaattgcgcaatacttagaagctgatgataacttcattaatcgcaagccttatcaagtgcgtaatattatcctcaaccctaattactgtggccgtgttatcaatcaatacggacaatatgaaaacatgttcccagctattgtcagtacaacgatatacgaagaagctcaagttacccgaactcagaaacaagtaaaacgtaagccgtcagaaaatcaactcaaacaaaaaatcaaatgtccctattgtcattcgacactcacaaacatgactgtccgcaaatcagatcattcattgcgttactatgtctgtccgcaaaatatgaataacgctcgctttgtttgtgaatttaaaggaatcaacgcacaagaattagaaacaagtgttttagcgacttgtcaggacttctttcaaaatcaacagctctattcaaaaataaatcatactattcaacaacgactcaaaagacaaagagatatagaaactaaaactacactcaatcacgagcagctgatagaaaaattagcccaaggcaaaattgatgcagatacgttcagagaacaatcgcaatcatttcgacaacagtcaaaccctataacatcaatcaatgcacatcaaattcgaaaggtttttcaaaatatcatacaacaacgtttcacgttaaacatgttgtacccttacattgatgaaattcatattaccaaaaataaaacacttacgggtatctatttcaaaaatgagcccttaaacatcgtcaatcaaacggcgcaatcatcgattgcttaa

SEQ ID NO: 413070 - DNA, 1245 bp, Staphylococcus aureus
atgactgaacatataaaaactccagagctaagattttcgaattttttagatatgtggcatattcataaattaagtgatgttgctacaattacaggaggcggtacgccaagtacgaaagtatcagaatattggaatggagaaattgattggtatacgccaaatgaaataggagaaagaatttatgctaaaggtagtaagaagaaaataacaaatttaggctataaaaaaagctctactaaattattgccggttaatacaattttatttacttcaagagcaggtataggaaatacagctatattagcaaaagaaggttgtactaatcaaggattccagtcgattatacctaatagtgagaaaatcgatagttattttatttacactatcagtaaccatataaaaaaatatgcattaaaacatgctgctggatcaacatttttagaaatatcgggaaaagaattaggaaaaatgaaattatttctaccttcgttaaaagaacaacaaaaaattggagtgttctttagcaaactcgaccgccatattgagttggaagagaagaaattagaattgttagagcaacaaaagaaaggatatatgcaaaagatttttacacaagagttgaaatttgaaaatagccaactagaaaatattaaatggtcatataaaacacttgaagaattaaatagtttctttacagatggaaattatggagaaagttatccaaagtctgaagatatgagtgataaaaatgatggtgtagcctttttaagaggttccaatttgaaaaaaggcagaataacattagaagatgccaattatataagcaaaaagaaacatagtgaactaacaacaggtcatctatttttagatgacattgttatagctgtaagaggttctttaggagcagttgggtatgttaatgaaaacatggttggtaataatataaattcacagctggcaattattagaacttcaagttcattactttacggtaaatatctattatattatttaatgagtaatcaaggtaaaaaagaacttttgagtagagtaactggaactgctttaaaacaattaccaattaaacaaattaaacaaattaaagtacctgttccaaaacttcacgaacaacataaaatagctaactttttaagtgaactagataatttaattgataatcaaacggagaaaatggaaattttaaagcagcgtaaacaaggattactacaaaagatgtttgtgtag

SEQ ID NO: 413071 - DNA, 144 bp, Staphylococcus aureus
atggcttatcaaagtgaatatgcattagaaaatgaggtacttcaacaacttgagagtttaggatacgaacgagtaaacatacataacgttgaatcagaaatcaaagactaccttaaagaactaggagtgttaaaacatgactga

SEQ ID NO: 413072 - DNA, 1050 bp, Staphylococcus aureus
atgccagtatataaggatgataatacaggtaaatggtatttttccattagatataaagatgtatacggtaataacaaacgtaagatgcaacgcggtttttcaactaagcgtgaagctaagagagcagaggctatttttttgaatgacgtaaacgaaggatatagtgattcgaaaacatttgattatgtttttcatcactacttagaaaatagcgatttgagacctaaaacaaaacgacgcaaacaaaatgaatatcataaacactttaaagctaagttcgggcacataaaaatgaataagataacacaaaatcaatgccaagagtttcgtaaatatctaatagagaatgtagcatcaacaaattctgctcgtacaatttggtcaggttttaaagttgtaattaattatgccaaaaaatactttggattacgtacagatccaacaatatcaattaaacctattccgcgtgtaaaaccaaaacctaagtttatgatgcgtgaagaatttgaagaaagaatcaaagacattgaagagcaagattacagagagttatttacattaatgttttatacaggtttgaggattggcgaagctatggcgcttgtttggacagactacaataaatataaaaaagagatatccataaataaaacaatggacatctctaatagaactatatatccgagaccaaaaacagatagttcagaggatattgttcctttacctaaattcatcaatacaatgttaactgaacgacaccaacgtgaaaaaaagttaaacaaatattttgatgaacgtagttattttattttcggaggaatggctcccaaacattacagtcatgttcaaaagaaattccaaaaagctttcccccattataacattcacgcgttaagacattcttatgcatcttatcttgcaaataatggtgtagatattttcgttttacagtcacttatgagacatgctcaaatcactgaaacgatgggcacttacagccatttatatactcagaaaaaacacgatgcaatagccatttttgacaagtaa

SEQ ID NO: 413073 - DNA, 726 bp, Staphylococcus aureus
atgaaatttggagaattattagatgaatatagaaataatttagggttatctataaataaactaggtgaactagcaaatgtatcacctacttatataagtagattgcaaaacaatccagaaaaaaaaccgtcaaaaaaaatcttgtttaagatattaaatgcacttttcattgaaacagctaatcaagaaatcaaaaccactcatcttttttcagatttcatcacaaattatttgtatgatgataaaaacgaattctctgattatgatataaatcaagtccaaaaattacttgatgaatttttcgaatacaacaataaatggaataatcataaaagaaagaaactttatagtcttagtgaatcaattgaaaaaaatagagtgatttatcaaaaaaatcaacaaataagttttactaataacaaagaagatttacaaaaacatctatataacaaaccaatttttgatctcgattggtatctaaagcaaaacgattttgaaattttatttccaagagaactaattactaattcaaattatgaagatatagattacaacgttttaactgaaaatgataaaaagatgatcctaaatttagtgcacgcatatatgaataccaaatacaccaaaatacaaaataaacaagagtttttcgataaaaactttgatttatttattgcacgcatgagcgatgttgaattacagtcttttgaatacaaaaacgaataa

SEQ ID NO: 413074 - DNA, 213 bp, Staphylococcus aureus
atgcgtaataatttaagtctatttatgggaagagatcgcatttctgcgtcgaaattaagtatggttactggtatatctagaacatctatacacggtttgtatcacgagcgtactgagaatccagatacaaaaactgtgatgaagttatgtgaacatttcaacataacaccaaatgaattttttggaattattgaaaaagagggggttaaataa

SEQ ID NO: 413075 - DNA, 156 bp, Staphylococcus aureus
atgaaaatgtacttaacttatatttgcttagtttcattgttaacaattttattactagcaatatctaacatgtatgttgcttttagcgtttatgcttggctaataactttaggatttaatttaacgggagagattacaacgtgcaaaaacaagtga

SEQ ID NO: 413076 - DNA, 1509 bp, Staphylococcus aureus; identical to SEQ ID NO: 406800

SEQ ID NO: 413077 - DNA, 360 bp, Staphylococcus aureus
atgttaaataccattattacatctatctttttattcatatttttcctaccatttttctgtataggattttttataatcactttgatcagggacttaacaagaaacttcaacaatattaatgtgacatacaatactttcacatattatgagactggtaaaacgatacttgagttgcggtactttatttgggaacgtagaaaacgaaaatattttatagacctcattgagcgctctgaaattattcatttagctggaaataaagaaattgtcagagggatgtactacgtagatgcttcgcctttaaaaggtaataataaaaagtcatttttacgtaaatgtatacaaatttttgaaaagtaa

SEQ ID NO: 413078 - DNA, 444 bp, Staphylococcus aureus
atgagcataattacaagattgtttgataacagtgattttgaaaaattagatcaaatatctaagctatatgatgatttaggctatccaacaaataaaaacgaattaaaaaagcggctaaagcaaataacaaatcatgatgattatttcgtactgcttttgataaaggaaaataagataattggtctaagtggtatgtgtaaaatgatgttttacgaaaaaaatggagagtatatgagaatacttgcatttgtaatacattctgattttagggaacaaggttatggaaagaaactattagctgattctgaagaattttctaaacagttgaattgtaaagcaataacgctaaatagtgggaatagaaacgaaaggttatcagcacacaaattatatagtgatagtgggtattatagcagtacaactgggtttgctaaacaactataa

SEQ ID NO: 413079 - DNA, 693 bp, Staphylococcus aureus
atgtctcaaattggaattagtatacgttctgtgataatagatagtgttactaaaaggcttatcaaggataataaaaatttgattgtgatcaatataggttgtggcttagatacaaggtttcaaagatttaataacgaaaaaatatcgtggatagatttagatgtacctgaatcaatagaaatacgaaaaacattttttaaagaaacagatagttataagatgatagctaaatcaatgctggattacagttggattgaagatgttataaattataaattttttaatagtaagtcaaatatattgtttatctttgaaggtgtattgatgtattttgatgagagtgtaatgactaaattattacatactattattaaaaagtttggagatcataatttgacatttgcgattgaattttgctcaaaaacaattgcaaataatacaaaaagacataaatctgtatcaaaattatcctcacaacctgtttttaaatatggatacaatgattttaatgaattggataaagttttaccaaataaaatgaaagttataaatgaatataattactttgactaccataagaaaaggtgggggctctttgggtattgtagatatataccttatctgaaaaaaaggctaaacaataaaatagtaattatggaatataaaccagctaaattaatcactcataattga

SEQ ID NO: 413080 - DNA, 579 bp, Staphylococcus aureus
ttgaaaataggttatgcaagagtctcaactggtttgcaaaatttgaatttgcaggaagatcgattaaatcaatatggttgtgaaaaaatatttagcgatcacataagtggagcaaaaagtaaacgtcctggtttagatagagccattgaatttgcgaggtcaggagatacgattgttgtttggagactagatagactaggacgtaacatggcagatttaatcacattagttaatgaacttaataatcgaggcgtgagttttcatagtttagaagaaaatataacaatggataaatcaagttctacaggacaattgttatttcatttattcgcagcatttgcagagtttgaacgtaatttaattttagaacgttcttcagcggggcgaattgcagctcgtgctagaggacgctatggaggtcgacccgaaaaattaaataaacgagatttgactttactcaaaacactttatgataatggaaccccaattaaaactattgcagagcaatggaaagtttcacgtacaacaatctatcgttatctcaataagttaaataaccaagaaaataaagataaataa

SEQ ID NO: 413081 - DNA, 534 bp, Staphylococcus aureus
atgattgtgggctatgcgcgggtatcatcagtggatcaaaatctagaaagacaacttgaaaatttaaaaacatttggtgctgaaaaaatttttacagaaaaacaatcaggtcaatctatagaaaacagacccgtctttcaagaagcattgaactttgtgagaatgggagaccgttttgtcgtggaatcaattgatcgtttaggtcgtaattatgatgaagtcattggtaatccattattagataagtttatgaaagatttaattatacagatattagcaatggtttcagaacaagaaagaaatgaaagtaaacgtcgacaagctcaagggattcaagttgcgaaagaaaaaggagtttataaagggcgaccacaattatattcacctaatgctaaagatcctcaaaaacgtgttatctattatcgagttgtcgaaatgttagaagaaggccagtcaattagtaaggttgcaaaagaggttaatatcacaaaacagacagtttatagaattaaatatgataatggattatcttga

SEQ ID NO: 413082 - DNA, 363 bp, Staphylococcus aureus
gtggaatatactgtaaatgaggtttcaaaactagcaaatattagcaatagaactcttcgatactatgatgaaattgggttattaccaccaaaatatattcaagaaaatggatatagaatatatggggatgaagaaatagaaattttatctattattttattatataaagcaatcggtatgaagttgaatgaaatacaagaaattataaattcaacagattttgacaagtttaattgtcttaatattcaactcaaagaattattaatgaaaagaaaacaattagatgttttgatagattttgttgaagatagtcttaaaaagaataacataagcgcaagtaaaagtattttcgattgcttataa

SEQ ID NO: 413083 - DNA, 708 bp, Staphylococcus aureus
ttgagaattttaattgtaggtgctgggagtgaaatagcagaaaatattgttaaatatcatgttgataataaagacgatgttagtatcatagatcatccttcaaataaaaacaacttggtgattgatgctgaatcagtttctaaatattttatagatgttaccgactattcggcagtaaagaatttttttgactctttagatagatcctttgaaaaactctattttttagtaggtacaaatatattcaaagatgtgttttctgtaactaataatgattgggatcatattatggatacaaatttgaaatcttttttctttttttcccaattttttgccaaaaaaataattgcttcgcaaaaaaaaggaaatattgtttgtattgggtcgcaacacggtgttatagctaatggtttaagagcaccttattgcactagtaaaggtggattaatccatttaactaaagtattagcattagaatactctgtatacaatatactagttaattgcgtatctcctacttatatactgacagaaaaaagtaaagaatttctaaataattctaatgtaaaaaaagaatttttaacaaaaatacctttaaaaaaatatatttttcctgaagaagtagctgactgctgtatatttttaaataactcttcctctatcactggtcataatttaattatagatggaggttactcaatttggtaa

SEQ ID NO: 413084 - DNA, 1341 bp, Staphylococcus aureus
atgaagctttataattttttgtacaacttacactacaatccaggggaagctataacatcaacttataaaataggagatactattgatcgaaataatgaaggtttttttaaaggagacggtattgattgtctaaaaactagtaattctttattaaaatccatagttagtagttatggagatttatattttaatagaatacaaactaatgatagtcccttaattttttcaagaaaacttactccttctggtggcggactttatccaattaatttattccttttaatagaatacaaaggaaataatgttttatggcaatttgattttaaaagaaatttgttaatttatattaaaaaaataaatacacttcaaaatctacaaacgccattgattgtattagttccttgctatactcgtaatttttttaaatataaagaattttcttataggctctgtcctatagatagtggatatttggctacaacactatcttacaatttactattacacaatattgatcataatattaatatagatagtgatactcttcaaaaaactgcccctatttttcaaaaagctggcattaaagaaaaaccattagccattattaaattgtttgaaaaatttacattagatgaaatagaagttcaaaaatttgacgaggtgaaaaattaccatttctttaacgaagttcaaaaatttgataatattgataaactcattaataaaaacacttttcctaaattagaaataagaaaaaaaatgtttaacaattccaaaattaacaattcgctatttcctaatagaatatctcctggaggcgagtttattcaaaattcatttgttgaatttgaagacatttcaaatcttttttttaatttccactcgataatttctaaaattcatatagatcctaaaatattcaagatatctttgattgacacatctaataataatcaatatttttataactatgaatttaaattgcgttttcaaaaaaaagtgaatgttcactttataaataagcaacttactaggcaaaattttgatttacaaactactccatttatcctacatgtaggaatagatgaaggatacttacaaaattatttcgctaatactcctttcaaaatctctcgatttttaggaggaggaattagcgctttaatcgctctattggggttgaaagaagaattgtatttccatccaatgatgagctataatgctttaaatttagagacttatttatttgataataaatataaggttgttaatcaaatagcaattggaaaaaaggtagtattaaacagactagcaagttcaattaatactaatctaatgtaa

SEQ ID NO: 413085 - DNA, 822 bp, Staphylococcus aureus
atgaataatatatatgtttcgacaagtccttttttagttgatcagtttttagatatatataatcatcctcataaaaataatcgattctatttctacgaggacaattatctgtatctttatgaatctaaaaaaattttttgcatcccatttgaaaaaacacaaaattttatgggagataaaagtgatgaaatattaatgaagcttttaataagttttaataagtattatgaagagctcatgtttttgaaatttagagatattaataaatttagacaagaagtttttaaatttatgtattgttttactagtgaaaattacggtgatttacaaagaggtatgatttcttattgttctcattctatgggttttttatatagagatgtaaacactaattacttgcaagttttcaagaataattttaaaaataatgaaactattcttaattatctgttaaaaacaagggagaaatcactttttcaagaatataaactatctgaggtaatacaaaaatataaaaacgatattaaagaaaagataataagaaaagaaatcacattttttaatatggataatgatgttacgaaaaacgaacttaatagtccttttcataaaactttaaaagaaaataaaacttttttaaagtttatgaaagaagacagtgattttttaacatcaagatttttaacaatctttcaatattttttcttacgcaatttaggtattgatggtcctaatcgatactattattgttatctggcctataaatctattgaagcagaattaaatgtatcagctgaaaagttaataggaaactttgaatag

SEQ ID NO: 413086 - DNA, 795 bp, Staphylococcus aureus
atgaaatggtctagtctccacattttttactatggtaatgtaaatatgctactaactaattgtattttgaagttatacaaagaaaaatatataaacacattttttttcataagatattggaatggcggtcctcatataagattacgtattgctaataaaaattataaccaaatattagaaatcaaagaaataataaagaaatatttaagtcaatatccttcaactgtacaactttcaaatgaggagtatactttaaaaagtgatgaattttcaacaaaagagggaattgagtcattacctttacaagataataattcaattcttgaaataccctattctcctgaaatgaataaatatatagatgaaaacgctttgtacttatcagaaatgattttttcaatatcatctatatatgcgctaaatattttaaatacttcaaataaaaaaagcgaattatattatatttctatgcaacatacaatgtatatgctccaattttttataaaagaggattcacagttagctgaatttttagagaattactttaaatattggcgtattttttcagagggtaaacctatcaaagtgcccaaaattaatagattaattagcatggaatttttaaaatatgactcctattttgaaattttaaaaaaaacatatagtaacagtgaaattcagggattagtttttaattatatacacttgtttaataacagattaggtattgatactaaagaagaagcatttcttgctcagtgtttattaagatatatcagagaggataaacattaa

SEQ ID NO: 413087 - DNA, 2520 bp, Staphylococcus aureus
atgttaataacttcgccatactatattgttagaaaagcaaataagaatactgaatatgatagtattgaaatgaatttcacatctattttaaagaaatatgaaaaaaatagaaaaataaaagaaaagctcgagaaaaaagtgaacgaaaaattgtatgaactatatgcagagagttcatacaacaaaaaagagatattaaaaataaaacgtaagttagataaaatatctactcataatattcaacaattcataaatattaatccaaatgatttagactatattaattcattaaaacaattagtaaatgctaaggtaaacagcaactttacagatttattagaaaataagttagatgaacacttggaagagaatcgacacgcaacactatcgtctttagagacagacccaaattttaagaatggggttttattgtcaaatggagatatattaagaaatgtaaataaatacgtcactaaaaataattctaaaaaaagtaggatgacgcagcaatctatcaaaaattactataatagaatgaattggaagccttccccattcagcagttttaattatattgaaatacactctaagtcaaaatcaaaatctaataaagaagaaaatgtactatacacagaatttaatgaaacattttataaaatgatagagatgcaacttattaaacacgatgaattagatgattttaaatttgtaactttaaatacgagtttgaaaaaagaaaaagaaaaatatacttatataaatatttctatgaaagctgagtatatgtattatcatgaaaaaataagtaatataagagttaatactattttcgatgagataattagaatactcgattgtaagatagtaagatataaagattttgagaaaaagttgaaagatatttgtggagctaaatataaagaaatactgagttttttagatgaaaaaaatattatatattttaattttaaaattgacgaattaagctataataagtttgaagaattgaataaaatattagaacaagcgataaagaaatcaaatagtttgaaattaagtacagtcaaaaatcatattactatgattaataaacagataaacattataaaccaagatcctttaaataataagatttctttaattgacaacattataaaagaaacaagcaatatatttcatgaattaaatttatcgcattatatccctaatattaaaagaagaaatattatttaccaaaattcagtatgtagtagtttgttacctttcagtaatgtaccgttagtttctaatgaaataattaaattagttcataagttgtatagactatttgatgataatataattgaaaaagtctttcaaatggaacattataataaaaaatattcacaagagacatttgtaccgatcaaagatttttatacatcatttaatagcgcatataatagtgaaaattggaatgctataaaagaaaacaaactacttttagaaattaaaaaattaagattagaattttttgaatacttatcaaaaaagaatatgtcttctgatatagagattaatcaaaaatggctaaaagaatttgttaataggtttccacctattttatctaactgggagtcattctctttttacctacaagaaggtaataaaataaacacttacattttaaatgatattggcccaggttatggaaggcatattctaagatattcaagaaatttaaatgatatttcactaaaagagtttcaaaagagttatgaaaagcacattgagtatatttcaaaaatgaaaaatagaaaaatcactgatatcaatactactcttgctctaaatattaaccttaaaggttttaagagcccatgctctatcgattatcctacagataataccgtagagaactatgaattgcgaaatttatatgtatgtagaacaggaagcaaattaaatatttgtgatgatacaggtacagttcttgatatcaatcctacaggttttttatttccagctttagcacctgaactttacaaatttctttctggattttcgtattcaaatggaatagatatagatatatgggagcgatattctttatactataatcaagaaaagatacattttccaaatatatatataggaaatcttattattagtagagaaacttataaaattaaagtatctaagttaaatataaacactgaaaaaaatgacagtttatctatgtatgaattttacaaaaaacttaatttaattactggaaatgacaaattttttgcgaaattttcttcagatatagatgctttattaaataactctgtttcaccaaaagattggatgactataattaaaaacactaaattaagaaaaccacaatattataatgtaagtaatatgcttgattataaaaatataagtaatatactttctaaaactaatcctgattcatatttattcttgcaaaaacctaatccaagcagtggtgaaactgaagaatatctttatgaatttacagaaatgagatga

SEQ ID NO: 413088 - DNA, 1707 bp, Staphylococcus aureus
gtgaataatattcatgttaaaagatgtagtagttttgtagttgttaatttttttagtaaatcatttatattaaaaaaaaataaggctgatactaattataactctcttattcatagattattactaaaccataatttaataaaatatataacagaagaagatatagacatattagaagtgaaatctacgcaatgttctactatcgaaatattactgggtgaaaaaataagtggaatggagcatcaatcaagcgttaaagaatttgtttatgtattaaacaataaaagtaaagaaataaatttaaaagagtattttcttgtacctaaatttttaaaattaccagatgatactatggggaaatatgatgaggttatctatgagttgaaaaaatctaaaaagaaagaatttagagcaagaaacatagaagaaatttatcgtatttttgagtatcaatttttagataaagatattggtatatttaatacattattagataattttgaaggggcttttccagtatcagtggcaatgttgccgttggataatggtaaagaagaacctggtgtaggaagaacggaaactatcttaaaaagtagaacggtagctatgttagaagccgcagaaagatattgtggaatgtcacctaaaggaaaaaaaactatagatcattttgatagtgaagaatatgtaaatcttgaatctttaatactacacaataacgattttttattaagtaaaggattaagaaattccagttttccaacttatccaataattaagactatgaagtggattgagtctttagaaattaatacttatagaaaagttttaattcccgaaaactatggttattatggactaaatgtcgttaatccctattcaaagattaattatttagcatatgaaatatctaatggatgttcaattggaaacaattattcagaggtaatatactatggattaatggaagttttagaaagagatgcttttttgagcttttggtattttgatactcctaagaagaggattaaaagtataaataacaagcaaacaatagaatttattaataaatttcaaaaattttataacgattatgatttgtttttatatgatatatctaatgacaatgaaataccagttgttatggctagcgtaatttcaataaaagaaactaatagtaaaatgaactttatgtgtgcagcagcagcagatgttaacatatttattgctatagaaaaagctatacaagaaatatccggaattctttttggtttaaatgataaatttttagaaaggtataacgaattatgtcaaattgtaaatggagaaatagatgttaaaactatggaagatcatagtttagtatatggattacctaagtacagacaactaattaaagaaaaactaaaatcccaggaaaatatttctatttctaatgaaaatattacaccatattctttagaaaaatcactaaagttagttaaaaataacctttctaaaaacaaaaaagaaattttatttttagatcagacttcaatagaaattaaagaagttaattttagagttggaaaagttattgtgccagggctcttaccaatgacttttggtaagaaaaatattcgtattaataaaaaaagaaaagaagaactagaaaattactttaattgttctcttaatacagatttgtcaccacatccattcccttag

SEQ ID NO: 413089 - DNA, 720 bp, Staphylococcus aureus
atgaaatacttattattaaaatctgatactttttttttagaggctgaaaatggaggattgtttttaaaaaataattataagtcgactattataaacaccaaaggaagttataggatattccaagaagtaaggaaaaatttgaacggaaaattcacacaaatacagattttagaaaatataaagaatactaaaattaaaaagtttgtaaatgaattattagatttacttataaaaaacggctacatatacacagatgatcaacctcttttattagataatttagaagaacagatactattattaaactcaatagatgtaaaagaatctaaaaaaaatttattaaagagcaataaaattaaaattaagaattatgaagagatttttcaaaaaaatgaactagaagactatttaaattcttacaatttgattttagatgatactgatcctactgtgactatagcgataaacggtgatgatggagatataaatattttttactataaaaataatttgatagcttcaaatgaatattttaatgatattgcacaaaataccattcctaaacaagcttggattattcttttaaatgtagtttttagtcaagtgtttttagaagcatgtcaaatagaaaaaaatagatttaaaaatatgtattatacactagatttattttcctttgatggaaaatttttagataaaggggcgttgtttagtgaataa

SEQ ID NO: 413090 - DNA, 426 bp, Staphylococcus aureus
atggcaaaaaaaatcaaacaagtcattaacatacaattagaagccggaaaagcttcaccagcacctcctgttggaacggttctaggtcctgccggaataaatattatgcaatttgtcaatgcttataacgaaaaaactaaagacaaagcaggaacaattgtacctgtagaaattactgtttatgaagatcaaagctttgactttattactaaaactccaccaacaacacaattgattaaagataaagcaaatattaaaaaaggttctggattgcctaataaagaaaaggtgggttctttaacaaaagacgatgttaaagatattgctgaaattaagtttccagatttaaatgctagtacgatagaagctgctatgtctatggttgaaggtaccgcaagaaatatgggggtgacagtagaaaactaa

SEQ ID NO: 413091 - DNA, 483 bp, Staphylococcus aureus
atgtctaagtattctttacaacaaattaaaaaaacagctaaaagtacagctttatcaagtatttttaataaaaactatattgaagatatatattcttctcctgaagaagaaagttttaaatttgaagtgttgattttttttgattaccaaataaatatatatatatatttacaaaatacagacacgttaaatgattgtatagtgcatttttcttcatttaaacttagagatttcatgaaaagtatttccactgccataatagataactttaagaattctaattttagacatcacagacttataatgctcaagatcaatgacatagtattggatggattaatatttttagacggtgcagagatacacaaaaatggtgtctattttgatccttattctagtataactaatatttcactttgtgaagattacttaattgatacttatatatctttaaataagtttaatttccctaacttctattaa

SEQ ID NO: 413092 - DNA, 660 bp, Staphylococcus aureus
atggataattgtgtcatttttggtgcgaatagtgatttggcaaaagactttattaaaaaaaatttaaataagtttaattttttccttttttgtagagaacccagtgaatcctattactttaattcccaacataaaaatataaccttctttaaaggaagaatatctagtatcgaagatttgaatttatttttagaaaaatattttaaaaaatcaaaaataaatattttaatcaattatgttggtgttatgtatgttgaaaatttttacaacaatcctcaaaacaataatgaaataattgatataaacattaaagggctaatgaacgtattacacacaacttataaatatgcatcagacacctgttcacttattacaataagttctatcaattcaaagatagctccagcttattctgtttcctatagtgcctccaaaagctttataaacactttaatgcagggattatataatgaagccttatttttaaataaaaaacaaagatttcttaatattatacccgggcctattgaaacaaaattcactgatactaactttactccaaaaaattttaaaatgttatctcctcaagatattactatttctataaattattttctaaatatcaattctacctttgtagaattatttttgcatccataa

SEQ ID NO: 413093 - DNA, 150 bp, Staphylococcus aureus
atgtcagaatttaacacagatgttttagacaatattgatttagattcattagaacttgcaagcgaagagatttctgaaaaagaagaaaaagaaatcatgggagcttcatgtactacttgtgtatgtacatgtagctgttgtactacttag

SEQ ID NO: 413094 - DNA, 201 bp, Staphylococcus aureus
atggcaggatttttagatgatatagatacttcgtcagttaaatatactgaaaattataaacctatttctaaaagtactacgatgcgtgtggatacaaatttaaaaaaacgtttaagtcaaatggcattagatcaagatacatctattaaagcaattgttgataatgttttaaatgagtttttagaaaaaaaaggttattga

SEQ ID NO: 413095 - DNA, 795 bp, Staphylococcus aureus
ttgagtgtaataacagttggaaactttaaaggcggagtaggtaaaacaacggtagcaacaatactttcttatatagcatcagagcagtatggtaaaaaagtattacttatagattttgatccgcaggggaatgctacgcaaattatgaaacggacatatgccgaagcaccagaggaaaatgaatcatttatagatatgcttagaaccggaaatttagaaaatagtatgattcgattatcatctaaattatcattgttaccagctgactcttcattagctaatttgtctgatataatttctaaaacagatattttgaagaaaagatatattttaaaaaatgtagtagaaaagattagggaaatttatgattttgaccatatttttattgatgtaccaccgactattaactctgattttactaataatgctgtatatgcaagcgattatattcttatggtatttcaaacacaacaatcagcttatgaaagtagtttgtcttttgtaaactttttaagagatagaaaaaatgaatcgaatttgccttttgaattgattggagctgtcccagttttgattaaacgaagtggaaaagtggatgagaaaatattaaatatgtctaaaactgcattttcacaagctctatttaaaaatcaaatttatcaaagagaaagaattaaaaaatttggtgctgagggtataagaaataaagatatgcatgataaaaaagtaatacacatgtttaataaagtttatatagaattgatagatagaatacaagtgattgaaagtgagtga

SEQ ID NO: 413096 - DNA, 1248 bp, Staphylococcus aureus
atgactaaacaacgatttacaaaactatataaattcttattcgaagattccacatttaacaaactatcaataaaagctaaattgctttatgcattgttaaccgaacgtcaaaacttatctaaattgagtgccaaacaacatggtattcaatcacaatttattgatgataacggacgtttattctcaatttatactaataaagaacttatgaataaaattaatatatctgaacctactgtcattaacctaaaaaagcaactcattgcatttggtttattagaagaaatacgtcttggaaaaaataaaccgaatcgcttatatcctaaaaaaccttatgatgaatatttctatgttcatgatgttgatgaattttatcggttaccacattcattattttctaatcctaaatataagaatcttaaagctgagacaattgtcgcttacgctgtttacctaagccgttatgaatatagtgtatacaaaaatcatttttcggataaaagtggtgaaatatattgccatttttctaatgagaaaatggctgaattcttaggtgttagcacacgaaaagtagagcgtatcaaaaaagaacttgtagtttctggtttgatgattaacaaacgtacaacatttggaaaagcaaatgatttatatattaaactccctaaaccttttcatagaaaggaactaaaaaattgtcggtctcggaacttaaaaattgtcggtactggaactaaaaaattgtcgggttcggaacttaaaaattgtcgcactagtaatactgatattagtaatactgatattagtaatattgagattaatgatacgaatgatttgcatgatatagctaacaacaatttcataaaacatcattcgaatcacacaaatcatcaacaaactgaatttaataatgatgctttgaaattccaaacgcttgaagaattacctacgcaaatcaaagattatttaagtaattttgaaattagagagattcgtattattaaaagtgttttactcaaaggaaaaaagtcatttaacaatgcacatgatacatattaccgtttagaagacgttgaatttgaaattgtaagtgttttaaaacgttttaaagccatgttgctacaaaaaaatgaaagtgttgaagcaatgcaaggctatttaatgcaatcaattaaagctgaacttgaagaaatacatgcattaaatatgcgtcgccaaaatatatctaaatacaatatctttaattaa

SEQ ID NO: 413097 - DNA, 231 bp, Staphylococcus aureus
ttgaaagaaccatataataatataatgaagctgttaaaaacacactatcactggatagcaaattctcaagacccttcaactttgaataatgatgacatgacatgggctactcgatttagagatattttaatgttattagaaaaagaaaaaataacgattgaagaagctatcgagtatttagataaagctattcaaaaaaatgcagacgaatacaaaaatgaatatctataa

SEQ ID NO: 413098 - DNA, 564 bp, Staphylococcus aureus
atgccaaaagataaacgttcaaataagtgggctttcttaatatatgaagagagctcgccatctaactaccgaaatattttggaacaaatgcatatcccctatattttaagtccgtggcataatcaagatattgatcactcgacaggagaaattaagaaatcacataaacacggtgctttgttttttgattctttaaaaagttattctcaagtctctgaattacttcaacaacacttaaatacacctagtcatattgaaatgattatgtcccctaagggcatgtttgattattttattcatgcgtctaatccagacaaaacgccttatgatatcaacgatattgaaagtggttgtggttttgacttaaatcaatttttattaaatcaaggtcagtccgaagtgtttaataatattattgatttgattgaaagccaagattttacagaatttcaaagtctagtaatgtatgcgcggcaacaccatccatcctatttacatttgattatccaacgaacatatttttttgcgaaatatttagattcaaggcgtcacatgtctaattaa

SEQ ID NO: 413099 - DNA, 603 bp, Staphylococcus aureus
atgaggaaaacctatttcatgcgtgtgtatgatattatcatttacttgttcctgttcgctattttgacagttatggttagtaaactctttgtcctattaaactttattgtgtctcaaattgatattatcgatacgcgaaacgtcacacactatatcacaatcatttcaaatggtgtatatcaacttacattttacttattagtcttagcattgatattaatggttatcgatttaatcattcgtttattgaaggatcaaattacgaatcatattaaatctgtctatcacacaatggttttacgacattatcttaaacaagatatcgacaccgcatcatcaaaagattggcaacaaacaggcgaaactaaaacaaacgctgtcgaacgctattttaataaagtcgtgggaaaatcgattgttgatgttcgtcaaaatgaagttcgtgtagcgattaaaattcctcgcaagcaacaagcacatgaaatattaaagaccattgaacctcagattcatgaagagattacccacatgcatcctaattactacttttcagcatctcaacgacatcatcgttatctatggtttacaggtcacaaacgttaa

SEQ ID NO: 413100 - DNA, 1077 bp, Staphylococcus aureus
atgacagccaaagagctcgaacaatatctcctacaaagcttaaatatggcactaggatccatgatgcaaggcgaaaccagttataccaatagtttcacctgcaaggtcacggaagaaggtttttactttcttcctcgcctgcctgcaggctatattgtggacgatgacttatatcaaaaaatatttctcattgcgagtgcagctttatatcccaaattcacattgttaaaacagaattctgcgtatttcgtacctatggataccgacgatattcatacgcaacgcgctttgtttttcccatggcaacaagggatatcagaacgcttagtgatttctgatttagatcgttttacgtcgtctctaacgaatcaacaaattccgatcatgaaacaattaactttaaactatcaaaacattacatctatagcgatcgcaggtaattcaggcagtggtaaatcttatatgctgacgtacttactaagtgtattaaaaccgatatcagaactcattattgttgaccctaagtttgatacaccgagccgttgggcacgtattcatgatattactgtgattcaccctcatcaaaatcgatctaagtctgattttttatctgaaattaatgaaaacttaagtcattgccttcaagttattcaacaacgacaaaccattctttatgacgatccagactatcaatttgatcacctaaccattgtgattgatgaagtgctcgctttagctgaaggtgtgaataagaccattaaagacgcgttcttttcattactatctcaaattgctttattaggtcgtgccaccaaagttcatttattactggtgtctcaacgatttgatcatcaaaccatcccggtttccgttagagaacaactcaatgtgctgattcaaatcggtaatattaataaaaaaaccacacaatttttattccccgatttagatccagaaggtattgtgatacccattggtaaagggacaggtctaatccaagtgattgatagtgaatctccctatcaagtcttacccttgttatgtccgacttactatacgaaagcaggtgtattgtga

SEQ ID NO: 413101 - DNA, 321 bp, Staphylococcus aureus
atgaaaattcaatctaatttcaaaaaaggtggctattcaactgaaatagcttccaattatattgataataaaaaacccatttatagcttaagtacagaactttatccgcaacagcgttttgagaataatcagcctaccggagaaattattgcgtataaagcctggtttgttcaagaaggcttaccgcccttcacagttaaattcgaaaatgaagtgacattacctaattatatgagcgtcattacttttgatcatttagaagcttgtgaagtccgttatgatgtttacttcaaagcttcagatctgaaggaggttaaataa

SEQ ID NO: 413102 - DNA, 1200 bp, Staphylococcus aureus
gtgattatcattaataacaaaggaatcaatgacttagattttaattattggatgaataatcaattaactgatgacaatatcgaagaaattttagaggggtctgatttaagtatggaacaagaaatttttaaaagtaattataaaaaattcttggagatagatggcaaaaaggaaagatggtattctctggaagaagctgcgtatattattaatgggaattatttttcaatttatgaggaagatagcaaaaagcgaagtgtcacaacagactatgtaaaaaataaaagtaatgatatcttaaataatatagaaaatggaacaaaccaaaattggaataaatatcattacccacaaaaaaggaagtttgcattcaaaaaagtaaagtatgttaatgaagatatgatcgatgaaatattaagagatgatgtaacaaaacctgaaaaaataaaacgaggtaatatatcaatcgaagagttgctacctaatcaaaatagaatagcaaaatatattagacagaatgagaatatacataataaaagtataatgatagattacctaaatcaattaagtgatacactggcaaaatcattagacgacgtacgttatttttcaaataaactatcattatttaaatctgttattaaagattctagagaaatagcacaaaatatacatagggatcacgatatagataataaagaaaaatatgaacttctgaaaaaagaatatagtaattttttagaaaactgtatacgtttttctaatgaatatttagatatactagatatcaaaaatatttttaatatttttgatactaagaaaattgttttaaatctgtcttattatacgaaaatgtgggaggttcctgatattaataatgaacaaccgataaataataatttacaaaagtttgttgatttgaaaaagaagaagtatttaaataatgtacattggagtaaaaataagatacttaaacaattaaatgaaattgaagttaaacccgttactttaaaagatggtactagtgaaacagaacgcgtggcagagtggatgtatagaaataaaacaaaagttgtttatgaaattataaataaagaatttgatgatgtttatgatttacttaacggtatgttgaagtctgaatacacagaacttatgggctatatgagaatatggcataacttaagcaaaaatttataa

SEQ ID NO: 413103 - DNA, 816 bp, Staphylococcus aureus
gtgtatttcaaaaatatggatttcttgattgacctatacaagaattttaacgaagtagggatttttgcagtaatatatattatatatgcgcttattcaaattctaagtcaaaatattttatataaaagacaaaagatggaaagagtaaaaacactgataatcaatataattttatacatatttataacactagtagcattaatgtacttgttagcaatgattttttattcactcagtgcatatcctaaagaagaagtgattaaatatataacagattgggataaaattagtttgccagctatattacttgttctttattcgttattattccctatttttatatttccatttgtaggaaaacgacgtagaaaaaactattttgcagaaaatgtaaataattgtattattgaaagagaaattatagatagagtgagtattaatggtagagataaattaattctaaaagatgccttaggatatcagacagaaaaagatataacaggaataaaggatttaaaaattagtacatctcaaaaaaaatcttggttaacgttagaagacattaaaatagctacgatgagtctaagagataaacaattactgttaaaaatgattataggtttaataatatttggggtccctacagggtattttgtgtggaacttcatcagtgtcgttgatgattgggatagaataatgcacgcaaatgatatatttatgtatatgggtcttttcacgttaccattaatggtaacagttgagttatatgtagttgcatttattattaccaaaaatttatttaaaaagaaaaaatga

SEQ ID NO: 413104 - DNA, 552 bp, Staphylococcus aureus
ttgccacaagtagacattgaaaagcgaccaaatatttggtcgctttatttttatactgtaggagaaattatgaaattatactatgttgatgaagattatattaatgaattaagaaatgtagatgagagagtattattaaataaatccactcgtccttatttaggagttgtattatctattaatgatcttaattattttgtccccttaagttcccctaaagaaaataaaaaactaaataatcaactatcaataaaattgtttgaggttaataatattcaaaatagattaggatatctattatttttaaatatgatacctgttcctgataaatatctttctaaaatagatatgcaatacataaaggagcaagatttagaatattataacttattaactaaccaattaatttttattaggcaagaaaatcaaagaatcgtaaataaagcccaaaaagtatataaaaatgctgtgataaaaaaagtttcattttttgaatcaatgtgtgtagattatttagcattggaaagatatgtgaaagatttaaaacagtaa

SEQ ID NO: 413105 - DNA, 234 bp, Staphylococcus aureus
atgcgtggccaaggattaggccctaaaataataaagaaattattgaaaaaggcttttgaagatttgggactacacagaattgaattaggtgtttttgcctttaataaatcagctattaaaagttacaaaaagattggatttataaaagaaggagaaaaaagagactttagaaaattaaatggagaatattataatttatggcaaatgagtatgttagaaagcgaatggtcttga

SEQ ID NO: 413106 - DNA, 1215 bp, Staphylococcus aureus; identical to SEQ ID NO: 405452

SEQ ID NO: 413107 - DNA, 180 bp, Staphylococcus aureus
atgttaagttatggtggattgctgaaacaaaagcataaaattttaaacttagacgatgccgaagatggtaatttgattaatacaagtgatgaagataaaacgacagacgaagaagaaaaagcacattcaattacggcaatttggaatttcgaaaaacaaaattattatttaagacattag

SEQ ID NO: 413108 - DNA, 558 bp, Staphylococcus aureus
atgtacaatattaatagttcaaaaattataaaaggttctcttgcatttgtcatcgcttctggagttgtatttagccctgttggcatcgacaatgattctgaagctgctgaagctaattcatcaatggtttctaaaaaaagtgctgggacaatttcaaaaattaatgataacgtggctagaattgatttgaacaaagggattacatacaatgttgatgaaaatggtatagctacgataaaagatactcattctggaaaaactgagcaattacctgtaacagcaaaagataaaaatggcgaagacgcgactttagtttattttgaagaggatggtaagttgggtgttcaagttgttaagcagcaacaagaaagaggagctgctaaatgtgtaatcggaactgtaggaggagctattggtggtgcgacaactggtggcttaggaggggctgctgttggtactgttacacttcctattgttggaactgttagtggtggtgttgtaggaactatcggtggcggtattggcggtgcttctggcggatatgtagctggttgttaa

SEQ ID NO: 413109 - DNA, 339 bp, Staphylococcus aureus
atgtctgaaaactggtgtataccaaaactaacggaacgccccttattagatacagaggacgctgaaggtttaagtgagacctttaaaatactttctaacgggacacggcttagaatactgcataccttgcttcgaactccaaatgcatctgttagcgaggtggcagaacagcttgaaatgaaacctcaagccatttccaaccaacttcaacgattggttgataaaggcatcgttcgcagtattcgtgaagccaattttattcggtaccgaattgttgataattgcgtcgttagtctattagatcgaggttggtgtttaaccgaagatttacctaaataa

SEQ ID NO: 413110 - DNA, 150 bp, Staphylococcus aureus
atggaaaaatgtgcgagaccgaactgtaattgtcttcttggggaaacaaaagtagaagaagcaggaaaagtttactgtagtcaagaatgtgtagacaactgtactgatgaagtttgcgagtgcaaagattgtagctgtgcaactgcataa

SEQ ID NO: 413111 - DNA, 1323 bp, Staphylococcus aureus
atgtcagacttattattactaccagatcttaaaacaatagaaccaccacaagaaaatgaatccgacatgatgtttaaagtggaagcaacttttccaccagtacgttgccctcaatgtggctttgacaggctatataaacatacatcaagaaagcaactaatcatggatctgcctattcgtttaaaacgagtaggattacaattaaaccgcagacgttataaatgtcgtgaatgtggcacaactttttgggaacgccttatatccattgacgaaaagcgtagtatgactaaaaggcttataaggtctattgaagaacaatctctgtctaagaccttcgtagacgtagctgaaagtgttggtgtagacgagaaaactgttaggaacatctttaaagactatgtggcattaaaagaacgtgaatatcagtttgaaactcctaaatggcttggtattgacgaaatacacattatcaagaaacctcgtcttgtattgaccaatgtagaacgtagaactatatatgacataaaacccaatcgtaacaaagatacggtcattcaacgcctttctgaaattaaagacaatacatatatcgaatatgtcacaatggatatgtggaagtcctacaaagacgcagttaatacagttatacctcacgctaaagtagttgtagataagtttcatgtagtccgaatggctaatcaagccttggatagtgttaggaagtctcttaaagccaatatgacagccaaagaaagtcgtacccttatgcgtgagaggtatatccttcttaaacgaaagcatgacttgaatgaacgagattcattccttttggatacttggctaagtaatttacctgaactaaaagaagcctacgaacttaaagaagagttctacttgatatgggatacagatgaccttgagcaagccaaagatcgttacaggtattggagacaatgctgtttatccagcaactctaaaaacgcctataaagacctattaagagccgtagacaactggcaggatgaaatcttcaattactttgataaaaggctcactaacgcttatacagagtctataaatagcatcattaggcaagtagaacgaatgggtagagggtactcatttgaagccttacgagctaaaataatttttaatgaaaagctccataaaaagaggaagccacgatttaattcaagtgcattcagcaaagctatgttatacgatagtttcaattcgtatcaaataacagaccgagacaaaacaggcaactatggtgtagatttttccacacttattaagaaattggaaaagagtaacttatag

SEQ ID NO: 413112 - DNA, 183 bp, Staphylococcus aureus
atgttggggaaataccataagttatttacagataagcatgatattaacgggaatgtccctatattcattaatattggtgaatgggacggagacgatgaggaattagataaggcagtgaaagatgtatctaacgctaatcctaatcatactgtgattgtggatgatattccgttagaggattaa

SEQ ID NO: 413113 - DNA, 1158 bp, Staphylococcus aureus
atggataaaggatcagagtggattcgatgggatttgcatgttcacactcgttcgtcagaagattataaatatatgcatgatgacgctgaagaaaagttagtggaagagtggaaaaaacaaggaattaaagcagtagcaataacagatcattttactatagactcagatagaattaataaattaagagagttagctaaaggagaaataacaatttttcctggagtagaattaaggacagataaaggatctactaatattcatgtaattggaatattttctgagcataaaaatttaaaagagcttcaaaatgattttgaagctataatgcttagaagaaatccaaataaagataaatttgaaaagatattttgggattttaatgatattgaaaaatttataagagatagacaaggtataattacaatacacgccggtaataagtcaaatagtatagaagaaataagtaatgacagcgcatttaatatggcaattaaagaatcttatagtcataaagttgatatatttgagcataacaatactcattcgtgtaagggttatgaaaaaagtgtatttaaagttactggtataaaacctcaaattgtttgttctgataatcataatccattagattatcaatactcagataagttatggataaagtctcagcctacatttaaaggtttattacaagctataaagcatccgacagagcgtatatatattggtccagaaccacaaaaaattaaacatgaaaaatttaataaacaatatattatagaagaaatagagatttgtaaaaataaaaattcttcaacttatgatatgtggttcgacacaaaaatcccattaaattcaagtttaacagctattatcggtaataaaggtagtgggaagagcgcattatccgatattatagcattaaccggagaatcagataaagttgatgaaaataatgcttcttttttaaacaataagagatttaataagtcaccacaaaaatatggagataactatgaatcaacattaacgtggaaagataaacatgaaaataaaaccaatagtctaatgcttaaaaaatcagacaattataataattatgtacagtatttaccgcaaaagtatatagaaaaaggttctgttgcaaagttgaatttatag

SEQ ID NO: 413114 - DNA, 792 bp, Staphylococcus aureus
atggaatatctaaaaaggcttgcattgttaataagtgttattattttgaccatttttataatgggttgtgatagtcaaagcgatactgcagaaaatccaaaagaaggttcaaaagaagcacaaattaaaaagagtttttcgaaaacgttagatatgtatccaattaagaatctcgaggatttttatgacaaagaaggatatcgagatggcgaatttaaaaaagatgataaaggtacttggctaattagatccgaaatagttaaacagccaaagggcaaagtgatgaaaacaagaggtatgcaattatatattaatagaaataccgaaacagccaaaggtttctttgttttgaaagaaataagtgaaaataataatcgtgtaaataaagataaggaggaaaaatacgaagtgaaaatggtaggaaataaaattattcctactgaacaaattaatgacgagaaaataaaaaaagaaattgaaaacttcaagttttttgtgcaatatggaaactttaaaaatttcgaaaaatacaacaatggtgagttttcatataatcctgaagcaccaatttattcggctaaatatcaattacacaacgatgattacaatgtaaggcaactacgtaaaagatatgacatttcaacaaaagaaacaccgaagttacttttgaaaggtggaggagatttaaaaaattcctcagttggtcaaaacgatattgaatttacttttgttgaaagaaaaggtgagaatatttattttaacgatagtgttgaattcataccaagtaagtaa

SEQ ID NO: 413115 - DNA, 378 bp, Staphylococcus aureus; identical to SEQ ID NO: 410975

SEQ ID NO: 413116 - DNA, 258 bp, Staphylococcus aureus
gtgtttgagtacctaaaaaatggatttgataccgatacacttgagggcattcaatcgagtaatactgatgtgatagcaaatattgaaatgttgtatcagttagctacgggaatcaatgaaccagcaacagaattagttgagggattgaagttggtaactgagtttgcgcaagacgagaaggctacacaagaggattacacggcgttagaacgtaaattgaatgatctaaaagcgtcttattatagtataagtaaataa

SEQ ID NO: 413117 - DNA, 321 bp, Staphylococcus aureus
ttgaaaatatctaatcttgaacaagtaatagtttttaaaaatatgatggaacaaaataaccattttagtaaaaaagcaaagaatcaattatcttcttcattattgattaagaaaaatgaaaagtatgaactgtatgggaaaacaggtacaggtatagtaaacgggaagtataataatgggtggtttgtaggttacgtaattacaaatcatgataagtattattttgctacacatttatcagatggaaagccgtctgggaaaaatgctgaattaatcagtgaaaaaatattaaaagaaatgggtgttttaaatggccaataa

SEQ ID NO: 413118 - DNA, 207 bp, Staphylococcus aureus
gtgacacaatacttagtcacaacattcaaagattcaacaggactaccacatgaacatattactgtggctagagataatcagacgtttacagttgttgaggcagagagtaaagaaaaagcaaaagagaagtacgaagtacaagttaaaagagatgcagttattaaattaggtcagttgtttgaaaatataagggagtgtgggaaatga

SEQ ID NO: 413119 - DNA, 444 bp, Staphylococcus aureus
atgacaaattacacagtagatactttaaatttagggaaatttattacagaatctggggaagtcatagataacttgcgtttgagatatgagcatgtcggttatcatggacaaccattagttgtagtttgtcatgcattaactggcaatcatttaacatatggaacagatgattatccgggttggtggcgagaaattattgatgggggatatatacccattcacgattatcaatttttaacatttgatgttattggtagtcctttcggttcaagttcacctttaaacgaccctcattttcctaaaaaattaacattaagagatatagtcagagcgaatgaacgaggtatacaagcccttggttatgataagattaatattttaataggggaagtcttggaggtatgcaagcaatggaactactttacaatcaacagtttgaagtag

SEQ ID NO: 413120 - DNA, 945 bp, Staphylococcus aureus
atgtataaaaacaatcatgcaaatcattcaaatcatttggaaaatcacgatttagacaatttttctaaaaccggctactctaatagccggttggacgcacatactgtgtgcatatctgatccaaaattaagttttgatgcaatgacgatcgttggaaatctcaaccgagacaacgctcaagccctttctaaatttatgagtgtagagccccaaataagactttgggatattcttcaaacaaagtttaaagctaaagcacttcaagaaaaagtttatattgaatatgacaaagtgaaagcagatagttgggatagacgtaatatgcgtattgaatttaatccaaacaaacttacacgagatgaaatgatttggttaaaacaaaatataataagctacatggaagatgacggttttacaagattagatttagcctttgattttgaagatgatttgagtgactactatgcaatgtctgataaagcagttaagaaaactattttttatggtcgtaatggtaagccagaaacaaaatattttggcgtgagagatagtaatagatttattagaatttataataaaaagcaagaacgtaaagataatgcagatgctgaagttatgtctgaacatttatggcgtgtagaaatcgaacttaaaagagatatggtggattactggaatgattgctttagtgatttacatatcttgcaaccagattggaaaactatccaacgcactgcggatagagcaatagtttttatgttattgagtgatgaagaagaatggggaaagcttcacagaaattctagaacaaaatataagaatttgataaaagaaatttcgccagtcgatttaacggacttaatgaaatcgactttaaaagcgaacgaaaaacaattgcaaaaacaaatcgatttttggcaacatgaatttaaattttggaaatag

SEQ ID NO: 413121 - DNA, 204 bp, Staphylococcus aureus
ttggcgagacttatattaaaagatccgaaaatcattttagctgatgaacctactgggtcattagatacgaaaaacggaaaaatagtcattgatttattattaaatctacttgatgaaaataaaactatgattgtcgtaacgcatgatttagagcttgcgaaacgatttgatgtcatagtcaatatttctgagcttagaagttaa

SEQ ID NO: 413122 - DNA, 483 bp, Staphylococcus aureus; identical to SEQ ID NO: 411722

SEQ ID NO: 413123 - DNA, 696 bp, Staphylococcus aureus
atgacagtattaacagataaagtagcagtagttacaggtgcaggtagtggtattggagaagcaattgcaacattactacatgaagagggtgtgaaagtcatcttagccggtagaaataaagataaactacaaaatgtggcgaatcaattagctcaagatagtgtgaaggtagtgccaacagatgtaacgaaaaaagaagaagtcgatgaattgataaaaattgcacaacaaacattcggtggtttggatattgttatcaatagtgcgggacaaatgttatcgtctaagattactgattatcaagtagatgagtgggatagtatgattgatgtgaatatcaaaggcactttatatacggcacaggctgcattaccaactatgttagaacaatcaagtggtcatcttattaacattgcatctatttctggctttgaagtaacgaaaagcagtacgatttatagtgcgacgaaagcagcagttcacactattactcaaggattagaaaaagagttggcaaagacaggtgttaaagtaacaagcatttctccaggaatggtagatacagcaataactgccgcatacaatccaacagatcgtaaaaaacttgaaccacaagatattgcagaagcagtattatatgcattaacacaaccaaagcacgttaacgtgaatgaaattacagtgcgtcctgtataa

SEQ ID NO: 413124 - DNA, 630 bp, Staphylococcus aureus
gtgtgcttacctgcatctgagtctgaatcactgtctgaatctgagtcgctatctgagtctgagtcgctatctgaatctgaatcactgtctgagtctgagtcgctgtccgaatctgagtcgctgtctgaatctgaatcgctatctgagtctgagtctgaatcgctatctgaatctgagtcgctatctgaatctgagtcgctgtctgagtatgagtcgctatctgagtatgaatcgctgtctgaatctgagtcgctatctgagtctgagtcgctatctgagtctgaatcgctgtctgagtctgagtcgctatctgagtctgaatcgctgtccgaatctgagtcgctatctgagtctgagtcgctgtctgaatctgaatcgctgtctgagtctgaatcgctatctgaatctgaatcgctatctgagtctgagtcgctatccgaatctgaatcgctgtctgagtccgaatcgctatctgaatctgagtcgctgtctgaatctgagtcgctatctgaatctgagtcgctgtctgagtctgagtcgctatctgattctgaatcgctatctgaatctgagtcgctatctgatgtatcttcttcgaagtatccgttatcaagtgtgaaatcatcatga

SEQ ID NO: 413125 - DNA, 390 bp, Staphylococcus aureus
ttgtcatacgcaacgtttaccacgtatttacaaaatttaggaccagatattttctataaaaatatcgcattagcaatttttgcatttatagcatttggtattattggttatttcttcgttggagatgcatcaagtataggtaagtatttattcgttacattaataactttaattattgcgagtctaattggtatttttctgcataatcctattttttatactgttattaccgtcgttagtctgttgttatttctactttatactttgtatgattttaatcgtttaaaaagaggtgactattcaccaagagaaatgggatttaatctatttattaatttgttgaatattattaaggatatactttatcttgctaatatgttcagaagataa

SEQ ID NO: 413126 - DNA, 363 bp, Staphylococcus aureus
atgttaaaagagttcaaagagttcgccttaaaaggtaacgtcttagatttagctatcgctgtagtgatgggtgcagccttcaacaagattataacttcattagtagaaaatataattatgcctttaatcggtaaaattttcggatcagtagattttgctcaagaatggtcattctgggggattaaatacggcctatttatccaatctgtaattgactttattattatcgcattcgctttattcgtctttgttaaaattgcaaatacgttaatgaagaaagaagaagtcgaagaagaagcagttgtagaagaaaatgttgtattacttacagaaattagagatttattacgtgagaaaaaataa

SEQ ID NO: 413127 - DNA, 1707 bp, Staphylococcus aureus; identical to SEQ ID NO: 407819

SEQ ID NO: 413128 - DNA, 4113 bp, Staphylococcus aureus; identical to SEQ ID NO: 407246

SEQ ID NO: 413129 - DNA, 336 bp, Staphylococcus aureus
atggcactattagaagcatttttaatttttatttttgctgtgattattagttcggttatcaataatcgattcccacaaattcctactgcctttattcaaattgcattaggtgtcgttattttcattattccaatacaagttgatttccaattcaattctgaagtatttatgtttgccgttatcgcgccactactttttgtggaaggtacccacgtctctcgaacaaaattattagaatatcgtaaacctatactattaatgtcaatggcactagtgttggctattttatacattggatttggcctgccttaccaatgccagccgcttttgcaatag

SEQ ID NO: 413130 - DNA, 1005 bp, Staphylococcus aureus; identical to SEQ ID NO: 405045

SEQ ID NO: 413131 - DNA, 225 bp, Staphylococcus aureus; identical to SEQ ID NO: 410345

SEQ ID NO: 413132 - DNA, 216 bp, Staphylococcus aureus
atgataattaacggttggaaactttataataattcaaatatcaatttaaattttatagataataaaaatagcatacaagccattagtcaaatgacaccagctttttgggtttactttgaatttgatttacaaaaagaggaaataatagatattaatccaaagttatgcttagaaataaataaagataataaaacaattaaactatttgataaataa

SEQ ID NO: 413133 - DNA, 738 bp, Staphylococcus aureus
atgataatttttcgattaaaagaaataatggaagaaaaaaatttgaaaataagtgatttacatgaacaaaccggaatttctagaaattccataagctcattattaaatggtaagactagaggtatacaatttgatactttagaaaaaatcactttagcgttaaatgttgatgttgcagatttatttaaaaatgtctttaacgaactgattattaagttagatgatattagtaaagtagaaacatacagacgtagtaagaagtttaaagaaaagaaaaatataattgttaaaaaatatgctgtaaattgcgatttaattgaagataatgacttaaaaaaaggtttcataccctatgaaatttctattgaattaaatccaaatcccgaaattgaaataaaaattcaattcgattatagtaatttatttaactacttaataaagtttttagaagattgtaataatttcaaacttttattagttaattatttaagcaaaaaaatatactgtttagaaaataagcgtattaatgaaattaaatcattttacagtatccctgatgaaaaagtttatattctttcctcattcccaggaatatttatacgcaggcctttacgtgataataatggaattttcgaaaacatcgaattaaataaaattattaatgaattgaattttaattcaaattataattacacatacagtgatcaaattacccttactcataaaaacaagaaatga

SEQ ID NO: 413134 - DNA, 663 bp, Staphylococcus aureus
atggtcagagcacacttaaatcatttagcaaaaacaaaaaatattcttgatgaacaaggtgaagtcttccatttcaaaactcatcagtttagacatacttatgcagtgaaattgttaaatggtggagcagatatattaaccatacaagaattattagcacattcctcaccagaaatgacactcagatatgctaagttacttgatgatacaaaaagaaaggcttttgaatcagttattgatcaaggggcttttagttttgatgttgacggtaaaattaaaaatatacagcatagtagtgaattatcagaaaaagcattgaattctttatggcaagaacataaattaaacgcaatggacaatccttatggtacttgtcatgctagattgagcggtgattgtccatatatggaagctccgccatgcttaacttgtaattctgggaaaccatgtaaggatctagctattggattttctgatttagatgttgaaaaatatgaattacatatcaaatcaacggtcaaatccatagaattagctaaaaataataatagacaagatatagttgaaaaacatactaatatattaaataaatatgaagaaatattaggtaatataaaagatggaaacattatattcgggagaagtaatagaataaaagtatag

SEQ ID NO: 413135 - DNA, 150 bp, Staphylococcus aureus
atgacaagagaaagaagatcatttagttcagagtttaagttacaaatggttagattatatgaaaatggtaagccaagaaatgaaattatacgcgagtatgatttaacacctttgacgttaggaaaatggataaagcaacatcaaaaataa

SEQ ID NO: 413136 - DNA, 441 bp, Staphylococcus aureus
gtgcagaaatttttggggcatgaaagcccagaaatgacaagcagatacgctcatatctttgatgaaactctaaaaaatgaatttactaaatttcaggaaaaactggttaccaataatggagatgtgcttgatctagatgaagataatgaagtcgatgatgtagagcttcaatggttcaagaaaaatataaatgcacaagtgcttccaaatggttattgtagattgccagtagtagcaggtggttgtccacatgcgaatgcatgcttagattgcactcacttctgtaccagtaagcaattcttaccacagcacgaagaacagttagagcgtacagaagagttattagccatagctaaggataaacaatggcaaagacaagtagagactaatagccgtgttaaagagcgtttagaacaaatcattggaagtttgacggggtaa

SEQ ID NO: 413137 - DNA, 162 bp, Staphylococcus aureus
atgagtaaaacttataaaagctacttattagcagtattatgcttcacagtcttagcgattgtactcatgccgtttctatacttcaccacagcgtggtcaattgcaggattcgcaagcatagcgacattcatattttataaggaatacttttatgaagaataa

SEQ ID NO: 413138 - DNA, 252 bp, Staphylococcus aureus
atgaaacatacattattaagaattgctaacgaattaaacgaactgattttgcattctgatgcaagaattgagtgtcaatttgcaagacataacgatgaaacatttacagtttatttgctccattttgatgatcgttacgaattatgtattagtcatttatccatcagcactaactactccgacgaagaggctcaagaaatctatgaacaaatgaaacgtgttattgcaggggaggaattaatcaatgaatga

SEQ ID NO: 413139 - DNA, 534 bp, Staphylococcus aureus
atgaatgagttacaagcgcaagaactagagaatattgaacaagatgaacgatttgaagttaccgatttagacagtgctaactgggtgtttaaaaagttagatgcgattactactaaagagaatgaaatcaatgaattagcagataaagaaatagaacgtatcaagtcatggcaagaaaaagaagtagagaaattgcaaggtagcaaagattatctacaaagcctagtgattgagtatttcagaatagaaaaagaaaaagatagtaaattcaagctcaatacgccgtacggcaaagtaacctcacgtaaaggttctaaagttatccaagtgagcaacgagcaagaagtgattaaccaacttgaacaacgtggttttgacaactatgtaaaagtaaccaaaaaacttagccaatcagacattaagaaagactttaatgtaactgaaaacggcactttaattgacgcaaacggcgaagttttagagggtgccagcatcgtggagaaaccaacgtcatacacggtaaaggtggggtag

SEQ ID NO: 413140 - DNA, 780 bp, Staphylococcus aureus
atgactgaacaaatcaatgagcaagtggacatcttaaaaaggttaaaaattaataatattgctgaaaagaacaaaaagaaattttacaaattcgctatctacggaaaaatcggtacaggtaaaacaacgtttgcaactagagataataacgcatttgttattgatattaatgaagatggaacaacagttgtcgatgaaggatcagacgtcgctattcaaaactaccaacattttgtagcgattatacaatatctacctcaggttattcaacaaatgagaaataacggacagcaaattgatgtagtagttattgagacaatacaaaaactaagagatataacacttcaagacgttatgaaaaacaaaggtaaaaagccaacgtttaacgactggggagaagtagccgaaagaatagtgagcatgtatagattaattgctaagcaacaggaagaacatcaattccattttgttattactggtcatgaagggattaataaggacaaagatgaagaaggtagcacaatcaatcctactatcactattgaggcacaagaacaaattaaaaaagccattacttctcaaagtgatgttttagctagagcaatgattttagaacatgaagaaaacggagaaaagaaaaaagaatatgttttaaatgctgaaccttcaagcacatttgaaacgaagatcagacattctccatcaataaatattaataataaagtatttatcaatccaagtattaacgatgttgtacaagcaatcagaaatggaaactaa

SEQ ID NO: 413141 - DNA, 537 bp, Staphylococcus aureus
atgactaacacattaacaattgatcagttacaagagttattacaaatacaaaaggagttcgacgatagaataccaactagaaatttaaatgacacagtagctagtatgattattgaatttgtagagtggattaacacacttgagttttttaaaaattggaagaaacaaccaggtaagccactagatacacaattagatgagattgctgattacttagctttcagtttgcaattaactctgactattgttgatgaagaagatttggaagaaactactgaggttatggttgatttgattgaaaatgaagttactttacctaaactacattcagtttattttgttcatgtaatgcatacgctaacagaacaatttgtaaaaggtattgataatagcattgtacaagttttaataatgccgtttttgtacgccaatacttactattctatcgaccaactcattgacgcatacaaaaagaaaatgaaaaggaatcatgaaagacaagatggaacagcagacgcaggaaaaggatacgtgtaa

SEQ ID NO: 413142 - DNA, 414 bp, Staphylococcus aureus
atggcaaaggttaagtatggtaattgggacttagttaaggaacttgaggagttcgaggaagaaacgattaaatgggctaaaaaaggcatagccaagacaattaacaaaatatataatactgcagttgcgttggctccggttgacatgggttttttaaaagaaagtatcgactttatgtataaagacggtgggcttacaggcatcatcagtgtaggcgctgaatacgctatatacgttgagtatggaacgggtatctatgctactggtcccggtggtagtagagcaaaaaaactcccttggtcttatgaagatgaagatggagaatggcacactacttacggtagtccagcgcaacctttttggaacccagctatcgatgaaggcagagcattcttcaataagtatttttcatag

SEQ ID NO: 413143 - DNA, 396 bp, Staphylococcus aureus
atgaataaaagaaatagtatagccacaattcataggaaaatcactaattactgtaaagaaaataattttgatataccaagttataaacaaatttatagtgttattaaagcgatgcctaagtctgttattgatttctctcatcagggtgaaaaatactatcaaaataagtacgatttaatacaaattagagaatcctcgagacccaatgaaatatggcaagcagaccatactttgctagatatctttatattagaccaaaaaggtaatatcaatagaccatggctaactattattatggatgactatagtcgtgcaattgcaggctatttcttaagttttgatgccccccaatgctcaaaacacagcattaacactacaccaagcaatatggaataa

SEQ ID NO: 413144 - DNA, 534 bp, Staphylococcus aureus
atgattgttggctatgcgagagtatcatcgaacgatcaaaatttagaaagacaacttgaaaatttaaagacgttttgtgctgaaaaaatatttacagaaaaacagtctgggaaatctattgaaaatagaccagtacttcaagaagcacttaactttttgaggatgggagatcggtttgtagtagaatccattgattgtttaggtcgtaattatgatgaagtggttggcaatccattactggataagtttatgaaagatttaattattcaaatattagcaatggtttcagaacaagagagaaatgaaagtaaacgtcgacaagcgcaaggaattcaagttgcgaaggaaaaaggcgtatataaagggcgccccttactttattcaccaaatgctaaagatccacagaaacgtattatttatcatcgcgttgtagaaatgttagaagaaggccaatcaattagtaaaattgcgaaagaagtaaatataacaaggcagacgatttacagaattaaaaacgataatgatttgatttaa

SEQ ID NO: 413145 - DNA, 1935 bp, Staphylococcus aureus; identical to SEQ ID NO: 409387

SEQ ID NO: 413146 - DNA, 306 bp, Staphylococcus aureus
atgtcttattcaattattcgagttgttaaagtgaaatcaaaaacaaatacaagaggtattcaaagacatattcaaagagaaaataaaaattatgaaaatatagatattgatttaagtaagtcatatttaaactatgatttagtcaatgatactaagtttgattttaataaaaaaattgatgagaaaatcgaaaaaaattataaagggaaacgcaaaattagaacagatgccattaaacatattgatggattaattacatcagataatgtgttttttaatcaattatctgaagaagagacaaaatag

SEQ ID NO: 413147 - DNA, 300 bp, Staphylococcus aureus
ttggaagaagaatacggtaaagaaaatcttttatatgcgacagtacatatggatgagataacaccacatatgcattatggcgtagttcctattactaaagatggacgtttaagtgcgaaagaagttgtaggtaataaaaaagcattaaccgaattccaagatagattcaatacgtatattaataagcaaggctatgatttaaaacgaggaatttctagacaacttacaaaagaaaaacatgatcaagttagccgttataaacaaaaaacagaatatcataaacaaatgcatatgcgctag

SEQ ID NO: 413148 - DNA, 546 bp, Staphylococcus aureus; identical to SEQ ID NO: 412734

SEQ ID NO: 413149 - DNA, 861 bp, Staphylococcus aureus; identical to SEQ ID NO: 408477

SEQ ID NO: 413150 - DNA, 342 bp, Staphylococcus aureus; identical to SEQ ID NO: 409374

SEQ ID NO: 413151 - DNA, 186 bp, Staphylococcus aureus; identical to SEQ ID NO: 409375

SEQ ID NO: 413152 - DNA, 744 bp, Staphylococcus aureus; identical to SEQ ID NO: 410407

SEQ ID NO: 413153 - DNA, 276 bp, Staphylococcus aureus; identical to SEQ ID NO: 409377

SEQ ID NO: 413154 - DNA, 189 bp, Staphylococcus aureus
atgataattaaaattttaacaattctatttctactttgtatattgagttatttggttacaaacagaaagaagcctttcttgtttttaaaaacactcttgatgggtgtcgtattcatattcattggatatatttcgttagctatctctgcagttatcattttatggaatagctcaatttattaccattga

SEQ ID NO: 413155 - DNA, 279 bp, Staphylococcus aureus
gtgttaggtagttggcgtttagaaggttgcacattatatgtaaccctagaaccatgtgtcatgtgcgcaggaacaattgtaatgagtcgcattccaagagtcgtctatggcgcagatgatcctaaaggtggctgtagtggcagtttaatgaatttattgcagcaatctaattttaatcatcgtgcaattgttgataaaggtgtacttaaagaagcatgtagcacattattaacaacattttttaaaaacttaagagccaataagaaatccaccaattag

SEQ ID NO: 413156 - DNA, 1419 bp, Staphylococcus aureus
atgggagaaaaagctttttatgataatcaaattaaaagattaaaaaagtatattagtgatttaaatgtacgaccaatattatttgttggttctggtttttctcaaagatacataaatacaccaaattgggaaggtctattaaattatcttattaacgaaaatacgatgattaataagccactacaatattatattcaaaaatttaatggtgatttaagtgaagttgctactgaattagtaaaattttactatgaatatgcctgggagaatactaaagaatttcctaataagttatatgaatcaaaagataaaaatatatatttaaaatataaagtagcaaaatatttagaagaattgtcttatgattttaaaaattctaaaaaaatatcgagaagtttaagtgaggaaattaatattttaaaaactttaagtccacattctattattactactaattatgataatctacttgaagaaatatttcctgattacgaagttattaatggacaacagattataaaagagaagaaagcaacagatattggccatatattaaaaattcatggttctattgataacccctcaagtttagtcatttctaaaaaagattatgaggaatttaattcaaaacaaatatatttaattgctaaacttttcacttattttgttgaacatcctataatttttataggatatagtctaaatgattcaaatattaaatcaattttaggaaatgtaaaaaaaatacatggaattgaaagtggaaataagttggaaaatatatggtttatagattggagttctacagcattaaataacagttctaatagaggagtatatgaaaaaaatgttgatgttggtaatggagaaaatataagattaaattatataaaacagcattcttttacagagctttttagttcattatatcaagaatcagttgatgttaacttgttaaaagattttgaagcagcagtgtataatgttgtaaaaagcgaaagcataactaatatgaaagtagatatagccagtcttcgatatttgacagacagtaaaaatgttttgcatacctttacacataattctattaatagtaattctagcacctcacaatcgcttctaagctttgctttgataaatgaagctaatcaattagccactcaatacatttatacagcaactgaattaagtaaaaaagtatttgaagatgaaaatgctcattggacaaaagcttataaattatttgacataattgaagaagaatttggttttaatttaagaaaaagtaataatgattatcatatagaattaaataaaatcaatcgatatactgatgaagctattagtttacttaaaaaagtaaaaaataatgaatattatgaaataaagatgaaaggaaaaatatattgtaaacaataa

SEQ ID NO: 413157 - DNA, 1725 bp, Staphylococcus aureus
atgaaaacatcatttaaagcatttaataacattataaatacaattaatcaatctgctggcaataatcaacgagatagaggaactttctttgaagaattagtgaaaatatatttgcaaaatgaaccagtttataaaaatttatactctgacgtttggttacttaaagaaattcctgaaaaatatgggattcctaaacaagatactggtgtagatttggtcgctaaaaatcgtattacaggaaaattaacagcaatccaagctaaattttatcaggggaaaattggtaaagctgaaattaattcttttattgcagaacttggaaaaagttattatagtgatggtctaatagtttctactactgatgaatggaaccaaaatgcactaaacactatagaaaaacaaacaaaacaagttcaaagaataggtctatctaatttaagacattcaagtatagattggtctatatttgacttcgaaaagccaaaggaagttgttgtagactcaccaaaaaaattacgtgattatcaagaagaggcaataagacttgcaaagaaatattataaaaataatgatcgtggcatgcttgttatggcaccaggtacaggaaaaacttttacttcacttaaaattgctgaaagctttgcaaaagacagtggtaaaaaaatttataatattttatatctagttcctagtattcaactattaactcaaactttatttagttggaatactgataaatcaataaattttaatattaattcttttgcagtcacatctgatagaaaagctacaaagaaaaaaacagatagcgatgatttagatgtattggctatagatattggttttccagctactacaaatgaaaaggaaatacttagtaattataattctataaagtatgataatgaaaaaattacaatgaatgtaatttttagtacatatcaatcaatagatgttgtgaaaaaggcacaagatttaggttatccaaaatttgacttcattatatgtgatgaagcacatcgaacgacaggtataaccgaagaagggaaaaaaagtagtcatttcactaaagttcataataataattatatcaatggagaaattagattgtatcaaacagctacaccaaagatatattctgatgatgcaaaatctaagaaaaatgaaaattcgataattatctcatctatggataatgaagaaatatatggaaaagaaatttttagattaggttttggtgaagctgttgctagaggatatctaacagattataaggtaatggttttaacagtagaagaagaggcaatgacaaggaacttgcaacaaactttagctgatgagaatgggcttagaatgaatgatattgggaagattataggtatatggaatggtatgataaaacgtcaaggaactagtgggaaagttaatggaagaccaatgaaaagagctatctcatttatagatagtatagaaaattcaaagaaaattgctgaaaaatttaattctgttgtaaatgaatatcttggtgataccgctaaagaaagctttcaaatagatgttcgacatgttgatggtaaactaaatgcactacgaaaaaaagaggcacttgattggttaacggatgatattgataataatgaagcacgagtattgtctaatgtaaaatttctaactgaaggtattgatgtacccaatcttgatgcggttatattcttttgcctatag

SEQ ID NO: 413158 - DNA, 2928 bp, Staphylococcus aureus
gtgattccagcaggaactaatccagaaaacattttagatgataacaaaagctatgcagctgtttggcaaattttgaatgctttaaggtctacagatgaacgatttaatgcgattgtgaatcaacttcagttgaataaagagaaatcaggaaatatagatattattaatccaggaaaaggacgaccaagaaaaccttataaagaaggtgaagaaaatggaaaccttgatgtgaataagcccatacaacaagaattagaactatgggatgatataaaagaggccatttatggtaaaattgtgcgtaaagtcgggaatagacgttatctagaagattggtctaaagatgttaatgaaattgcgcaaagatatatacgctggattactgatagaataaatgataaagaaaatcctataaaaaatgaattctcaaagtttgtatatagtttacaaattaatcttaataaaagtattactatagaattagccattgaaatgttagctcaacatcttattactaaacccgtttttgaagcattatttgaccaaaatagttttgttaataataatccagtatcccaatctatggaaaaagttgttaaagagctacaaaaagcaggttttgagaaagaacaagatagacttaaaccattttatgaatcagttaaattacgcgcaagtggtattgataatgcggaaagtaaacaaaaattaattaccactttatatgaaaaatttttctctacaggctttaagactactagcaaaagactagggattatttttactcctgttgaagttgtagatttcattattaaatcagtagatgaaatacttcaaaaccattttgaaaaatcattgtctagcaaaggtgtgcatattctagatccatttactggtactggtacatttgttgctcgtgtattatcgtatttaaaaagtcaaatggaacaaaataaaatatccatggcagatattgttcataaatacactaaagaattacatgctaatgaaattattttgttaagttattatattgctgctatcaatattgagactacatttaatgaaattgatactaatttagaatatcagcctttcgaaggaattgttttgacagatacatttgaaagcacagaaaatgataatacttttgatgatatattttttggaattaataataagcgattaaaacaacaaaaaaagttaccaattacagctataataggcaatccaccatataaaaaaataaaagcaacggcaaacgattttacagcagttcaaaattatccgatgcttgatggaaaaattaatgaaacttatgcgcgagagacttccgctaatttaaaaaattctctgcaagattcatatatacgtgcattgcgctggagtactgatcgaataggtgataccggaataattggctttataacaaataatggttatatagattcggcttctttaaatggtgtacgaaaagtgcttgaaaaagattttaattatatttatgtaattaatttaaaaggttcattatctggattaagttctgaagctataaaaagagaagggaaaaatatttttgatataaagacgggtgtagctattataattttagttaaggatggttctaatgctcatagtattaaatattatgatattggaaataatctttcaaaacaagaaaaactagatatattatctaataatagtattaaagatttagactttattgatattattcctgatgaaaatggagattggattaatcatcgagataaaaattatggtaaatatttagctctaggtggagaaaaagatgcagtttttcaaaataagcttgttggcttcaatacaaatagagatttttggtcttttaatttctcaaaaaaagaagttgaaaaaaatatcgaacgcatgattagcaactataatacggaaatagaaaagtcaaatgactatgatactcaagaagaaaaattaaaaaatttaaatagcaatgaatcttatataaagtggtcacaaggtttaaaagataaatttattaaatcagaaaagctcaattttaaacctaataaaattatattaactcaagcaaaaccatttacaaaaaaatatgtatattatgatagagatttagtagagagaccaggtaaatttgattcagttttagaagaaaatggggaagtaatatatactccagggcctggcggagcaagaacattttctgctttagtagggaaaggtccaattaatctacaggcttttggttatgcttcaaaaacacaaacgtaccctattaaagtaaagacgcaaggatttgaagaagataatttttctaatgttacagaaaaagctaaagctcgcttcggtcttaatgatgaagaagtaatttattatatttatgcagtaatgcatcatcaaagctttattactagatacgaagacgatcttcgtaaaataattccgcgtataccacttttgaaaaatgtgaaaaaatttgtaaatataggtaaaaaattattagatttacatttaaattatgaagctgtggccccatgtgaaaatgttaaaataaaaataaaatctgagaaccctgattatactgtaaaaaaaatgaagcatcctaaaatacttaattctgaaggtgaaaatgtaaatgatttaacgagaataatatacaatacagaaatagaaataattgatataccagaaaaagcatataactatgtaattaatggaaaatctgctattaattggattatgtctgaatatcaaattaaaactaataaagcatctggtataactgataatccaaatgatttcagtgaagattctaaatatattttaaatttattattatccgttattaatttatcattaaaaacacttgatttaatagattcactacctgaacttgagttagatgaatga

SEQ ID NO: 413159 - DNA, 222 bp, Staphylococcus aureus
atgaaccatgatactacacaatcagattggcgaacagttgctagttgcttagcatcacaagattatgtatcaatagtaaaagggttagtacaccattttacagcaattaaagatgaggaaatacttgataaaatatatgaagattttatgaatgatgattctatagcaaccgtacttaacaatgatttacaaataattattaaccaatacctatcaaaatga

SEQ ID NO: 413160 - DNA, 504 bp, Staphylococcus aureus
atgaaaacaatcaaaagtacattagaaaccgaagctatattcagtgatgaccaagaacatcgctatctacttaagaaaaaatgggatagtgaaaaacaaacaattacaatcattacaatgtatccacattatgatggcattctcaacatcgacttaacaactcagctcattatgaacaaagtttcagaaatggatgcatttggttcaatcaattttgtgaatctatattctaatattacaacacctattaatattaaacattcaaaaaatgcttttgataatcatacaaatattcaaattatgaaggctgtgaaagaatcggatgaagttatattagcttggggagcttacgctaaaaaacccgttgttgaagcacgtgtcaatgaagtattagaaatgttgaaaccacataaaaagaaagtgaagcaactcatgaaccccgcaactaatgaaattatgcatccactcaaccctaaagcacgtcaaaaatggacattgaaataa

SEQ ID NO: 413161 - DNA, 1350 bp, Staphylococcus aureus
atgaaacaagcaataggttacttacgtcagagcactacaaagcaacaatcactagtagcacagaaacaagccatcaagacattagctgaaaaacacaatattcaacacatcacattttatagcgataagcaatcaggacgcactgataagcggaatggttatcaacaaattactgaactgattcaacaaggacaatgtgacgtactatgttgttatcgcttgaatcgactacatcgtaatttgaaaaatgcattaaaacttatgaaactgtgtcaaaaatatcatgttcatattctaagtattcatgatggctattttgatatggataaagcgtttgatcgcctaaagctcaatatattcataagcctcgcagaattagagtccgataatattggtgaacaagtcaaaaatggccttcgagaaaaagcaaaacaaggtaaactgatcacaacccatgcaccatttggttatacctatcgcaatggcacattcacaattaatcaagatgaagcaccaacagttaaggcaatattccattactacctacaagactatggttataagaaaattgcgcaatacctagaaacagatgataaatgtattaatcgtaaaccttaccaagtacgcgctattataacgaatcctaattattgtggtcgcgttatcaatcaatatggacaatatgacaacatgttcccatctattgtttcgaccagtatatacgaacaagctcaagcaataaggtcacaaaaacataccaagcggactccatcatctaatcaactcaaacaaaaaatcaaatgtccgtgttgtggctcaacactcacaaatatgacaattagaaaaaagaaccatacattacgttattacgtctgtcctcaaaatttgaatgcatctcattttgtctgtgaattcaagggaatcaacgcacaagcattagaagcaagtgtcttatctacatgtcaggatttctttcagaaccaacagctgtattcaaaaattaaccgaacaattcaacaacaactcaaaagacaaagagacatagaaactaaaactacactcaatcacgaacagctgatagaaaaattggccaacggcaaaattgatgcagaaacgttcagagaacaaacgcaatcattacatcaacaatcaaaacctatatcatcaatcagtgcgtatcaaattcaaagagcgtttcaaaacatcattcaacaacgtttcacgctaaacatgttatacccttatattgatcaaattcatatcacaaaaaagaaaatgcttgttggcatttatttcaaaaatgaacccttaaatatcgtcaatcaaaaaacgcaatcatcgattgcttaa

SEQ ID NO: 413162 - DNA, 279 bp, Staphylococcus aureus
atgaatgtaattgtattagcacataatattacagatgaaagagaagaccacttggataaacaacctattgatactgtaagagcatattgtaaagaacatggttataaaatcacaaaagattataacgacgataaccaattaataaatgatattaaactgaagcacttcaaacctaaacgtattgtcttttggggtatttatgaagattatcctaaattggtcagactctgctcaacacgaggtatcgaactcattacaacgtttccaatgttggtataa

SEQ ID NO: 413163 - DNA, 1788 bp, Staphylococcus aureus
atggctaacaacatcttcgagcaatatccatactggttagattcaactgcatggtatgaacttattcgagcaaaaaacaaaaacgacgaagataagataattcgtttatctagtccaatcatcatagaaaacaaatttctcgaccctactacaggggttgagaaattgactatcacggatggcaaaaatattaaacgtattgaaacgtcagatattctaacgacacaaaagttacctagactggttatgtttagcttcagcatcaatgaaacgtacattaaatcgctaagtaatgcactacaattaatgcgtcaatcactgcccatttctacattgtatacaggtgtaggtgtcttaagtactgatgaaggtactgtcatttcattagatgaaccatatctttcaaaagacatcgagcagtctcaggctgatgaaatcatttgtgaaacaaagtatgacttacaacctaaaggtacatttgaaagctggtggcaaatgtatcttgatgaagtaaaaggaaacttgttactggagcttgctgtgatatttggtgtttcttcattagtgactgcgttcttaaaaacaaagcatgaagtcgaatattttggcacgatattttcatttatggggaactctagtacgggtaaatcgactgcagcggcattagcagtttcaatagcaggtaatccatctaaaggtgatcaaacattattcagaggttggaacggcacccgtaatgcaattgaaggatacttaagtaacaactttggtgttcctattgccttagatgaattatcagcagctacctttaaagatacaaatggtttactttattccctagcagaggggcaaggtcgtctacgtgctaatcgagaaggaaatgtaaaaaatcctcaccactttggatctagtgtgattagtacagcagaacacacgattttcagggatgctagtgcgaatgatggtctcagagcaagatgcatcgaaatttctgatgtctttacaacaagtgctgacaatgcggacgccattaaaaaaggaatatcaaaaaactacggacacgtaatgccgttagtagctgaatatcttctaaatcgtgaatctgaagtaatcaagtggtttcatagagaacacgattggttcaaaacgcaacttaacaatgaaacaaacaatgtaggcatacgtatgttcaagcgctacgccaccattatggtatcagcacgaatattagaacgtgtaattgcgacacccatagatttggatgcagtaagagaatacctagtgaattaccactcagattcggtaagcgaaaggtcgctgtccgacaaagcaatcgaattaattgtccaatttgtagcacagtacagaaataaattttcagatgacggtagattatcaaatatgctggagggatttggcctcatagaacttaaagatgaccacatccaagttaagataattgccaaagttttcaaagatatgcttaataataatcaatttcaggacaccaacaatgtagttgaagctttgatagaaaaaggttatatggaatcggaccgagatcgtaagacaacaaaacgaagtgtcaaagatgctcaaggtaaaacaaaatcaattgtattctatcatcttaaattggataaagatcttgcacctatttttggcttaagttccaatacagaaactttcacaccaccgaaatttgataataatacaaatccagatttgcttaataattttattaagcaagccaaagaaaaagaagcaagtgacgatttagaactataa

SEQ ID NO: 413164 - DNA, 270 bp, Staphylococcus aureus
atgaagtataaacctattcgagtaatacaattgtatggagcaacaaagaaagctgcaaaacaaaaatacagcggagagacattcatctttaatgacttagtaaatcaggttggcactttcaactgtactactaatgaaattagagaagtaggtcgcatgtttggggcgtgggaaagaaaaggatgcgacgctcctatcaagagaatttctaacaaatctcctatcctgtatcaaagaattcgactttttaatacaggaggtaaacgctaa

SEQ ID NO: 413165 - DNA, 1560 bp, Staphylococcus aureus
atgacactaaaacttatttcaaagtataactctgaattcatgcaggatataatcaaacaaataaacatatcgttagaagatattgaaggttcatcatcaattgaagtcgaattcgataataaaggcaattacacacgttatcaatttcaaaataataaactttatataaaaaatgttttatcaaatttaatagatttgttaggtattgaatatggtgtagatacttttatgcgtggattcaacgaaggattttatgaagtcttaacaagtttcatggatgcttcaaacttagatgatcaatttgaagaatataaaaatgcaattttcacttatttgttcacatctaaaggcaaactaaaggaacatgtactattaaaattacataatgatggatctatagctcttgacgacactacttttaaaagagctactgtaaatgctacttttggttataaaaatgatataccttttagattttatgatgaaaataatccgaatatcacatcactggataatatgctaaacactgcttttacaattaaaaatggtctcgaacgtaaaaactataattattcaaataactactcctcatcatattcacatgaagaatgggaaaacttaaataagattgctgatataagtacacaaatcaatatagatttaaatgacaaaaataatgagatattccatagatatttcacaaaagaacaacttatttcatctataatacagacactattaaataggttccctgatatcaacacagatgaagaaaaacagataactgcaaatctaaattcattaattggtaaattatcaaaagacaacattcgtggaaggttcccttttagtgatgtactaacaattttgtctgttttttattttagatatttgtacatagatagtaatacacatgctaaacacaaaaatgcctctggcaacaatagctattttgctttactatttaacaagcaagaattaaatatattaaaaaagcaaaaagttaattattcagaactccaagattttaaggaacaaaaattaaaattcaacgctgattttcaacaactacataacgacatagatgaattaactgaaaatcacttacacattgtcttcacagatgacaaattaggaaatgaagatgatgaaggtgatttttcatcttttcatatcatcgataatgaacttataaatgcatcaaatttgtttatacataaattattttatatggatcagctaccatttatggaaactttgcttagtactttatcaggtgtttacgctcatatttgcgagaacatgaatttctttcatacaaatgcgcctatagaagttcttaatttgagtaatcaaattataaaaacgacaaaaaaatggagtaatacaataacacctctccatgctaaaaatgacctaactcatagtaaatcaaataagtacgacctaaacttattcatttatgactttaaaatttctagtgaaactcatctatctctaattaattctatgaatgtaattgataatctaaacttgagacaaaaatattttaaaaaataa

SEQ ID NO: 413166 - DNA, 675 bp, Staphylococcus aureus
atgaactatttcagatataaacaattcagtaaaggtgttatcactgtagccgttggctactatctaagatatgcattgagttatcgtgatatatctgaaatattaagggaacgtggtgtaaacgttcatcattcaacgctctaccgttgggttcaagaatatgccccaattttgtatcagatttggaagaaaaagcataaaaaagcctattataagtggcgtattgatgagacatacatcaaaataaaaggaaaatggagctatttatatcgtgccattgatgcagagggacatacattagatatttggttgcgtaagcaacgagataatcatgcagcatatgcgtttatcaaacgtctcattaaacaatttggtaaacctcaaaaggtgattacagatcaggcaccttcaacgaaggtagcaatggctaaagtaattaaagcatttaaactgaatcccgactgtcattgtacatcgaaatatctgaataacctcattgagcaagatcatcgtcatattaaagtaagaaagacaagatatcaaagtatcaatacggcaaagaatactttaaaaggtgttgaatgtatttacggtctatataaaaagacccgcaggtctcttcagatctacggattttcgccatgccatgaaattagcatcatgctaacaagttaa

SEQ ID NO: 413167 - DNA, 219 bp, Staphylococcus aureus
atggtatttaaattaagttgtgttgtaggtatcaaggacatcaatcaaagtaataggcactacaacccttattggtggggccccaacaaagaagctgacgaaaagtcagcttacaataatgtgcaagttggcgggggtcaacaaagagaaattggaaccacaatttctacaggcaatgcaagttggggaaggacaacaaatttaagatacaaggcgtaa

SEQ ID NO: 413168 - DNA, 264 bp, Staphylococcus aureus
atgaacacttatgcttggaatgataagtttattgatagagagtacatattcacaaatacggctggtagccctatcgactcgaataaaattagccacattattaaaggggaaactatcaaagagacaactgagattaattctattaagaaacctgtaacgacgcatacattacatcattcgcatatatctacacttgctcaattagtaattaacttaaaagcaatgcaagagcatgtaggtcattcagattataaaaaaatctag

SEQ ID NO: 413169 - DNA, 1008 bp, Staphylococcus aureus
atgaaaatgagaacaattgtgaaaaacagtttagcactagcacttttaacaacaggtgcaagtatagtaacaacgcaatcggccaatgcagaagtaacgccatcatttaaatcagaacggttagcaatgttaagcatttcaccaagcgcagtcacaacgacaacgcaagcagcgaacgcagaacaaaatcgtacggctaatactgaacaggcaccaaagtctaacacagaaaaagtatcaacatcgccttcaacaaaagcagaagtaacacaatcaacaccaaaccctacaacaacacctccaacaaatacacaaccgcaatcaccacaaccgcaatcgccaagcgcaacaacaccgccttcatctaatgtcgaaacacaacaaccgcaatcgcctaccacaaaacaagcacaaaaggaaataaaccctaaatataaggatttaagaacatattatacgaaaccgagtttagaattcgaaaagcaatttggttttatgctgaaaccatggacgacagttaggtttatgaatgttataccagattggttcatttataaaatagctttagttggaaaagacgataagaaatataaagatgggccatacgataatattgatgtatttatcgttttagaggacaataaatatcaattaaaaaaatattctgtcgggggtatcacgaagacgaatagtaaaaaagttgatcacaaagcaagaatcagtattactaaagaagatgagaaaggcaaaatctcacgcgatgattcagaatacaagattactaaagaagagatttccttgaaagagcttgattttaaattgagaaagcaactcattgaacaacataatctgtacggtaatattggttcaggaacaattgttattaaaacgaaaaatggtgggaagtacacgtttgaattacacaaaaaattacaagaacatcgcatggcagatgtcatagatggcactagtatcgacagaattgaagtgaatctaacatcatcgtaa

SEQ ID NO: 413170 - DNA, 1161 bp, Staphylococcus aureus
gtggttgcacattataaaaatgaaaaattccaaaaagagtttttcatccaaaataataaaaatggctacaattatttgctcaagtatttgaatgacttagaccacccaaaactcgttttcgaatctacaggtatctattcaagaagtatgaaacgattttgttgtgtaaataaaattaactatattgaaatgaatccgttagaagccaaatttaaaacgagctctttaagatcatggaaaactgatcaggcagatgctcataagcttgcttgtttaggacctacgctcaaacaatcagacagcttacctacacatgagttaatattctttgaattaagagaacgcgcccgtttccatctagaaatcgagaatgaacaaaatcgacttaaatttcagattgtcgaattactccatcaaacattccctggtttagaaagattatttagtagtcgatattcaatcattgcactcaacatcgcagaaatctttactcatccagacatagttcatgatatcgacaaggatgtacttattacacatatattcaattatacagataagggcatgtctatggataaagctacaaaatacgcacttcaattaggtgtgattgctcgagaaagctatcctaatgtcgatagacattcctttttagtagaaaaagtacgcttgcttattcaacaattaaaacaatctatccatcgtctcaaacaattagatgatgccatgattcaattagcacaacaacttgattattttgaaaatattcattcgatacctggtattggtaagctaagcacagctatgattattggggagattggtgatattaagcgatttaaatcaaataaacaactcaatgcttttgtaggcattgatatcaaacgatatcaatcaggtaatacaagttgtagagataccattaacaagcgtggtaataaaaaagcgagaaaacttttattttgggtgattatgaatataataagagggcagcatcgttataacaatcatgtcgtcgattattactacaaactaagaaagcagcctaatgagaaacctcataagactgccatcattgcttgtataaatcgattattaaaaacgattcattatctggtaatgaaccataaattgtacgattatcaaatgtcaccacattag

SEQ ID NO: 413171 - DNA, 1455 bp, Staphylococcus aureus
gtgcttaaaattgaaagcggattgattcaaggttattatcaaaataatacgtatcattttttaggaattccatatgctgaaccacctgtaagtaatttaagatggaaggcaccgagacctccacaaaaatgggaaggcatttatctggcaaatgaatttggtcctgcgtgtccacaaataggtggtgctagcttcaacttacgtactgaaaagcaaagtgaagattgcttatacttaaatgtgtggtctacaacaattgatgaaactgctgaacaacccgttatggtatggatacatggcggtggtaatcttggtggtgcagggtctgaagatgcctttgatggagagaaattagcacaaaatggagtgacagttgttacatttaattataggttaggtgcattcggctatattgctgatccaaatatcggctgtaattttgctgttttggaccaaattgcagcattaaaatgggttgctaacaatatacgaaaatttggtggtaatcctgacaatgtaacaatatttggagaatcagctggagcacaggcagtaagatatttattatcatcggaaaatgcaaaaggtttatttcataaagcaatcattcaaagtgctggatttgaaaagtatgtgttctcagaagaacctacttatgaaaaagtagctaaacaaacaagtaaaatgtttgaagagctaggtagtcataacctagcagaacttcaaagtgtgtctactgaacgcatattagatatttcgactaagtattctggggtaagaccacctagtggagaagttcatacgcctgcaaatttagtatggaatcaggttcctgatggagagattatttcgaaatcacatttccctgcattatcgaaagatataccgatattaattggatgtgttgaaaacgaagctagatattttataaaaccaaataaaacatatcctgaagaagtattattgaatatggtagatactttggctagtagcaagaaagaactcattttgtcatattttaaacagcataattattcaaattatgaagcattagataaagtttttaccactgttatttggtttgaaccttgtttagcaacaataaagcgttttgagaagttgtgtgaacatatatattattatcactttgcaagagtttcacctaaggctaaaatgaacaatgagttggctaaacatacttctgagataaaatatatatttggaaatttaacacctgaagaagattatgacgaaattgacaaagagatttcttttaaaatgcaatatgcatggtcaacttttgcaaaatatggtgtgccgaaaaatatagatcattctaattggtgtcattacgacaaaagtaatccatactacacattgattaacaatcgcattcaaactaaaccattagagataaatcagttaacagggtatatacaagaaataagaaactaa

SEQ ID NO: 413172 - DNA, 228 bp, Staphylococcus aureus
atgagtactattaaaaaggatgtgaaaaaatttattaattttgatttatataaagaaaaaggatatgttacgccgttcttattgatgctaacagcaatttatttttccattttcactttttatatcagtcaatatagtttaaaattaaagacattatataatattgaaactgactataactataagattgttttgttattgaaagaagggaaaacgcatgaatcatga

SEQ ID NO: 413173 - DNA, 891 bp, Staphylococcus aureus
atgaataaaatttcaaagtatattgcaatagcatcattatcggtagcggttacagtttcagcgccacaaacgacaaattctacagcgtttgccaaaagttctgctgaagttcaacaaacgcaacaagcttctataccagcatcgcaaaaggtgaatcttggtaatcaaaatattatggcagtggcttggtatcaaaattcagctgaagcaaaagcattatatttacaaggttataacagtgcaaagactcagttagataaagagattaaaaagaataaaggtaaacataagttagctattgctttggatttagatgaaacagttttagataattctccatatcaaggctatgcatcaatacataataaacctttcccagaaggttggcatgaatgggtacaagctgctaaagctaaacctgtctatggcgcaaaagaattcttgaaatatgctgacaaaaaaggtgtcgatatctactatatttctgatagagataaagaaaaagatttaaaggcaacacaaaagaacttaaaacaacaaggtatccctcaagctaagaagagtcatattttactaaaaggtaaagatgataagagtaaagaatcacgcagacaaatggttcaaaaggatcataaacttgtcatgctatttggagataatttattagactttacagatccaaaagaagctacagctgaatctcgtgaagcattaattgaaaaacataaagacgatttcggtaagaaatatatcattttccctaacccaatgtatggtagttgggaagctacaatttacaacaataactataaagcaagtgacaaagcaaaagataaattacgtaaaaatgctattaagcaattcgatcctaaaacaggcgaagttaaataa

SEQ ID NO: 413174 - DNA, 519 bp, Staphylococcus aureus
ttgtctgaatctgactcactatctgagtccgagtcgctgtctgaatccgagtcgctatctgaatccgaatcgctatctgagtctgaatcgctatctgagtccgagtcactatctgagtccgaatcgctttctgaatccgagtcgctatctgaatccgaatcgttgtctgaatctgaatcgctatctgaatctgagtcactatctgagtctgaatcgctgtctgaatccgaatcgctatctgaacctgagtcgctgtctgagcctgagtcactgtctgattctgaatcgctgtctgagcctgagtcactatctgagtctgagtcactgtctgattctgaatccgggtctggacttgggtctggacttggttctggatccggtgttggctccggttctggatctggacttggctctgggtctggcgttggttccggttctggatctgggtcaactggtggtcccggtgttggatcaactggatttactgctgaatcaccatcagcacttccgcctccataa

SEQ ID NO: 413175 - DNA, 2001 bp, Staphylococcus aureus
atgaagttaagattgttatggcacataatgcgacgtcaatttatcacgcagcgacttgtaatcattccattcattttagcggtaagtgtactattcatgattgaatatacacttgtgtcaattgggttaaatagctacataaaacagaagaatgacttcctagtaccatttattatcatagctaatttttttatggcgcttttaacttttatttttattttctatgcaaatcactttatgatgtcacaaagacgaaaagagtttagcatttttatgacattgggcatgaccaagaaaagtatgcgcttaattgtagtgatggaaactatcttacaatttatgataatttcagtcgttagtattgccggcggatacttacttggtgcgatatttttcttgtttatacagaaaataatgggcagtgaagttgcgacgttaaggtattatccatttgactctgtagcgatgtttattactttgattatcattgctgtattaatgggcatgctacttatattcaacttgttcagtataaattttcaacgaccgataacttatcaacatcgttctgattccagtgtcatatcacgatggttgcgttacgttttaattgttataggaagcgcagcactatatttaggttactttattgcattacaacaagatacgacgtttggtgccttttttaaaatatggattgtcataggattagttattatcggtacttatgcactttttgtaggtataagtgaaataattattagtatattgcagcaggtatcaaaagtttactatcatccacggtatttttttgtggtagttgggatgcgtgtacgtcttaaaatgaatgcagtcagtcttgcaacaatcactttgctgtgtacatttttgattgtaacgctcacaatgacattaacaacctatcgcgatatgaatcataccattatgaaattgattaccaatgattatgatttgtcatttagcgacaattctaagtcacaaatagaacgtcaacaaacaattgagaatattaaacgtgatatacagggttcggttaatgcaaaagacttcaaagtatatgaaacgacattatttagagcttctttagaaaagaatcgtgcttattacaagttaaaacaggctagtgatgatattccaatagacttcattggtaatgaaggcgcgatattttcaagacaatcagtaatgattacagcttttactgcacaagattataatcgatatcaccaaaacaaattatacttagacaatcaaagtataggtatgattacgaatgtacctatttttaaaaagcagtctaaggtcggtcttaataatgaagtctttaaagtgaaacaacttgacgcacatgcgttaaatttgatgatgattcaagatagtatggttttaattgttaaagataaaaatcaattacaaaaagtaaaaagattttatgcacatgaacaaaagaagtcgacaatatcgataaactttaatgtatctggaaagacgaaattaacaacatcacaaatacaaaaactatcgaaaaaatacgatgcgtcaataaattctaaatcagaaatgctaatggtttgggatcgtctgacaggtggactaatatttgtaggtggcgtagtatcaattgtacttgtcattggaatatttctaatgatgtactataaacaagtttcagaagcctatgcaaatcagcacaattatgacattatgaaaaaacttggtttagataatggaagaatagcaaagataacacgaaatcaaatgactttcttgttcgcaataccaataacagtagcactgattcatacattaatttctagtaacattgtatatacgttactaaatatgataggtattaataactatcatatatttttaacaagttacgtactagctgtcattataatttcgtttctatatatggcgatgtacaaaataacttcctatatttatgctaaagttattcatcaagaacgtaattaa

SEQ ID NO: 413176 - DNA, 1323 bp, Staphylococcus aureus
atgactaaacaatttgaagtggattatggcaaactaaatagtgaaacagaagcaacgagtgctgtttcaaaattagcttatgaggttgaaaatgcaaataataataaaatatcaaatcgagaattgaaaacaaaatttgaagtattaaaaaaacggggaaaattcccttctaatcttgagtatatagatagtcacacagataaaaaacacggtgtgacagcatcagctttcctaaacaaagatactgggaaagtgattattggcatgactggtacaaatttcaaaaaggaagctcttgcgaagcaacttttgctaccagattttgcaacaacaaaacaggatagaattgactcagctgagactaaaaaggatttaatttccgatgcccaaattggaacattccccccttctgataacagtaaacattttgaagaaacacaagagttcatcaaaaaaataaaaaataagtatgatattgattttataactgggcattcattaggtggtagagaagcggtaatattaggaatgagtaatggtattccgaatattgttgtttataatccagctcctatagcagctaggtatttaaatcataactcccgattatttaaactatataaaggttataaaggtaacattactagaattgtttctgataaggattggttaactaatattataaagggatatacgaattatacttatttcggtaatgaaattgtggttcataacggcaagtcacatgatatggctggatttttaactgaacaagaacaaaaagctataaaaaaagaacttaaaaaagtacaaggttatgtagaagaaaataataagtcgttcgtaaaaaattctaataatgctatgtctaaattagctagtatagaattacttagagccaatatgatgactacaaatggtggttggttatcttcttcgcaacagaaagttttagaaagtttaacagctttaacaattgcgcagtcattcaatcaactgatagaggacgaaattaatcaaatcaaaaaaatgtataatgaaaagaaaaagaaatttgaaaaaaattgggaagacgcgcaaaaagctggaaacactgtaggtaaagatataaccgtgaatgaagtgctagaagctttagatgaaggtcatgtgaatgaaagtagtatggtaggggaacctaaacaaatgatatctgcaaaagaaaaacaactttcaacaataggttcatctatatcaaattatattacaagagttagatctagtattaatgaaatcgttgataaagatcaagcacttgcatcgcaaataggtggattactatga

SEQ ID NO: 413177 - DNA, 495 bp, Staphylococcus aureus
atgaacaaattaactaaaaagcaacgtttgtttgcagaagtatatacaatacccggtactgaatgttatggcaacgctactaagtcagctgtgcatgctggatatagcgaaaagacggcgtactcacaaggacagcgtatgttgaagaatgttgaaattcagaattatatcaaggaggttgaaacgaaactctttgatgagaatatcatgtcaggtaaagaagtgttgtataggctaactagaacagctagaggagaacactcagaagttgaagctgtcgtaacaaaaaccggagactataaagagaatccggacactggcaaaatgcaattagtatacgatgaacacatacaacttgtttctaagtcacctaaaatcagtgaccaaaacaaagctttagagatgttaggtagacaccataaattatttacagacaaacaagaagttgactacaaaataccaatgtttgtcgataatattccggaagatgattag

SEQ ID NO: 413178 - DNA, 318 bp, Staphylococcus aureus
atgaaaaatgaatttaaaaacatgagcagacaagaaattatagatgtaattaaagaaaaagtggatagtttgcgtgcaactatagaaggtgtaaaagaacaaacggactttgacataagtattaatttacaactacttatgtcaaaaggagtaattgatgataacgcatttttcgtggacgtgttggatgcaacagaaggtcatatcgttggttttggcttaaaaagtaaatcttttagcgtaatttcaaaagcaaccgccatgtatacactacttgaattggtttctaaagaggatgatgacaacaatgaagaatga

SEQ ID NO: 413179 - DNA, 774 bp, Staphylococcus aureus
atgaaaccattatttgacgaaaaaataaacgagagtttaaaaaaataccaaccaatcgaagtaatactaagacagaattgcgataaatgcgggcgtcaatatgatttatataagtttgaaagtggatacgaatacaaagatggttgtgaatgcgagattcaaaaactagcttatgaagagtataaacgaaacaaacaaaagaaacttgattacattttcaatcaatcaaacgttaatccatctttgcataatgcgactgttaacaactataagccacagaatgaaaaacaagcacacgctaaacaaacagcaatagattatgtacagggtttctctacaaaagaaccgaaatcattaatattgcaaggttcatacggaactggtaaaagccacctagcatacgctatcgcaaaagcagtcaaagctaaagggcatacagttgcttttatgcatgtaccaatgttgatggatcgtattaaagcgacatacaacaaaaatgcagaagaaactacagatgagctggtcagattgttaagtgatattgatttacttgtactagatgatataggtgtagagaacacagaacacactctaaataaactttttagcattgttgataacagagtaggtaaaaacaacatctttacaactaactttactgataaagaattaaatcaaaatatgaactggcaacgtattaactcgagaatgaaatataacacaagaaaagtaaaagtaatcggagaggattacagggagagatatgcatggtaa

SEQ ID NO: 413180 - DNA, 159 bp, Staphylococcus aureus
atggtaacaaaagaatttttaagagaaaaacttcagtgttctgaattatatgctcagaagctcatagatagcgcacagggcgatgaaaataagttgtatgacctatttacccgaaaacttgcagaacgccacagacgccctgctatcgtcgaatattga

SEQ ID NO: 413181 - DNA, 357 bp, Staphylococcus aureus
atgagtgttgtaaagattcatgggaaaccatataaatttacccattatgaaaatgaactgatagaaaagaatagactaactccaggaatagttgcgcaaagagtacgtaatggctggacaatactagaagccttaaatgcaccttatggcatgcgcttaaacgagtataaacaaatagtattagcaaaaatcatggagcgagagaaagaagagcgtgaaatggttagacgacgacaaaaacaggcagagttacgaaagaagaaaccgcatttgtttaatgttcctcagaaacatccaagaggacgttatgcgtgctacctgatggaaaacgacatattcgtgaaagttaagaagtag

SEQ ID NO: 413182 - DNA, 408 bp, Staphylococcus aureus
atgaaaatcaaagttaaaaaaataatgactctagaaaagttgattgaatgggctcgagaaaatcctgaattaacaaatgataaaagatttttttcaagaaacagttgtctctcaggttctgttgaatttcgtagtggtataaacagaactatcgtaatcaatcatataatgtttgatgatgaattcgaagttgaagttgaagaagaagtaaccaaagatacggtatttgataggctgtttgaagtattcgaggtctcagaaggagaatataatcctacatcaaataggaatactagtataaacgaaagtttaaatgacgacagatgtttccctatcaaagcattctacatcttaaacgatgacttaactttaactttaatttggaaagaaggtcatttaattgattga

SEQ ID NO: 413183 - DNA, 537 bp, Staphylococcus aureus
ttgattgagcaatggagaccaataaaaaattataaaggcatatatgaaattagtaatttaggaaacgtgaaaagcttagcaaggacaataataaaaaaagacggtaaaaaacaaactttcaaagaaagaatattaaataaaagacataatggttatggttactatcaagtaggtttaaataacaaaggtaagaggatatatttctatattcatagattagtgggcgaagcttttatagacaatcctagtaatttatctcagataaaccatatcaatggcaacaaagaagataattctgttaataatttagaatgggtttcagcaaaagacaatacaattcattcttggaaaaccggattaagtaaaggcggagaaaatcatggaatgtctaaattgacaaataatgaagttttagaaataagaaaaaagtatttatcaaaaaattactcacaaagaaaactagcaaaggaatacaatgtcagtcaaaaaacaatatataacataattaataaaaaacaatggaagctggtggagtag

SEQ ID NO: 413184 - DNA, 456 bp, Staphylococcus aureus
atgacggctaaaatattagacgcgtgttgtggtagtaagatgttttggtttgataaagaaaatcaagatgtagtgttcatggataacagaacattaaatactaaattgaatgacggaagaaacttgataataaatcctgatgttgtggccgactttagagatatgccatttgatgataatacatttcatctagttgtatttgatccgccacatttaaaaacaggtggagataaaagttggctagttcaaaagtatgggcgtttgaatgaaacttggccagaagatattaaacaaggttttaacgaatgtatgagagttttaaaaccaaacggaacactaatatttaaatggaatgaagaacaaataaagcttagccaaattttaaaatgttttaatcaattgcccttatttggaaataaaagagctaaaacacattggctagtttttatgaaatag

SEQ ID NO: 413185 - DNA, 906 bp, Staphylococcus aureus
atgaaaaaaatccctgataatagtatagatttaatattatgcgatccaccgtatggaacgataaaaggaatagggatatatgaaaaagaacatactgattgggataatgaattggacatatacaaactttttgaagagtataaaagagttttaaggtatagaggaagattgattttatttagtcaggaaccatttacatctaagcttagaacttttaaagcaggatgtgaaattaaatttaattatccattaatatggcaaaaaaaccattttgctaattggttaggcgcaaataaggcacccgttaagtattttgaagatataaatgtttttactaaagaatatagtaaaacaaactttaaagaggcgagacagtattttagagaaattaaatctgtgtttggattgacaacaactaaagtagcgagagcgattaattcgtttaaagctcaaggttgcttaagcacagagtcaacatcatttagattatgttctaaggaaacttatcaagagataattgataaattccacattaatcaatataaaaattttgtaaattacgaaaagttgattaacttatcgaaagaaaaagaaaaagtttttaatttaccagatggtaaaaagcatgtcggtgatattctctcatataaaaaagataacgatcattaccatccgacgcaaaaaccagtgaaactattagagtttttaattaacgtttatagcaataaaggcgatatagttttagataattgtataggtagtggttcaacggcaatagcttgtataaacacaaatagaaaatatatagggtttgaaaacaatacaaaattttacgatgtttgtttgaatagaattcaaaatcacattagtagttctaaggaggagcaagaagatgaaaaaatttaa

SEQ ID NO: 413186 - DNA, 294 bp, Staphylococcus aureus
atgaagtcaatagcaaccttagaagcggaacagtatttatatgattcactgatcatagacaaaatgggaatgtgtggatgtcatgaggtagtcattgggcgtaagcctctaacacatgggcgtgaaatcgtggacttttcaacctatgatactagaaacatttttagagcatatgaaattaaagtatcaaaagcagatttaaagagttcagctaaattgtcttttgtaggtcattataattacttagtggtatgtcaacatttttttagacagttttcatgtgtagatttttaa

SEQ ID NO: 413187 - DNA, 177 bp, Staphylococcus aureus
ttggttcaaaatgacatttgtcacttttacggtttacataatacaattatagttattaattacagaaataaaaaaagcctcattaaaatgagatttgaaattattctttataaaattggcgaaactaatttagctaacgattctttaaactttacagacaatggtctattagcataa

SEQ ID NO: 413188 - DNA, 384 bp, Staphylococcus aureus
ttgattcaaatatctaatattaataaattatttaagaaaaagcgtgttttaaaaaacatttcgttcgatattgaacaaggtaaatgtatcgctttaattggaaaaaatggtgcgggaaagccaacgttaattgatatattaattggtaatgttaatgctaattctggtgagatatttgataaagacaagttattacaaagtgaaaatcgcagtataatgttccaaaaaacgatgtttccagatcaattaaaagttattgagattatcaacttatatcaatcattttatgaaaatccattaccattggaagaaataatagaactgacgaaatttgattctagtcaactgaaccaatttgtaaataaactttctggtggtcaataa

SEQ ID NO: 413189 - DNA, 162 bp, Staphylococcus aureus
atgaaatatgatggaatacagcaagacgaatatttattaaattcgaatatgcttggcgccaaaacttctaatgaattaaagcggcttagaaaagttgcttttttaattgctgaatctttcgttgaagaggaaggatataaattctatttccgtatcgtttaa

SEQ ID NO: 413190 - DNA, 1164 bp, Staphylococcus aureus
atgaaattagaagagttgctactaatcacacaaaaaccattaatcaattattcaaaaaataaaaaattcttagaaggatcacgtttatttgattttgatgaaaggatgaatgaaagaaaaattccgaaaattttaaataatagtgataagtaccatcttgttgaaatagctaattatgataatttaataattattgataatgatgttataaatggtaatgaattaattaaagtgtgtcaatgtattgactttgatagtaacataatgagctatttacgaaatttgattgtgaatggtgagtatgaaagtgatttcttcaaaattttaactaatataaaaaaaagtaaacaacaaataagctgcgtaccttacttaatagaaaatggaaataatattcatagtataaataaaattgtttcatatgaaactattttatcattttcaatatttgataggataagtcaatttgattttgaaaatcgtaatttctcaagatattttaatgattcagaagtaattttagatacagatgatagatactatcatatgttgaatatacaagattcaaatattctacaattccaatcaatttatcttttagttttaatggcattttacataaaaaatagtagtaaaaaatcagcagaaaataaaattttttacttgattcaaaattttattaaagaaactgaaaataaattagcatactcagagttagagttaagtgttatttttgactacataaataatgatgaaaataatatatttaaatctaccaatttgaatagtaaaaatttattgagtaaattaaaaggtattgcttgggatttatttcatattagaacgtcagaagaccaaatcgctctaagaaatactaatagtaaagaagtttttttacattcaatttttacagcagataagggcttgagtaatgtgataaataactattcaataagtaggatgctagcgcatgaagaaaaattatatgtatatagagaaaataatatatttaaaaaattatcaaaagataaagcttctaaaatacaagaattgttagaaaaagatagagatattagaatttctaatgtaagagaagcaaaatataatattcaaggaaatattgagatgtatgaaaaattaattaatgaaattatttcaaaataa

SEQ ID NO: 413191 - DNA, 1791 bp, Staphylococcus aureus
atggacaaatttaaagaaaaagtaaatgaactggaattaattgagactactaaatattattcagaatttatagaaggctttaaaaaaattcgagattgggctaaaaatgaaaaccttaaaaatgaagaggaattggcacaatatgagattgatattttctctttatgtgagaaaactcccattttatcaaaaaatagaaataaaccaagatttatggcaacatttaatgatgttaatggtactgagtggccagatataaaaaaatttagggatgaacagcttaaatattatgagaaaaggttatatgagacaaataatatatttttaaaagtaagatactctgatttcttatttgagtatggtgataagaaaatagctaaaaataaatatgagatttcacagtctttactaactagcctagtttatatttgtgaacattatagtgaaactagtaactatgactcaatgatatctagattggttgaagtatctcttctaatgggaaataagaaagaactcaaaaaagctgtcgaattaatttatctgaaaattaatgaatttgatgataataatgaatatagaagggtatatgaactttcgcaacttacaagagaaattttaaaatctgaacacaaaaaaataattatagaagaatattcaaataaaattataattgtgttagaaaaagttattaaaaactattttgaagataaagattatcaatcccatataatgttttgtgaagaacttattcaatacagaaaattcagtttaatctcttctgaaagaataaatgaattggaaaaagaaattggaaaaagctacgagttagaggcagaatatcaacaaggaagaaaagataagagtttattggtaaaagcacattttttagaaaaagctatgaaacattatagcgaaattggagaaagagaaaaaattaatgagatgaaaattttagtaaaaaaaacctacgaagaatacgaaaaaagtaatgaaatgagtcttataaaaagtacaatagaattttcaaaagaggaaattgataaagtaattgatagttttatttcttcagatgtacagatgtcgttagataaaatagcatacagtaatcacttaattcctaaaatcacaataattgaagatcaggttgataagttaagtaaagagtttcctttacaagattttatttcgaaaagtttattgagtgatggaaaaaaaatagtggaaaatactacagaagaagataataaaacaattaattttaatagttactacatgaatcatttaaatattaatgttgaattatttcttaaagctatttttgataaattaatattagaatttgaaatttctactgaagatttcatgcaaaaatttaataggtgggaactactagataataaaaatattccttttatagaacatggaatatctcgatttttagaaaaggattatttgagtgctttgcatattttagtccctcaatatgaatctacagttagaagaatgttttctaaagcagactattcaactacatctattaggaaaggaaatacgcaacaagaagtaacattcaatgaatttttactcagagatgatgtaaaatctgcctttggcaatgatgtacataaactaattcaaattgtaatggttgaacagtcagggctgaatttacgcaatgaaatagctcatgggttaatagaattttcgaaaataaattatacaaaatgtattttaattgtttatttatttttggtattaactagatataatattgaaaaaaatgactaa

SEQ ID NO: 413192 - DNA, 492 bp, Staphylococcus aureus
atgaataaagtaagaatggtaacatatgagcctatgatttttaaaaaaagaaaaggaaataaaattgtaaaaaacaatgtggatatactaccgtatttggatgcctcttttcgaacagagccatcattaaacgtagagtatcaaggaatatcatcattatgtagaggagaaaagttagctccgaaattaaaaaagggtgataaagtagtatatatcgctaaaaaaaataagtatgatcaggattttaagcattggcgacttgttgcaattttggaggtgattgaaattaagagttgtcattacgctgcaagcaaatggtatgaagaaaataattatacattacctaaaaattgtattgtagatggtaatcctccgctgactcttgataaaactactgttaaggatcaaagtactattgacgaaagagaaagaggttataattgtagagcaaaaaagtatcctcaatttaatatttgtaaaaaatatatttaa

SEQ ID NO: 413193 - DNA, 618 bp, Staphylococcus aureus
atggagaaaatccgtagatctgaagagacctacggttatcgtaagattacagcattgattaatcaatgttatacatcaccaattaatcataagagagtacagagaatgatgcagaagcatcatttgaactgccgagttagacctaaaaagacgacaagaataggtaaaacgtattataaaacggacaatttattacaaagacaatttaaagcgagttgtccaatggaagtattaacaaccgatattacttatttaccatttggtcattctatgttgtatttatcttcgataatggatatttataacggagaaattgtggcgtataaaatagatgataaacaagaccaaagtttagttaatgatacattaaatcaaatcgatatacctgagggctgtatattacatagtgatcaaggcaacgtttatacatcttatgcttattatcaattgtgcgaagaaaaaggcattatcagaagtatgtcccgaaagggaacacctgccgataacgccccgatagaaagtttccattcctccctaaagtctgaaactttttacatcaataatgagcttaatcgctctaatcatatttgtaatagatattgtcgaaaagaatattaa

SEQ ID NO: 413194 - DNA, 636 bp, Staphylococcus aureus
atgcttaaaattgaaagattaactaaatacattgatgggaaacttatcttcaaagatatatcatgtgcaattaatgaccaacatttacttataagtggtgaaagtggctgcggtaagtctacgttagccaagattatcgccggattagatatgaattatcaaggtaacttatactttaatggccaattacgtaagtcatatacggcaaaagaatggatgaaacacatccaatatgtgccccagtatcaacgtgacacattaaataagcgtaaaaccgtattatctacgttattagaaccacttaagaattacaaatttgataagcagagttacacatcaagaatagaagcggtacttagacaatgcaagttaccacaaagcatacttaatcaaagcatttcgacgctaagtggtggacaatttcaacgtgtatggatagcaaaggcactaattctagagccggagatattgatattagatgaagcaacgacaaacttagatgtgattaacgaggaagaaatacttcaaatgttaattacgttaaagcaaacgcaattaatcattatttcacatgatgcgtacgtcttgagtcgctttaaaggcgttcagttacaactcaaacaattgaataattag

SEQ ID NO: 413195 - DNA, 768 bp, Staphylococcus aureus
atgtcaaatgatcaacaaaaaaataacgcaatgaatactgtagttaaagtcaatcaattatccatcttagatcataatcagtcattgttaaacgatgtgaatttgacaataactaaaggtgcatttcattgcattataggtgagagtggtagtgggaagtcattattgacgagaactattcttggaatgaagccttcacaactaagctatcaaggagatatcaagattgatttaaataaggtggatgccgtttttcaagatgttcaaagtaatatgtttcaaaacgtgaacttggctaaacatttccaatatatttatgaagctaaccattcacaactatctaaacaagatatcaaggaagacgtcttagataaaatgcaattactcggtttaaatcaaggtgaacaattacttaaacgatatccctttgaacttagtggaggtatggcacaacgtatagcctttataatgtcattaattagacgcccggactacttatttttagatgaaccgacgagtgcgctagatcaagagaatgttaaaaagtttatgcactatttgattaaggcacaggaacattatcaaatgacaattgtctttattacacatgatattaacttagttaaggattatgccactcatattagtattatgcagcaaggtcaattgattgagagtggtgaggcatcatccattttagctaaccccatacatagctatacgaaaaatttaattgctatcgcacatcggagacaggcctatgcttaa

SEQ ID NO: 413196 - DNA, 768 bp, Staphylococcus aureus
atgaaaaaatatcaaacttacatcgccataagtgcaatattaagtgtgatgtttgtgctaattgtatattgctttatgcaagacacacaaaacttggacccacttcaatcacctaatagccaacattggttaggcacggatcaattaggcagagatttcttagtcagactgattgtaggtagcctagtcacattaagcttaactagcgtggtaattctgttaagtgtttgtattggactggtctttgggttaattgcaggtatagaaagaaaatggttagaccaaatcatcatgtttattgctgatatgctattggcaattccttcgtttattattgcattagtcatcttaagcttagtaagtaattcaatgctaggtttgatacttgctttaacgattggatggataggccgttatttacgttatttcagaaatttaacacgagatattcaaaaacgtccctttgtcagttatgcaagactaagtggtaactcaacgtttaaaacgacagtgacgcacatgattccgcatttactaagtaatatatttgctttggtcacggctgactttggcaaaatgatgctaagtatatctggacttgcttttttaggcctaggtattaaaccaccgacgcccgagttaggaaccattctctttgacgggaaaagttatttcaatggagcaccttggctcttcttcttccctggtgtattgttaggaggtttcgccttattatgtcaaatgatcaacaaaaaaataacgcaatga

SEQ ID NO: 413197 - DNA, 957 bp, Staphylococcus aureus
atgcttaaacgaacaataaaattaatactttacttaatcgtgagttcgtttattatattcgttttagtcgagaagacatcaggtaatccagcgatactatacttacaacgtcatggttatacgtcgattacccaggaaaatattgaagcagcacaacataaacttggtttgggccagcattttttattaagatatatcgattgggttggacatgcacttactggtaacttgggatacagttttagtacaaatgagccagtaacaactatgattatggaggccgtcattccaacattaatattaatcgttgtttcaagttgtatcatgttgccattgggttatatggttggttattttattgggacgcgcccacatactcgatacgcgaatggtattcgtggattcgctcaagtgatgacttctatgccggaatattggttagccattttgtttatatattatttaggagtacgttggcagttgctaccttttgtaggtagcgattcctggcaacatttcgtgctacccatcttcaccattgttgttatagaaggatgtcatatcttattgatgacatcgcaccttattgcgccaacgttagataacgatgcgtatcaacttgctcagttaagacattactcattaaaggcacgtatcattgtccagattaaagagatatttgcaccactcatgaccatttcaattaacagtgtgattcatttaattggaaaagtagtcatacttgaagtaatcttcagcatgtctggtatagggaaattattaattaatgctatcaatcaacgagattatccacttattcaaggcattgtggtctttatcatcgtcttaattatgttcattaattatttaggcgacattattattttaaacaatgaacctagacttcgacgacgacataccaaacgccaagcccatgagaaaagaggtgtgtcgtga

SEQ ID NO: 413198 - DNA, 1554 bp, Staphylococcus aureus
atgaaaaagcgtgtattaattacaatggcagcaagcgcaacgttcttattagcaggttgtgggaatgaccaaaaagaagataaaaatatcacagtatcgctacctactgaagcgaaagcagataaacttgacgcacaaggttatgacgccgcaatgccagtctatagtgcagtatatgattcattagttaaatatgataaagataaaggtgtgaaagctggtttagcagaaaaatggcatgttgacgactcaggaaaagtctatgatttccatttgaaaaagaacgttaaattctcagatggctcagctttagatgctaaagcagtgaaattctcgattgagcgtgcgaaagcgatgaacaaagatacgactgtagaaacgttaaaaaaattggataaggttgttgttaaaaataatcatgttgtccaaattagattgaagtcaccatcaaatcaagttttgaatgaattaacacaggtgagaccgttgcgtattatgagtccacattccgttgaaaatggtaaagtaaatggcaaatttgaaaaagcgattggaacaggtgcctttgtcgttaataaaactggcaaagaaaaaacgacaatgaagccaaataaatatttcaaccatagccatcccgtaaactacaatcttgcgttccaaacgattgaagatggagattcaagaaactcagcagtacaaagtggttctgtagatatttctggtggtgctttaggaatgctgtcagatcaacaaattaagcaagacaagaaaaataaaaaattaactgttgaagataaaccaagtacagtaagtcatttcatggcatttaacccagataaagatgtattaaaacagcgtacaatccgtgaagccattagtaagagcatcgatacaaaagatattgcgggtaaatctgtaaatggtttattccagaagaacgtagaatttgtaaataaagataatcaacaggcacatgactatgatgtaaaagatgctgagaagttacttaaagaagcaggttatcacaaaaacagtgacggtatttttgaaaaagacggtaaatcattaacatttaatttggttattcaaacggcagagttcccaagttggaaagataaagcggaaaaagtgcaacgtcaacttaaaaaagctggcattaagttaaatgtgaaaacgttagattcacaatcatactatgatacgttatggacgaaaaaagattatgacctcatcttctatagaacgtattcagatgccttaatgccatataatttcatgagttcagtatttaaaaataatgatggcaagtcaggtgtattagctaatgataaaacattgactcagcaactagatgacttcccaacaactgtatctaaaaaagaacaacagcgttcatttgatgaaatattcaaacactttaatcaacaatattatggtgtgcctattgcttatccaaatgaaacctttgtcgttagtgataaagtgaagcaatttaaattctctggacttactgatgctcctattgattataaagcgttgaaagttaatgagtaa

SEQ ID NO: 413199 - DNA, 693 bp, Staphylococcus aureus
atgactaagagttatgatgtttggtggcaaaaaggccaagaatcagatgatgatatggcgtgtgaccatcaagaagcttgggagagaactatagaaatgcttgatacatcggatatcaaagggaagacaatcttagatgtgggatgtaatcaaggcggatttttaagaaaattatatgacacaacgccatttaaagaaggtgtcggcatagatttagcacgtttatctttagaaaaggcagaaactttaaaaggtgaacgaccacttacatattatttaacggataaaccacaagagacaaatagaacatttgatactgctgtaagtacatctgttttgtacttaatcgaagacattccacaacatgcacaagatttaaaagaagtgttgaaaccgggaggcgtttactatgcttcattcgccgatttaaccaataatcctagtcgtcaatttatggatgatacgattaatcaatacggcgcaacaccttctcagaaccattctttaaaacatatcgttgatagctttgttgatgcagggtttgaagttgcagtaatgaaagaacctgtgcctgtcgtgattgatttaacacattatagtgatttttatctatcaccaaatgattatctacaaacactttatgaggaatcatttttaattaaagcaagcgtgaaagaaggtatcgggaaatga

SEQ ID NO: 413200 - DNA, 426 bp, Staphylococcus aureus
ttgatatattggaatttatataaaatttttaaatataaaataagtcatatattactcgcttgtatcttcactaatgtcggattaactaaaattattatgtattcaacgccagtattaatgtttatctatccgttagcgattacactgattttattaacgcttgtcagtccattaattaatcattcgacaattgtacataaatttacaacgttctttacaatgtttgcagcgttctttgatggtttaaacgcatgcccagaattctttgcaaagacatcatttgcacaagcgttaataattttcgctgaacgttatttaccgttcttcacaattggaatgggttggattgttccggcaatcataggatttgtagtaggacttatcgtttatttaattcgttctcgtagacaaactcaaacacaataa

SEQ ID NO: 413201 - DNA, 216 bp, Staphylococcus aureus
atgtctttatatatcattgagaatcaaagcaatgtgatagcgaatagacatcaatatacgatgtatttgaatggtgaagaagtaggcacacttgagatgaaacagttcttcaaaagagggggaaagcaacaaattccttatatgtttaattacaaatttgaagtgtttgatgtaagcaatccgttttttagtaatgaaacgaaaatcacattttag

SEQ ID NO: 413202 - DNA, 447 bp, Staphylococcus aureus
atggtagtaaatttgcaaaaggcggaactaggtaaaggtgttacaggtgtaggatttggtataggtatgtatgatgacatggcaaacgatgataaaacagttggagaggcattgtcacataatggtatgacgcttgcagctggaataggtggaacagctatgttaacaggcttaacaacaatctttttaggtagtaatccaattggatgggctattttaggcgggcttgttgtaggttctatttcggcaagggttgcagacctgatgtatcaaaacaatttctttggtacgaaagacaaagtagatgcgataggtcataaaatagacgatggcatagacgttgtgaaagaatccgcagaagttaccatagatagtgtagaaaatacagtgggtgaagctacaaaaagtatcggtaaacatattaatccaatgaaatggatgtggtaa

SEQ ID NO: 413203 - DNA, 837 bp, Staphylococcus aureus
atggaaagtttggaattgagaatttttaaagaagtagctactgtcaaatcgataactaaagcagctcaaaatttaggatatgttcaatctaatgtcactcataggattagaaaactagagactgagattaattgtgaacttttcgtaagaagtcgtacaggagttattctaactgaagaaggtaaacgacttttaaattatgctaatagaataacagaattgttagatagtgctatgggtacaataaaaagaccaaaaaaacatttcaaagttggaacttctgaaacaattgcttcaaaaaaattaccaaaattactaaataaggtattgatagatgaaaaagatattgatatatcaataaaaatatatgagcctaaaatgttgatagatctccttttaaataagaaaattgatttggccttcataaattcaaaggcaattacaactgaaatgctacaaactcactttacattttctgaaaattatgtattaatttctaaaagcaattataaatattacgacaatccaaaattaattgtttcaagctctattgaatgtccatatagaaatattttattctcttggtactatgacaaatataataaagatcctgactttattgagtttgacagtctgcaaggcattttggaatcggtttcattaggtatgggaataagtattgttcctaattcaatactccctttaaataatgaatttaaaatactaaaaataagtgatgaaaatactatcaatataagtttagtaactaataaagatgaactcgacactccattaaatcattttatacgtaaattaataataaataataagtgttaa

SEQ ID NO: 413204 - DNA, 1167 bp, Staphylococcus aureus
atggggaataataaaagaaaaataacgtttttggatacaactttaagagatggagaacaagcacctgggaattcaatgaattatacgaaaaagctggagttagcattgttgctcgaggaatcaggtatagaaactattgaaacaggatttccggcttcttccagagatgattttattgcaacaaaaatgattagcgaatcactaaagtcatctaattttgctacattttcgagaacaaaaatcgaagatatcgaattatctattcaagcaggaggaacttcgaatagacatattcttatgttggtagcgacaggtagtgatttgcatttagaaaaaaaacgaaaaattactagggaaaagggagtggaagaagttaaaagagctgtatcatttgccaaatctagaggtataaaaaatatcgcagttggaatagaagatgcaagtaggtctagtagagaatatattaatattttaataaaaacatctattgaatttggtgctaatcagataattttagcagatactacggggtattctactccaaatgaaatgtataatttagtggaatttgctaaaggctgcattaatgaaagtgtaaaattatctgttcattgtcataatgatttgggacttgctgttataaattcatattttgcagtactagctggagctgatgaaattcaagggactattgggggtataggggaaagagcaggaaatacttcattagaacaaattataggtcttattagttataaaggatatcatgacaatctttattgtgaaatcaaaaaagaaaaattatataaaatatatttaaaactaactcaatttataaatttagaagaaaataaaaatttacctttatttggtaaaaatgtatttagcacagcagctggaattcatcaacaaggaattttaaatgatccgaacacttatgaatttgtaaagccaaatgattggggtagaaatcgaagtttttatatagataagcattcaggaagatcaatgataaaacaagtattaaataaaattgatcgaaataaattaaacgaaaaagaaataaacaatttatataagaaatatattgaaaatctaagtaaaagcattacctacgaagaattagagtatcaaattaaaattgaattaggggagagaataaattaa

SEQ ID NO: 413205 - DNA, 330 bp, Staphylococcus aureus
atgactaaagctctattagttatggatataattaatgatattgcacatgaaagtgggaaggtaggaaaagatggattttatattgaagcaaaaaaacgaaaaattatcgataatacaaaaaaagtcataaatcatgcaagagagttaaaattcaaaatcatctacgtagttattggatttagtgaaaactatgaagaatggaatgaaaaatcattactttttaaaaaagttaaaagtgataggcaagttatgtttaatacttggggtacgcaagtttgtgatgatattgcaccacaaaagggagacttagtgataaaaaaaatagaatag

SEQ ID NO: 413206 - DNA, 189 bp, Staphylococcus aureus
ttggtcattttgagtacagtattgagtgctcatgatagagattttaaagtacatactattgaagattgtacgtctgctaatagcaagcaaagtcatgataatgcaataaatatcattagtaatttatctgacatagtaaatgtaaatgaatttttaaaaaaggagttgcgttatgaaggagatttataa

SEQ ID NO: 413207 - DNA, 1011 bp, Staphylococcus aureus
atgaaggagatttataagtttacaaatgaagaaagatatgaaattgaaaaagtattggaaaatgcttcgaaaatatcaccatatattaatgaaaagctatttaacgaaaaaatacaaaatattattgacgaagagttacttccaaagttctttttaactgtatgtgaaaaaattaaaaaagaaagaaatctcaacaaaagaatgcatgtactcaaaaattgtcctattgattacaacattcctgatttaaatcttgatgatcctattaatgataaatataagaaaaaaacatcatttttaagtgaatccttcttagcagtttttaataaaatgttgggaactcctctattttcatatgcatcacgaaataatggtgatttttttaccgatgtaatagcaataaaaaaattcaagggtaaaaaaactgggtttaccgatggagacttaatttatcataatgatcgtacaagtcatcctataagagcggattatataaccctcttaggtattaaatgtcctgaagaggatttagtgtatacaaatgttatttatgcgtccgaaataatgagatatctatctgatgaagatttaaaagtattaagccaaaaacaattttatacagaagttgatgacttaacaaagaatagtgtgaaaaattggaatgtatctaaaaatcacgaagtgatctttgatgggaaaatacgatttcaagaaactttgacaaaaccagtcgatataaataataaggatgcatataaggcactcttgaatttacgtgacgctatgacaaaatcagtaaagcacagacatagattagaaaaaagagatttacttacacttccaaatcagtacgcattgcataatagggaatgtattgaagtcaaaaatcctaatgtgacatcagaaagatggttattaaaaacgtatagttttgaatcacaaagtgtggccaaagaatatagtgagttttggactaatggagttccagggagagttaatgatggactataa

SEQ ID NO: 413208 - DNA, 393 bp, Staphylococcus aureus
atgatggactataatataagattgaaaattttaaagtcaggttcagaaaagttagaagaggaagttatatcttttaacgacttttatgatgaacagagacaaatgtctcaagttcattggttatatagagatacagattctcgctctgcttctgcagcaattgtacattataaaaaaggagggtattcaccagaacattttcatactggatttgagctgatttatatgttagagggagaaatggaaactagtcaaggtaaagtcagaagtggagaaataatatactttgatccggaaactagtcatagtttttatacgaatacaggatgtattgcattaattacttggggggcaacggtagttccctcaaaagaaaggacagatttaaattaa

SEQ ID NO: 413209 - DNA, 147 bp, Staphylococcus aureus
atgacattttcaataggttatgctggtgtagctgtttcaggagttttatttagagaaaagtataattttgaattaacgcaaataggattacttttagggtgtatggcattaggtattgcattttctgagcttatctgggggggttaa

SEQ ID NO: 413210 - DNA, 921 bp, Staphylococcus aureus
atgacgattgaattttggaaatttaattatatttttctatgtattctattgataatagcaggtatctttggaggtagtgttaactcaagctcaggtagagctgtgatgtcttggtttaatgataaaagaagagggttagcaatgagtataagacaaactgcaattcctataggagcatcaattggagcttttgcatttcctaactttacagaaatgtacggttttgaattatcttttttaattctttcatttttatgtggtttagatactttaagcgtgattatttggattaaaaaaaaggaagacaatactgatgaaaatataaaaaataattccaatattttaaataaatcaccgtataaacgatgggatgtatggaaaattgcaataataggaggtattttaacatttcctcagatggcaattttaacattcggatcggtatacttagataatattttctcaatggaaactctgcatatatctttattgattggcttaatacaattagtgggagggagtagtagaatacttatgggagcaataagcgataaatataagaatagaaatcaattgttattttacacttcgctcactttaggcatcttcagtattggattaggtatatttacacaaaatgttttctttgcaatacttttattaactttacttggtattatagctaatgcttggacagggattgcttatactgaaattgctgaagtagcaggtataaattatgcagggagggcgttaggaatgattggaacaacagtttttatttcatcatttctaattccgtatataattccatttttaatcaaatatatagattggcaaggattatggttagtaatagggattttatcattaacagtattaattttaattccacgtaaaggaagtatgtattttgggtaa

SEQ ID NO: 413211 - DNA, 1386 bp, Staphylococcus aureus
ttgggtaaaactttgtatgaaaaaatcagagaatatcattgtattaaagaatactatgaagatgaagaggatttaatatttattgacatgcatttgttacatgaaattaatacacctcaatcatttaatgaattgaggaggaaaggaagagtcgtaaggcgtccagagttaaccgtagctacagttgatcataatacacccacaaaggctctaaaatcgttaaaaaacgatgttaagagaaataaacaaataacggccttaagaaaaaattgtaaagattttaacattgaatttaaagatttagggaaccgagatcaaggtattattcatgttatagcacctgagcaaggattagtaattccagggtcaacaatagtttgttgtgattctcataccactactcacggagcgtttggaacgcttgctataggtattggttctagtcaggtagaacatgtattaactacccagacattaaggattcctaaatttaaaacaatgaaaatagaagtatcaaaccgattatctaaatatgttagcgcgaaagatctagcattatatattgttaataaaataggcacaagtggggcttttgaatatgtaattgaatacacaggagaagctataaataatttaacaatggaagaaagaatgactctttgtaatatggcagttgaagcaggtgcaatagcatctttaataagtgttgatgaaacaactatatcatatttaaaaaaagtacatagttatttatcaaatagtgagttacaaaagaaagttgttgagtggaaaagatggataagtgatgatgatgcccaatttgattctattttatcaataaatgcattgaatgttaaagaaaccgttacatgggggattaatccatcacaaagtatatctttttttgaaaaaattcctgaacctaatatggatagagaaattgaaaaaagtttggattatatgagattatcccctggacaaaaactaacagatattaaaattgatgtagtttttatagggtcttgtaccaatggtcgaattgaagatttaagaattgtagctcaaatattaaaaaacaaaaaagttcactcttcagtaaaaatgattattgttgctggatcaatgaaagtaaggcaaatggcaattgaagaaaaattagatgaaatttttttagaagcaggagcagatttcagagagctttcaggttgttcgatgtgtgttggactaagtgaagatactttaagctctggccaaagatgtatagctactagtaatagaaattttgaaggaagacaaggggcaggtgttttaacacatattgcatccccagcagtagcgacagcaagtgcaattaaaggatgtatttattcaccattagatttataa

SEQ ID NO: 413212 - DNA, 522 bp, Staphylococcus aureus
atgtatttattcaccattagatttataagggaggtctttaaaattataattattggaaaaggtattcctttagtaaaagataacattgatacagatcaaataattcctgctgaatattgtctttctactaaaagagagagctttgcatcagcgctttttggtagatggaggaaagatgaaaattttgttttaaatgatccagcatatagtaattcaacaatacttgtagctggaaggtcatttgctactggttcatccagagagtatgcggtatgggctattaaggattatggattcaaagtagttattgctgaaaattttggcgaaatattttataaaaatgctattataaataaagttttaccaataaaaatgaaatatacagatatcgaaaatatatggtctcttttaaaagtggataatgatgctgaaataaaaattgatttagagaaagaaaaagtttttttaatgagagggaatttaaaatacaattatcagctatatctaaaaaaagatatttaa

SEQ ID NO: 413213 - DNA, 453 bp, Staphylococcus aureus
gtgattatactgaataaaagaatatctattattgggagtggtcctaggggattatcagttctagaaaggcttgtttgtaggtgtaatgataaggttataacagatcaaatagaaattaacttaatagatgatagttttgttggagcggggagagtatggtcccccatacaatctaaacatttattgatgaacacatatgcaaaagaaatcactgccttttcaggaactattaaaaataatcagaaagaaagagcggggagcggtctcactttttatcagtggtggataaaaaattataatgactttgactattatgaaggctatgcaccaagaaaatattatggtgaatatttattatatgtattaagtacaatcgaaaaaagtctccctgaaaatataattttaaataaaattaacgatgaagtcactgatattaaaattgaaaaaaagtaa

SEQ ID NO: 413214 - DNA, 939 bp, Staphylococcus aureus
atgaagtcactgatattaaaattgaaaaaaagtaaagtaattaaattacgtaaagggaaagagattatttgtgacaaaatagttattgcaacaggacattctgataatcgcttgatgggaaaattgaaagaaattcaaaaaaagagtattgaaagagataagataaattttattcaatatccttgtataagagaaaatgatagattaactcttattagaaaaagtgaaaaggttggaatattagggttaggcttatcattttacgatgtaatggccgaattaactatcggaagaggaggcaattttaaagaaaatgaggatggcactttaatttatataaagtctggaaacgagcctaaaatatttgcctctagtagaagtggatttcctgttcctgcaagaggaaaaaatcaaaaaaattcaaattataattatgtaccagcaattttcacgcaaaaacgagctgaaacattaaagagaagaggaagtatatattttgataaagaagtattgccacttattgaagcggaactatctttagtctatgctcaaactttatttgcaaataataatgaaatgcaaaagtcatctgaacttagaaagctagttatagatcacaatgttaccacggcacaaggagtgcaaactttttgcgatattttaggactaaatgaattaattaggataaatttatatgattggaaatatccttttcaaaattgtaaatttaagaatattgatcaatttcagaaatatcttttaaaattgatatcaaaagatattaatgatgcattacaagggaatatgaattcgcctaaaaaaacagctttagatgttttgagaaacattagaaatattatcagaataattgctgattacgggcgtattcattgtgactcgtataattctgaatttttaaaaaattcgactctgctatga

SEQ ID NO: 413215 - DNA, 522 bp, Staphylococcus aureus
atgaagtttttatctgcaggccccccactgaaaaggttattgcaattacaagctctaattaaagcagatgttgtgaaaatcattggtccaaatttagactattactttgacgacaatgaaaataaggtgtgcatgtattcaaagaatgttagcgattcatttgttaatgtgacaacgtttatagacgcaaggattccaagtccgagcttacaaaatgacaattctattcttatacaaaatatgctgaaacgtaatattataagtccatttgtaaattataatggtaatcaaccatttgaaacacctggtattaatattactgaatctccatttcatccaataaacaatacgggagatgtattatatgatttctatataataggaatccccactgaatttacaaggtggtttatgcaatctggaagtacaaaaccgaataaatggatagatttcatgatagatgcagatgaaattgctaaagatattttaggtttgatttctattaaaaaggagatgttttga

SEQ ID NO: 413216 - DNA, 1128 bp, Staphylococcus aureus
atgaatttaaataaagtaaatttaagtataggtatatatacaaatgaacagggtatctcaccaatattaaaatctgtaaaattatgtgaaaatcatatattaaacgaggaaagcacaaaagcgtcatatgatatgttgggagatgtgaaatatagagattctataaaaaaaataatttttcaagaaaaaaatattgaaaagttattcccaaatttaattactatacaaacattaggcgcttgtggtgcattatatttggttgctaatactttacgttatataaatactactaataatatatggattagcaatccatcatgggaaaattatgagtctatttttgaagattatattggaatttttaagtatacttataaatcttttgacacaaatgttattgatatagatctaattataaaggatttatgcaatgttaaaaaaggagactatgtattactacaggtatgctgtcataacccaactggaattgatttgaccatagatcaatgggaaaaattggcaatttttttacgacataaaggtgtaagtgttatattagatttttcttatcaaggattagcagatagtttgaaaagtgatgcattaccaatcgcgatattatccgaatacttagataatataattattgctcaatctttttcgaaaaatatggggttatatagcgaacgagtaggaagtttatcattgttaatgaaggatcatgatcttcaaaaaaaatggttaaatactattagaaaaataattcgtaaaacatatacagtgccaccaatacatggtaaaaacattgcaactagaattttaaatgatgaatctttattaagaacttggcgcgaagagttagacgatatgaagaaaagcctgaatgaaaaaagagaattgttgttcagcaaaatgaatgattatgaaatcccaaaagatataatcgggttttataaccaaaaaggaatgtttgtcgttttgaacattacacgagagcaaataaaaaaattaagaacaaaatatagtatatatattttagataatggtagagtttctatatctactattactggaaataatatagattatatatgcaatggaataaaaaatgtattaaaaaataggtag

SEQ ID NO: 413217 - DNA, 1002 bp, Staphylococcus aureus
atggttaaaaaaatagcaattaatggatttggtcgtattggtcgcttggcttttagaagtattttagaaatggagaatatggaagttgtagcaattaatgaccttactaatatagaaactttagctcatttattagaatttgattcttctcaaggtagactggaaaaagatatttcatttaaaaaagatgagatatttgttgataacaagtctgtaaagatactttcggaaaaagacccttcaaatttaccttggaacacgttagatattgatttagttttagagtgcacagggctatacgcatcgaaggataaagcgtatcgacatattgatgcaggcgctaaaaaagttgttatttcagctccggcaggtaatgatgtacctactattgtatatgggataaatgaaaaattattatcaaaaaaccataaagttatttcagctgcatcatgtacaactaactgtttagcaccattagcacaaatactaaataatctcactaacataaaaaaaggatttatgacaacgctacatgcttatacaaatgaccaaaatacacaagattcacctcatacaaaaggtgatttaagacgtgcaagagcagctgcattaaatattgctccaactagcacaggtgctgctaaggcaatcggtctagtaataccagagttgaaaggaaaacttgacggtgtatcacaaagggtcccagtaagtgctggttccttaactgaattgacggtgttatgtgatggtaagataacaaaagaaatgataaatgaacaagcaagaaaaatgatttctgattcatttggatacaatgataaacaaattgtttcttccgatgtaataggtataaagtttggctcattatacgatgaaacacttactaacgtatttgtaatggaaaatgaaactttagttaaaatttcggcttggtatgataatgagagttcttatgttgctcaaatgataagaactattaattactttttgagtttgtaa

SEQ ID NO: 413218 - DNA, 582 bp, Staphylococcus aureus
atggcaaagattaaaagaaaaaagaagatgacgctactcgaactggtggaatgggcatggaacaatcctgaacaagttgaaagtaaagtgtttcaatcagatagaatgggcacgcttggagaatgtagcgaagtacatttttcaactgatgggcatgggttttatacaaaagtagtaacagataaagatatttttactgtagaaatcacagaggaagtcactgaagatactgagtttgattgtctagtagaactaaacgatattgaaggttttgaaatatatgaaaatgattcaatcagagagttgatagacggtacttccagagcgttttatatactaaacgaagataaaactattgacattaatttggaaagatggggagttggtagtatgatgcaaacctataaagtatgtctttgtatcaagttctttgcatctaaatgtgattataaattaaagaaacattatttcgtgaaaagtacgaatgaggaaaaagccacgaacatggtattaaaactgattcgtaaaaagctcccgttcgaaactgcaagcatagaagtcgaaaaagtggaggcaatataa

SEQ ID NO: 413219 - DNA, 531 bp, Staphylococcus aureus
atgaaaggcattgaattacttaacaatccatttttaaacaaaggtacagcatttactaacgaagaaagaaaacagttagggcttgaaggtttattacctgcgaatgttcgaactttagaacaacaagctgaacaatgttatgaacaattcaaggcgaaacaaaccgattttgagaaacgtttatttttaatggcaatttttaatcgtaatcgtacattgttttacaaattgacttcagagcatttagttgaatttatgccaattatttatgaccctgttattgcacaatcgattgaacaatataatgagaatttcagcagaccccaagatgcagtgtttttatctgttgatagacaggaccaaattgaacaagaattgcgcaacgttgcaaatggcagagatattcgattaattgtagtaacagatgcggaaggtatattaggtatcggcgattggggcgttgatggtgtagatattgcgataggaaaattaatggtatatactgcggcagctggcataaatccttcataa

SEQ ID NO: 413220 - DNA, 558 bp, Staphylococcus aureus
atgaatcctccaatatgcgccacaatatttatatttgacataaacagagaaacaccaactaatatcactaatgcaattaataactgccctaacatttttttgttaaatgtttttgaaacatacatcatcgcaaaaattgatccaatcagaccaaatatagcaccactagccccaactgaaattgtagtcgtattaaatgatagtgatacaaagtttccaaacaaccctgcaataaagtatacagttaacatccgccatgaaccaataattgcttcgactattttaccaaaaataaataatgaaagcatattcataagtatatgttcaaaactaaaatgtaaaaacatcgatgtaacaattcgataccattcaccatgtacgacattaaaatgcactaacccgccaacatctaataattttacatccgaaaaattatttaaatataaaatcatacataaccatattaagacatttacaaatattattgtgtatgttgccggtgaaaatttctgcatatatttatctaaaaagttatcggttaatactttgcgtttatag

SEQ ID NO: 413221 - DNA, 192 bp, Staphylococcus aureus
atgagaaaagagattgaagcgcttattttctcagacgtaagtagctatgatatttacgtgaacactggtgtaaatcaaggattaattggtgacattaaagatggttacctaactattgattctatgccttacattgatgctgagcgtttgtatcactttgctatggaacgtaaatcgttagtcactaactag

SEQ ID NO: 413222 - DNA, 252 bp, Staphylococcus aureus
atgggggtttttcatattggagtcaattttaaactaatatgtatttcattgcctgtagaaattgaaatccaatttctctatgttgggcaccgccatcttgcacattattgtgagctgatctttcctatgttggggcccgtactccaacgcgcattgtctgtagaatttcttttcgaaattctctgtgttggggcccctataattgaaaagcgtattatcattcagtcaatgactgctaatataacagtatag

SEQ ID NO: 413223 - DNA, 399 bp, Staphylococcus aureus
atgaaaaaatttaaatatagttttatagtagtttttatattattttttaacgttaatgacctttcgtatgcgcaaggagatattggtgtaggtaacttaagaaatttctatacaaaacatgattatatagatttaaaaggactcacaaataaaaacctacctattgcaaatcaactcgaattttcaaccggcaccaatgatttgatctcagaatctaattattgggacgaaataagtaaatttaaagaaaagaagctggatatttttggaattgattataatggtccctgtaaatctaaatatatgtatggaggggtcactttatcaggacaatatgtaaatgtcaatataaaaatgtacataaatgattgtataagaatgtacaaaattgtttgctaa

SEQ ID NO: 413224 - DNA, 363 bp, Staphylococcus aureus
ttgactgcaattccatatactttagatgaatataaaaagtattttcaacccttaatcaaagaggatgataagtcttttagggacggtatgaaaaactcaaaaaaacaacttaaagataaatctcgtccatatattgttacaactttatttagtgctaaagataattttactaaagataatacaatagacgagatgattgatttttctgaagtactaaaaaagaaaaagaatattcctcgtgatttgaatgtttctcttcaaatttctaataaatatataaatacaaaaagacctaattatagtaagaaggatgtaatagaaataggtgtatttaatcatgaaaaagctaatacgaatgattaa

SEQ ID NO: 413225 - DNA, 726 bp, Staphylococcus aureus
atgaaaaagaacatcatgaataaattagttttatcaacagcattgttacttttaggaaccacttcaacacaacttcctaaaacgccaatcagtttttcatctgaagcaaaagcctataatatcagtgaaaacgagactaatatcaatgaactaatcaaatattacactcagccgcatttttcattatctggaaaatggctatggcaaaagcccaatggtagcattcatgcaacattgcaaacgtgggtttggtatagtcatattcaagtatttggtgctgaaagttggggaaacattaatcagttaagagataaatacgttgatatattcggaactaaagatgaggatacagttgaaggttactggacttatgatgaaacatttacaggtggtgtaacacctgcagctacatcatccgataagtcttataaattatttttaaaatatagcgataaacagcagactatcatcggtggtctcgaattttacaaaggaaataaaccagtattaactttaaaagaactagatttccgtatccggcaaacattaataaagaataaaaagctatataacggagaatttaataaaggtcaaattaagattacgggtggcggtaataattatacgattgatttaagtaagaagttaaaattaactgacacaaaccgttatgttaaaaatcctcgacatgcagaaattgaagtcattcttgaaaaatctaattaa

SEQ ID NO: 413226 - DNA, 837 bp, Staphylococcus aureus
ttgcaagaattatcaaatagttttataaatgcattaaaggaaaaaacgaaagaagaatcgaaagagaaagcaaaggaaataattaataataatggtggagaagaaatagctgagtttgtttctgatgttatgattggaacggcctttgatgccggtttcagttttttaccagtaattggtaagcctatacttgagtatagaaagaacaaagctattaaaaacatacatcacttcctaaaggtgttatcagaaagaattcacatattagaaaatgctaataataattatgataaagaaaagttagaaagaattataacgattgctacagataaagctgcgaatgaattacaagaagagaaaattaaacacatagctaatggacttttgaattcaattgaacataatttttcatatgacatttctattttatatttttcaatactcgatagaattacattattagaaattgaaatactgaaaaattatgctatgccttttgacgaaagagtcgaattttttgggcgagtaattcaagaaaagtttaatgtgactgatgaggggtattttgctgctaagaataacttgttgagaaatgggttattagacaacaagactgaacgatatctgcaacatgatattgataaaattttagaagctattcaggacatgcaagaagatataagtaaaatcacaaaatatgtaaatagtaatagcaaaagtaaattaaaaactaaaggtaacaaaaagatatggaataaaactaaagatagtgttcaaataactatgttaggcagaaattttattgactactttataaatgaaaatcttaataaataa

SEQ ID NO: 413227 - DNA, 498 bp, Staphylococcus aureus
atgaaagacttgctaattgaatataggaaaacgagactttgcgtactcaataaaataaaatcacttaaatataaagtagatgaagaggataaattaagtatttacaaagatatattaaaagacattgattatacaattgaatggttaacatgtggacacgaaccaggcaattataacgcaatagatagaagtcaatgctacttagtagataatgatgtgatcaataaggcttttagtgaatcaatgtataaaaagaattcagatgttgaatacaatgatataattaatgatgttaataataaagtgagctacgcattgatgaagttaacacctaaagaactagagtgttttattatggtcaaatgtgaggggctaagtcttaaacaaacggcagatttattaaaaattaataaaagcacagttaatggatatttaactagagttagtaaaaaaataaaacgagaattaattaataatctatttgtaaatttacaatga

SEQ ID NO: 413228 - DNA, 408 bp, Staphylococcus aureus
gtgaacccattaacgggtgaaaaagttggcgagggtcaaccaacagaagagattacaaaacaaccagtagataagattgtagagtttggtggcgagaaaccaaaagatccaaaaggacctgaaaacccagagaagccgagcagaccaactcatccaagtggcccagtaaatcctgacaatccaggattatcgaaagacagagcaaaaccaaatgaaccagttcattcaatggataaaaatgataaagttaaaaaatctaaaattgctaaaaaatcagtagctaatcaagagaaaaaacgagcagaattaccaaaaacaggtgcagaaagcacacaaaaaggattgatctttagtagtataattggaattgctggattaatgttattggcacgtagaagaaaaaattaa

SEQ ID NO: 413229 - DNA, 174 bp, Staphylococcus aureus; identical to SEQ ID NO: 413049

SEQ ID NO: 413230 - DNA, 189 bp, Staphylococcus aureus; identical to SEQ ID NO: 413053

SEQ ID NO: 413231 - DNA, 1197 bp, Staphylococcus aureus
atggctctattcaagagaaaaattagcctacctatgcaagttgttattgcattagtgttaggtgttgtcgtaggacttttattatatggacaagaaaacgtagcaaattacattaaaccatttggtgacgtatttttaaatttaattaaaatgatcgttataccagttgtattttgctcactagcgctttctatttcgaacgttggggaatcgaaaactgtagggcgttatggctggaaaacaattttatactttgaaattattacaacaatcgcaataggtttagggattatcttcggtaacctatttaaaccaggtgctggattagacccaacaaaattacctaaaggtgatatttctaaatatcaatcaactgcacatgcagcagaacaatctacatatggaaatcattttattgataccattgtacatattattccgacaaacttttttgaagctttaaataagggtgaattattacctattatcttcttcgcagtattctttggattaggattagctgctgtaggtaaaaaagcagaaccagttaaagaatttttaagcggatcgcttgaagctgtgttctggatgattaataaaattttaaaattagtattagttgttgtctttgcaatggtgttctttgtattcgctatactaggactagttgcatggatgtgtggtattaatatcatgaatattattagaatcttgaaaagtgaattgcttttagcattttctacatcaagttcggaagctgtacttcctgtaatgatgaagaaaatggaaaacttcggttctccaaaagaaattacttcttttgttataccaattggttatacgtttaacttagacggatcagcactttatcaatctattgcagcattattcgttgcacagatgtatggaatgcacttaacattatcagaacaaattgtgttgatgttaacattaatgattacatctaaaggtatggcggcagtaccaggaacttcaatcgttgttttattaacaacattaggtgccatgggcttaccggcacaaggtttagcattaattattggtgttgaccgtatcttagatatggtacgtacatgtgtaaacgttattggtaacgcattatcaacaatcgttatagctaaatgggaaaacgtatatgacaaagcaaaaggtcaagaatatttaaaatcaatttaa

SEQ ID NO: 413232 - DNA, 768 bp, Staphylococcus aureus
atgaatcatattgaaataagtaaagatgtaaagataccagtattaggtttcggagtatttcaaattcctcaagaacaaacagcagaagcggttaaagaagcaattaaagcgggttatagacatattgatacagcacaaagttatttaaatgaaactgaagtaggtcaaggtattgaagcttcaggtattgatagaagtgaactattcattacgactaaagtatggattgaaaatgttaactatgaagatactatcaaatcaatcgaacgatcattacaacgattaaatttggactatattgatctagtgcttattcaccagccttacaatgatgtatatggctcatggcgtgcattagaagagttaaaagaaactggtaaaattaaagcaatcggtgtatctaacttcggcgttgatcgaattgtagatttaggtattcacaatcaaattcaaccacaagtgaaccaaatagaaattaatccattccatcaacaagaagaacaagttgcagcacttcaacaagaaaatgttgtggtagaagcttgggcaccatttgcagaaggtaaaaatcaattattccaaaatcaattgttgcaggccattgcagataaatataacaaatcaattgcacaagttattttacggtggttagtagaacgtgacattgttgtactcgcaaaatcagtgaatccagaacgcatggctcaaaacttagatatatttgattttgaactgacagaagaagataaacaacaattgcgacattag

SEQ ID NO: 413233 - DNA, 1056 bp, Staphylococcus aureus
atgaaattagcgataaaagagattatgttttacaaatttcgttatattttaatcacattaatcattcttttattaagtattatggtgttatttattagtggtttagctcaagggcttggtagggagaatatttcgttatttgaacactttgataatgatgaatatgttgttcaaaaaatgaaagagccgcaaattgagaaatcgcaacttagtgatacgcaacagaatcaaattaaaaaggtaattcatcaagaaccatataaaatgaatgttcaaacattgaaattatctaataaagaacaagatgtgattacaatgaatgacgttaaacaacaacgcttacaacttaaaaaaggtgattatcctaaaaatgctcatgaggtcgctattaatgataagttagctgcagacaacattagagtcggggatagattacattttaaaaataattcaactagttatagagtttctggtattttaaacgacacaatgtatgcgcatagttccattgtgctattgaacgataacggatttaatgcattgaataaggttaatacggcgttttatccagtgaaaaatttaacgcaacaacaacgtgatgagcttaataaaataaatgacgttcaagttgtgagtgaaaaagatttaacaggtaatattgcgagttatcaagcagagcaagcaccgttaaatatgatgattgttagtttgtttgctattacagcaattgttctaagtgcatttttctatgttatgacgattcaaaaaatatcacaaattggcattttgaaagcaattggtattaagacaagacatttattgagtgcattagttttacaaattttaacactaacaataattggggtaggtattgctgtgatcatcatagtaggactatcatttatgatgcctgtaacgatgcctttttacttaacaacgcaaaatattttattgatggtggggatatttatattagtagcgattttaggtgcctcactatcatttatcaaattatttaaagtggatcctatcgaagcaattggaggtgcagaataa

SEQ ID NO: 413234 - DNA, 606 bp, Staphylococcus aureus
ttgttaatcgttttatcaggaccatctggagtaggtaaaggtactgttagaaaacgaatatttgaagatccaagtacatcatataagtattctatttcaatgacaacacgtcaaatgcgtgaaggtgaagttgatggcgtagattacttttttaaaactagggatgcgtttgaagctttaattaaagatgaccaatttatagaatatgctgaatatgtaggcaactattatggtacaccagttcaatatgttaaagatacaatggacgaaggtcatgatgtatttttagaaattgaagtagaaggtgcaaagcaagttagaaagaaatttccagatgcgttatttattttcttagcacctccaagtttagatcacttgagagagcgattagtaggtagaggaacagaatctgatgagaaaatacaaagtcgtattaacgaagcacgtaaagaagttgaaatgatgaatttatacgattacgttgtagttaatgatgaagtagaacttgcgaagaatagaattcaatgtattgtagaagctgagcacttaaaaagagagcgcgtagaagctaagtatagaaaaatgattttggaggctaaaaaataa

SEQ ID NO: 413235 - DNA, 255 bp, Staphylococcus aureus
atgaaatttgtatttgatattgatggtacactttgttttaatggtaaatcaattgatccatcaatcgttgatgcattgttacaattacaaaattctggtcatgaacttatatttgcatctgcgcggccgattcgtgatttgttaccagttttaccagaagtctttcatcaacatacattaattggcgcaaatggcgctatgttttcacagcaatcaaatatttcggttatcaagccaattcatgaattggcttga

SEQ ID NO: 413236 - DNA, 1260 bp, Staphylococcus aureus; identical to SEQ ID NO: 410734

SEQ ID NO: 413237 - DNA, 1263 bp, Staphylococcus aureus
atgaagtttacaaatttaacagctaaagagtttggtgcctttacagatagcatgccatacagtcatttcacgcaaactgttggccactatgagttaaagcttgctgaaggttatgaaacacatttagtgggaataaaaaacaataataacgaggttattgcagcttgcttacttactgctgtacctgttatgaaagtgttcaagtatttttattcaaatcgcggtccagtgatcgattatgaaaatcaagaactcgtacactttttctttaatgaattatcaaaatatgttaaaaaacatcgttgtctatacctacatatcgatccatatttaccatatcaatacttgaatcatgaaggcgagattacaggtaatgctggtaatgattggttctttgataaaatgagtaacttaggatttgaacatactggattccataaaggatttgatcctgtgctacaaattcgttatcactcagtgttagatttaaaagataaaacagcagatgacatcattaaaaatatggatggacttagaaaaagaaacacgaaaaaagttaaaaagaatggtgttaaagtaagatatttatctgaagaagaactaccaatttttagatcatttatggaagatacgtcagaatcaaaagcttttgctgatcgtgatgacaaattttactacaatcgcttaaaatattacaaagaccgtgtgttagtgcctttagcgtatatcaattttgatgaatatattaaagaactaaatgaagagcgtgatattttaaataaagatttaaataaagcattaaaggatattgaaaaacgtcctgaaaataaaaaagcgcataacaagcgagataacttacaacaacaacttgatgcaaatgagcaaaagattgaagaaggtaaacgtctacaagaagaacatggtaatgaattacctatctctgctggtttcttctttatcaatccatttgaagttgtttattatgctggtggtacatcaaatgcattccgtcattttgccggaagttatgcagtgcaatgggaaatgattaattatgcattaaatcatggcattgaccgttataatttctatggtgttagtggtaaatttacagaagatgctgaagatgctggtgtagttaaattcaaaaaaggttacaatgctgaaattattgaatatgttggtgactttattaaaccaattaataaacctgtttacgcagcatataccgcacttaaaaaagttaaagacagaattttttag

SEQ ID NO: 413238 - DNA, 729 bp, Staphylococcus aureus
atggctaaattatttataccttatattatgggagataaagattttattgaaaatgcaacattgttgagtgaaaatggtgcagatataattgaaattggtgtacctttctctgatccggttgctgatggtccagttatcatggaagcaggtcaacaagcgattaaacaaggcataacgatagattatattttcgagcaattagaaaaacacggtaatcaaattaagtgtcattatgtattaatgacgtattataatattatttgtcattatggagaacaagcattttttgaaaaatgtcgagataccggtgtctacggcttaattatacctgatttaccatttgaattatcgcaacgtttaaaacaacaatttagtcactatggcgtcaaaattatatcgttagttgcgatgactactgatgacaaacgtataaaagatatcgtatcccatgcggaaggctttatttatactgtgacgatgaatgcgacaacaggacaaaatggtgcgtttcacccagaattaaaacgaaaaattgagtcaattaaagcgatagccaatgtgccagttgtcgcaggatttggcataagatctccacaacatgttgcagatataaaagaggttgcagatggtatcgttattggtagtgaaatagtaaaacgatttaaatctaacacgcgtgaagaaatcattaaatatttacaatctatccagcaaacattgaataattaa

SEQ ID NO: 413239 - DNA, 636 bp, Staphylococcus aureus
atgatgaaattgaaattttgtggctttacatcaatagaggatgttacagcggccagtcaattacctattgatgcgataggattcatccattatgaaaaaagtaaaaggcatcaaacaattgtccaaattcaaaagttagcgtctgctgttccaaatcatattgatacagtatgcgtcatggtaaatcctgatttaacaacaattgaacacgtattaagcaatacgccaattaacacaatacagttacacggcacagaatctattgattttatacaggaaattaaaaagaagtatccaagcattaaaatcattaaagctttagctgcagatgaaaacataatccaaaacataaataaatataaagggttcgtagatttatttattatcgacacaccctcagtgtcgtatggtggtaccggtcaaacatatgactggactattttgaagcacataaaagacataccttacttgatagcaggaggcattaactctgaaaatattcaaacagttaatcaacttaaattatcacatcaaggttatgatcttgcatcaggtatagaagtaaatgggcgaaaagatatagaaaaaatgacagcgattgtaaatattgtgaaaggagatagaggaaatgaatag

SEQ ID NO: 413240 - DNA, 783 bp, Staphylococcus aureus
atgacgattttagaagaaattgttgaatataaacagttacttttacaaaatggctattatcaagacaaacttaataccttaaaaagtgtgaacattcagaataaaaaatcttttataaacgcaattgagaaagaaccaaagttagcaattattgcagaaattaaatcgaagagtcctacagttaatgacttacctgaacgagatttatcgcaacaaatctcagattatgagcaatatggtgcaaatgctgtatccattttgactgatgaaaagtactttggtggtagttttgaaagattacaagcattgacaacaaaaacaacattacccgtattatgcaaagattttattatagatccgcttcaaattgatgttgccaaacaagctggtgcatctatgattttactgattgttaatatcttatcggataaacaattgaaagatttatataactacgctatatcgcaaaatttagaagtgttagttgaagtacataatcgtcatgaattagaacgtgcctataaggttaatgctaaattgattggtgtaaataacagggacctaaaacgatttgtcacaaatgtggaacatacaaatattattttagaaaataaacagccgaatcattattatatttcagaaagcggtattcatggtaactctgatgtaaggaaaattttgcatagtggtatcgatggcttactaataggtgaggcgcttatgcgttgtgacaatctatctgaatttttaccacaactaaaaatgcaaaaggtgaagtcatga

SEQ ID NO: 413241 - DNA, 567 bp, Staphylococcus aureus
atgatcttagttgtagataattatgattcctttacgtataacctagtggatattgttgctcaacattctgacgtaattgttcaataccctgatgatgataatgtgctgaatcaatctgttgatgctgtcattatttcaccaggccctgggcatccattagacgaccaacagttaatgaaaattatctcatcctatcaagataaacccattttaggtatttgcctaggtgctcaagcactgacttgttattacggtggagaagtcattaaaggcgacaaggttatgcacggaaaagttgatacacttaaggttatatcgcatcatcaacatctgttatatcaagatgtaccagaacaattttcgattatgagataccattcattaataagtaatcctgataattttccagaagaattgaaaattactggacgtaccgaagattgtatacagtcatttgagcataatgaacgaccccattatggtattcagtatcatcctgaatcatttgctacagactatggtgtcaaaataattactaattttattaattacgtgaagaaaggatga

SEQ ID NO: 413242 - DNA, 1407 bp, Staphylococcus aureus
atggatgtattctataaaaaaataaaagcaaatgtaacacctgaagttttagcacaacttcattccaagaagatcattttggaaagtacaaatcaacaacaaactaagggtcgctattctatagtgatatttgatatctacggtactttaactttagataacgatgtattatcagtaagcactttaaaagagtcgtatcaaatcactgaaagaccgtatcattatttaacgactaaaataaatgaagactatcataatattcaagataatcaacttaagccattaccgtttatatctggatatgttgggacgtgtagctttgatttagtaagacatgaatttcctaaattgcaatcaatacaattagaggatcacaagcagcacgatgtacggttatatatggttgaacaagtttatgtatttgaccattacaaagatgagttatatatcatcgcgacgaatcaattttcaaattcaacaaaatcagatcttgagaatcgagttaataagtctatcgaagacttaactaaaatccaaccgttcatgcctacacaagattttgattttaaaactaaagaaattcaatcaaatatttctgaagaaagatttatcgaaatgattcagtatttcaaagataaaataacagaaggggatatgttccaagttgtgccatcaagaatttacaaatatgcgcatcatgctaatcagcatttaaatcaacttacgtttcaactgtatcaaaatttaaaacgacaaaacccaagtccatatatgtattatcttaatatcgataaaccctacattgtcggtagttctcccgaaagtttcgtaagtgtcaaagataaaattgtaacaactaatcctattgcaggtacgattcaacgtggtgagacgacacaaatagataatgagaatatgaaacaactacttaatgatcctaaagaatgcagtgaacatcgtatgcttgttgatttaggttgtaatgatattcatagagtaagtaaaataggtacctcaaaaattactaaattaatggttattgaaaaatatgaacatgttatgcatatcgtaagtgaagtcacaggtgaaataaatcaaaatttatcgccaatgacagttattgcgaatttattaccaacaggtaccgtttcaggtgcaccaaaattacgtgcaatagaaagaatttacgaacaatatccacataaacgtggcgtttatagtggtggtgttggatacataaattgtaatcataacttagattttgcattagcaattcgaacgatgatgatagatgagcagtatatcaacgtagaagcaggttgtggcgttgtatatgattctattcctgaaaaagaactgaatgaaacgaaattgaaagctaaaagcttattggaggtgagcccatga

SEQ ID NO: 413243 - DNA, 1032 bp, Staphylococcus aureus
atggaaccaatattagaaatgattaaaacattaacaggtattaatagtccttcaggagacacagaagaagcaattcaatttgtcgaaaaatatgcaaaagacttaggttatcaaacaacactaacaaataaaggtgcgttattaataacagtgccaggcaaaaatgatgaagtacaacgctgtattactgctcatgttgatactttaggtgcaatggttaaagaaattaaagaagatgggcgcttagcaatagaattaattggaggattcacgtataacgcgattgagggtgaatattgccaaattaaaactgatgctggtcaaatatatacaggaacaatttgtctgcatgaaacaagtgttcatgtatatagaaataatcatgaaatacctagagaccaaaagcatatggaaataagaattgatgaagtaactacatcagaagaagatacaaagagtttaggtatttcagtaggtgattttgttagctttgatccacgtacagttatcacgtcatcaggttttattaaatcacgtcatttagatgataaagctagcgtagcgatgatactacaattactaaagaaattaaaagaagagcaaataatattaccacatacaacacaattttatatttctaataacgaagaaataggttacggtgcaaatgcatcaattgattcgaaaatcaaagaatatattgcattagatatgggcgcgttgggagacggtcaagcatccgatgaatatacagtttctatttgtgccaaagatgcttcaggtccatatcataagcaattgaaatcacacctagttaatctttgcaaaataaataatattccatataaagtagacatatatccatattatggttcagatgcttcagcagctttacatgctggtgcggatatcagacatggtttatttggcgctggcattgaatcatctcatgcaatggaacgaacacatattgattctattaaagcgacagagaaattactatatgcatattgcttatcaccaattgagtaa

SEQ ID NO: 413244 - DNA, 1092 bp, Staphylococcus aureus
atgacaacagttttatttgttgggcttggattaattggtggaagtcttgctagcaatataaaataccataaccctaatactaatattattgcatacgattcagatacttctcagttagataaagctaaatcaatcggtattattaatgaaaaatgtttaaattatagtgaagctattaaaaaagccgatgtaattatttatgcaacacctgttgctatcacaaataaatatcttagcgagcttatagatatgccaactaaacctggtgttattgtttctgatactggtagtactaaagcaatgatacagcaacacgaatgcagtttattaaagcataatattcatttagtcagtggtcatccaatggctggtagtcataaatccggtgtactaaatgctaaaaagcacttatttgaaaatgcttattatattttagtctacaatgagccaagaaatgagcaagcagcaaacacgttaaaagaactgttatcacctactcttgctaaatttattgtaactactgctgaagaacacgactacgtaacaagcgtcgtaagtcatttacctcatatcgttgcatctagtttagttcatgttagtcaaaagaacggtcaagaacatcatttagtcaataaacttgcagctggtggttttcgtgatatcactcgtatagctagtagtaatgcacaaatgtggaaagatatcaccttgagtaataaaacgtatattttagaaatgattcgacagctaaaaaatcagtttcaagatttagaaagactaattgaaagcaatgattctgaaaaattgttatcattttttgccgaagctaaatcgtatcgtgacgcactgcccgctaaacaactaggtggactaaatactgcgtatgatctatatgtagatattccggatgaatcaggtatgataagcaaagtgacttacatactaagtttacataacatatctataagcaacttaagaatcttagaagtacgcgaagatatatacggtgctttaaaaattagtttcaaaaatcctactgaccgagaacgcggtatgcaagcattgagtgattttgattgttatatccaataa

SEQ ID NO: 413245 - DNA, 1263 bp, Staphylococcus aureus
gtgtataattatcatttattagaagatagggatgttctatgtattgaccaaaaaagtttttttgcgagtgtttcttgtattgaaaaggggctagatccattagaaacaaaattagctgttgttgcagatactaagcgtcagggttctgtagtattggctgcgacacctaaattaaaagaattaggcatcaagacaggatcgcgattgtttgaaataccacatagaaatgatatttacattatcaatccaagtatgcgtaaatatcttaatgtttcagttgctatttctaagattgcattgcgttatattccacctgaagatttacaccaatatagtattgacgaattttttatggatgttactgatagctatcatagatttagttctacagtacatgcattttgcgaaagacttaaacgtgaaatttatgaagaaacaggcatttattgtactgtgggcattggttctaatatgttattaagtaaaattgctatggatgttgaagcgaagcataatcaaaatggtatagctgaatggcgatatcaagatgtaccaacaaaattatggccaattcagcccttgcgagatttttggggtattaatcgtcgaacagaagctaaattgaataaaagaggaatttttactataggagatttagcgaaatatccatataaatttttaaaaaaagagttcggtattttaggtgttgatatgcatctacatgcgaatgggatagatcagagtaaagtacgtgaaaagcacaagatcagcaatccatcgatatgcaaaagtcaaatattaatgagagattatcattttgatgaagcaaaagtagtaatgcaagagttaattgaagatgttgctagcagagttcgagcaagaaaaaaagtggcaagaacgatacattttgcttttggctatagtgatgaaggcggtgtacataagcaatatactttgaaagatccaacaaacttagaaaaagatatttataaagtagtaatgcatttcgcagataaattatgtaataaacaagcactatatcgtacgttaagtatatctttgagtcaatttattaatgaggatgagcgacagttaagtttgtttgaagatgaataccaacgcaaacgtgacgaatgtctagctaaaacgatagatcaattacatttgaaatacggcaaaggtattgtgtccaaagcagtatcgtttacagaagcaggtacaaaacacggcagattaggtttaatggctggacataaaatgtaa

SEQ ID NO: 413246 - DNA, 189 bp, Staphylococcus aureus
atgatgccaatcgtcaatgtaaaattattagaaggtcgttcggatgaacaattaaaaaatttagttagcgaagttactgacgccgtagaaaaaacaacgggagcaaatagacaagcaattcacgttgttatagaagaaatgaaaccaaaccattatggtgtggctggcgtaagaaagtcagatcaataa

SEQ ID NO: 413247 - DNA, 984 bp, Staphylococcus aureus; identical to SEQ ID NO: 412443

SEQ ID NO: 413248 - DNA, 510 bp, Staphylococcus aureus
atgaatattaatacagcttattttgccggaggttgcttttggtgtatgacgaaaccatttgacacctttgacggcatagaaaaagtaacttctggatatatgggcggacatattgaaaatcctacttacgaacaagtaaaatcaggtacgagtggtcatttagaaactgttgaaattcaatatgatgttgcattattctcatacaataagttattagaaatatttttctcagtcattgacccattagatacaggtggtcaatatcaagaccgtggtcctcaatatcaaacagctattttttacactaatgatcatcaaaaagaactcgctgagacttatatcgagcagcttaaaaatacgattaatgctaataaggcaattgcaacaaaaatattacccgcgtcacaattttacaaagccgaagactatcaccaagatttttataagaaaaatccagagcgctatgcagaagaacaaaaaatacgccaagaatacaaaaataagcaataa

SEQ ID NO: 413249 - DNA, 2523 bp, Staphylococcus aureus
atgaatcaggaagttaaaaacaaaatattttcaatcttaaaaattacgtttgctacagctttatttatttttgtagtaatcacgttgtatcgagagttatctgggattaactttaaagatactttggttgaatttagtaagatcaaccgtatgtcccttgttttattatttattggtggtggggcttcgcttgttattttatcaatgtatgatgtgattttatctagagctttaaaaatggatatttcattaggaaaagttttaagagtaagttatatcattaatgcattaaatgcgattgtaggctttggtggctttattggtgccggtgtaagagcaatggtttataaaaactatacgcatgataaaaagaaattggttcactttatttcattaatactgatttcaatgttgactggtttaagtttgttatcattgttaatcgtattccacgtttttgatgcgtcattaattttaaataaaattacgtgggtgagatgggtactttatgctgtgtcgttgtttttaccattatttattatatattcaatggttagaccgcctgataaaaacaatcgttatgtaggcttatattgtacattagtgtcatgtgtcgaatggttagccgctgcagttgtattatacttctgtggtgtcatagttgacgtccatgtctcatttatgtcatttattgcaatattcattattgctgcattatctggattagtcagctttattccaggtggttttggtgccttcgacttagttgttttattaggctttaaaacgctaggtgtacctgaagaaaaagtattattaatgctactactttatcgctttgcgtactatttcgtaccagtgattattgcattaattctttcatcatttgagtttggtacttcagctaagaaatatattgaaggatctaaatatttcattccggctaaagatgtgacgtcgtttttaatgtcgtatcaaaaagatattattgctaaaataccatcattatcattggcaattttagtattctttacaagtatgattttctttgtaaataatttgacgattgtatacgatgctttatatgatggcaatcatttaacgtactatcttttattggcaatacatacaagtgcctgtttattacttttacttaatgttgtaggtatttataaacaaagtagacgtgccattatttatgcaatgatttcgattatcttaattattgtcgcgacgttattcacttatgcgtcatacattttaataacttggttagttattatctttgctttacttattgttgctttccgtagagcacgtaggttaaaacgtccaattcgaatgcgaaatttagtcgcaatgcttttgtttagcatatttatactctacatcaatcatatatttatagctggaacattttatgctttagatgtttatacaatcgaaatgcatacgtctgtacttaaatattatttctggattaccattttaattatcgcaattattgttggtgcgattgcatggttatttgattatcaatttagtaaagtgcgtatatcttctaatattgaagagtgcgaagagattattgatcaatatggtgggaattatttaagtcatttaatttatagtggtgataaacagttcttcactaatgaagataaaaatgcatttttaatgtatcgctataaagcaagttcgttagtagttcttggcgatccaatcggtgatgaaaatgcctttgatgaattgttagaagcattctataattacgctgagtatttaggctatgatgttatattctatcaagttacagatcaacacatgcctttatatcataatttcggtaaccaattttttaaattaggtgaagaagcaattattgatttaacacaattttcaacttcaggtaaaaaacgccgtggatttagagcgactttaaacaaattcgatgaacttaatatttcattcgaaattattgaaccaccgttttcaactgaatttataaatgaacttcaacatgtaagtgatttatggctagataatcgtcaggaaatgcatttctctgttggtcaatttaatgaagaatacttatctaaagcgccaattggtgtgatgcgcaatgaaaataatgaagtaattgcattttgtagtttaatgccaacatactttaatgatgccatttcagtcgatttaattagatggttgccagagttagatttaccgttaatggatggattatacttgcacatgttactttggagtaaagagcaaggctatacaaaatttaatatgggtatggcaacgttatcgaacgttggtcaattgcattattcatatttaagagaacgacttgcaggccgtgtctttgaacatttcaacggtctatatcgtttccaaggattacgtcgttataaatctaaatataatccgaattgggaaccacgctttttagtttatcgaaaagataattcgctttgggaatcactttctaaagtaatgcgtgtaatacgtcacaaataa

SEQ ID NO: 413250 - DNA, 768 bp, Staphylococcus aureus
atgattattttgcaattctttgtgaatagtgctgatgcaacaaaagttaacttatcgcaaacgtttgaaccaataagttggacccatttactaggaacagatgactatggtcgtgatttatttacaagggtcattgttggtgcacgatcaacattattcatcacaatcttaactttaattgctattgttattattggggtaacacttggattacttgcagggtataaaaaaggatggatagagcgcattatattacgcattgttgatatcggtctaagtataccggaatttattatcatgatagcattagcaagtttttttcagccaagtatttggaatttagttattgcaattacaattataaaatggatgaattatacaagattaacaagaagtattgttaatagcgaaattaccaaaccttacattaaaatggcaaaattatttcatgtaccaactagggtaatattgttacgccacttaacacctaagataatgccgtcaattatcgttttgatggtggtcgatttcgggaaaatcattttatacatcagctcattatcattcataggactaggtgcacaaccaccgacaccagagtggggcgctatgttgcaacttggcagagattttatttcgtcacatccaattatgctcattgcgcctgcttctgtcattgctacaacgattttaatttttaatcttactggcgatgcactaagagataaattgttgaaacaacgaggtgaatattatgagtctcattga

SEQ ID NO: 413251 - DNA, 774 bp, Staphylococcus aureus; identical to SEQ ID NO: 407498

SEQ ID NO: 413252 - DNA, 1623 bp, Staphylococcus aureus
atgggtactgattataaagtagatattgaaggtaaatcttacacaccacaagaaatctcagctatgattttacaaaacttaaaaaatacagctgaaagctatttaggtgagaaagttgacaaagctgtaattacagtacctgcatactttaacgacgctgaacgtcaagcaactaaagatgctggtaaaattgctggtttagaagttgagcgtatcattaatgaaccaacagctgcagcattagcatatggtttagataaaactgataaagatgaaaaagttcttgtttttgacttaggtggcggtacatttgacgtatctatcctagaattaggtgacggtgtattcgaagtactatcaacagccggtgacaacaaacttggcggtgatgattttgaccaagtaattattgactacctagttgcagaatttaaaaaagaaaatggcgtagacttatctcaagataaaatggcattacaacgtttgaaggatgctgctgaaaaagctaaaaaagacttatcaggtgtatcgcaaactcaaatctcattaccatttatctcagctggtgaaaacggtccattacacttagaagtaaacttaactcgttctaaatttgaggaattatcagattcattaattagaagaacaatggaacctacacgccaagcaatgaaagatgctggcttaacaaactcagatatcgatgaagttatcttagttggtggatcaactcgtattccagcagtacaagaagctgtcaaaaaagaaatcggtaaagaacctaacaaaggcgtaaacccggacgaagtagtggctatgggagctgcaatccaaggtggcgttatcacaggtgacgttaaagacgtagtattattagacgtaacaccactatctttaggtattgaaattttaggtggacgtatgaatacgttaattgaacgtaacactacgattcctacatctaaatctcaaatctattcaacagcagtagataatcaaccatcagtagatgtacacgtattacaaggtgaacgtccaatggctgcagataataaaacacttggtagattccaattgactgatattccaccagctgaacgtggtaaacctcaaattgaagtaacgtttgatatcgataaaaacggtattgtaaatgtaactgcaaaagacttaggtacaaataaagaacaaagaattacaattcaatcaagttcttcattatcagacgaagaaatcgaccgtatggtaaaagatgctgaagttaacgctgaagcagataaaaaacgtcgtgaagaagtagacttaagaaacgaagctgacagcctagtattccaagttgaaaaaactttaactgatttaggcgaaaatatcggtgaagaagataaaaaatctgctgaagagaaaaaagacgctcttaaaactgctttagaaggtcaagatatagaagatattaaatctaaaaaagaagaacttgaaaaagtgattcaagaattatcagcaaaagtatatgagcaagcggctcaacagcaacaacaagcacaaggtgctaatgctggtcaaaacaacaatagtactgtagaagatgctgaatttaaagaagtaaaagacgacgacaaaaaataa

SEQ ID NO: 413253 - DNA, 1428 bp, Staphylococcus aureus
atggctgtaaaaagagaagatgtaaaagccatcgtaaccgctattgggggaaaagaaaatcttgaagctgcaacgcattgtgtaacacgattacgtttagtgctgaaggatgaaagtaaagttgataaaggcgcattaagtaataatgcgttggtcaaggggcagttcaaagcagaccatcaatatcaaattgtcattggtccaggcacagttgatgaagtgtataagcattttattgaagaaacgggtgctcaagaagcttcgaaagatgaagcgaaacaagccgctgcacaaaaagggaatccagtacaacgtttaatcaaattgttgggggatatttttataccaatattacctgcgattgtgacagctggtttgttaatgggaatcaataatttacttacaatgaaaggtttatttggtccaaaagcacttattgagatgtatccacaaattgctgatatttcaaacatcattaatgtgattgcgagtacggcatttattttcttaccagcattaattggttggagtagtatgcgtgtatttggtggtagtccgattctaggcttagtcttaggtttgattttaatgcacccgcaattagtatctcagtatgatttggcaaaagggaatattccgacgtggaacttatttgggttagagattaagcagttgaattaccaaggtcaagtgttgcctgttttaattgcagcttatgttctagctaaaattgaaaaaggattaaataaagttgttcatgattcgataaaaatgttggtcgttggacccgtagcgcttttagttactggatttttagcatttattatcattggaccagttgcattattgattggtacaggtattacatctggtgttacatttatattccaacatgcaggatggcttggcggagcaatatatggattgttatatgcaccacttgtaattactggcttgcatcatatgtttttagcagtagatttccaattaatgggtagcagcttaggtggtacatacttatggccaatcgttgcgatttcaaatatttgtcaggggtctgcagcatttggcgcatggtttgtctataaacgtcgtaaaatggttaaagaagaaggtttggcattaacatctggtatttctggtatgttaggtgttactgaaccagctatgtttggtgtgaacttacctctgaaatatccatttatcgctgcgatatcaacgtcttgtgtattgggggcaatcgttggtatgaataacgtacttggaaaagttggtgttggtggtgtgccagcattcatttcaattcaaaaagaattttggccagtatatcttattgtgacagctattgctattgttgtaccatgtatactaacaattgtgatgtctcattttagtaaacaaaaagcaaaagaaattgttgtagattaa

SEQ ID NO: 413254 - DNA, 1122 bp, Staphylococcus aureus
atgggattaaaagatcaagctgttgcctggagaaggtattttcatcaatttccagaactatccgataaagaatttaagactacacaaaaaattaaagatattttaacagaatataatattagaatattagacttaccacttgcgactgggcttgttgctgaagtggggcaaggtctgagttgtatagctgttcgggctgacattgatgctttaccaattcaagagcttgttgaacaggattttaaatctgaaaatgaaggtgtgatgcatgcgtgtggtcatgatattcacatggctagtattttggctacagctgtaaagttaaaagaaattgagggcactcttactgggcgtgttaaattcatttttcaaccagcagaagaactaggacatggcgcttttaaaattattgaaacacatgcattacaagatgtacaagcagtattgggttttcataatgacccatcgcgttcggtaggtacatttgcaatcaaaacagaggcaattacatcagcagtagatcgttttgagtttcatattaaaggcgtgggtggtcatgctgcaaagccagaacaatgcaacgatccagttattgtgttggcgcaattgattaatagtattcaatccatagttagtagaaatctatctgcgtttgatgaagcggtagtaacaataggacaaatatcatgtggtaatacttggaatgtcattgctgatcatgcgtatgtacaaggcacagtgcgtagttttgatcctgtggtgcgaaagcttgtagaaacacgattacaagatattgcggacgggttagctcaagcatataatatgaaaattaatttaaattatacacatttacctggcgctgtgatgaatgatgaggcattgacgcataaagcaatttcagtagcccaacatgttggatataaggtggaaatgatggaacagccgcttacgattggagaagatttttcaggttatagtcaacattttccaagtgtatttgcgttaattggttctcatagtgaatatgatttacatcatcctcaatataaaccggatgaaaggattatggaaaaagtacctgagtattttgttgaatttgtaaagagactattgcatgagtaa

SEQ ID NO: 413255 - DNA, 1635 bp, Staphylococcus aureus
atgaaaggcattgaattacttaacaatccatttttaaacaaaggtacagcttttactaacgaagaaagaaaacagttagggcttgaaggtttattacctgcgaatgttcgaactttagaacaacaagcagaacaatgttatgaacaattcaaggcgaaacaaaccgattttgagaaacgtttatttttaatggcaatttttaatcgtaatcgtacattgttttacaaattgacttcagagcatttagttgaatttatgccaattatttatgaccctgttattgcacaatcgattgaacaatataatgagaatttcagcagaccccaagatgcagtatttttatctgttgatagacaagaccaaattgaacaagaattgcgcaacgttgcaaatgacagagatattcgattaatcgtagtgacagatgcggaaggtatattaggtatcggcgattggggcgttgatggtgtagatattgcaataggaaaattaatagtatatacaggggcagctggaataaatccttctcaagtattacctgtatctttagatgttggtactaataatgaacaattattgaatgatgacctttatttaggaaatcgtcataaacgtgtcgatgatgagacatattacgcatttgtagataaatttgtgagtgcagtgcgtaaagaatatcctaatgcactattacattgggaagattttggtagagggcatgccaaaaatattttagataaatatgaagatacgttaccaacttttaatgatgatattcaaggtacaggtatagttacattagctggcgtactaggtgcattaaatatttctaaagtagattatacgaatcagacgtttttagtttatggtggtggtacagctggtatgggtattaccaatattttaaaagatgaactaattaaacagggtgtttcagaagaaaaagcaaatcagcatttctatattatggataaacaaggattgctgtttgatgatatggatgatttaactgaagcgcaacaagtatttgctaaaaataggaatgaattttcaaatacagtaaactggaaaaatttaaatgaagtaattgaaaatatcaagcctactgttttaatcggtacatcaactcaaacaggtgcatttacagaagatgcagtaaaagagatgtttaaacatacagaacgtccggtgattttcccattgtctaatcctacaaaattatcagaagcaactgcacaagatttattaaaatggactaacggaaaagcattaattggaactggtataccatataatgacattgaatacaatggtgtgaattacagtattggtcaagcaaataatgcattgatgtatcctggtttaggtttgggtcttattgcgtcaaatgcgaagaaagtaaatcaacagattctatcagctgcgagtcatgcacttggtggcatggtcaatccagatgaaccaggtgctgcagtcttaccacctgttgagaaaatacatcaatgttctcgtgccatagccaaagcggttgcacaaagtgtcattgatcaaggattaaacgctgaaactattgatgatattgacaaagcaattgaagctgaaatttggtatcctaaatacaaatcatacatttaa

SEQ ID NO: 413256 - DNA, 915 bp, Staphylococcus aureus; identical to SEQ ID NO: 407517

SEQ ID NO: 413257 - DNA, 759 bp, Staphylococcus aureus
gtgattcagactcagacagcgactcagactcagatagcgactcagattcggacagcgattcagactcagatagtgattcagattcggatagcgactcagatagcgactcagattcagatagcgactcagattcagacagcgattcagattcagatagcgattcagattcagatagcgactcagactcagacagtgattcagactcagacagcgactcagattcagatagcgactcagatagcgactcagactcagatagcgattcagattcagatagcgactcagattcagacagcgactcagactcagatagcgattcagattcagatagtgactcagactcagatagcgactcagattcagatagcgactcagattcagacagcgattcagattcagatagcgattcagattcagatagcgactcagactcagacagtgattcagactcagacagcgactcagattcagacagcgactcagattcagacagtgattcggactcagatagcgattcagactcagatagcgactcagattcagacagtggctcagattcagatagcgattcagactcagacagtgactcagattcagatagcgactcagactcagacagtgattcagactcagatagtgattcagactcagatagtgattcagactcagatagcgactcagactcagacagtgattcagactcagatagcgactcagactcagatagcgattcagatgcaggaaaacatacacctgtga

SEQ ID NO: 413258 - DNA, 1491 bp, Staphylococcus aureus
atgaattattttgtaggtaatagtttaggtgttaatttaactgggatagagaaagcaattattaatcgtttaaatttatttaaagaaatgggaagaccagcgcaatgtgtatttctgtcatggaatagatatttatatagaaatgcccaaaattatattactagttctgactatattaatatgtatgatttcttccaagaagcaacatatttagaacgcaatgaaccatttgactggttgtcatattggactgatgaatgtcattatactttaaaacatgttgaaaatagtcatgactttagaatatatgatcaagagcgtttcttaatgtatgcccattttcaagatcctaaatatcgtatattagattatgtgaatcattttgatagtcaaagacgaaaagtaaaacgtgatttttatgatgtgcgtggctttttaagttgtagtaggattcttgttgataaacaacaaacattatgtgaatttttctataatccagaaggagacacaaaattagaaaagtatttttcttacaaagatggcaaaccagaagtacaaaaaattattgtttactatgctaacaaacaatatttctttaataatgaaacggaattaggcgcatttttcattaaacaactatatcaacatggggatttatttttcagtgaccgcaatgtgtatacagcacctattttcaacttaacacctaagtcaatcccagtagtagctgtgcttcacagtacacacattaaaaatattgatgcattagattcatcgccatttaaaaatgtatataaagcgatgtttgaaaatttatctcgatatcgtgcaattatcgtttctactgagcagcaaaaattagatgttgaaaaacgtattaaccatactattcctgttgttaatattcctgtcggctatagtgaaacaattgatacaccagtccaaacattagatcagcgcagtgttaaattaatttccgttgcacgttattcacctgaaaaacaattacatcaacaaattgaattaattaaacgcttaatcccttatgtaccgaaagtagaactccatatgtatggttttggttcagaaagtaaaaaattaaatgaattgatacaaaaatatggattagaaaatcatgtatatttacgcggctttttaagcaatctagaccaagaatacagcgatgcctatttgagtttaataacaagtaacatggaaggtttctctttagcgctacttgaatctttagcacatggtgttccagttattagttatgatattaaatatggtcctagtgaattaattacttcagatttcaatggttatttaattactaaaaatgatgaagatgtgctattcgaaaaagtaaaatatgtgattgatcatccggaagtacaacaacggctgtcaaaaggtagtttggcaaaagcgcaacaatacagtaaagcgtcgttaattaaacaatgggaccaatttgttcgtcttatataa

SEQ ID NO: 413259 - DNA, 153 bp, Staphylococcus aureus
atggcagaaaaatttaagataataatgacagaagcattgtctttatatatttgggggtgcaacattttgaatactgagaaattagaaacattgcttggcttctataaacaatataaagcattaaatttagatatatcatcatcatttaaataa

SEQ ID NO: 413260 - DNA, 585 bp, Staphylococcus aureus; identical to SEQ ID NO: 409425

SEQ ID NO: 413261 - DNA, 207 bp, Staphylococcus aureus; identical to SEQ ID NO: 409596

SEQ ID NO: 413262 - DNA, 249 bp, Staphylococcus aureus
atgatgaataatcgtgaacaaattgaacaatccgttataagtgctagtgcgtataacggcaatgacacagagggattgctaaaagagattgaggacgtgtataagaaagcgcgagcatttgatgaaatacttgatggaatgacaaatgctattcaacattcagttaaagaaggtattgaacttgatgaagcagtaggaattatggcaggtcaagttatctataaatatgaggaggaacaaggaaaatga

SEQ ID NO: 413263 - DNA, 537 bp, Staphylococcus aureus
atgactaacacattaacaattgatcagttacaagagttattacaaatacaaaagaagttcgacgatagaataccgactagaaatttaaatgacacagtagctagtatgattattgaatttgcggagtgggttaacacacttgagttttttaaaaattggaagaaacaaccaggtaagccattagatacacaattagatgagattgctgattacttagctttcagtttgcaattaactttgactattgttgatgaagaagatttggaagaaactactgaggttatggttgatttgattgaaaatgaagttactttacctaaactacattcagtttattttgttcatgtaatgcatacactaacagaacaatttgtaaaaggtattgataatagtattgtacaagttttaataatgccttttttgtacgccaatacttactatacaatcgaccaactcattgacgcatacaaaaagaaaatgaaaaggaaccacgaaagacaagatggaacagcagacgcaggaaaaggatacgtgtaa

SEQ ID NO: 413264 - DNA, 288 bp, Staphylococcus aureus; identical to SEQ ID NO: 409280

SEQ ID NO: 413265 - DNA, 258 bp, Staphylococcus aureus
atggcatctataagaaaacgaggtaataaatatcaagctagagttaattattatgatttatatacacacgagcgaaaaccaataactaaaacattcaatactaaatcagaggctaggaaatgggctgctagtgtagaagcagacacagaaaactttgtattacttgataataatattacactagaagcatggattgaactttatttagctacttttagattaaacaatattgcatatctgtctcttatacacatctga

SEQ ID NO: 413266 - DNA, 1455 bp, Staphylococcus aureus
atggaagataataaaatgaaccgtagtcttaactcaagacacatttccatgattgctataggtggtgcaattgggactggtctatttgtagctactggtaatatcatttctcaagctggtcctggaggcgctatactcgcttatcttgttattggtgtcatgctatatttcttaatggcatcaattggagagttggcaacattttatccagtatcaggttcattcagctcttattcaacacgctttattgactcatctctaggctttaccatgggatggttgtattgggcattgtggtcattagttacaagtgttgatgtcatagtagcgtcaaatgtgctttatttctgggacacatttaaatttttccaccccattacttggagcttaatctttattacaattttactattattaaacattttttctgtaaaatcatttggagaaactgagttttggttatcattaattaaagtgttaacaatcatcgtattcgttatttttggctttttaatgattttcggtatcttaggtggtcatgcatatggatttgaaaactatacaaaaggccaagcaccgtttgttggtggtatctctggtttcctaggcgtattattagtcgctggattctcagttggtggtactgaagtagtagcagtaactgctggcgaatcagatgatcctaaaaagtctatgcctaaagcaattaaacaagtgttttggcgtatacttttattctatgtattatcaattgcagtcattggtgcaattattccgtacacagatccatcattattaagagcaagtagttcaataagtcaaagtccatttacaattgtattcgatagagtaggcatagcctttgcagcatcagtaatcaatgcagttatattaacttcattattatccgctgcaaattcaggtgtgtatacaacaggcagaatgttgtattccttaagttcagacaaaaaagcacctaaatttttaagtaaattaaacaagacaacaaagttaccattaagagcattattaactacatatgcagtcgttgttattgttattatttatgcaaactttaattcaaatgccgtttttaatttacttgaaattattggttcaatgattatagttgtttggggatcaagcatttggtcacaaatacgattgcgacaagctattaaaaaacaaggtcaagatcctaataaggtcctaccatataaagcacctttttatccattaggaccaatcattgtcatcgctacgctattattcttgctatttggtggttcagttgaatatattttaaaagatcaatggttaaatgcttttaaaaactttttacctttaatcattctagcgttgatttactttattcataaaatcattcacaaaacaaaatttgtaaagctagaaacaattaatttaaaaccacacgattatgacaatcaaaaataa

SEQ ID NO: 413267 - DNA, 1119 bp, Staphylococcus aureus
atgttagttgcagtagtcaaagaattaaaacaaggtgaaggacgtgtagcttgcacacccgaaaatgtgcgtaagttaacggatgcaggacataaagtaattgttgaaaaaaatgctggcattggttcaggattttctaatgatatgtatgaaaaagaaggcgctaagatcgtaactcacgaacaagcatgggaagctgatcttgttatcaaagtaaaagaacctcataaaagtgaatatcaatattttaaaaaagaccaaatcatctggggattcttacatttagcatcttcaaaagaaattgtagagaaaatgcaagaagttggtgtcactgcaattagtggtgaaaccattgttaaaaatggtaaagccgaattattagcgccgatgagtgcaatagcaggtcaacgttcagcaattatgggtgcttactattctgaagcgcaacacggtggtcaaggtacattagtgacaggagtacatgacaatgtcgatattccaggaagtacatatgtcatcttcggtggtggcgtagcagcaacaaacgcagccaatgttgcattaggactcaatgctaaagtaatcattatcgagttaaacgatgatcgcattaaatatttacaagatatgtatgcagacaaagatgtcactatagtcaaatcaacaccagaaaatttagcagaacaaattaaaaaagcagatgtatttatttcgacaattttaattcctggtgcaaaaccaccaaaattagttacacgtgagatggttaaatcaatgaaaaaaggttcagttttaatcgatatagctattgatcaaggtggaaccattgaaacaatcaaaccaactacaatttctgatccagtgtatgaagaagaaggcgtaattcattacggtgtaccaaaccaaccaggtgcagttccaagaacgtcaacaatggcattagcacaagggaatattgattatattttagaaatttgtgacaaaggcctagaacaggcaatcaaggacaatgaagcgttaagtactggtgtaaacgtatacaaaggacaagtgacaaaccaaggattagcttcatcacatgatttagattttaaagagattaaggatgttattgaataa

SEQ ID NO: 413268 - DNA, 909 bp, Staphylococcus aureus; identical to SEQ ID NO: 412466

SEQ ID NO: 413269 - DNA, 429 bp, Staphylococcus aureus; identical to SEQ ID NO: 410368

SEQ ID NO: 413270 - DNA, 471 bp, Staphylococcus aureus; identical to SEQ ID NO: 407744

SEQ ID NO: 413271 - DNA, 777 bp, Staphylococcus aureus
atgcctagtctcgtgggctcggagatgtgtataagagacagtgttaaacaacgaggatatgatttagaacgtgggcaatcaagacaagtaacaaatgctaaacatgagcaaataagtcagtataaacaaaaaacagaatatcataagcaagaatatgaacgtgagagccaaaaaacagaccatataaagcaaaagaacgataaattaatgcaagagtaccaaaaatcgttaaatacgcttaaaaagcctataaatgttccgtatgagcaagaaactgaaaaagtaggtggtttatttagcaaagaaatacaagaaactggaaatgttgtaataagccaaaaagatttcaatgaatttcagaaacagataaaagctgctcaagatatttcggaagattacgagtatataaagtctggtagagccttagatgataaagataaggaaatacgagagaaagatgatttattaaataaagcagttgagcgtattgaaaacgcagacgataattttaaccaactttacgaaaatgcaaagccacttaaagagaatatagaaatagcgttaaagcttttaaaaatcttactaaaagagttagaacgagttttaggaagaaatacctttgcggaaagagttaataagttaacagaagatgaaccaaaactaaatggtttagcaggaaacttagataaaaaaatgaatccagaattatattcagaacaggaacagcaacaagaacaacaaaagaatcaaaaacgagatagaggtatgcacttatag

SEQ ID NO: 413272 - DNA, 774 bp, Staphylococcus aureus; identical to SEQ ID NO: 407554

SEQ ID NO: 413273 - DNA, 744 bp, Staphylococcus aureus
atgagaaaagtaactggctttgtattgtgtacatcacttattttaggaggctgttctttaatgcataaagatcaaacaaaagatattccaaagacggttagcgtcaaagattatgatggtcaatatattggtgaacataaaaaaagaaacgaagtatttctgaaaaaacataaaggtgaagcgataaaaaaatataaagactatgtgaaagacacctttggttatgattgtaaaatcaatttagttgatgcctatactaataaatctggatttagcgagaaaagtaaggtagatggtatctcagtggttggtactgtcaattatgacgttccttttcaactccaattgctttttgttgagtctggaaatggtataactatttcaacatttacacctggtcatataaatgaaacatcagcggccgtttcagccatgatgtacaaacgttatgaacatgaaattgaacaagctcgattaaaattcaaatcagaagttgagaaaaacggttactttgccatgaatgaaaaacttcaaaagaagcaagaattcaatggtgttactaaacaatttttgaatttcaacacagacagtatcgatgatctggataagttcaaaaaagaattcaaacctgttatgcacttaaaaggtgatgcattcaatcaacagttacaaaatttaattaataaatatcctgaaattaagaaaagcatgaaatctgactttattagtataggcatcaactaa

SEQ ID NO: 413274 - DNA, 192 bp, Staphylococcus aureus
atgagaaaagagattgaagcgcttattttctcagacgtaagtagctatgatatttacgtgaacactggtgtaaatcaaggattaattggtgacatcaaagatgattacctaactattgattctatgccttacattgatgctgagcgtttgtatcactttgctatggaacgtaaatcgttagtcactaactag

SEQ ID NO: 413275 - DNA, 240 bp, Staphylococcus aureus
atgcacaaagatttatatagctctagaaaagcggcgaaaaagaaccaagactttatggggagtttgattggtgtttcgggtcaacaatacggaaaaagagaacgcggagagattcctattaatttagatgaagcgatgattttttctaaggctctcgaaacacctatacaagaactatttccagaatatttttttattgagcgagttccaaaaatgcacaaaaacgaaataacatcttaa

SEQ ID NO: 413276 - DNA, 708 bp, Staphylococcus aureus
atgagttcattttcttcgaatttagaacgtctgatgaacaaaagagatatgagtgatagtgaattagcagaattagtagatgttaatagaacaacagtcacaagatggagaaagggaattagaagtccaaaactagataaattacctgaaatagctaatgtttttggagttaaacccttagatttaatacatgatatggatgattcgaaaattattgaagaaattcataacgtatcatctcaactcacacctccaagacaaagcaatgtactaaaatatgcgactaatcaattagaagagcaaaataatgacagtgataatctggtagatttcaattcttacattcaagaaaaatccgaagtggatatatatggttgtgcgtctgctggtattggtgaaagattatataacgagcctatttcaaaagaattcgtaagaggttatgtccccgcacatgatatagctttaaaagtaaatggagactcaatggagccgttatttaaaaatggacaaattatattcattgaaaaatctcacactatcaaagatggacaaataggcgtctttattataaatggagatgcttacgtaaagaaggtttatgtagaagataacagattaacgttggtttctttaaataaaaagtataaagatttacatttttatgataatgaaagtgtgaggttagttggaaaagttattttatag

SEQ ID NO: 413277 - DNA, 570 bp, Staphylococcus aureus
atgagtgagttaacggcaaaacaagcgcgttttgtgaatgagtatattagaacacttaatgttacacaaagtgccataaaagcaggctatagcgcaaatagtgcacatgtgacagggtgtaggttattgaagaaaccacatattaagcaatatatacaagaacaaaaagataagatcatagatgagaatgtattaaccgcaaaagagttactacatgtgcttaccaatgcggcagtcggtgacgaaacagaaacgaaagaagttgtagtcaagcgaggggaatataaagagaatccacaaagtggcaaagtacaattagtctataatgaacatgttgaactgatagaggtaccaattaagcctagtgatcgtttaaaagctcgtgatatgttgggtaaataccataagttgtttacagataagcatgatattaatgggaatgtgcctatattcattaatattggtgaatgggacggagatgatgaggaactagacaaaaccgtaaaagatgtatctaacgctaatcctaatcatactgtgattgtggatgatattccgttagaggattaa

SEQ ID NO: 413278 - DNA, 513 bp, Staphylococcus aureus
atgaaaaatgatattactgctatttcaattgctaattatcttattgaaaagtatgaagtgaataatctatatttacaaaaattactatattatttgcaaaataattatatgtataaaaatgatggaagccttctttttgaagagaaaatacaaaaatggaaattagggccagtgattccagatgtttatcatgcttttaaagaaaatggcacaagtaatattatagagccataccaacagtatgatattaaaatagataatggaagtttaaccattgaagaaaaaaatgatgaattgccagaaggtataaaaaaatttattaattctactatggttgatttacttaaatatgataaatttgaattagttaatctaactcataaacacccagaatgggctaaatatgaaaaagaaattttaaatggtagtaaaaatctagaatatgattataaatcattgtatgaatattttaaaaagaatcctaagaaattgttggtaagtattgatgaatga

SEQ ID NO: 413279 - DNA, 957 bp, Staphylococcus aureus
atgaatgatgaagaagttagaaaattagttatagaatacgataaaggaaatgctgaaaaaaaagaagaaatagaattgtttatagtaaggagattgatagatcaagtttcattttccagtgaagaagctatttttttaactttaatatggaaaaatgagataaacaaagagcaaaaaaaatatgatattattaccaaaagtgtttatagtataggagaaaaacaaattgactctgaattaattgatgcaaatttggaaaaactcgaaaaagcaataaataagggtggatttttaagtcaagaaagcgctaaaaaatattgcaataaattagttaaacatattgatttagcaaaaatccaaaaagactatatacaagagaatttaattcaattagagaataatatttcaattgcgaatgaaagagttaaagagattagtgatataaaaaacagtatatataccgaatttgtagcaattcttggtatattcgcttctattatatttggggtgtttggagggtttcaagaaatacaattgattggtaaaaatttaaatacaactccaatacctaaacttttaattttttcatctctagtcatgttaggcgttactttaataatctttttatgctttaactcaattagtaagcttactaatatgccattgagaagttgcaattgtgagataggtaaatgtaattgtagttttagaaaacgtcatccgaccatattttattcttcatgtatatacttatatgttctattagtaggttttgctttgaggctatacaaatatgatgattttaaatttaacgatttatataacggaatatgcgaaggatatgatattttaccgttactattattgatattaccgatatttattccttttgtagtatatgttagacgtaaaataaaagaataccactataaaaagaaaaaaagaaaaaagagctaa

SEQ ID NO: 413280 - DNA, 555 bp, Staphylococcus aureus
atgaataaaaaactattaacaaaaacattgatagcaagtgctttagttttaacaacagtaggttcaggttttcattcttcttcaaattataatggtattaataacgttgcaaaagcttctgaaataacagatagcgaattgtggaaaaatgtaagagacgctttaaaagacgcaaatatcattgataaaacagacaaagaaacgattaaagtaaaatataaattaaaaaacggtggagagagcgaaatttctgggactgcgaacttagataatcttagtaatactaataacagcaccgttagtcctgatagcgttaaccgtgtcgatattacaagagttaatccaaacggaaataaattagatgctaatgacgcttggaaaaaactaactcaaagccttaaagaaaagaatatcgttaaagacggcgatacagtaactattcacagtaaagactcaactgaccctaaaatctctggaaaagttggacaagattttaccgatcatcgtaattatatgttagacaagaaagacatagataaaataactataaactag

SEQ ID NO: 413281 - DNA, 726 bp, Staphylococcus aureus
atgagttacttcactgattttgtaaggggatttttagatttaggtgcaactgttattttaccggttgtcatattcttgcttggcctattctttaggcagaaaattggagcggcatttaggtctggtttaacaataggtgtggcttttgtagggattttcttagtcatcgatttattagttaaaaatttagggccagcagcacaagcgatggttaaaaatttaggcgtcagtctgaatgtgattgatgtaggttggccagcaacatcatctatcgcttgggcatcatctgtcgcagcatttattattccactcggaatcatagttaacgttgtattgctagtaactaaagtgacaaagacgatgaatgtagatatttggaatttttggcattatacgtttacagcagcaatggtttatgccgtatcaggcagtatttggcaagcgttattagcagcagttattttccaagttatctgtttgaaagtagcagattggacagcaccgatgatgagtgagttctttgatttaccaggtgtatcgattgctacaggaagtacaatttcttatgcaccaggtatttacttagttaaattgttacaaaaagtacccggtctgaataagttagatgctgatcctgaaacaattcaaaaacgttttggcgcatttggagaatctatctttgtcggcttaattttaggtttaggtattggtgtgttagcaggttaa

SEQ ID NO: 413282 - DNA, 501 bp, Staphylococcus aureus
atggctgcagtaatggtattaatgcctagaatggtaaaaatcttaatggaaggtttaatgccagtttcagagtctgcaagaacatggctaaacaaacgttttggcgaacgtgaaatttatattggattggatgcggctgtagcattaggtcatccagcggttatttcgacagccttaattttagtacctatcactgttttattagccgttattttaccaggaaaccaagtactaccttttggtgacttagcaactataccatttgttgtcgcgtttattgttggtgcagcaagaggaaacattattcattctgtcattgtgggtacgattatgattgcaatttcactatatattgcaacagacgtagcacccattttcacagatatggcgaaaggtacgaatgtacaaatgccaaaaggttcatctgaaatttcaagtattgatcaaggtggtaatatcgttaactatcttatctttaaactatttagtctattcaattaa

SEQ ID NO: 413283 - DNA, 1044 bp, Staphylococcus aureus
gtgaaagctttgaaattatatggcgtggaagatttacggtatgaggataatgataagccagtcattgaaagtgcgaatgacgttattgttaaagtgcgcgcaacgggtatatgtggttcagtcacgtcacgatacaaaaaaatgggcccatacattcaaggtatgccatttggtcatgaattttcaggtgttgtagatgccattggaagtgatgttacgcatgttaaggtcggcgacaaagtgacaggttgtccagccataccttgttatcaatgtgagtactgtttgaaaggtgaatatgcacgatgtgaaaagttgttcgtcattggctcatatgaacctggatcgttcgcggaatatgtcaaattgccagcgcaaaatgttttaaaggttccagacaatgttgattacattgaagcagcaatggttgagccatcagccgttgttgcgcatggattttataaatcgaatatacaacctggtatgactgttgcagtaatggggtgtggcagtataggattgttagctattcaatgggcacgaatatttggtgctgcacatatcatcgctatagatatagatgcgcataaactagatattgctacatcattgggcgcacatcaaacaatcaattcaaaagaagaagatcttgagaaattcatcgaaaatcattacgccaatcaaatcgatttagctatagaatcatcaggtgctaaagttacgattggtcaaatattgacgctacctaaaaaaggtggcgaggtggtattactcggaataccatatgatgatattgagattgatcgcgttcattttgaaaaaattctgcgtaacgagttgacagtatgtggctcttggaactgtttgtccagtgattttccgggcaaagagtggacggcaaccttacattatatgaagacgaaagatattaatgtaaagcctattatttctcattttttaccgttagaaaaaggcccagagacatttgataaattagttaacaagaaagaacgatttgataaagtcatgtttacgatttattag

SEQ ID NO: 413284 - DNA, 312 bp, Staphylococcus aureus
atggatcaatgggtatctaaatacaatagtgtaggcgatgttagaggtaaaggtctgagcattggtattgatattgtttccgacaaaaaactcaaaacacgtgatgccagtgcggcacttaaaatttgtaattactgctttgagcatggcgtagttattatagctgtagcaggaaatgtgttgcgattccaaccgccattggtaataacatatgagcaattagacacggcgttaaacactatagaagatgcactgactgctttggaagcaggtaacttagatcaatatgacatatctggacaaggttggtaa

SEQ ID NO: 413285 - DNA, 384 bp, Staphylococcus aureus
atgaaagaaatcagtgactttgttaaaaagaaaaatatccctaaagatgaaacggtatatatcggtggcgaccttaatgttaataaaggcactccagagttcaaagatatgcttaaaaacttgaatgtaaatgatgttctatatgcaggtcataatagcacatgggaccctcaatcaaattcaattgcgaaatataattaccctaatggtaaaccagaacatttagactatatatttacagataaagatcataaacaaccaaaacaattagtcaatgaagttgtgactgaaaaacctaagccatgggatgtatatgcgttcccatattactacgtttacaatgatttttcagatcattatccaatcaaagcctatagtaaatag

SEQ ID NO: 413286 - DNA, 153 bp, Staphylococcus aureus; identical to SEQ ID NO: 411673

SEQ ID NO: 413287 - DNA, 516 bp, Staphylococcus aureus
atgacaggtaaaacacatgcttcatgtggcatgctcgttggagcgctaacaacacaatattttcaaacggatattttttcgtcggttacggttatcattctagcaactctagctagcttattacccgatatatgtcacactcaaagtaagattggcagaaggtttaaggtaattagtttttttgtgagattgatctttggacatcgaacctttacgcattcaatattatttatcgcaatcatagcatttttattgcaaattattcagacgcctaattattatatggcagcaattataattgggttagtgtcacatgttatactagatatgataacaccaagaggcgtgaaattattttatccgttaccgtttaatgtgaagacaccgattcaatttaaaacaggtggacttgtagacttatctttagctacagcgttaatggtcggaacagtttatgttttatttcagcctttcatcaatgatataataagcaactggaatactaagtttttatag

SEQ ID NO: 413288 - DNA, 261 bp, Staphylococcus aureus
atggcaatgacagtaaagaaagataataatgaagtgcgtattcaatggagagttgctgatatcaaaattcctacaagtgaaattaaaaatattacacaagaccaagatattcatgcagttcctaaattagacagcaaagatgtatctagaatcggctcaacgtttggtaaaacgaatcgcgttattatcgatactgaagaccacgaatacattatttatactcaaaatgatcaaaaagtttacaatgaattaactaaataa

SEQ ID NO: 413289 - DNA, 1032 bp, Staphylococcus aureus
atggctataaaagaaataagtagccaatctgccatagatcataaaagaaaaagacgcacaacactcacgtatatagtgagtttgtgctttctttttatttgtatatatttaaatatggcgattggttcttcgaaaattaattttagcgatatcattcactatgttactggtcatacagatacgaaagcaacgtttttattgcataatgtacgtatgccaaggatgattgcagggttatttattggcggtgcattagcggtatctggtttgttaatgcaagcaatgacacgcaatccgctagcatcacctaaaatttttggtgtcagttctggtgcatcgtttttcattgtatttgtgacgattatcattccatcattagaatattatgcattatatttaggtgtgataggtgcatttataggtggtttaactgtttatacactttcaggtgctacgaaaggtatgacacccattaaattagcattggctggtatggccatccatttgttttttagtagtatgactgaaggtattattattttgaatgagaattcaaacgaacaagtgatgttttggcttgtcggttcattatccagtatgaagtgggatgaaattttaaccattttaccatggattattggtgctttaattgtaacgatttttattggacgtcaactaacgattatggaactaggcgatgacattgctaagggattgggtcaaaatataaataaagttagaattatcattgggctattagtcattattcttacaggtatgtcggtgtcagtggcaggaccaattggatttgttggcttaatcgtaccgcatatagtcaaacgctatgtgagtaagaattatttagtcatgattccattaacatttattataggtgcagatttgttactactatcagatgtattaagtcgtttaatcacttatccttacgaatcacctgtaggtattgtgacatcattcgtaggtgcactttacttcttatttataacgattaaaggggtgaaaagaatatga

SEQ ID NO: 413290 - DNA, 984 bp, Staphylococcus aureus
atgagaggtctaaaaacttttagtatattgggattaatagttgccttacttttagttgcagcttgtggtaatacggataattcaagtaaaaaagaatcatcaactaaagatactatttcggtaaaagatgaaaatggtacagtaaaagtacctaaagatgcaaaacgtatcgttgtattagagtactcatttgcagatgcattagcagcattagacgttaaaccagttggtattgctgatgatggtaagaaaaaacgtatcattaaaccagttagagaaaaaattggggattatacttctgtaggtacacgtaaacagccaaacttagaggaaattagtaaattaaaaccggatttaattatcgctgatagcagtagacataaaggtattaataaagaattaaacaaaattgcaccaacattatcattaaagagttttgatggagactacaaacaaaatattaattcgttcaaaacaattgctaaagctttaaataaagaaaaagaaggcgaaaaacgtcttgctgagcatgataaattaatcaataagtataaagatgaaattaaatttgatagaaatcaaaaagtgcttccagcagtagttgctaaagctggtttattagcacatccaaactattcatatgttggacaatttttaaacgaactaggatttaaaaatgcattaagtgacgatgtaacaaaaggtttaagtaaatatttgaaaggaccttacttacaattagacactgaacatttagctgatttaaatccagagcgtatgatcattatgacagatcatgctaaaaaagattctgctgaattcaagaagttacaagaagatgcaacatggaaaaagttgaatgcagttaaaaataatcgcgtggatattgttgaccgtgatgtttgggcaagatctcgtggcttaatttcttctgaagaaatggctaaagaacttgttgaattatcaaaaaaagaacaaaagtaa

SEQ ID NO: 413291 - DNA, 1758 bp, Staphylococcus aureus
atggtatatcttgaatgggcaaaggcagatagaaatattcaatatcgtgtaattaacgccattattaaagaacgtatttaccccgagcaaacatttatttcgcaaaaaggatctttaattgaaattcagtatcatatgcatgtgttgactattgaagttgttagaaaaagtgcattagaacgctatgagtttacaggtgatattacttatttaaataaaggtgaaacgtcattaattataactttagaaggtttgttagatgtgttgaatcatgactttgatatccctatttcagagcgactacgcgaagagttaatacacagtcgagatagtttagttgaaacatataagcaaatgtctcacagacaaacattaataagtcaaagttttaaattttcaagattaccacaagatattaactttttttcatggttacaacatgtaaaagatagtgataagacagatgatttaacttattctgagagcttggtaccagaggggcatccaacacaccctttaaccaaaacgaaattgcccttaactatggaagaagtacgagcatatgcacctgagtttgaaaaagaaatccctttgcaaattatgatgattgaaaaagatcatgttgtgtgcacagctatggatggtaatgatcaatttattattgatgaaataattcccgaatactacaatcagattcgtgtgtttttaaagagtttaggtttgaaaagtgaagactatagagcgattttagtacatccttggcaatatgatcatacgatagggaaatattttgaagcatggattgctaaaaaaatattaattccaacgccgtttacaatactttcaaaagcaactttatcatttaggacgatgtctttaattgataaaccataccatgttaagttgcccgtcgatgcacaagcaacaagtgccgttagaacagtctcaactgtgactactgtagatggaccaaagttaagttatgctttacaaaacatgttgaatcaatatccaggatttaaagttgctatggaaccgttcggtgaatatgcaaatgttgataaagatagggcacgtcagcttgcttgtattataagacaaaagcctgaaattgatggaaaaggtgcaacagtagttagtgcaagtctagttaataaaaatccaatagatcaaaaagttatcgtggatagttacttagagtggttaaatcaaggaattactaaagaaagtattacgacatttattgaacgatacgctcaagcattaatcccgcctttaattgcttttattcaaaattatggaattgcattagaagcacacatgcaaaatacagtagtgaacttggggccacattttgacattcaatttttagtgagagatttaggtggttctagaattgatttagaaacattacaacatcgtgtatcagatattaaaattacaaatgatagtttaatagctgattctatagatgcagtgattgcaaaattccaacatgctgttattcaaaatcaaatggcagaattaatccatcattttaatcagtatgattgtgttgaagaaaccgaattatttaacatagtacagcaagtagtagcgcatgctattaacccaacactaccacatgcaaatgagttaaaagatattttgtttggaccaacaattactgtcaaagcgttgttaaatatgagaatggaaaataaagtaaagcaatatttaaatattgagttagataatccgataaaaaaagaggtgtag

SEQ ID NO: 413292 - DNA, 1194 bp, Staphylococcus aureus
atgacaaaatatttttttagcagttcttttctactatttctaggtaattggattggacaaatagggctaaattggtttgtacttaccacttatcataacgcagtttatctggggattgtcaatttttgcagacttgtaccaatattattactaagtgtgtgggcaggggcaattgccgataaatatgataaagggcgattgctgagaattacaatttcatcatcatttttagtaactgcaattttatgtgtgctcacgtatagtttcactgcaattccaattagcgtcattattatatatgcgacattaagagggattttaagtgcggttgaaacacctttaagacaagcaatcttaccagatttatcagataaaatatctactacacaagctgtatcatttcattcattcatcattaatatttgtcgttcaatagggcctgccattgctggtgtcatattagcagtctatcatgcgccaacaacatttcttgcacaggcaatttgttattttatcgcagctttattatgcttaccattacattttaaagtaactaaaatacctgaagatgcaacaagatacatgccgttaaaagttattatagattacttcaaattacatatggaaggtcgacaaatatttataacatcattattgattatggcgacaggtttttcatatacgacacttttaccagttttgacaaacaaagtatttccggggaaatctgaaatatttggtatcgctatgacgatgtgtgccattggtggtattattgcaacgctagttttacctaaagtacttaaatatattggtatggtaaatatgtattatttaagttcacttttatttggcattgctttgttaggtgtggtatttcacaatattgtcatcatgttcatttgtattacattgattgggttatttagtcaatgggcacgtacgacaaatcgcgtttattttcaaaataatgttaaagattatgaacgtggtaaagtactgagtattattatgatggatagaggtatgattccattgggaagtctgttaatgagtatatgtgcagatgtgtttggcattgttagaactttttcaataatgggaataagtactatatgcattacaatggtattctattttataaatagaaagttgaagttaaagttggaggaaagtaatcatggtatatcttga

SEQ ID NO: 413293 - DNA, 1977 bp, Staphylococcus aureus
atgaacttgaacttaatttttaaagaacagacattaaaatttaacaaagaagaacaagaaacatatttatttttacaacaacataatagcgattgggctaatatttttaaagagatgattttacaaggaagagataaagtcactcagagattagtcacatcaatgcatcgcgaaaacttagttaaagcgcgcactcaaagtaagaaaatattgagtcgtgatttgattatgttagatatctcaacgactcatatactagaaatccagttcccacaagctaagcaaacattatatgctcctatcactggagaacacgcctttgatcgaattgatgttgaaggccctttctacattaaaaatgacattacaaatacgattacacgagtacaccatccaaatgaaattcttgagtgtattttaattgaagcaccagatttaaaaaatgctgctagtgatcaatttcagcaagatttaataaacagtgcaactaatatgacatttgcaattagctatcaagcactgtcaatgcaacatgattctgcacctttatttaatattatcgaaaatagcgaagatagttacttgcgttcagagcaagccgttattgaaggtcatccgctacatcctggggctaaattacgtaaaggtttaaatgcattacaaacattcctatattcttcagaatttaatcaacctattaagttgaaaatagtactgattcacagtaaattaagtcgtactatgtcactgtctaaagattatgatacaactgttcatcagctatttccggacttaattaaacaattagaaaatgaatttacgccaaactttaactttaatgattatcacattatgattgtacatccatggcaattagatgacgtattacattctgattatcaagcagaagtagataaagaattaatcattgaagcaaaacatacgttggattattatgccggtttatctttcagaacattagttcctaaatacccagctatgtcgccacacatcaaattgtcgacaaacgttcatattacaggtgaaattcgtacattatcagaacaaacgacgcacaatggtccactaatgacacgtattttaaatgatattttggagaaagatgtcatatttaagtcctatgcatcaacaattattgatgaagttgctggtattcatttttataatgagcaagacgaagtagactatcaaactgaacgaagtgaacaattaggtacattatttagaaaaaacatataccaaatgattccacaagaagtcacaccaatgattccttcaagcttagttgcaacctacccatttaacaatgaatcacctatcgtgacattgattaaacgttatcaatcagctgcatcattgtctgattttgaatcatcggcgaaatcgtggattgaaacttatagtaaagcattgcttggtctcgtaatcccactagttactaaatatggcattgcattagaggctcacttgcaaaatgctattgcaacatttcggaaagatggtctattggacacgatgtatattagagactttgaaggtttaagaattgataaagcacaactaaatgaaatgggatacagtacatctcatttccatgaaaaatcaagaattcttactgattcaaaaacgtctgtgtttaacaaagccttttattctaccgttcaaaaccatttaggcgaattaattcttacaatctctaaagcatcaaatgattcaaacttagaaagacatatgtggtatatcgttcgtgatgtactagataacatttttgatcaacttgtactttcgacacacaaatctaatcaagtaaatgagaatcgcataaatgaaattaaagataccatgttcgcgccatttatagattataagtgtgttacaacaatgcgtcttgaagatgaggcacatcattatacttatattaaagttaataatcctttgtatcgagaaaataattaa

SEQ ID NO: 413294 - DNA, 510 bp, Staphylococcus aureus
atgactgtagataacaataaagcaaaacaagcatacgacaatcaaactggtgttaacgaaaaagaaagagaagagcgtcaaaaacaacaagaacaaaatcaagagcctcaattcaaaaataaattaactttctctgatgaagttgttgaaaaaattgctggtatcgctgcacgtgaagttaaaggtatcttagacatgaaaggtggcttaactgatacattcactaatgcattctcaagtggaaataacgttactcaaggtgtatctgttgaagttggtgaaaaacaagctgctgtagacttaaaagtaattttagaatatggtgaatcagcaccaaaaatcttccgtaaagtaactgaattagttaaagaacaagttaaatatattactggtttagatgttgttgaagttaacatgcaagttgatgatgtaatgactcaaaaagaatggaaacaaaaacacgaaaaaaataatgaaaacaataaccaagaaagacaaggtttacaataa

SEQ ID NO: 413295 - DNA, 1008 bp, Staphylococcus aureus
atgaaaatgataggatttgaaaagccctttaaattggaagaaggaaatttatttaaagtatacgaacaaagaaagccaacgccagaaaacgatgatatcttagtcaaagtaaatagtattagtgtaaatcctgtagatacaaaacaacgtcaaatgaaagtcactcaagcacctcgtgtacttgggtttgatgctattggtactgttgaagctatcggaccagacgttacattatttagtccgggtgacgttgtattttatgctggatcgccaaatagacaaggatcaaatgcgacatatcaattggtgtcagaagctatagttgcaaaggcaccacacaacataagtgctaatgaagcggttagtctaccgctaactggtattacggcatatgaaacgttttttgatacatttaaaatttcacataatccttctgaaaatgtaggtaaatccgtgttaatcattaatggtgccggtggtgtaggcagtatagccactcaaattgctaaacggtatggtttaactgtcattacaacagcatcacgacaagaaacaacagagtggtgtgaaaagatgggcgcagatatcgtattgaatcataaagaggatttagtgcgtcaatttaaagaaaaagaaattccattagtagattatatattttgcacttataatacagacttgtattacaatactatgattgaactgataaaaccattagggcatattacgactatcgtagcttttaatgaagatcaagatttaaatgcattaaaattaaaaagtataacatttacacatgaatttatgtttgcgcgtccaattcatcgaacgcctgatatgattaaacaacatgagtatttagaagatattacgaaaaatatagaattagggcattaccaaccaacaacgacacaagtttttgaaggtttatcacctgaaaacttatatcaagcacatcaattgttggaaaaacaatcaatgattgggaaattagtaattaatatatag

SEQ ID NO: 413296 - DNA, 1005 bp, Staphylococcus aureus
atgatgcaaaataaacaaattctttttaacaaaataccagaaggcatgcctcaagaggatacattcaaaattgaagagattgacacgcctaaacttgagagcgatggtgtacttgtacaaacgctgtatatttcagtggatccatatatgagaggacgtatgactaaggcagattcgtatgtacagccttttgaaattggtaaaccgattgttagccatgtcgttgcaaaagtaattgattcgacactcgcagattataaaaaaggagatgtcgttgtaggtatgttgccttggcgaatcattaatcatgtccaagcggatcaaattactaaagttccaacgacagatgtaccacttgatttatatttaagtgttttaggaatgccaggacaaacagcatatcatggtctgcttgatattggacaacctaaagccggtgatactgttgtggtttcagctgcatctggtgctgtaggttcagttgtaggtcaaattgctaagattaaaggttgccgtgtagtaggtattgcgggtggcgacaaaaaagtaaattatttaacagagacactgggctttgacgctggtattgattataagaaagaggattttgcagaagcgttagcacaagcagtaccagatggtattgatgtttattttgaaaatgttggtggtacagttggcgatgaagtatttaagcatttaaatcgttttgcacgtgtaccagtatgcggcgcaatttcgtcatataatcatcctgaagcagatatcggaccacgtattcaaggtacgcttattaagaagcaagtaatgatgagaggcttcttagtaagtgaattcgctaatgcttttaaagaagctagtgaacagctcgcaacatgggttcaagaaggtaaaattcagtcacaagtaaccattgaagatggttttgaaaatgcgccacatgcatttaaaaatttatttactggcgataactttggtaaacaagttattaaagtaacggaataa

SEQ ID NO: 413297 - DNA, 933 bp, Staphylococcus aureus
atgattttaactttaacattaaatccatccgttgatatttcatatccattaacagcattgaaattagatgatgttaatcgtgttcaagaagtaagtaaaacagctggtggtaaaggtttaaatgtaacaagagtacttgcgcaagtaggcgagccagtccttgcgagtggttttattggcggtgaattaggtcaatttattgctaaaaaattagatcatgccgacatcaagcatgcattttataacattaagggtgaaacacgaaactgcattgcaattttacatgaagggcaacaaacagaaattttagagcagggaccggagattgataatcaagaggctgcaggatttattaaacattttgaacaattattagaaaaagttgaagcagttgctatttcaggtagcttacctaaaggattaaatcaagattattatgcacaaattattgaacgatgccaaaacaaaggtgtgcctgtgatattggactgctcgggtgcaactttgcaaacagttttggaaaatccatacaaaccaacagtcattaaaccaaacatttctgaactatatcaattgcttaaccagccacttgatgaaagtttagaaagtttgaaacaggcagtgtcacaacccttattcgaagggattgagtggattattgtgtctttaggtgcacaaggtgcattcgctaagcacaatcatacattctatagagtgaatattccgacaataaacgtattaaatccggttggttcaggtgattctacagttgctggaattacttcagcaattctcaatcatgaaaacgaccacgatttactaaaaaaagctaatactttaggcatgctgaatgcgcaagaagcacaaacaggatatgtcaatttaaataattatgatgaattattcaatcaaattgaagttttagaggtgtaa

SEQ ID NO: 413298 - DNA, 516 bp, Staphylococcus aureus
atgaagattgcattaggatgcgaccatattgttacagatacaaaaatgcgtgtatctgaatttttaaaatcaaaaggacatgaagtcattgacgtaggaacatacgattttacaagaacacattatccaatttttggtaaaaaagttggcgaacaagttgttagcggtaatgcagacttaggtgtttgtatttgtggaacaggtgttggtattaacaatgctgtaaataaagtacctggcgttcgttcagcactagtacgtgatatgacatcagcgttatatgctaaagaagaattaaatgcgaacgttattggctttggtggacgtattataggtgagttattaatgtgcgatattatcgatgcatttattaacgctgaatataaagcaactgaagagaacaaaaaattaatcgctaaaattaaacatttagaaacaagcaatgcagatcaagctgatccacatttctttgatgaattcttagaaaaatgggacagaggcgaataccacgattaa

SEQ ID NO: 413299 - DNA, 741 bp, Staphylococcus aureus
gtgtttattttgagaaatgatttagagacattaaaacatattatagatagttcgaatcgtattacatttttcacaggtgctggtgtatctgtcgcaagtggcgttccagatttccgttcaatgggtggcttatttgatgaaatttcaaaagatggactttcgccagaatacttgttaagccgtgattatttagaagatgatcctgaaggttttatcaatttctgccataagcgtttactatttgtcgatacgaagcctaatatcgttcatgattggattgcaaaattagaacgtaatcaacaatctttaggtgtcatcacgcaaaatatcgatggtttgcactcagacgctggaagtcaacatgttgatgaattacatggcacgttaaatcgtttttattgtaatgcatgtcataaatcttatacgaagtcagatgttattgatagaactttgaaacattgtgataattgtggtggtgccattcgaccggacatcgtattatacggtgaaatgttagatcaacctaccatcataagggcattaaataaaattgaacatgctgacacccttgttgtactaggttcatcactcgttgtacaacctgccgcaggattaatatcacattttaaaggcgacaatttaattattatcaataaagatcgaacaccttatgatagcgacgctactttggtcatacatgacgacatggtttccgttgtaaaatcattaatgacagagtaa

SEQ ID NO: 413300 - DNA, 417 bp, Staphylococcus aureus
atgaaaactaaagaagtcgtagcgctcatgaatatatctcaagacactttaagatattatgaaaaggttggtgtgattccacccgttaatcgagatgaaaatggatatagaatatataatgatagtgatttaaattggatttatttagtgaaaaatttgcgaaatgcaggcgtcagtattgaatcgcttatcgaattttgtagattagcgcagcttcctaaaaataaaaatattcaaacacagcaaaagcaaattttaaataagcaactcgaagaattaaatgaaaacttaaagacaattcatgatgcgagagatttactaaaatataaaattgataattatgataatcatattgctaaaatcaatgctagtgataatcatgatgacaatgttgaacgtctttgggagagaaagtaa

SEQ ID NO: 413301 - DNA, 855 bp, Staphylococcus aureus
atgaataaaacaaactttggggattatttaaataaaagtaagagcaggaaaatatataagatttttgatcaaaatttgaagcgagagtttagttattggcagtttaggaaacttttcaaatcttatacaaggcagtctgatgtacatgagttaaaagtgtgtactcaaaatgatgatactatggagcaaatatggatagataaagcaaatcaatttggagtggcagtgacttggaaagataatagtattatcggatttgttatgcgtccgttaatcaattatgatgcgattaagaatgaaacgactttaaaatacgcagtgccgacaacagattgctatgaggttttttggggtggagataatgaattatataattatcactatttatacctacatcaaaggtatgctattgatttagttattaaagaaaatcataaaacatataagaatcaaggaaaagtaaatactgattatttttgttttggaaaagatatcattgcgccagcaaatggtacagttgaaaaagtagtgaatggggttcaagacaacagtattggaagtacgaatgaatcacagtttttaggaaattatattgtaattaagcacgcagaaaatgagtatagcttaatagctcatttacaacaatattcaatcattgtgaatgaggggcaaaatgttaaatatggtgacttccttgggaaggttgggaattctggcaattctactgaacctcatatacatttccaagtaatgaatgataagaatattgaagcatgtacgtctttgaaaattcgatttttaaataatctagaacttatcaaaggggatgtggtctgcggattacaaggtgaatga

SEQ ID NO: 413302 - DNA, 426 bp, Staphylococcus aureus
atgaaactaaaatcatttgttactgccactttagcattgggattattatcaacagtaggtgcagctttaccgagtcatgaagcatctgcagatagtaataacggttataaggaattgacaatggatggaaaacacactgtgccttacacgatctcagtagatggtattactgcattacatcgaacttactttgtttttccagaaaataaaaaggtactttatcaagaaattgacagtaaagtaaaaaatgaattagcttcacaacgtggtgttacaacagaaaaaattaataatgcacaaacagcaacgtatacacttactttgaatgatggtaataaaaaagtagtgaatctaaagaaaaatgacgacgctaaaaattcaattgatccaagtacaatcaaacaaatacaaattgtagttaaataa

SEQ ID NO: 413303 - DNA, 1017 bp, Staphylococcus aureus; identical to SEQ ID NO: 408069

SEQ ID NO: 413304 - DNA, 648 bp, Staphylococcus aureus; identical to SEQ ID NO: 409262

SEQ ID NO: 413305 - DNA, 438 bp, Staphylococcus aureus
atgcgtcaaacatttatggcaaatgaatcaaacattgagcgcaaatggtatgttatcgatgctgaaggccaaacattaggtcgtttatcatcagaagtagcatctatcttacgcggtaaaaataaagtaacttacacaccacacgttgatactggtgattatgtaatcgttattaatgcatcaaaaatcgaatttactggtaacaaagaaactgacaaagtttactaccgtcactcaaatcatccaggtggtatcaaatcaatcactgctggtgaattaagaagaactaacccagaacgtttaattgaaaactcaattaaaggtatgttaccaagcactcgtttaggcgaaaaacaaggtaaaaaattatttgtatatggtggcgctgaacatccacacgctgcacaacaaccagaaaactacgaattacgtggttaa

SEQ ID NO: 413306 - DNA, 804 bp, Staphylococcus aureus
atgcgtatattagtagaaattgcgtatcaaggaaataattttctaggctttcaaattcaacagaatggacgtacggtacagcaacaatttgaaaagctattacaacgcatgcataaaagacatgtgagaatccatccttcaagtaggactgatagaggtgtacatgcgatacagcagtactttcatttcgacacagagctgaatatacctatgtcacaatggcaatatgcaatgaaccgaacgttaccagatgatatttatgtcaataatgtagttacagtcgatgacgattttcattgtcgttacgattgtgtcggtaaacgctatcgatataaagtatatcaagcacaacaccgcgatccatttcaaagtggtttgaaaacatttattcctgaaacgttggatttagacaaaatgaacagagcggcgcaacaattcataggtacacatgattttacggggttttgttcgcaaaaaactgaagtagaaagcaaagttagaacattataccaaagtgaaatcgtaaagacagatgatggctttgattatattgtcactggatctggatttttatataacatggtgcgtgtcttagttgcatttttaatagaagttggaaaagggcgacatgaaatttctgatgtgccgaagctacttgaatcaaagaatcgtaagaatgttcctttcactgcaccggctgaaggactatatttagagaagatttatttagatgaaaatgagttattaaaagactttggcaacgatataaaaatacatcgcaaaaaatcattacaaaatgactga

SEQ ID NO: 413307 - DNA, 861 bp, Staphylococcus aureus
atgactatacggtttgacaatgtaagttatacctatcaaaaagggacaccatatcagcatcaagctattcatgatgttaatacagaatttgaacaaggtaaatattacgccatcgttggacaaacgggtagtggtaaatcaacgttgatacaaaatattaatgcgctgttaaagccgactactgggacagttacagttgatgacattactattacacataagaccaaagataaatatattagacctgtaagaaaaagaattggaatggtatttcaatttcccgaatctcaattatttgaggacacagtagagcgtgaaatgatatttggacctaaaaactttaaaatgaatttagatgaagccaaaaactatgcccatcgtctgttgatggatttaggcttttcaagagatgtaatgtcacaatcaccatttcaaatgtcaggtggacaaatgcgtaaaatagcgattgtatcgatattggcaatgaatcctgatattatcgtggttgatgaacctacagcaggacttgatccacaaagtaaacgacaagtaatgagattactaaagtcactacaaacagatgaaaataaggcaattatcctaatttcacatgatatgaatgaagtcgcgcgttatgcagatgaagtcatcgttatgaaagaaggtagtatagtgtcgcaaacatcaccaaaagagctcttcaaagataaaaaaaaattggcggattggcatattggtttgccagaaattgttcagttacaatatgactttgaacaaaaatatcaaacaagattaaaagatattgccttaactgaagaagcatttgtaagcttgtataaggagtggcaacatgaaaaataa

SEQ ID NO: 413308 - DNA, 945 bp, Staphylococcus aureus
atgatagaaatcgaaaaacctagaattgagacaattgaaattagtgaagatgctaaattcggtaagttcgttgttgaaccactagaacgtggctacggtactacactaggaaactccttacgtcgtatcctactatcttcattaccaggtgcagccgttaagtatattgaaattgagggagttttacatgaattctcagcagtagacaatgtagttgaagatgtttctacaattattatgaacattaaacaattagcattgaaaatttactctgaagaagataaaactttagaaattgatgtacgtgatgaaggcgaagtaacagcaagcgacattacacatgatagtgatgttgaaattttaaacccagagcttaaaattgcaacagtatctaaaggtggtcacttaaaaattcgtctagttgctaacaagggtagaggttacgcattagcagaacaaaataatactagtgatttaccaattggtgtaatccctgttgattcattgtattcacctgttgaacgtgtgaactatactgttgaaaatacacgtgtaggtcaaagcagtgattttgataaattaacattggatgtttggactaatggttcaatcacaccacaagaatcagtttcattagcagcaaaaataatgactgaacacttgaatatcttcgttggtcttactgatgaagcgcaaaacgctgaaatcatgattgaaaaagaagaagatcaaaaagaaaaagtattagaaatgtctattgaagaattagacttatctgtacgttcatataactgcttaaaacgcgcaggaatcaattctgttcaagagttagctgacaaatctgaagctgacatgatgaaagtgcgtaatttaggtcgtaaatctttagaagaagttaaatacaaattagaagatttaggattaggattaagaaaagaagattga

SEQ ID NO: 413309 - DNA, 390 bp, Staphylococcus aureus; identical to SEQ ID NO: 406228

SEQ ID NO: 413310 - DNA, 366 bp, Staphylococcus aureus; identical to SEQ ID NO: 406229

SEQ ID NO: 413311 - DNA, 648 bp, Staphylococcus aureus; identical to SEQ ID NO: 406231

SEQ ID NO: 413312 - DNA, 537 bp, Staphylococcus aureus
atgagtcgtgttggtaagaaaattattgacatccctagtgacgtaacagtaacttttgatggaaatcatgtaactgttaaaggtcctaaaggtgaattatcaagaactttaaatgaaagaatgacattcaaacaagaagaaaacacaattgaagttgtaagaccatctgattctaaagaagatagaacaaaccatggtacaactcgtgctttattaaacaatatggtacaaggtgtttctcaaggatacgtaaaagtacttgaacttgttggtgtaggttaccgtgctcaaatgcaaggtaaagacttaatccttaacgttggttattctcacccagtagaaattaaagctgaagaaaacattactttctcagttgagaaaaacacagtcgttaaagttgaaggtatttcaaaagaacaagttggagcattagcatctaacatccgttcagtaagacctcaagagccttacaaaggtaaaggtattcgttaccaaggtgaatacgttcgccgtaaagaaggtaaaactggtaaataa

SEQ ID NO: 413313 - DNA, 210 bp, Staphylococcus aureus; identical to SEQ ID NO: 406244

SEQ ID NO: 413314 - DNA, 654 bp, Staphylococcus aureus
gtgggtcaaaaaattaatccaatcggacttcgtgttggtattatccgtgattgggaagctaaatggtatgctgaaaaagacttcgcttcacttttacacgaagatttaaaaatccgtaaatttattgataatgaattaaaagaagcatcagtttctcacgtagagattgaacgtgctgcaaaccgtatcaacattgcaattcatactggtaaacctggtatggtaattggtaaaggcggttcagaaatcgaaaaattacgcaacaaattaaatgcgttaactgataaaaaagtacacatcaacgtaattgaaatcaaaaaagttgatcttgacgctcgtttagtagctgaaaacatcgcacgtcaattagaaaaccgtgcttcattccgtcgtgtacaaaaacaagcaatcactagagctatgaaacttggtgctaaaggtatcaaaactcaagtatctggtcgtttaggcggagctgacatcgctcgtgctgaacaatattcagaaggaactgttccacttcatacgttacgtgctgacatcgattatgcacacgctgaagctgacactacttacggtaaattaggcgttaaagtatggatctatcgtggagaagttcttcctactaagaacactagtggaggaggaaaataa

SEQ ID NO: 413315 - DNA, 663 bp, Staphylococcus aureus; identical to SEQ ID NO: 406252

SEQ ID NO: 413316 - DNA, 309 bp, Staphylococcus aureus
atggcaaaacaaaaaatcagaatcagattaaaagcttatgatcaccgcgtgattgatcaatcagcagagaagattgtagaaacagcgaaacgttctggtgcagatgtttctggaccaattccgttaccaactgagaaatcagtttacacaatcatccgtgccgtgcataagtataaagattcacgtgaacaattcgaacaacgtacacacaaacgtttaatcgatattgtaaacccaacaccaaaaacagttgacgctttaatgggcttaaacttaccatctggtgtagacatcgaaatcaaattataa

SEQ ID NO: 413317 - DNA, 888 bp, Staphylococcus aureus
atgagcatagttcagttatatgatattacacaaataaaatcgttcattgaacattcgaattatgaatcagcatcatacttatataaacttcctcaacagtacaatgaaatagatgtattaataaccgatgcgattgaatcacctggtgtattttcgattaaagaaaacgattcaatcaaagcaatcatattgtcttttgcatacgataaaaataaattcaaagtcataggcccattcgtggctgacaattatgtattatctgtcgatacgtttgaaacgctatttaaagcaatgacttcgaaccaacctgacgatgccgtctttaacttttcttttgaagaaggcattcaacaatacaaaccattaatgaaagttattcaagcaagttataacttcactgactattacatagaagcccgtacaagattagaagaagatatgcaccaaccaaatatcattccttatcacaaagggttttatcgtgctttcagcaaattacacacaactacatttaaatatcaggcacagtcaccgcaagatatcattgatagtttagacgaccatcatcatttgtttttatttgttagcgaaggtttacttaaaggttatttataccttgaaattgattcacaacagtcaatcgccgagattaaatacttcagttctcatgtagattaccgtttgaaaggtatcgctttcgagttgcttgcgtatgcattgcaatatgcttttgataattttgatattagaaaagtttattttaaaattcgtaataaaaataataaactcatcgaacgatttaatggtctaggtttccatatcaactatgagtacattaaattcaaattcgaatcacgtaacgtaaaagatcaaacaatccctgaataa

SEQ ID NO: 413318 - DNA, 864 bp, Staphylococcus aureus
ttgcaatttcttgatttcttaatcgcacttttacctgctttattctggggaagtgtcgttcttattaatgtgttcgtcggcggtggaccttacaaccaaattcgtggtacgacgctaggcgcactcattgttggattaggtttacttattactggtttcgcaaaattcaataatcctactgtaattattgtcggtcttatttctggtgcattatgggcgtttggacaagcgaatcagcttaaatctattagtttaatcggtgtatcaaatactatgccagtttctacaggtatgcaattagttggtacaacattattcagcgttatctttttaggtgaatggtcttcaatgactcaaattatctttggtttaatcgccatgatattattagttactggtgtagcacttacttcacttaaagccaaaaatgaacgtcaatcagataatcctgaatttaaaaaagcaatgggtattttaattgtatctacagttggatatgtaggtttcgttgtacttggtgacatctttggtgttggtggaactgatgcattgttcttccaatctgtcggtatggcaattggtggctttatcctatccatgaatcataaaacatcacttaaatcaacagcacttaatctattgccaggtgtgatttggggaattggtaacttgttcatgttctattctcaaccaaaagttggtgtagctacaagtttctcattatcacagttacttgttatcgtttcaacattaggtggtattttcattttaggagaaagaaaagatcgtcgtcagatgacgggtatttgggcaggtattattattatcgtgatagctgctataattctaggtaatttgaaatag

SEQ ID NO: 413319 - DNA, 252 bp, Staphylococcus aureus
atgagaacaattattttaagtctatttataattatgaacatcgttgcaatcattatgacattgagtcaacctctcaccgtgaattactttagtttacgggttatacttatctttttcacatttatattatcaatctttttcattttaattaagtcatcccgattaaataatatattaacgattctttccattgtgcttgtcattattcatatgggcattctcgctcatagcacttacgtatatttatactaa

SEQ ID NO: 413320 - DNA, 765 bp, Staphylococcus aureus
atgatattgaaatttgatcacatcattcattatatagatcagttagatcggtttagttttccaggagatgttataaaattacattcaggtgggtatcatcataaatatggaacattcaataaattaggttatatcaatgaaaattatattgagctactggatgtagaaaataatgaaaagttgaaaaagatggcaaaaacgatagaaggtggagtcgcttttgctactcaaattgttcaagagaagtatgagcaaggctttaaaaatatttgtttgcgtacaaatgatatagaggcagttaaaaataaactacaaagtgagcaggttgaagtagtagggccgattcaaatggaaagagatacacataaagatggtaaagtaaagtggcaattgctttatataatgaatcaggatgatgatgaaattaagccaccattttttattcaatgggaagaaagtgattccatgcgtactaaaaaattgcaaaaatattttcaaaaacaattttcaattgaaactgttattgtgaaaagtaaaaaccgatcacaaacagtatcgaattggttgaaatggtttgatatggacattgtagaagagaatgaccattacacagatttgattttaaaaaatgatgatatttattttagaattgaagatggtaaagtttcaaaatatcattcggttatcataaaagacgcacaagcaacttcaccatattcaatttttatcagaggtgctatttatcgctttgaaccattagtataa

SEQ ID NO: 413321 - DNA, 486 bp, Staphylococcus aureus
atgattttacaaattgtaggttacaaaaagtctggtaagacaacattgatgaggcatattgtctctttcttaaagacacatggttatacagttgctactattaaacatcatgggcatgctaaggaagatattcaattacaggattcagacgtcgatcacatgaagcattttgaagcgggggcagatcaaagtattgtacaaggttttcaatatcagcaaactgtaacacgtgtagataatcaaaatcttactcaaattattgagaaatctgttacaattgacaccaatatcgtattagttgaaggctttaaaaatgctgattttgaaaaagtcgtagtctatcgagatgaagaagagttgcaagtattacaacaattgtcgaatgtttgttatagcattaatgtaagggagcatgaagattttacagcatttgagcaatggttattaaataaaattaaaaatgattgtgatacacaattaacatag

SEQ ID NO: 413322 - DNA, 1005 bp, Staphylococcus aureus
gtgagtcaagaacgttattcaaggcaaattttatttaaacaaataggtgaaataggtcaaagcaaaataaatcaaaaatgtgcgttgattattggtatgggcgcattaggtacacatgtggccgaaggacttgttagagcaggcattgctaaactaatcattgttgatagagattatattgaatttagtaatttacaaagacaaacattgtttactgaagaagatgctttgaaaatgatgcctaaagtggttgcagctaaaaagcatttgctagcgttacgtagtgatgttgatattgatggttgtattgcccatgtggattattattttttggaaacacatggacaggacgttgacgttattattgatgcaaccgataactttgaaacacgacaactgattaatgattttgcatataaacatcgtataccttggatttatggtggtgttgtacagagtacatatacagaagctgcatttatacctggtaaaacaccttgctttaactgtttggtaccacaattgccagcattaaatttaacatgtgatacagtaggggtcattcaacctgccgtgacgatggcaacaagtttacaattaagagatgcgatgaaagtattaacggaacaaccaattgacacaaaaataacttatggcgatatttgggaaggtagtcattattcatttggtttcagtaaaatgcaacgttcagactgtacaacttgtggagatgtaccaagttatccgtatttaaacaagaatgaacaacgttatgcaacattgtgtggtagagacactgtacagtatgaaaatgcatcaattacacacgacattcttgttcaatttttaaaacaacatcaactaaattatcgcagtaattcgtatatggttatgtttgaatttaaaggacaccgcattgttgcttttaaaggtggaaggtttttaatacatggcatgacacgcacatcagatgccacacatctaatgaatttattgtttggataa

SEQ ID NO: 413323 - DNA, 672 bp, Staphylococcus aureus
atgcctgacttaacacctttttggatatcaatacgagttgctgtaatcagtacgattattgtaacggttttaggtatttttatatctaaatggttgtatcgtcgtaagggttcgtgggttaaagtattggaaagtttattgatattacctattgttttgccgccaacggtattaggttttattctattaatcatcttctcgccaagaggaccaatcggtcaattctttgcgaatgtactacatttacctgtagtgttcactttgacaggtgctgtgatagcatctgtcattgttagttttccactaatgtatcaacatactgtgcaaggcttcagaggtatagacacgaaaatgattaatacagctagaacgatgggagcaagtgaaacgaaaattttcctcaaattaattttaccattagctaaacgctctattttagcaggtataatgatgagttttgctcgtgcattaggtgagtttggtgctacattaatggttgcaggatatattccaaataaaacgaatacactacctttagaaatatacttcttagtggaacaaggtagagaaaatgaagcgtggttatgggtattagtgctagtcgcattctctattgtggttatatctacaattaatttattgaataaagataaatataaggaggtcgactag

SEQ ID NO: 413324 - DNA, 771 bp, Staphylococcus aureus
atggctagtataagtatgtcagatatatattgtaacggcactatatttgaaaatgacgacgagcagttaatttatttaacgccttcttttccacaacgatacacaagcaacacatggatatataaaaagacgcctacccaagagcgatggctgaaagacttagaacgtcaacatcaattacatacaaatcaaggttcaaatcattatgcgtttagtttcccggaaaatgaacaacttgataatcattggatggctatgtttaaagatatgaattttgaactaggtattatggaattgtatgccatagaaagtgatgcgcttgctaatttgccgcgtaactctgacgttgaaattgccgtcgttgacgagtcgcatatagatgcctatttaaaagttgcatatcagtttagtctgccatttggaaaagactatgcagatgcacatgaagaaatggtaagggaacattatcaaaaagatgtgattaaacgcttagtagcttatttaaataatgaacctattggcgttgtagatgtcattgaaagtgaaaattacattgaattagatggatttggtgtattagaacaatttcgacaccaaggaattggatctacaattcaatcgttgataggtgaatacgccatatcaaaaaatcacaaaccaatcatattagttacagatggtgaagatacagcaaaagatatgtatgcaaagcaaggttatgtctatcaatcgttttgttatcaaatattaaaagaagatattggaaattaa

SEQ ID NO: 413325 - DNA, 555 bp, Staphylococcus aureus
atgacaacaaaacagttagtatatacagctttaatgacagcgattatcgctattttaggaatggtaccggtaattccactaccattttcttcagtaccaattgtacttcaaaacattggtattttcttagcaggtgtgattttaggacgtaaatatggcacattaagtgttatcgtctttttattattagtagttgctggcttgccattgttatcaggtggtcgcggtggcatcggtgtattcgcaggtccttcagcagggtttttactattatatccagttgtagcattcatgattggtgcgattcgtgatagattcatcaatgaaattaatttctggattttattcgttggtattttagtttttggtgttatagcattagatgttattggtacattgattatgggcatgattattaacataccatttacgaaagctatttcaatttcattagcttatttgcctggtgatatattaaaagcaattgtagcaagtttgattggtacagctttacttaatcactcgcagtttcgtcaaattatgggattaaaataa

SEQ ID NO: 413326 - DNA, 942 bp, Staphylococcus aureus
gtgactaagaaagtttattttaaccatgatggtggtgtagatgatttagtatctctatttttattattacaaatggaaaacgttcaattgataggggtcagtacaattggtgctgattgttatttagagccatctttgagcgcatcagtaaaaattattaatcgtttttcaaatgaagatattcaagttgcgccatcatatgaacgaggaaaaaatccatttcctaaagaatggcgtatgcatgccttttttatggacgcattgccaattttaaatgagccagtcaaacatgttgcttcaaatgtgagcgacaaagaagcctttgaagacattattcaaactttaaagagacaatcagaaaaagtaacattattatttacaggcccgcttacagatttagcaaaagcactacaaaaagattcatctatcgttcagtatatagaaaaattagtttggatgggtggcacctttttaccaaaaggaaatgttgaagaacctgagcatgatggttctgcagaatggaatgcatattgggatccagaagcggttaaaattgtttttgatagcgatatagagattgatatggttgctttagaaagtacgaatcaagtgccgctaacgttagatgttagacaaagatgggcgaatgaacgccaatatacgggcattgattttttaggagtaagttatgcagcggtaccaccattaacacactttataacaaattctacttactttttatgggatgttttaacgactgcttatattggtaacaaggacttggttcattcaattgagaaaaaagtcgatgtaataagttatggaccaagtcaaggtaagacatttgagtgtaaagatgggcgcaaaattaatgtcataaatcatgtagataacaacgcattttttgattatataactgcacttgctaaaaaagtaaattaa

SEQ ID NO: 413327 - DNA, 1155 bp, Staphylococcus aureus
atgaatgatatggataattcctttttaataacaacggaaattcaaagaaaatggattgaaaaattcaaagtaattagagatacatttaaggctaaagctgaatataatgatcaacatagccaatttccatataaaaatattgaatggttaattaaagaaggttatggaaaattaacgttaccaaaagcatatggtggtgaaggtgcgaccatagaagacatggttattttgcaatcatttttaggcgaacttgatggtgccacagcattatctattggttggcatgtgagtgtcgtaggacaaatttatgaacagaaattatggtctcaagatatgttggagcaatttgctgttgaaattaataatggtgcattagttaatagagcagttagtgaagctgaaatgggtagtccaacaagagggggaagaccaagtacacatgctgttaaagctgatgatgggtatattttaaatggtgtgaagacatatacatcaatgagtaaagcactaacacatattattgttgctgcttatatagaagaattagaaagtgttggttttttcttagtagacaggaatttgcctggtgttgaaattgccgataattgggacgtattaggtatgcgagcgacagaaagtcatgatttaatattaaatgatgtaaaagtaccattaaaacatttagtggaaacagagaaaagtaaagcgccaaatggttggatattgcatataccaagctgttatttaggtatagcacaagctgctagaaattatgctgtagactttgcaatccaacatagccctaatagtattgaaggaacgattgcaacattgccaactgtgcaacaaaatttagggaaaatggaaacgctattgttatgtgcgagacaatttttatggagtacagcaaaagggtatcaacaatataaagatgacagtcagataagaaatccaacaagtgcgagtaaagtgatggtaatgaatcaagggcttgaagtgattgatttagcgatgagaatagttggtgctaaaagcttagaaatgaatcgaccattacaacgttactatcgtgacatgcgtgcaggattacacaatccacctatggaagatgcagcatatacaaatattgctaagagtattacagatacattttaa

SEQ ID NO: 413328 - DNA, 303 bp, Staphylococcus aureus; identical to SEQ ID NO: 406287

SEQ ID NO: 413329 - DNA, 348 bp, Staphylococcus aureus; identical to SEQ ID NO: 406294

SEQ ID NO: 413330 - DNA, 327 bp, Staphylococcus aureus
atgattttagataatgtgaatccgaatgatttatttccaactgaaaaaaagggtccgtcagtgctaggaataattgagtatcaagttcaaggtgagaatgaatttgaaggggcatttatagcaacaaatgaaagattaattatgaatgtagatatgaatggccaattttattatagaagtattagttataatgaaatagagaagatagattatgatggtcaaactataatgttcaaatttaatattggtaatgtcccaatgcatgatattaaaagtgataacgttgaaatgtttgttgaatatgtaaaacaacatatgatagtataa

SEQ ID NO: 413331 - DNA, 501 bp, Staphylococcus aureus
atgaaaaaattagtaacagcaactacgttaacagcaggaatcggtacagcattagtaggtcaagcacatcatgcagatgctgctgaaaattatacaaattacaacaactataactacaacacgactcaaactacaacgactacaacaactacgacaactacatcatcaatttcacattctggtaacttatacactgcaggacaatgtacttggtatgtatatgataaagtaggcggagaaatcggttctacttggggaaatgctaataattgggctgctgctgcacaaggtgctggattcacagtaaatcatacaccttctaaaggcgctatcctacaatcttctgaaggaccatttggtcacgttgcatatgtagaaagtgtaaacagtgatggttcagttacaatttcagaaatgaattatagtggcggacctttctcagtaagttctagaactatttctgcaagtgaagcaggtaactacaactacatccatatttaa

SEQ ID NO: 413332 - DNA, 948 bp, Staphylococcus aureus; identical to SEQ ID NO: 406309

SEQ ID NO: 413333 - DNA, 693 bp, Staphylococcus aureus
atgaataaagctgaaaggcaaaatttaataattactgcaattcaacaaaataaaaaaatgaccgctttagaattagctaaatattgcaacgtatccaaacgcacaattttaagagatattgatgatttagaaaatcaaggtgttaaaatttatgcgcattatgggaaaaatggtggttaccaaatacaacaagcacaatctaaaattgcattaaacttatctgaaacacaattatcggccttatttttagtgcttaatgaaagtcagtcgtactcgacattaccatataaaagcgaaatcaacgcaattataaaacaatgtttaagtcttccacaaacacgcttaagaaaattgcttaaacgcatggacttttatattaaatttgatgacacacaacatatgacactcccaatgctgttttccgacattttaatttattgtacagaacgaaatgtgatgttagtagatcatagggttgatgataatattaaagctgaaaacgttatatttattggccttttgtgtaaacatggacattggcatgcagtcatttatgacattgctcaagacaaaactgccgaactcgaaattgaaaatattatagatatttcgtattcattcggtaagacgattcaaaccagagacatatccattgataactatcatcaatttttaaaccccatcgattcctaa

SEQ ID NO: 413334 - DNA, 330 bp, Staphylococcus aureus; identical to SEQ ID NO: 406313

SEQ ID NO: 413335 - DNA, 918 bp, Staphylococcus aureus
atgtttcaaaaattgagtatatttgccacgaagagttttttggtatggatgttagtagcagctgttattggatttattttcccacaacatgttgcgacattaggtaagtgggtaccttatttacttggtattgttatgttaggtatgggattaacaattacacctaatgatttcaaaatggtctttaaagcacctagagcagtaattattggtgtctgtctacaattcagtattatgcccacattagcatttataattgcaaagtcttttcatttaccacctgatattgctgttggcgtaatattagttggatgttgtccgggtgggacatcaagtaatgtaatgagttatttagccaaagctaacgtagcactttctgtttctattacgacggtctctacgttgctagcgccattcgttacacctgcgttaatatatctatttgcaaatgaatggttggaagtatctttcctgagtatgttgtggtcagttgttcaagttgtattaattccaattgctttaggtattgttttgcaaattattaatcgtaaaattgctgaaaaagcttctacagctttgccgattatatcagttgttgctatttcattaattttagcaatagttgtaggtggcagtaagcaccaaatcttaactacaggattattaatatttttagtagttattttacataacgtattagggtatacgattggatattggttagctcgtcttttaaaattagatcgacaagatcaaaaagcagtcagtattgaagttggaatgcagaactctggtttagctgtgtcattagcagcattgcattttaatccaattgcagcagtaccaggcgcagtgtttagtttcattcataatataacagggcctattttagcaaagtattggtcaaaaaagttataa

SEQ ID NO: 413336 - DNA, 531 bp, Staphylococcus aureus; identical to SEQ ID NO: 406321

SEQ ID NO: 413337 - DNA, 1239 bp, Staphylococcus aureus
atgaatgatttaataattaatcacatagcagaattaattttaccgaaatcaacagataaacctttgaagggtaaggaattagatgaattaaatgttgtgaaaaatggtacagttgtcattaaagatggcaaaattgtatatgctggacaacatacagatgactatgatgcgactgagacgatagatgctagtggaaaagtagtttctccggcattagtagatgctcatacccatttaacatttggtggatctcgagaacatgagatgtcattaaaacgtcaaggtaagtcttaccttgaaatattagaaatgggtggtggcatattatctaccgttaatgctactagagaaacatccgaagatgacttgtttaaaaaagcagagcatgatttgcttactatgattaaacacggcgtgcttgcagttgaaagtaagagtggttatggattagatagagaaaatgaactgaagcaattgaaagtgtctaatcgtttagctgagaaatatgatttagacatgaaacatactttcctagggcctcatgctgtacctaaagaggcaagttcaaatgaggcatttttagaagaaatgattgcgttacttccggaagtaaaacaatatgcagactttgcggatattttctgtgaaacaggtgtatttacaatagaacaatcgcaacattatatgcaaaaagccaaagaagcaggttttaaagtgaaaatacatgcggatgaaattgatccgttaggcggactggaattagcaattgatgaacaagcaatatcagcagaccacttagtagcttctagtgataaaggaaaagaaaagttgcgaaatagtgatactgtagctgtcctcttacctgcaacgacgttctatttaggtaaagaagattatgcagatgcgagaggtatgcttgataataatggtgccatcgcgttagctactgattataatccaggcagcagtgtaacgaataacttgcaacttgttatggccattgcagcattaaaattaaagctttcgcctagtgaagtgtggaatgctgttacggtcaacgctgctaaagcaatagatattaacgcgggtacaattaacacaagtgataaggctaatttagtaatttgggatgcaccaaatcatgaatatattccatatcattttggtatcaatcacgcagaaaaagttattaaagacggtaaggtcatcgtagataacacattatcttttaaagcataa

SEQ ID NO: 413338 - DNA, 900 bp, Staphylococcus aureus
atgggacttgtaattgaacatgttacgaaacgttttggcaagatgacggcagtaaatgatatttcattagagttagaatcaggcaaaatgttaggttttctaggaagaaatggtgcaggtaaaacaacgacatttcgtatgattttaggcttaagtgaaccaactgaaggacacattacgtataacggtaaaaaactagataaaacaatgtacaatcgtattggttatttaccggaagaacgcggtttacatgggaaattgacagttgaagaagaattgaaatatttggcaactttaaagggaatgtcaaaaacagaaatacaacagcaaatatcgtattggcttgagcgttttgatattactgaaaaccgcaaaaaacgaattgatagtctatcaaaagggaatcaacaaaaaattcagctgttagcaagtatgttacataaaccagaattactaatattagatgagcctttcagtggtctagacccagttaatgttgagttattaaaagaagcagttaaagacttaaatgattggggcagtacaatcgtttatagttctcaccgtatggagcatgttgaagaattatgtgatgatgtttgtattttagataaaggtcaacttgttgtttctggtgatatcaatcatgtacgtgcatctaatggtaacaagaaagttgtcattgaatcagaaacaacactaccagatttaacaaacattagaggcatcattcatagtgaaaacatgaagcaaggtcttcagttgacgattgagaatgaagacgtagccaaagatatttatcaagttgtggcacatcaaggttatgttaaacgattccaagttgtagaaccatcattacaagatatattcattgagaaggttggtggcaaggatgcataa

SEQ ID NO: 413339 - DNA, 1209 bp, Staphylococcus aureus
atgatagaacttaatgcaattacaacattatgtttagcctgtatactttacttacttggtacagctatcgttaatcacgttaattttttgaaacgcatttgtataccagcaccagtgattggcggcttaatctttgctattttagttgcggctttggattcatttggcatggttaagattaaattagatgcttcattcattcaagatttcttcatgttagcattctttacgacaatcggtcttggtgcatcattgaaattatttaaattaggtggcaaagtcttgctattatactttatgttttgtgctatcatttcagtcattcaaaacatagttggtgtatcactagcaaaagtattaaatattaaaccgttactaggattaacagcaggttccatgtctatggaaggcggtcatggtaatgctgctgcttatggtaagacaattcaagatttaggtattgattcggcactgacagcggctcttgcagctgcaactttaggtcttgtatttggagggcttatcggtggtccagttgtaaaatatttaatcaaacgttataacttaaagcctcaacatagtgacgatacatttaaagattatagccaagtagcatataacgaacatttacatagtaaatttaatgccactgaagtattcttcattcaatttacaatcgttgtattctgtatggcagttggaagttatttcagtcatttgtttacagctcaaacagggattaatgttccaatttacgttggctcattatttgtagctgttatcgtccgaaatatctctgaaagttttaattttaatattgtagatttaaaaattactaatcaaattggcgatgtcgcattaggtattttcttatctcttgcgctaatgagcattcaattaatcgaaatttataaacttgctatacctcttattattatcgttttagttcaagttgtcgttatgattttatttgctgttttaattttatttagaggtttaggaaaagattatgatgctgcagtaatggtaggtggttttatcgggcatgggcttggtgcaacgccaaatgccatggcaaatttagatgttattactaaaaaatatggaaactcacctaaagcatatttagttgtacctattgttggtgcattcttaatcgatttaattggtgttatagtcattatgggattcattcaatggtttagttaa

SEQ ID NO: 413340 - DNA, 921 bp, Staphylococcus aureus
ttgattagaaaccgtgttatgaatagcgttgtcaataaatatttgcttcacaatcgctcgattatgtttaaaaatgatcaagatgttgaaagatttttttataaaagagaaattgaaaatagaaaaaaacataagcagccttcaacattaaatgttaaagcaaatttagaaaaattatcattagatgatatgcaagtctttcgctttaatttcagacatcaaattgataagaaaattttatatattcacggtggattcaatgcactacaaccatcaccgttccattggagattgttggataaaatcactttaagtacattatatgaggttgtactgcctatctatccaaagacaccagagtttcatattgacgatactttccaagcgatacaacgtgtttatgatcaattagtatctgaagtaggacatcaaaatgtcgtagtcatgggtgatggttcaggtggtgcactggcattatcctttgtacaatctcttttagataatcaacagccattaccgaataaattgtatttaatctcaccaattttagatgcaacactatctaataaagatatttcggacgccttaatcgaacaagatgcggttctaagtcagtttggtgtcaatgagattatgaaaaaatgggcgaatggcctaccattaacagataagcgcatatcgccaattaatggcacaatagaaggattgccaccagtttatatgtttggtggtggacgtgaaatgacacatcctgatatgaagctattcgaacaaatgatgttgcaacatcatcaatacattgagttttatgattatcctaagatggtacatgattttccaatttatccaattagacaatcacataaagctattaaacaaattgccaaatcgatagatgaggatgtaacacaaaataactaa

SEQ ID NO: 413341 - DNA, 648 bp, Staphylococcus aureus
atgaaaaagatgatattaattaatgtcattacggttgttgtactgttagcaattgggattgctggcttttatttctggaataaaacaacaagctatgtaacaactgataatgcaaaagtaaatggcgatcaaattaaaatagcaagtcctgcatctggacaaattaaatcacttaatgttaaacaaggtgacaaactcgataaaggtgacaaagtagcaactgttactgtacaaggtcaagatggcgaaacgaaagatatggatcttaaaatgcctcaaaaaggtacaattgccaaattagatggtatggaaggttcaatggtgcaagctggtaacccaatcgcttatgcatacaatttagatgatttatatgtaacagcaaatattgacgaaaaagatattaaagatgttgaagtaggtaaagatgttgatgtgactattgacggtcaaaaagcttctattaaaggtaaagttgatagtattggaaaagcaactgctgcaagcttttcattaatgccatcatcaaatagtgatggtaactacactaaagtttctcaagtaatacctgttaaaatcactctagaatcagaaccgtctaaacaagttgttcctggaatgaacgctgaagtaaaaatccataaaaattaa

SEQ ID NO: 413342 - DNA, 357 bp, Staphylococcus aureus
atgaaaaagaaaaaaggttttggtcttggtattagtttaatcgccatcatgttaattgtatgtattgtattagtaatcatgatgatgactggcggaaagaaagatacatactatggaattatgaaagataatactactattgaaaaaatgattagtgaaaaagatgaaagtattgaaaaaaatgttaaattaccttcagattcagatgttaaagttaaaaaaggtgattttgtaattgtttataaattagcagattcagataaaattgttaaagttaaaaaagttgaccatgatgacgtccctcacggtttaatgatgaaaattcatgacatgggcaaaatgcacatgaaacactaa

SEQ ID NO: 413343 - DNA, 1278 bp, Staphylococcus aureus
atggctctattcaagagaaaaattagcctacctatgcaagttgttattgcattagtgttaggtgttgtcgtaggacttttattatatggacaagaaaacgtagcaaattacattaaaccatttggtgacgtatttttaaatttaattaaaatgatcgttataccagttgtattttgctcactagcgctttctatttcgaacgttggggaatcgaaaactgtagggcgttatggctggaaaacaattttatactttgaaattattacaacaatcgcaataggtttagggattatcttcggtaacctatttaaaccaggtgctggattagacccaacaaaattacctaaaggtgatatttctaaatatcaatcaactgcacatgcagcagaacaatctacatatggaaatcattttattgataccattgtacatattattccgacaaacttttttgaagctttaaataagggtgaattattacctattatcttcttcgcagtattctttggattaggattagctgctgtaggtaaaaaagcagaaccagttaaagaatttttaagcggatcgcttgaagctgtgttctggatgattaataaaattttaaaattagcaccacttggagtgtttgcattcatttgtactacaattattacatttggtgcatccgcattattaccactattaaaattagtattagttgttgtctttgcaatggtgttctttgtattcgctatactaggactagttgcatggatgtgtggtattaatatcatgaatattattagaatcttgaaaagtgaattgcttttagcattttctacatcaagttcggaagctgtacttcctgtaatgatgaagaaaatggaaaacttcggttctccaaaagaaattacttcttttgttataccaattggttatacgtttaacttagacggatcagcactttatcaatctattgcagcattattcgttgcacagatgtatggaatgcacttaacattatcagagcaaattgtgttgatgttaacattaatgattacgtctaaaggtatggcggcagtaccaggaacttcaatcgttgttttattaacaacattaggtgccatgggcttaccggcacaaggtttagcattaattattggtgttgaccgtatcttagatatggtacgtacatgtgtaaacgttattggtaacgcattatcaacaatcgttatagctaaatgggaaaacgtatatgacaaagcaaaaggtcaagaatatttaaaatcaatttaa

SEQ ID NO: 413344 - DNA, 2406 bp, Staphylococcus aureus
atggcaaagcaaaaactagtaatgattggtaacggtatggcgggcattcgaacaatcgaagaaatattagagcgcgccaacgatttatatgatattacggtaataggtaaagaaccttatccaaactataaccgcatcatgctttcaaatattttacaaaataaaatgacagttgaagaaacaattatgaatccatatgagtggtatgaggaacatggtatcgagttaattaccaatgatcctgtaattgaagtagatagagcaaatcaatcagttactactgcaaatggtattgaagtatcatacgataaattgatttttgcgacaggttctaaagcattcgtcattccagttccaggttcgacattaccgagtgtaattggttggagaacgattgatgatactgaacaaatgatgaacattgcgaagactaaaaagaaagcaattgtaattggtggaggcttactaggtttagagtgtgcacgtggtttattagatcaaggtatggaagtaacggtgttacatttagctgaatggttgatggaaatgcagctagaccgtaaagcaggaaatatgcttaaagcagatttagaaaagcaaggtatgaagtttgaaatgcaagccaacacaactgaaatcttaggagaagatgatgttgaaggtgttaaattggctgatggacgcgagattccggcagacttagttgttatggcagtaggtatacgaccatacacagaagtagccaaagaatcaggtctagatgttaatcgtggtattgttgtcaatgatgtgatgcaaacaagtgatagcaatgtatatgcagttggagaatgtgcagaacataacggcaaagtttatggactcgttgcaccactatatgaacaaggtaaagtattagctgatcatttaacaaataaagaaacgaacggatacaagggatcaacaacatttacgtcattaaaagtttctggttgtgacttgtatagtgctggtcaaattgtagaaaatgcagaaattaaaggtattgaaatatttaatagtgttgataataactataaaaaaatctttttaaaagacggtaatgtagttggtgcagtactatatggtgatatcgatgatggttcacgcttttataacatgatgaaaaaaggtgaatccactgaagattacacacttgtatcattgcttactaaaggtggagaagaggcatcgctatcaattgctgatatggctgatgatgaaacaatttgtggttgtaatggtgttgataaaggtactatagtaaatgcgattacggaaaatggctttacaacagttgaagaagtaacggctaaaacaaaagcggggaattcatgtggtaaatgtaaaccgcaaattgctcaaatattgcagcacaccttaggagatgactttgttgccgcaaaacctgctggtatatgtggttgtactgatttgacacgcgatcaaattgtaacgcaaataagagcgaaaggtttaaaaacatctaaagaagttcgacatgttttaaactttaaaaataaaggtggatgtccaaaatgtcgaccagcaatcaactattatttaaacatggtttatccacatgatcatgaagatgaaagagaatcaagatttgctaacgaacgttaccatgcgaatattcaaaatgatggtacattttctgttatacctcaaatgcgtggaggtgttacagatgcagaccaactgattcgtctaggagaagtggctaagaaatatcatgtgccactagttaaagtgacaggttcgcaacgtgttggtttgtatggagttaaaaaagaagaattaccaaatatatgggaagacctaggtatgcgttcagcatcagcttatggtaagaaaacacgctcagttaaaagctgtgttggtaaagagttttgtcgatttggtacgcaatacacgacacgacttggcattcgtttagaaaaaacatttgaatacatcgatacacctcataaattcaaaatgggtgtatcaggctgcccaagaagttgtgttgaatcaggtgttaaagattttggtattatctcagttgaaaatggattccaaatctatatcggtggtaatggtggtacagaagtcgaaaaagctgaatttttaacaactgtagaaacagaagatgaagtaatcaaattatgtggtgctttgatgcaatattatcgcgaaacaggtatatatgctgaaagaacagcgccatggttaagaagacttggatttgaaaatgtaaaagaagtcttacttgacccagaaagacaaaatgaactatttgaacgcattatggatgctaaaaaagcagtcgaagctgaaccttgggaagcaataactagcaatgcgcaagcacgtaaaatttttgaagtggagaaggtgtaa

SEQ ID NO: 413345 - DNA, 687 bp, Staphylococcus aureus
atgaggatttttattacaagtacgaatactgatgtaggcaaaacctatgttacaaagcatttataccatgctttgaaaacacgtggtcatcgtgtttgtgtttttaaaccatttcaaactgaggaacgccaagacgggacatttccagatttagaagtatttaaaaatgaatgtgatttaagctatgacataacgtcactttatacttttaagcaacctgtatcaccacaccttgcatttaaaatgacagatcaaatttttctaaataagcagcgtgtattagataaggtaaaagttttagataaggaatttgattttatcttaattgagggtgctgggggaattgccgtaccaatatatgaaggtacagatgatttctacatgactaaagatctaatcaatgattgtgcagattgtgtcatcagtgtgttgccatcaaaattaggtgctattagcgatgccgttgttcaccaagattatgttaataagaatgtatcggcgagtaattttttaataatgaatcgctatacagacagctatattgaaaaagacaatcaaattacgattggaaaattaacaaataaaacagtctatacatttgaagaacatgccacgtatgaaaatttctcagaagcatttttaaaacaattaataggagttaaaaatgaattacacacaacaacttaa

SEQ ID NO: 413346 - DNA, 474 bp, Staphylococcus aureus
atggaatatcaattacaacaacttgcgtcgttaacgttagtaggtattaaagaaacgtatgaaaatggacgacaggctcagcaacatatagccgggttttggcaaaggtgttatcaagagggagtaattgcggatttacagttaaaaaataatggtgatttagccgggatacttggcttatgtatacccgaattagacggtaagatgtcatatatgattgcagttaccggagataatagtgctgatattgcaaaatatgatgtcataacattagcaagttcaaagtatatggtatttgaagcacagggcgcagtacctaaagcagttcaacaaaaaatggaagaggttcatcactacatacatcaatatcaagcaaatacggtaaaatcagcaccattttttgagttgtatcaggatggtgatactacaagtgaaaaatatattacagaaatttggatgcctgttaaagggtga

SEQ ID NO: 413347 - DNA, 942 bp, Staphylococcus aureus
atgaagaaaattaaatatatacttgtcgtgtttgtcttatcgcttaccgtattatctggatgtagtttgcccggactaggtagtaagagcacgaaaaatgatgtcaaaattacagcattatcaacaagcgaatcgcaaattatttcacatatgttacggttgttaatagagcatgatacacatggtaagataaagccaacattagtaaataatttagggtcaagtacgattcaacataatgccttaattaatggggatgctaatatatcaggtgttagatataatggcacagatttaacgggagctttgaaggaagcaccaattaaagatcctaagaaagcaatgatagccacacaacaaggatttaaaaagaaatttgatcaaacgttttttgattcgtatggttttgcgaatacgtatgcattcatggtaacgaaggaaactgctaaaaaatatcatttagagacagtttcagatttagcaaagcatagtaaagatttacgtttaggtatggatagttcatggatgaatcgtaaaggcgatggctatgaaggatttaaaaaagagtatggttttgactttggtacagtgagaccaatgcaaataggtctagtctacgacgcattaaacacagagaagttagacgttgcattaggttattctacagatggtcgaattgccgcgtatgatttgaaagtacttaaagatgataaacaatttttcccgccttatgctgcgagtgctgttgcaacaaatgaattattacggcaacacccagaacttaaaacgacgattaataagttgacaggaaagatttcgacttcagagatgcaacgcttgaattatgaagcggatggtaaaggtaaagaacctgctgtcgtcgcagaagaatttttgaaaaaacaccactattttgataaacagaaaggtggtcataagtaa

SEQ ID NO: 413348 - DNA, 600 bp, Staphylococcus aureus
atgagtgagaaacaatcaaatgaacaagttgaagcatttttaaataaagagagtcaatggcaagaagaatataaatatttgagagcgttaatctttaatgaaacagaattagaggaagcgtataaatggatgcatccttgttacacgttgaataataaaaatgtagtacttatccatggcttcaaaaattatgttgcactattatttcataaaggtgccattttggaggataaatatcatacactcattcaacagactgaaaaggtgcaagcagctcgtcagttacgatttgaaaatttaacagagattcaagcacgtaccgaagaaattaaatattatctagccgaagcaattaaagctgaaaaagctggtaaaaaagttgaaatgaagaaaacagaggaatatgttattcctaaagagttagaagctaagttcgaagaaatgccacagttagagtcttcattttataaattaacgccaggcagacaacatcaatatatatatcatattggacaagctaaacgcagtgaaacaagacaaaagcgtgttgaaaagtatattaaccaaatactagaaggtaaagggatgcatgataagtaa

SEQ ID NO: 413349 - DNA, 201 bp, Staphylococcus aureus
atgatgatagagtctgggacatcacaatgtcctaggctctacaatgttatattggcggggccccaacatagagaatttcgtaaagaaattctacaggcaatggaagttggggacggggcccccaacatagaagctgaccaaaagtcagctttcaataatgtgcaagttggggatggggccccaacacagagaatttcgtaa

SEQ ID NO: 413350 - DNA, 1377 bp, Staphylococcus aureus
gtgaataacacacaatcttcaccacgcagtaatattattattgcgattatgttgtctgcattaacatattggttgtttgcacaatcatttattaatataggacctctcgttggtcaaacgtatcaaacctctcctgccgtgttaaatttatctattagtttaacttccttcgccacaggtatcttcatggtggctgcaggtgatattgctgataaaataggacaactgagaatgacatacatgggtctcataatcagtatgtttgcatctcttctattaattatatcggacatcactgcactgctcatcatcggtagaattttacaaggtctatcagcagctatcttgttaccttcaacagttggcgttttaaataatcaatttaaaggagaacatttaagacgagcgattagttatctaatgattagtactgttgggggcatcggcctagctggtgttatcggcggtttaattgctacaaatttcggatggcaaatgaatttcatcattagtatagtcattgctttcattgccatattacttctaaaaggcacacctgaaaaagtaagtcaacatagccaccgtcatccgttcgattacaaaggtatgtcgattttcgctgttatgattggtagctttacattattgttaacacaaggattcgaacaaggttggtttagtacattctcattcatttgtctgagcatttttatcatcactacgctgatattcatcatcatcgaacgtcgacatgaagtaccttttattgatttctcagtattacgcaaccgtccgttcattggtgcatttttaaataactttgttttaaatagcggtctaggcgttacagtggtctttttcatatatgctcaaacacaccttggtttatcagctgcgcaatctggacttgttacattgccatatgccattgtggcagttgcgatgattcgtttaggtgaaaaagcaacattacgtttcggtggcaaattgatgctcatcattggtccgttgttccctgtcatcggcatcactattattagcatgactcaattatcggcatcacaatatgtcattgcagttatcattggtttcgtcatttgcgcaattggaaatggtttagtcgcaacacccggccttacaattgcaattttcagtatgccaaatgaaaaagttggtttagctacaggattatataaaatgagtggtacattaggtggcgcctttggtatagcactaagtactacagttttcagtatgttacaactaaactatgcaccaagtgtagctgcaaccgtaacatttatcgtcagcattgtattgatgatccttggctcattgtctgcatacatgatcattccaaaaacagttaaatcttaa

SEQ ID NO: 413351 - DNA, 1437 bp, Staphylococcus aureus
atgacaaaattaccgcaaaattttatgtggggtggcgctcttgccgcaaatcaatttgaaggtggatatgaaaaaggtggtaaagggttaagtgtaattgatgttatgacgagtggtgcacatggcaaagcacgtcagattacagaatctatagacctcaatcactattatccaaatcatgaaggtattgatttttatcatcgttataaggaagatattgccttgtttaaagaaatgggattgaaatgtttacgtacgtcgattgcgtggacacgtatctttccgaatggggatgaagatgtgccaaatgaagaaggacttgccttttatgatcgtatctttgatgaattaattgcacaaggtattgaacctgttgtgacgttatcacattttgagatgccacttcatttagcgaaacattatggtggatttagaaatagagaagttgtcgattattttgtgcattttgcgcgtgttgtatttgaaagatataaagataaagttacatattggatgacgtttaatgaaattaataatcagatggacacatcaaatcctatctttttatggacgaattctggggtagcattgacagaaaatgataatcctgaagaagtcttgtatcaagtagcacatcatgaacttttagccagtgctttagcagttcgtcttggtaaagagattaatccgaagtttaagattggaacaatgatttcacatgtacccatttatccatattcgtgtcatccgaaagatatgatggaagcacaaattgcgaatcgcttacgtttctttttcccggatgtccaagtgagaggttattatccaagctatgctaaaaaaatgttggcacgaaaaggatatgatgttggatggcaagaaggggacgacagtattttacagcagggcacggttgattatattggctttagttattacatgtctacggctgtaaaacatgatgttgatactacagttgaaaacaacatcgtcaacggtggtttgaatcattctgtggagaatccgcatatcgcaacgagtgattggggttgggcgattgatccagatggcttaagatatacattgaatgtgttatatgatcgttatcagttaccactttttattgtggaaaatggttttggtgcagttgatgaagtggtagatggacatattcatgatgattatcgcattgaatatttaaaagcacatattacagcagcgatagaagcagttgatcaagatggtgtagatttaatcggttatacaccgtggggaatcattgatattgtttcatttacaaccggtgaaatgaagaaacgctatggtttaatatatgttgatcgagataatgatggtcatggcacgatggaacgcttgaaaaaagattcgttctattggtatcaacaagtgatagcatcaaatggagataaattataa

SEQ ID NO: 413352 - DNA, 717 bp, Staphylococcus aureus; identical to SEQ ID NO: 405141

SEQ ID NO: 413353 - DNA, 1044 bp, Staphylococcus aureus
gtgaaagcattgaaattatatggcgtagaagatttacggtatgaggataatgaaaagccagtcattgaaagtgcgaatgacgttattgttaaagtacgagcgactggcatatgtggttcagacacgtcacgatacaaaaaaatggggccatacattaaaggtatgccatttggtcatgaattttcaggtgtagtagatgccattggaagtgatgttacgcatgttaatgtgggcgacaaagtgacaggttgcccagcaataccttgttatcaatgcgagtattgtttgaaaggtgaatatgcacgatgtgaaaagttattcgtcattggctcatatgaacctggatcgttcgcggaatatgtcaaattgccagcgcaaaatgttttaaaggttccagacaatgttgattacattgaagcagcaatggttgagccatcagccgttgttgcgcatgggttttataaatcgaatatacaacctggtatgactgttgcagtaatggggtgtggcagtataggtttgttagctattcaatgggcacgaatatttggtgctgcacatatcatcgctatagatatagatgcgcataaactagatattgcaacatcattgggcgcacatcaaacaatcaattcaaaagaagaaaatcttgagaaattcatcgaaaatcattacgccaatcaaatcgatttagctatagaatcatcaggtgctaaagttacgattggtcaaatattgacgctacctaaaaaaggtggcgaggtggtattactcggaataccatatgatgatattgagattgatcgcgttcattttgaaaaaattctgcgtaacgagttgacagtatgtggctcttggaactgtttgtccagtaattttccgggcaaagagtggacggcaaccttacattatatgaagacgaaagatattaatgtaaagcctattatttctcattttttaccgttagaaaaaggcccggagacatttgataaattagttaacaagaaagaacgatttgataaagtcatgtttacgatttattag

SEQ ID NO: 413354 - DNA, 147 bp, Staphylococcus aureus
atggtagaatcaatgctaacttttatgcttgggccattaagacaaatcactgatttttatatggaacatttactcgtaagtaattccatcgtcattgcaggttattttgcgacaggtatttttaaaaagaaaaaagttgtgaattaa

SEQ ID NO: 413355 - DNA, 1530 bp, Staphylococcus aureus
atgaaatctttatttgaaaaagcacagcagttcggcaagtcctttatgttacctatcgcaatcttaccagctgcaggtctattgttgggtatcggtggtgcattaagtaatccaaacaccgttaaagcataccctattttagatattaccttattacaaaatatttttacattaatgtcagctgcaggtagtattgttttccaaaatttaccggtcatctttgcaattggtgtcgcaatcggattatctagaagcgataaaggtactgcaggtttagctgcgctgctcggtttcttaattatgaacgcaactatgaatggcttattaactatcacgggcacattggcaaaagatcagcttgcacaaaatggacaaggcatggtgctcggtatacaaacggttgaaaccggtgtttttggcgggattatcacaggtattatgaccgcaatacttcacaacaaatatcacaaagtggtattaccaccgtatttaggtttctttggtggctctagatttgtccctattgtcacagcatttgccgcaatctttttaggtgtattgatgtttttcatttggccaagcatacaagccggcatttatcatgttggtggatttgtaacgaaaacaggtgccatcggtacttttgtttatggcttcatcttaagattgttaggtccactcggtttacaccatattttttacttaccgttttggcagacggcacttggtggtactttagaagtcaaagggcacttagttcaaggtacgcagaacatcttctttgctcaacttggtgatccagatgtgacgaagtattattcaggtgtgtcacgctttatgtcaggccgttttattacgatgatgttcggcttatgtggtgccgcacttgcaatttatcacacagctaaacctgaacataaaaaagttgtcggcggtttaatgttatccgctgcactcacttcatttttaacaggtattaccgaacctttagagtttagtttcttgtttgtcgcacctattctttatgtaatccatgccttctttgatggattagcatttatgatggcagacattttcaacattacaattggtcaaaccttcagtggaggctttatcgatttcttactctttggtgtgctacaaggtaatagtaaaacaaactacctatacgtcatacctattggaattgtgtggttctgtttgtattacatcgttttcagattcttaattacgaaatttaatttcaaaacacctggtcgagaagataaagctgcagcacaacaagttgaggctactgaaagagcacaaactattgttgctggtttgggaggcaaagataacattgaaatcgttgactgttgtgcaacgagactacgcgtcacacttaatcaaaatgacaaagtcgataaagtattactcgaaagtactggtgccaaaggtgtaatccagcaaggcactggtgtgcaagtaatttatgggcctcacgttacagttatcaaaaatgaaattgaagaattgctcggggattaa

SEQ ID NO: 413356 - DNA, 1185 bp, Staphylococcus aureus
atgcaagaagcatacattgtagcttatgggcgttcagccgcagcgaaagcaaagcaaggcgcattattccacgaaagacctgatgatgtcgcagccaaagcattacaaggcgtattgaaacgtattgacggaaaattcaataagaatatgattgaagatgtcattgttggtacggcttttccagaaggattacaaggacaaaacattgcacgaacgattgcattgcgtgcgggattatctgacacggtaccgggtcaaacagtgaatcgctactgctcatcaggattacaaaccatcgcgattgcagccaatcaaattatggctggtcaaggagatatacttgtagctggtggcgttgaattgatgagtgccgtaccaatgggtggcaacgagcccacaaacaatccaaccttacaatatgatgatataggtgcgtcatatcctatgggtttaactgctgaaaatgtagcatcccaatttgacgtatcacgcgaagatcaagatgcttatgctgtcagaagtcatcaacgtgcctatgacgcacaacgtgatggtcggttcaaagatgaaattattccaatacgggtaaactcagttgaatatacaaacgcaggaccaaaagtacacacaaatatctttgaccaagatgaatttatacgccctgacaccacgatggaggcattagccaaattacgtacagtatttaaagctgacggcactgtgactgcgggaacatctgccccactttctgatggtgcaggatttgtagttttaatgtctggagataaagtgaaagaactaggcgtgacacctattgcacgattcgttggttataaggcagtaggcgttgacccgaaaattatgggtattgggcctgcatatgcgattcctgaagtattgtcactcagcaatctatctgttgaagacattgatttgatcgaattgaacgaagcatttgcttctcaaacgattgcatctattaaagaagtaggtctagatatatcacgtacgaatgtgaatggtggcgctattgctttaggtcatccattaggtgctacaggggcaatgttaaccgcgcgtttacttaatgaaatgggtagacgtcccgatagccgttacggcatggttacgatgtgtattggtgtcggcatgggtgcagctgctatatttgagtatgtgcgttag

SEQ ID NO: 413357 - DNA, 1764 bp, Staphylococcus aureus
atgaagagaattagtaaagatatatgggcagtatttaaattactgtatcaaaataaagggcgttttagcattaatgccttactattgcagttaatcatgatttttattagtagtacatacttaattttactatttaatatgatgttaaaagtagctgggcaaagccaacttacgattaacaattggatggaaatcataagtcatcctgccagtgtgatacttcttattatattcatattaagtgttgcctttctgatttatgtagagttttcattgttagtttatatggtttatgccggctttgatcgacagattattacatttaaatccatttttaaaaatgcctttgtaaatgtgcgtaaactcataggtgtaccagttattttctttgtcatttatttaatgttaatgatacccattgccaacctaggactaagttcagtattaacaaaaaatatttacatacctaaatttttaacggaagaacttatgaaaacgacgaaaggtataatcatttacggtacctttatgattgctgtatttatattaaactttaaattaatatttaccttaccgttaacgattttaaaccgccagtcgttatttaaaaatatgagactaagttggcaaattacgaagcgaaataagtttcgacttgttatagaaatagttatattggaactcatcattggtgcgattttaacattaattatttcaggagcaacatatcttgctatttgtgtagatgaagaaggagataagtttttagtctcatcaattttatttgttgtattgaaaagcgcattgttcttctattatttatttacgaaattatcattaatcagtgtgttagtactgcacttaaaacaagagaatgtattagaccaaccgggcttagaatttaaatatccaaaaccgaaacggaagtctaggttctttataatttcaatggtgcttgcagtgacatgttttatcggttataacatgtacttactttacaataatactatcaatacaaatatctccattattggccatcgtggtttcgaagataaaggggttgaaaattctattccgtcattgaaagctgctgcaaaagcgaatgtcgaatacgttgagttagatacaattatgacgaaagataaacaatttgttgttagtcatgataacaatttgaaacgtttaacaggtgttaataaaaacatttctgaatctaatttcaaagatgtcgtcggtttgaaaatgcgtcaaaatggacatgaagcaaaacttgtatccttagacgaatttattgaaacggctaaacaatcaaatgtgaagctactagttgagttaaagccacatggtaaagaaccagcagattatacacaacgtgttattgatattttgaaaaagcatggtgttgaacatcaatatcgtgtgatgtctttggattatgatgtgatgactaagttgaaaaaagaagcgccatatctcaagtgtggttatatcattccgttgcagtttggtcattttaaagaaacatcattagatttctttgtcatcgaagatttttcttattcgccaagacttgttaatcaagcgcacttggaaaataaagaagtctatacttggactattaacggcgaagaagatttaacgaaatacttacaaaccaatgttgatggtattatcacagatgacccagcattagctgatcagattaaagaagaaaagaaagacgaaacatacttcgatcgttctataagaattttgtttgaataa

SEQ ID NO: 413358 - DNA, 1272 bp, Staphylococcus aureus
atgtctaaaattttaaaatgtatcacgttagccgtggtaatgttattaatcgtaactgcatgtggccctaatcgttcgaaagaagatattgataaagcattgaataaagataattctaaagacaagcctaaccaacttacgatgtgggtggatggcgacaagcaaatggcgttttataaaaaaattacggatcaatatactaaaaaaactggcatcaaagtaaagcttgtaaatattggtcaaaatgatcaactagaaaatatttcgctagacgctcctgcaggaaaaggtccagatatctttttcttagcacatgataatactggaagtgcctatctacaaggcttagctgctgaaatcaaattatcaaaagatgagttgaaaggtttcaataagcaagcacttaaagcgatgaattatgacaataagcaactagcattgccagctatcgtagaaacaaccgcacttttctataataaaaaattagtgaaaaatgcaccgcaaacgttagaagaagttgaagctaatgctgccaagctaactgatagtaaaaagaaacaatacggtatgttatttgatgctaaaaatttctattttaattatccgtttttattcggcaatgatgattatattttcaagaaaaatggcagtgaatatgatattcatcagctaggactaaattcaaaacatgtcgtcaaaaatgctgaacgattacaaaaatggtacgacaaagggtatcttcctaaggcagcaacacatgatgtcatgattggtctttttaaagaaggaaaagtaggacaatttgtcactggaccgtggaacattaatgaatatcaagaaacgtttggtaaagatttaggagtaacaacattacctacagatggtggcaaacctatgaaaccatttctcggtgtacgtggttggtatttatctgaatatagtaaacataagtattgggctaaagatttaatgctgtatatcactagtaaagatacattacaaaaatatacagatgaaatgagcgaaattactggacgtgttgacgtgaaatcatctaatccaaatttaaaagtgtttgaaaagcaagcacgtcatgctgaaccgatgcctaatattcctgaaatgcgacaagtttgggaaccgatgggcaatgcaagcatatttatctcaaatggtaagaatcctaaacaagcgttagatgaggcgacgaatgatataacgcaaaatattaagattcttcatccatcacaaaatgataagaaaggagattag

SEQ ID NO: 413359 - DNA, 1098 bp, Staphylococcus aureus
atggcagaactaaagttagagcatattaaaaagacgtatgataacaacaatactgtagtgaaagattttaatctacatattactgacaaagaattcattgtatttgttggaccatcgggatgtggtaaatcaacaacattacgaatggttgctggactagagtctatcacatctggagatttttatattgatggggaacgcatgaacgatgttgaaccaaagaatagagatattgcgatggtatttcaaaactatgcattatatccacatatgactgtatttgaaaatatggcatttgggctaaagctacgtaaagtaaataaaaaagagattgaacaaaaagtcaatgaagcagctgaaatattaggattaactgagtatcttggtcgtaaaccaaaagcgttatctggtggacagcgtcaacgtgttgctttgggcagagctattgttagggatgcgaaagtctttttaatggatgaaccattatcgaatcttgatgcgaagcttcgagtacaaatgcgcacagaaatattgaaattacataagcgacttaatactacgacaatttatgttacacatgatcaaactgaagcattgacgatggctagtcgaattgttgttttgaaagatggcgacattatgcaagtcggcacacctagagaaatatatgatgcccctaattgcatatttgtggcgcaatttatcggctcaccagcaatgaatatgttgaatgctacagttgaaatggacggattgaaggtaggaacacatcattttaaattacataataaaaaatttgaaaagttaaaagctgctggctacttagacaaggaaattattttaggtattcgagctgaagacattcatgaagaaccaatatttattcaaacttctccagagacacaatttgaatctgaagtagttgtatccgagttgttaggttcagaaatcatggtacatagtacattccaaggaatggaattgatttctaaattagattcaagaacccaagtgatgacgaacgacaagattacactagcatttgatatgaataagtgtcacttttttgatgaaaaaacaggaaatcgtatcgtctaa

SEQ ID NO: 413360 - DNA, 2007 bp, Staphylococcus aureus
atggtcattaacttaaatgacaaacagacaaaaacatctaaagaagggttaatttccgtatcacatcctcttgcggctaaaattggtaaggatgtattagatcaaggtggcaacgccatggatgccgtgattgcaattcaactggcattgaatgtggtagaaccatttgcatcaggtattggtggtggcgggtacttgctatattatgagcaaagtactggcagtataactgcgtttgatgcacgtgagacagcacctgaacatgtagacaaacaattttatctagatgattcaggcgaatataaatcattttttgatatgactacacatggtaaaactgtcgctgtgccagcaattccaaagctgtttgattatattcacaagcgttatgctaaattgtcattggaagatttaattaatcctgcaattgaactagccattgaaggtcatgcagccaattgggctactgaaaaatattcgcgccagcaacacgcacgattgacaaagtatcatgaaacggcacaagtatttacgcatgaaaatcaatattggcgtgaaggtgattggattgtacaacccgaattaggtaagacatttcaaatattaagagaacaagggtttaatgcattttataaaggtgacattgcgaaacaattagtcaatgttgttaaagcatgtggtgggacaatcattttagaggatctagccaattatgacattcagattaaagcgccaatcagtgcgacatttaaagactatgacatttattcaatgggaccatctagttctggcggtatcacggtcattcaaatattgaagttattagaacatgtcgatttaccatctatgggtccaagatctgtcgattacttgcatcatttgatacaagcgatgcatttagcatatagtgatcgcgcgcaatacttggcggatgataattttcatgaggtgcctgtacagtcattaattgatgacgattatttaaaagcacgcagtacgctcattaatagcaataaagcaaatattgatatagagcatggtgttgtgtctgattgcattagtcatacagatgttgaagaaaatcataccgaaacaactcatttttgtgtgattgataaggaaggtaatattgcttcatttacgacatcaattggtatgatttatggttcaggtatcacgattccaggctacggtgtgttattgaatacgacaatggatggctttgatgtagtagatggtggtattaacgaaattgcaccatataaacgaccactaagtaacatggctccaacgattgtgatgcatcacgggaagccgatattaacagtaggtgcacctggtgccataagtatcattgctagtgttgcgcaaacattaatcaatgtattagtgtttggcatggatattcagcaggctatagatgaacctagaatttatagtagccatcctaatcgcattgaatgggagcctcaattttcacaatctacaatattagcattgattgcacgtggacatgcaatggaacataaaccagatgcctatattggagatgtacatgggttacaggttgacttgaatacacgtgacgcgtcgggaggtgctgatgatacgagggaaggcacagtgataggtggcgatgtattatcaattagaaaacaaccattacctagtccgaaaatatacgataatgacacccatcgagtatatttcaatgatatgcagttgccattatatgctgaacaagtgcggtggatgcatgacaaatattgggttgatgaaagtgttattagaatcattttccctgaagttagtgtgcatattgaagatttaagaagttatgaaatcgccggaaaaaattatatagatattgcctggttggcacggaagaaaggttatcaagttaccttaaaggatgacagtttatacttaactgatgaaacatatcattcagtgaaagcaaacacaaatgcatactatagatatgatcgagatagtatcacaagataa

SEQ ID NO: 413361 - DNA, 1164 bp, Staphylococcus aureus
atggtaaaacttacaacaaagatagcttccttaaaactattcgcaagttatgctatagcaacttatattttagttatgttaacgagtgcattaaatctttttaaaggttatgtggccgatacgttctatattgctgaaacattgccaatcattttaaccatcattttaattatcattttaacaacggaacaaacatggaagcatcatgacctatggcgacgtatcgtcgaagtgttgttattgttgatggcattaacaggcaacgtatttacattattaatgtttgtaagtattagacgttaccaacgtacatcgcaaatacatagttataacgggtgggaatcgtttatacgaaaaactactagacatcgtattgcgattatcgggttacttattttagtctacatgctgacattatcaattgtgtcacaatttacatttgatacgacattggctactaaaaatcagttcaatgcactgttacatggaccgagtctagcctatccgtttggtactgatgatttcggtagagacttatttacacgcgtagttgtaggaacgaagctgacattttcaatttcaattatttcagtagttattgcagttatttttggtgtgttactaggcactatcgcaggttattttaatcatattgataatttaataatgcgaattttagatgtagtgtttgcaattccatcattattgttagcggtggcaattattgcatcatttggagcaagtattccaaatttaattattgctttaagtatcggtaatataccatcatttgcacggacaatgcgtgccagtgttttagaaattaaacgcatggaatatgtagatgcagcacgtatcactggtgaaaacacttggaatatcatatggcgttatattttaccgaatgcgattgcgcctatgattgtacgtttttcattaaatataggtgtggttgtattaacaacaagtagtttaagtttcctaggacttggtgttgcacctgatgtagctgaatggggcaacattttacgtaccggtagtaactacttggaaacgcacagtaatttagctattgtacctggtgtttgtattatgttcgtcgttttagcatttaattttataggtgatgcagtgcgtgatgcactagatccaagaattcattaa

SEQ ID NO: 413362 - DNA, 1593 bp, Staphylococcus aureus
atgtcaaatttattagaagtcaacagtctgaatgtacaattcaattatgatgaaactacagttcaagcggtaaaaaatgtctctttcgaattacgaaaaaaacatatcctaggtattgttggtgaatcaggatcaggaaaaagtattactgctaaatctattttagggctactaccagattatccagatcacacattaacaggagaaattatttttaatgggcaatcgttaaataatttatcaacttcagcgttacaacaaattcgaggtaaggatatttcaatgatttttcaagatccactctcttcgttgaatccaagattaacgattggcaaacaaattacagaagtactatttcaacataaacgtgtatctaaatctgaagcaaagtcgatgacaataaacattttagaaaaagtaggtataaaacatgcaactcgacaatttgatgcttatccacatgaactttctggtggtatgcgtcaacgtgtcatgatagcaatggcattgattttaaagccacaaattttaatcgcagatgaaccaacaacggcattagatgccagtacacaaaatcaattactgcagttaatgaagtccctttatgagtacacagaaacatctattatttttatcactcacgatttaggcgctgtgtatcaattttgcgacgatgtgattgtaatgaaagatggaagtgtcgttgaaagtggcacggttgaaagtatttttaaatcgccacaacatacctatacaaaacgcttaatagatgcgattcctgatattcatcaaacgcgtccgccaagaccgttaaacaatgatattttattaaaattcgatcgcgtgagcgtggattacacatcaccgagtggcagcctataccgagcagttaatgatattaacttggctattagaaaaggcgaaacattaggcattgtcggtgaatcagggtcagggaaatcgacattagctaagacggtcgtcggtctaaaggaagtgtcagaaggctttatttggtataacgaattaccattaagtttatttaaagatgatgaattgaaatctttacgacaagagatacaaatgatttttcaagatccattcgcatctattaatccaagatttaaagtcattgatgtgattaaacgaccactaatcattcatgggaaagtcaaagataatgatgacattattaaaactgtcgtatcgttgttagaaaaggttggcctagatcaaagtttcttatatcgctatccacacgaattatctggtgggcaacgtcagcgtgtaagtatcgcgagagcacttgctgtagaacctaaagtgattgtttgcgacgaggcagtgtccgctttagacgtttcaattcaaaaagatatcatcgagttattaaaacaattacagttagacttcggcatcacttatttattcatcacacatgacatgggtgttatcaatgaaatatgtgatcgcgttgcagttatgaaaaatggcgaaatcgttgaactgaataacacagaagatattatcaaacatccgcaatcagactatgcaaagcaacttatttcagaagtagcagttattgctaaataa

SEQ ID NO: 413363 - DNA, 732 bp, Staphylococcus aureus
gtggttataaatgatcaagtagcaaaaactgtattcaataataatgctattggtaaatcgctatatattgagggacagggatttgaagtcataggaattacggataaactatattctgactcatctaccgttataatgcctgaaaatacattcaactactatatgggacacttacatcaaggtctgcctaccttacagataattattgaagatggttacaataaaaaaactgtagttaaaaaagtagaatcactattaaataaaaaaggatcgggctctgttttaggtgagtatacatatacagacactgaagaaattatcaaaagtattgataaaatttttgatagtattacttattttgtagcagctgttgccggtatttcactttttattgctggtattggagttatgaatgtcatgtatatatctgtagctgaaagaacagaagaaattgcgatacgacgtgcatttggtgcaaaaagtcgagatattgaactacaatttttaatagagagcattttaatatgtgtgacaagtggttttattggacttattttaggtgttgtgtttgcaacaataattgatgtattaacaccagattatattaaaagtgtagtaagtttgagttctgtcataattgcggttagtgtgtcgatattaattggacttctttttggatggataccagctcgcgcagcatctaagaaagagctcatagatattataaaatag

SEQ ID NO: 413364 - DNA, 2046 bp, Staphylococcus aureus
gtgaggaagaaacttttcggtcaattgcaacgtattggtaaagcgctaatgttacctgttgcaattttaccagcagcgggtctgttattagctatcggtacagctatacaaggcgaagcattacaacactacttgccgtttatacaaaatggtggcgttcaaaatgtcgctaaattaatgacagctgccggtagtattatttttgaaaacttacctatgattttcgcattaggtgtcgcaatcggattagctggcggtgatggcgtagcagctatcgcagcattcgtcggttacataatcatgaacaaaacaatgggcgactttttacaagttacacctaaaaatgttactgatccagcgagtggttacgctagcattttaggtattccaacattacaaacaggtgtgttcggcggtattattatcggggccctggcagcttggtgttataacaagttctataacattaacttaccatcttatttaggtttcttcgctggtaagcgtttcgtacctattatgatggctacaacatcatttattttagcatttccaatggcattaatttggccaacgattcaatcaggattaaatgcattcagtacaggattattagattcaaatactggtgttgccgtattcttatttggtttcatcaagcgtttattaattccattcggtctacatcacattttccacgcaccgttctggttcgagtttggttcatggaaaaatgcagctggtgaaattattcacggtgaccaacgtatctttatcgaacaaattcgtgaaggcgcacatttgacagctggtaaattcatgcaaggtgaattccctgttatgatgttcggtttacctgcagcagctttagcaatttatcacacagctaaacctgaaaataagaaagtagtagcaggtttaatgggttctgctgctttaacatcattcttaactggtattacagaacctttagaattctcattcttattcgtagcaccattattattctttattcacgcagtacttgatggtttatcattcttaacattgtacttattggatgttcacttaggttatactttctcaggtggtttcatcgactacgttttacttggcgtactacctaataagacacaatggtggttagtcattcctgtaggtcttgtatacgcagttatttactacttcgtattccgattcttaattgtaaaattaaaatacaaaacaccaggtcgtgaagataagcaatcacaagctgttactgcttcagcaactgaattaccatatgcagtattagaagctatgggtggcaaagcaaacattaaacatttagacgcttgtatcacacgtctacgtgttgaagttaacgacaaatctaaagttgatgttcctggtttgaaagatttaggcgcatctggtgtattagaagtcggcaataatatgcaagcaatttttggtcctaaatctgaccaaatcaaacatgaaatgcaacagattatgaatggtcaagtagtagaaaaccctactactatggaagacgataaagacgaaactgttgttgttgcagaagataaatctgcaacaagcgaattgagccatatcgttcatgcaccattaactggtgaagtaacacctttatcagaagtgcctgatcaagtgttcagcgaaaaaatgatgggtgacggtatcgctattaaaccttcacaaggtgaagttcgtgcaccattcaacggtaaaatacaaatgattttcccaacaaaacatgcaattggtcttgtatcagatagtggtttagaactattaatccacatcggtttagacactgttaaattaaacggagaaggctttactttacatgttgaggaaggtcaagaagttaaacaaggtgatttattaatcaactttgatttagactacatccgcaatcatgcaaagagtgatattacgcctattatcgtgacacaaggaaacattacaaaccttgattttaaacaaggtgaacatggcaacatttcatttggcgatcaattatttgaagctaaataa

SEQ ID NO: 413365 - DNA, 741 bp, Staphylococcus aureus
atgattaaaattcaacaattacaacatcactttggatcacataaagtaattcataactttaatttggacattagcaagggagaaatagtcactttcatagggaaaagtggttgcggaaagtctactttactcaatgttatcggtggatttattcatccatcgtctggtcgtgtcattattgataacgaaattaaacaacagccatctccagattgtttaatgctatttcaacatcataatttgctgccatggaaaacggttaatgacaacattaggattggatttcaacagaaaattagtgatgaagagattaacgcacagcttaaattagttgatttagaagacaggggaaagcattttcccgagcaactgtccgggggtatgaaacaacgtgtggcactatgtcgagcgcatgtgcataagcctaacgttatattgatggatgagccattaggtgcattagatgcatttacacgttataaacttcaggatcaactagtgcaactaaaacataaaacgcaatcaactattattttagtgacgcatgacattgatgaagctatttatctttccgaccgcattgttctgttaggtgaagggtgcaatattatttctcaatatgaaattacagcatcacatccacgcagtcgtaatgatagccacctacttaagattcgtaatgaaattatggaaacatttgcattgaatcatcatcaagttgaacctgaatattatttataa

SEQ ID NO: 413366 - DNA, 327 bp, Staphylococcus aureus
atgtttatggcagaaaatagattacaattacaaaaaggcagtgcggaagaaacgattgaacgtttttacaatagacaaggcattgaaactattgaaggcttccaacaaatgtttgtcactaaaacattaaataccgaggatacagacgaagttaaaatcttaactatttgggaatctgaagatagctttaataattggttgaattccgatgtatttaaagaagctcataaaaatgtacgtttaaaaagtgatgacgatggacagcaaagtccaatattatcaaataaagtattcaaatatgatattggctaccactatcaaaaataa

SEQ ID NO: 413367 - DNA, 291 bp, Staphylococcus aureus
gtgaaattcccagtaacaataaataaatttgaaaacatagtttcaaatgaatttgtgttctataatgcaagcaaaattacaattaatgatttaagtataaaacttaaatcagcaatggcaaatgatcaagggataactaaacatgacataggacttgctgaacgcgcagtgtataaagtgtattttaaaaatggttcgtcaaaatatgtagacttaaaaactgagtataaagatgaaagagtatttaaagcaactgacattaaaaaggtagatattgaacttaaattctaa

SEQ ID NO: 413368 - DNA, 663 bp, Staphylococcus aureus; identical to SEQ ID NO: 408855

SEQ ID NO: 413369 - DNA, 732 bp, Staphylococcus aureus; identical to SEQ ID NO: 409080

SEQ ID NO: 413370 - DNA, 783 bp, Staphylococcus aureus; identical to SEQ ID NO: 408857

SEQ ID NO: 413371 - DNA, 378 bp, Staphylococcus aureus; identical to SEQ ID NO: 408858

SEQ ID NO: 413372 - DNA, 1086 bp, Staphylococcus aureus; identical to SEQ ID NO: 408860

SEQ ID NO: 413373 - DNA, 156 bp, Staphylococcus aureus; identical to SEQ ID NO: 409125

SEQ ID NO: 413374 - DNA, 330 bp, Staphylococcus aureus
gtgatctcttctttcgattcacctttactaataatttctccagttaatggattttttagtgttggtgtcgttattgtcttctcacctttttgtccttctcttgttactttttctgttcctggtgctaaatcaggattaaatttacgttctttctcgaatggaatttcttctttttctacaatcgagtctccttttacaggtccatattttgttacactatcgaccggtggtctaactacgtctcctgtttctggattcttaattcctggtttacctggaacttcttctttctctcctgttggtaacttcggatcaaattcgtctcgatga

SEQ ID NO: 413375 - DNA, 168 bp, Staphylococcus aureus
gtgttgttaatcagcagaggtgtatttgatttaaatgattttattagattgaaagtattttcatcgtataacgacatacacgataaaattttgcatttatataggaagtttttagatttaattgatttaacagataacacatttgaaaaaatagttaaatcaaattag

SEQ ID NO: 413376 - DNA, 393 bp, Staphylococcus aureus; identical to SEQ ID NO: 410718

SEQ ID NO: 413377 - DNA, 1410 bp, Staphylococcus aureus
atggcaagaaaattgcatagagagttgaataacagacacatccaattgatagcaattgggggcgcaattggaactgggttattcctaggatcaggtcaaacaatatctttaactggtccatcactgttattcacatacatgattattggggttgtactattcgcttttatgcgcgcattaggcgaattgttgttgagcaatacaagatttaattcatttgttgatattgcaaatgaatatttaggcccttttggtggctttgtcattggctggacttactggttatgttggattgtatcaagtatgtcagacctaactgcgatgggacaatactttgcattttggtatccacaagtcccaaattggattaccgtgctatttattgttttaatcttgattagcttcaacttattaggtgccagattatttggtgaactggagttttggttctctattattaaagttgttacaattattgcgatggttatcgttggtcttgtattaatctttttctcatttaaaacacattatggacatgcatcattcacaaacttaatcagtcacggtggcatgttccctggtggaacatttggtttcttaatgtcattccaaattgctgtatattcattcattggtattgaacttataggtgtaactgctggtgaaacgaaagatcctgaaaaaaccttaccgaaagcaattaataatgtacctatccgtattttattattctatatcggtggtctattagtaattatgtcagtcataccttggaatgatatcgatccaaatagtagccctttcgttaaactctttacattaatcggcgtgccatttgcagcaggtgtcgttaactttgtcgtgctaactgccgcggcctctgctacaaatagtggtatctattcgaatagtcgtatcttattcggactgtcacaacaagggttaggtcctaaagttttaaataaaacgaatagtcatggcgtgccttatttatcaatgttagtttcatcaattgcattacttatagcagccttgttaaactacattttccctaatgcaattcaactattcatatacgttacaacgttatcaactgtgttgtttttagttgtttgggcaatgattattgtcgcttatctaatgtatttgaaaaagcatcctgaggcacataaaaacagtaaatttaagttgattggtggtaagcctattgcttacattattctagcgttcttcttctttgtattcattttattattctttagtgacgaaacaagagcagctatttatatttcgccattctggtttatatttttatttttcttttataaaaaatacaaaacgaatgctgaaaagctcgcgtatgaacaacgacaaaatgacagcggtcatttcagatatgacaatcaataa

SEQ ID NO: 413378 - DNA, 621 bp, Staphylococcus aureus
atgaaaagattagttacagggttactagcattatcattatttttagctgcatgtggtcaagatagtgaccaacaaaaagacggtaataaagaaaaagatgataaagcgaaaactgaacaacaagataaaaaaacaaatgattcatctaaagataagaaagatgatagtaaagacgtaaacaaagataataaagataatagtgcaaacgataaccagcaacaatctaattcaaatgcaacaaacaatgaccaaaaccaaacaaataataaccaatcaagtaataatcaagcgaataataatcaaaaatcaagttacgttgcaccatattatggacaaaatgccgcgccggttgcacgtcaaatttatccgtttaatggaaataaaactcaagctttacagcaattgccaaatttccaaacagctttaaatgcggctaataatgaagcaaataaatttggtagtaataataaagtgtataatgattattctattgaagaacataatggcaactataagtatgtgtttagttttaaagacccaaatgcaaatggaaaatattcaattgtaacggttgattatactggacaagcaatggttactgatccaaactaccaacaataa

SEQ ID NO: 413379 - DNA, 1662 bp, Staphylococcus aureus
atgaatcgtcgacgtacatggaaagcacgttggcaattatgtattattttcagtttgtttgccttaatgtctaatttaactggtatcgtcatcgatcatcaacatagtttgtcaggaagtgtgtacttccgtttagatgatgatgtatctttagctaacacacgtgtattaacgataggtgtcgcaggattagttggtggcccttttgtaggtctatttgttggcgttatttcaggtattttcagagtgtatatgggtggggcggatgcacaagtttatcttatctcatctatatttatcggtataattgctggttattttggcttacaagctcaaagacgcaagcgttacccgagtattgcgaaaagtgccatgattggaattgttatggaaatgattcaaatgttgagcattttaacattttcccacgacaaagcatatgcggttgacctcatatcattaattgcactaccaatgattattgttaatagcgttggtacggcgatttttatgtctattatcatttcaacattaaagcaagaagagcaaatgaaggctgttcaaacacatgacgtactgcaattgatgaaccagacattgccgtattttaaagaaggattgaatagagaatcggcacagcaaattgcgatgattattaaaaatttaatgaaagtatctgccgtagcaattacaagcaaaaatgaaatcttatcgcatgtaggtgcaggtagtgatcatcacataccaacaaatgaaatattaacaagtctgtctaaagatgtattgaaatcaggaaagttgaaagaagtgcatactaaagaagagattggttgtagtcatccgaattgcccgcttagagcagctatcgtgataccacttgagatgcatggttctatcgtcggtacattgaagatgtattttacaaaccctaatgatttaacttttgtggaacgtcaacttgcagaaggattggcaaatatttttagtagccaaattgaacttggtgaagccgaaacgcaaagtaagttattgaaagatgctgagattaagtcattacaggcacaagtgagtccacattttttcttcaattcaattaacacgatttcagctttagttagaataaatagcgaaaaggcacgagagttactattagaattgagttattttttcagagcgaatttacaaggctcaaagcaacatacgattactttagataaagagttaagtcaagtgcgtgcatacttatcactcgaacaagcacgttatccaggaagatttaatatcaatattaatgttgaagacaaatatcgcgatgtgcttgtaccaccatttttaattcaaattttagttgaaaatgccatcaaacatgcgtttacgaatcgaaagcaaggtaacgatattgacgtgtcagtgattaaagaaactgcaacacatgtacgtattattgtacaagataatggtcagggtatttctaaagataaaatgcatttgttgggagaaacatctgtagaatcagaatctggaactggtagtgctttagaaaatttaaacttacgcctaaaaggattatttggaaaatccgcagcattacaatttgaatcgacatcgagcggtaccactttttggtgtgtacttccttatgaaagacaagaggaggaataa

SEQ ID NO: 413380 - DNA, 723 bp, Staphylococcus aureus
atgattaatgctgaacctattatcagtaaaatgaaaaatcaaaaaattaattatgacaaggtgttgaagaaattaatcgggcagtgggaaagagaagcaatcagacctaaaatcttattgcatagttgttgtgcaccttgtagtacatatacattagagtttttaacacaatatgcagacattgcaatttatttcgcgaattcaaatattcatccgaaaaatgaatatttacgacgtgctaaagtgcaagaacaatttgtggaagattttaatcgcaagactggtgcgaatgtgaagtatattgaagcaccttatgaaccgcataagtttgtgaaaatggtgaaggataaagaattagctgatgaaaaagaaggcggcttacgttgtaccgcttgttttgaaatgcgtttggatattgtagcgaaagcagctgtagaacatggctatgattattttggcagtgcaatcacattatcacctaaaaagaacgcacaattaatcaatgaacttggtatggatgtccaaaaaatatacgatgtgaactatttgccaagtgattttaagaaaagtaaaggttatgagcgttccatagaaatgtgtaatgactataatatctttaggcagtgttattgtggatgtgtctttgcagcgatgcaacaaggtattgattttaaaacagttaataaagaagcgaaagcatttttagaacaatatccagattaa

SEQ ID NO: 413381 - DNA, 807 bp, Staphylococcus aureus
atgaagatagggacaatcgccgatttacatattgatcgtcataataaaaaaacatccgaagattacttagaggcattggttgaaatagttaagtataagaaattggatatattgttgattgcgggggatatctcaaatcattatcaattgacgcaccaatttataacgcaattgacaaaacaattagatatacctgtgaaatttgtacctggaaaccatgatttatgggaagttgaaagtatgactgcgcaagacatttggaataattataagagtatgtcacagtgcttggtaggaaaaccatttatagtaaatgaagaatgggcaatcataggacatactggttggtatgattatagctttgcagcacaacgattttcattagatgagttacaaaaaggaaaacattatggtgcgacttggcaagataaagaacgaatatcttggggcatatcagatcaaaatttatctaaaatagtggctgaacaagtgaagaaagatatattagaagtaggaaatagacgagtgattttagtcacacatgttgtgacgcaccctgatttcattgttcctatgccgcatcgtatattcgatttttataatgcatttattgggacaagtgatttcaatcctttgtatgcgatgttcgatataccatatagtattatgggccatgttcattttcgtaaaagtgtgatagatgatggcagatgttatctctgtccgtgtctaggctatccaagacaatggcgttcagaagatatttaccaggaaataaatgagacgatacaaataatagaaatttaa

SEQ ID NO: 413382 - DNA, 846 bp, Staphylococcus aureus
ttgaaaaagttaatatttttaattgtaattgctttagttttaagtgcatgtaattcaaacagttcacatgccaaagagttaaatgatttagaaaaaaaatataatgctcatattggtgtttatgctttagatactaaaagtggtaaggaagtaaaatttaattcagataagagatttgcctatgcttcaacttcaaaagcgataaatagtgctattttgttagaacaagtaccttataataagttaaataaaaaagtacatattaacaaagatgatatagttgcttattctcctattttagaaaaatatgtaggaaaagatatcactttaaaagcacttattgaggcttcaatgacatatagtgataatacagcaaacaataaaattataaaagaaatcggtggaatcaaaaaagttaaacaacgtctaaaagaactaggagataaagtaacaaatccagttagatatgagatagaattaaattactattcaccaaagagcaaaaaagatacttcaacacctgctgctttcggtaagactttaaataaacttatcgcaaatggaaaattaagcaaagaaaacaaaaaattcttacttgatttaatgttaaataataaaagcggagatactttaattaaagacggtgttccaaaagactataaggttgctgataaaagtggtcaagcaataacatatgcttctagaaatgatgttgcttttgtttatcctaagggccaatctgaacctattgttttagtcatttttacgaataaagacaataaaagtgataagccaaatgataagttgataagtgaaaccgccaagagtgtaatgaaggaattttaa

SEQ ID NO: 413383 - DNA, 294 bp, Staphylococcus aureus
atgaaaaagaaatttgtttctagttgtattgctagtacaatcttattcggcactttattaggtgtaacttataaagctgaagctgcaacagtacatgtagctggtggtgtttggagtcatggtattggaaaacattacgtatggtctcattatagtcataacaaaagaaaccatggctcaacagcagtaggaaagtattcatcttttagtggtgttgctcgacctggtgttcaatctaaggcatctgctccaaaggcttggggtggaaacaaaacattttatagtcttcactaa

SEQ ID NO: 413384 - DNA, 636 bp, Staphylococcus aureus
atgatgaaattgaaattttgtggctttacatcaataaaggatgttacagcggccagtcaattacctattgatgcgataggtttcatccattatgaaaaaagtaaaaggcatcaaacaattacccaaataaaaaagttagcgtctgctgttccaaatcatatcgataaagtatgtgtcatggtaaatcctgatttaacaacaattgaacacgtattaagcaatacgtcaattaacacaatacagttacacggcacagaatctattgattttatacaggaaattaaaaagaaatattcaagcattaaaatcactaaagctttagctgcagatgaaaacataatccaaaacataaataaatataaagagttcgtagatttatttattatcgacacaccctcagtgtcgtatggtggtaccggtcaaacatatgactggactattttgaagcacataaaagacataccttacttgatagcaggaggcattaactctgaaaatattcaaacagttaatcaacttaaattatcacatcaaggttttgatcttgcatcaggtatagaagtaaatgggcgaaaagatatagaaaaaatgacggcaattgtaaatattgtgaaaggagatagagacaatgaataa

SEQ ID NO: 413385 - DNA, 882 bp, Staphylococcus aureus
atgacacacgattatattgttaaagcattagcatttgatggagagattagggcttatgctgctttgacaactgaaactgttcaagaagcacaaacgagacattatacatggccgacagcatctgctgcaatgggaagaacaatgacagcaacagctatgatgggcgcaatgttgaaaggtgatcaaaaattaactgtcactgtagatggccaaggacctattggacgaattattgccgatgcaaatgctaaaggcgaggtgcgtgcttatgtagaccatccacaaactcattttccattaaatgagcaaggtaaacttgatgtaagacgagcagtagggacaaatggatctattatggttgttaaagacgttggaatgaaagactatttctctggagcaagtccaattgtttcaggagaacttggtgaagattttacttattattatgctacaagtgaacaaacaccttcatcggtaggtcttggtgtattggtaaatcctgataatacgattaaagcagcaggaggatttatcattcaagttatgccaggtgccaaagatgaaacaatttcaaaattagaaaaagcaattagtgaaatgacaccagtttctaaattaattgaacaaggattaacgccagaaggattactaaacgaaatcttaggtgaagaccatgtgcaaattttagagaaaatgcctgttcaatttgaatgtaattgtagtcatgagaaatttttaaatgctattaaaggattgggcgaggctgagattcaaaatatgattaaagaagatcatggtgctgaagcagtatgtcatttctgtggaaataaatataaatatactgaagaagaattaaacgtgttgctagaaagtttagcgtaa

SEQ ID NO: 413386 - DNA, 447 bp, Staphylococcus aureus
atgactgtagataacaataaagcaaaacaagcatacgacaatcaaactggtgttaacgaaaaagaaagagaagagcgtcaaaaacaacaagaacaaaatcaagagcctcaattcaaaaataaattaactttctctgatgaagttgttgaaaaaattgctggtatcgctgcacgtgaagttaaaggtatcttagacatgaaaggtggcttaactgatacattcactaatgcattctcaagtggaaataacgttactcaaggtgtatctgttgaagttggtgaaaaacaagctgctgtagacttaaaagtaattttagaatatggtgaatcagcacctaaaatcttccgtaaagtaactgaattagtaaaagaacaagttaaatatattactggtttagatgctgtctcttatacacatctgacgctgccgacgatactccttgtgtag

SEQ ID NO: 413387 - DNA, 255 bp, Staphylococcus aureus
atgaatttaatcccaagaactagtattgtagtttatttaaaacatatgaaacatgaacgacaaatccgaaaatatggacatatcgttcattcaaatagagatcgtaaatttgtaattatgtatgtgaatgagcaggatgttgatcaaattgtacataaactaatgcaacttaaatacgttagacacattgatggctcaccatataaatacttaaagaaaacttacgaaaaagagaaacacgaaatatataattaa

SEQ ID NO: 413388 - DNA, 1398 bp, Staphylococcus aureus
atggctaaatataaagatattgctagtgacataagagataaaataatcacaggggattggttttatggaatgaaaataccttcacataggcagttggcgatacagtacaacgtaaatagagtaacgattattaaaagtattgagttattagaagctgaaggatttatctatactaaagtaggtagtggaacatatgttaatgactatttgaatgaagcacatattacaaataagtggtctgaaatgatgttatggtcctctcaacaaagaagtcagtatacggtgcaattaattaataaaattgagacagatgattcgtatatacatataagtaaaggtgaattgggtatatcgttaatgccacatattcaattgaaaaaagccatgtctaatacagccagtcatattgaagacttatcttttggttataataatggctatggttatatcaagttaagagatatcatcgttgaacgaatgtcaaagcaaggtataaatgtaggtagagaaaatgtaatgatcacttcaggcgctttacatgccattcaacttttatctattgggtttttaggtcaagatgccataataatttcgaatacaccatcatatattcactctacaaatgtttttgagcaattgaattttagacatattgatgttccttataatcaaattaatgaaattaataccatcattgatagatttattaattttaaaaataaagcgatttatatagaacctaggtttaataacccgacaggtcgttctttaacgaatgagcaaaagcaaaatataattacttatagcgaaagacataatatacctatcattgaagatgatatctttagagatattttttttagcgatccaactcctgctatcaaaacttatgataaattgggaaaagttatacatataagcagtttttcaaaaacgattgcaccagcaataagaataggttggattgttgcttctgaaaaaataatagagcaattggcagatgtaagaatgcaaattgactatgaatccagtattttgtcacaaatggttgtatatgagatgttgaaaaataagtcttatgataaacacttagtaaagttaaggtatgttttaaaagataaacgagactttatgttaaacatcctcaataatttatttaaggatatagcacattgggaggttccaagtggaggttattttgtatggttagtctttaaaatagatatagatattaaatatttattttacgaattgttaagtaaagaaaaaatattaatcaatccgggttacatttatggtagtaaagaaaagagtataaggctatcttttgcctttgaatcaaatgaaaatattaagcatgcgctctataaaatttatacatatgtgaaaaaggtttaa

SEQ ID NO: 413389 - DNA, 873 bp, Staphylococcus aureus
atgaataagcttcgagacactacttttctatcatatttatttactatcatcttgtggggatctgcatttccaatgataaagattgcgttaaatgattttagtgcggaatcattgtcggcatttcgtttaattttagcaacaataattctcttgccgttcgttattataaagaaattgcctacccctgaactaagagatatccctgttatttttattttaggattttgtggatttgtgatttatcacacagctttaaattttggtgaaactttgattagtgcaggtatatctggaattctagtctctacaacgcctattttttctagtgctttagcttatatatttttaaaagagcatttttcaaaatggaattggttaagttcactcgtcgcatttataggaatatccattatttcaataagtaaagatgattacacaactattaatgtattaggtgtttttattattttacttgcatcttttagtgaaagtttgtattttactttccagaaaaaatacatagaaaaatacagcttcatcgctttcacactatatacaataatggcaagctcaccatttatgcttatttttattcctgaaatcatcaacgatatacacggcgccacttttacatcaatagtatcggtactttatttagctatattccctactataattccatacgttttgcttgcttatatcgtgaagtcagttggtgtctctgatgcaacaatgtctctttatttaacacctatcgtttctttattattatcttatctgttattagacgagctaccaacaacccttgctattataggtggaattatcactctactaggcgttagtttaagtaacttctttcaaaatacataa

SEQ ID NO: 413390 - DNA, 1776 bp, Staphylococcus aureus
atgtattacagttatggtaactatgaagcatttgcgcgccctaaaaaacctgaaaatgtagaaaacaaatctgcttacttaatcgggtctgggttagcttcacttgcggcagcttgtttcttaattagggatggtcaaatggaaggttcgaagattcatattttagaagagttacctaaagcaggtggtagtcttgatggtgaaaatatgcctttaaaaggctatgttgtccgcggtggtcgtgaaatggagaaccactttgaatgtttgtgggacttattcagatctatcccttcattagaaatcgataacgcgtctgtattagatgagttctattggctaaacaaagaagaccctaactattctcgctgtcgtgttattgagaaacagggtcaacgtttagtcacagacggagacttcactttgactaaaacggcgattaaagaaattttagatttatgcttaacgaatgaagaagatttagatgatgtcaaaataacagatgtattttccgatgacttctttaattcaaacttttggatttactggaaaacgatgtttgcatttgaaccgtggcattctgctatggaaatgcgtcgctatctaatgcgattcgttcatcatattggtggtctcgcagacttttcagctttaaaattcactaaatataatcaatatgaatctttagtattacctatggttgaatatttaaaatcgcatggggttcaatttgaatacgatgtaaaagtagaagatattaaagtagatgttacgacaagtcaaaaaattgcccgagaaatattaattcaccgacatggcaaagcagagtcaattaaactgactgtagatgatcttgtctttgtgacaaacggtagtattacggaaagctctacgtatggtgataatgatacaccagcgccaccaactgatgaattaggtggtagttggacactatggaaaaatttagcacgacaaagtcctgaatttggtaatcctgataagttttgccaaaatattcctcaaaaaagttggtttgtttcagcaacatcgacaacaaacaataaagatattatcgatacaatagaaagcatttgtaaacgtgatccacttgcaggcaaaactgttactggcggtattattacaatcaatgattctgcatggcaaatcagttttacaatcaatcgtcagcaacagtttaaagaccaacctaaaaatgaaatatctacatggatttatgccttatattcagatgtaaatggcgattatattaaaaagccaatcacagaatgtagtggtaatgaaatatgtcaagaatggctgtatcacttaggtgtaccaactgacaaaattaaagacttagcaaaacatgcatctaatacgattcctgtttatatgccatatattacctcttatttcatgacgcgtgctatcggcgacagacctttagtcgttccgcatcaatcacaaaatttagcatttattggtaactttgcagaaacagagctagacactgtatttacaacagaatattcggttcgtactgccatggaagctgtttatcaattactaaatatagatcgtggtattccagaggtcatcaatagtacatttgatcttcgcgtcttaatggatgccgtatacgaactgaatgaccatcaagatttgcgcgagattactaaagattcgaaaatacaaaaactcgcattagctggattccttaaaaaggtaaaaggtacgtacattgagacattattaaaagaacacaaattgttataa

SEQ ID NO: 413391 - DNA, 1098 bp, Staphylococcus aureus
atgtatatcaatatgaaagattatgggttaacaggcataaacaaaactaaagatactcgagcaatacaacatgcgttaaatcgtggaagatgtaaaccaacgacagtttatataccgaaagggacgtatgatatttgcaaaccattaacgatatatggcaatacaacacttttgttggataatgaaactattttacgccgatgtcattctggtcctttattaaaaaatggtcatcgctttggtttttatcgtggttataatggacacagtcatattcatattaaaggcggcaagtttgatatgaatggtgtatcgtatccttataacaatacagctatgtgcattgggcatgctgaagatattcaattaataggtgtgaccattaagaatgtagtgagtggtcatgcaattgatgcttgtgggattaacggactctatattaaaagctgttcatttgaaggattcatagactatagtggcgaacgcttttattctgaagcaatacaattagacattcaagtacctggtgcttttccaaaattcggaacgacagatggtacgataacgaaaaatgtcgttatcgaagattgttattttggaccttcagaattgcccgaaatgggaagttggaatcgtgctattggctcacatgcaagtagacataatcgttactatgagaatattcatattagaaataatatatttgaagatatacaaggttatgcattaactcccttgaagtataaagatgctttcattattaataataagtttattaactgtgagggtggtattagatatttaggagttagagatggtaaaaatgcagcagatgtgatgacaggaaaagacttaggttcccaagcaggcataaatatgaatataattggaaatgaatttaaaggatcaatgtctaaagatgcgatacatgtacgtaattataataatgttaaacataaagatgtattaatcgttgggaattcattcaataattcgactcaatcaattcatttagaagatattgatacagtgtttttaagtcctgttgaagcgggtattcaagttactacaatcaatgtagatgaaatgaaaaagtaa

SEQ ID NO: 413392 - DNA, 888 bp, Staphylococcus aureus
atgatgttagtggatatcaaacatatgaaatattttattgaagtcgttaagcaaggaggcatgactaatgcttccaaatcattatatattgcacaacctacaattagtaaagcaattaaagatattgaaaatgaaatgggcacgcccttatttgatagaagtaaaagacatttaattcttaccgatgcaggtcaaattttttatgagaaaagtaaagaaattgttgcactgtatgattatttaccatctgaaatggaacgcttgaatggactggaaacaggacatataaacatgggcatgtcggcagtcatgaatatgaagattcttatcaatattcttggtgcattccatcaacaatatccaaatgttacatataatttgatagaaaatggcggtaaaacaattgaacagcaaattatcaatgatgaagtagatataggcgtgaccactttgccagtcgatcatcatattttcgattatactaccctagataaggaagatttgcgacttatcgtgagcagagagcatcgactcgcaaaatatgaaactgttaaactcgaagatttagcaggtgaagacttcattttatttaataaagacttttacttgaatgataaaattattgaaaatgctaaaaacgttggctttgttccgaatactgtagcgcaaatttcacaatggcatgttatagaagatttagttacgaatgaattaggtattagtattttaccaacatcaatttcagagcaactaaatggagatgtgaagctactacgcattgaagatgcgcatgtacattgggaattaggtgttgtttggaagaaggataaacaattaagtcatgccacaacgaaatggatagaatttttgaaagatcgtttaggctaa

SEQ ID NO: 413393 - DNA, 258 bp, Staphylococcus aureus
gtgcagaataatgcggtaaaggcaaaaaaatctggaatagtatcggattgtagacatttactaaaacatccagataatttaatggatggcacggaagatccaaaagttatcaagcagttgaaaaacgtaaatgtaacatcgaataatggtgctgtaaatccaagtgttaaagcaaatgatactcacacaaaaagtaataaacaaatggctaaacaacaaagtaatcattgggatagcaagggccaagtctatacataa

SEQ ID NO: 413394 - DNA, 918 bp, Staphylococcus aureus
atgatgactgaaaaacaatttaaattaactgtacaagataatacgaatattgaagttaaagtgaattatacagatgtagattcaaaaggaattattcatatatttcatggtatggctgaacatatggaacgttacgataaattagcacatgcactttcaaagcatggcttcgatgtgatacgtcataatcatcgaggacatggtattaatattgatgaatcaacaagagggcattacgatgatatgaaacgagttatcggtgatgcctttgaagtagcgcaaacagtgagaggcaatgttgataaaccatacattataatcggacattcaatgggatccgttatagctagattgtttgtagaaacatatccgcaatatgttgatggtctaattttaagtggtactggtatgtatccattatggaaaggattaccaaccgttaaagtgttacaactgattacaaaaatttatggtgctgagaaacgagttgaatgggttaaccagttagtatcaaatagttttaataaaaaaatacgtccattacgtacacaaagtgattggatttctagtaatccaattgaagtagataactttattaaagatccatatagtggatttaatgtgtcaaatcaattattatatcaaacagcctattatatgctacatacatcacaattaaaaaatatgaaaatgttaaatcatgccatgcctatattattagtttcaggatatgacgatcctttaggtgattatggtaaagggattttaaaattggcgaatatatatagaaaagctggcattaaaaatgttaaagtgaatctttatcatcataaacgtcatgaagtgttatttgaaaaagatcatgacaaaatttgggaagacttgtttaaatggttgaatcaattttataaaaaataa

SEQ ID NO: 413395 - DNA, 405 bp, Staphylococcus aureus
atgcataaaatattttcaaagaataacctgatattttttgtattcgttgcatttatttttgtggtaattgtactgcaattctttgtcagtagtgaaaatgcaaccaaagtcaatttatcacaaacttttgaacctattagttggttgcatttattaggaactgatgattatgggagagatttatttacccgaattattatcggtgcacgttcaacattgtttgttactgttttaacattaatagctatcgttgtcataggtgttacactaggtctatttgccggatataaaaaagggtggattgaacgattagtgttaaggtttattgatgttggtctaagtattccagaatttatcatcatgattgctttagaagcttttttcaaccatctttgtggaatttag

SEQ ID NO: 413396 - DNA, 765 bp, Staphylococcus aureus
atgttaaatgtattattattaattttaaatttaattgcaatatgtagtgtaaacaatgcatatgcaaatgaagaagatcctaaaatagagagtttgtgtaagaagtcaagtgtagaccctattgctttacataatattaatgatgattatataaataatcgatttacgacagtaaaatcaattgtatcaactacagaaaaattcttagacttcgatttattatttaaaagtattaattggttagatggaatatctgctaaatttaaagatttaaaagtggaatttagctcatcagcgatttctaaagaatttctaggaaagactgttgatatttatggtgtttactataaagcacattgtcatggtgagcatcaagtggatactgcctgtacatatggtggggtaacacctcatgaaaataataaattaagcgagcctaaaaatataggagtagctgtgtataaggataatgtaaatgttaatacatttatcgttactacagataaaaagaaagttactgcacaagaacttgatattaaagtaagaacaaaattaaataatgcatataaattgtatgacagaatgactagtgatgtacaaaaaggttatattaaatttcattctcattcggagcataaggaatcattttattatgatttattttatattaaaggaaatttaccagatcaatatttgcaaatttataatgataataaaacaatagattcatcagactatcatattgatgtttatttatttacataa

SEQ ID NO: 413397 - DNA, 141 bp, Staphylococcus aureus
atgattttagataatgtgaatccaaatgatttatttccaactgaaaaaaagggtccgtcagtgctaggaataattgagtatcaagttcaaggtgagaatgaattctgtctcttatacacatctccgagcccacgagactag

SEQ ID NO: 413398 - DNA, 702 bp, Staphylococcus aureus
atgttagcggctcgtgcatgtgtatttagcggtagtggtttaatcactgtagctacacatccaacaaatcattcagcattacattctcgttgcccagaagcgatggttattgatattaatgatacgaaaatgttgacgaaaatgattgaaatgactgacagtatactaattggtccaggtcttggcgttgatttcaaaggaaataatgccattacattcctactacaaaatatacaaccgcatcaaaatttaatcgtagacggcgatgcgattacaatctttagtaaactgaaaccgcaattacctacgtgtcgtgtaatattcactccacacctcaaagagtgggaacgtttaagcggtattccaattgaggaacaaacttatgaacgtaatcgtgaagcggtagatcgtttaggtgcaacagttgtactaaaaaaacatggtactgaaattttctttaaagatgaagactttaaattgacaattggtagtcctgcgatggctactggtggtatgggtgatactcttgctggcatgattacaagttttgtcggtcaatttgataacttaaaagaagcggttatgagtgccacatatacacatagttttattggcgaaaatcttgcaaaagatatgtatgtggtgccaccatcaagacttatcaatgaaataccttacgcaatgaaacaattagaaagttag

SEQ ID NO: 413399 - DNA, 1311 bp, Staphylococcus aureus
gtgattaaaaataattctgaacgtaagccaaaaggactgtggactgcaaatacgaatggtgagaaaattcattactatgaagcaatgacggaacgtgatgaagcggaatttgtaatacgagaaattatgaagcatcaacgtaatggtaagaaatatcaagatatggcaattttatatagaacgaatgcacaatcacgtgtacttgaggaaacattcatgaaatctaatatgccatacacaatggttggtggccaaaagttctatgaccgtaaagaaatcaaagatttattaagttatttgcgtataattgccaatagtaatgatgacattagtttgcaacgtattattaatgttccaaaaagaggtgtaggtccttcatctgttgaaaaagttcaaaactatgcacttcaaaacaatatcagtatgtttgatgcacttggagaagctgattttatcggattgtcaaaaaaggtgacacaagagtgtcttaatttttacgagttaatccaaagcttgataaaagaacaagaatttttagaaattcatgaaatagttgatgaagtattacaaaagtctggctatcgagaaatgcttgaacgtgaaaatacattagaatctcgaagtagattagaaaacatcgatgaatttatgtcagtaccaaaagactatgaggaaaataccccattagaagaacagtcattaattaactttttaacggatttatcgttagtagctgatattgatgaggcagatactgaaaatggcgtaacactaatgacgatgcactcggctaagggccttgaatttccaattgtctttataatggggatggaagaatctttattcccacatattagagcgattaagagtgaagatgatcatgaaatgcaagaagaacgtcgtatttgttatgtagcaattacaagggctgaagaggtgttatatatcactcatgcgacatcaagaatgttatttggtcgccctcagtcaaatatgccatccagatttttaaaggaaattccagaatcactattagaaaatcattcaagtggcaaacgacaaacgatacaacctaaggcaaaaccttttgctaaacgcggatttagtcaacgaacaacgtcaacgaaaaaacaagtattgtcatctgattggaatgtaggtgacaaagtgatgcataaagcctggggagaaggcatggtgagtaatgtaaacgagaaaaatggctcaatcgaactagatattatctttaaatcacaagggccaaaacgtttgttagcgcaatttgcaccaattgaaaaaaaggaggattaa

SEQ ID NO: 413400 - DNA, 285 bp, Staphylococcus aureus
atgaatttggattgtataagcttattagacaaaagagacaagttgtttaataacaacggtaaaccagtatttatagttattaaagactttgaaaacagaatcattgaagagggtgaacttaaaacctataattcagctggtagcgatttcgatttactagaggttgagcgacaagatttcaaagtatctgatttaccgtcaaacgatgaattgtatattaaacatacacttgtagaccttaaacaacaaattaaattggatttatatttaatgaatgaatattaa

SEQ ID NO: 413401 - DNA, 369 bp, Staphylococcus aureus
ttgaaaacgattttaaaaacaataacatatcttgtacttactatcattggcgcttatgctgctttattcattttaaaaacaatagactctcatggtataacagatcaatttaacccattagtaaaggaagatgattcttatgttaaaacgacagaggtgtctactagaatggatgatcaactccgaagttatactcaaagtgcttttaataaagaagggaaagagacgcaattaatgtatactgctacatttgatgttaaaccgcatagatacttgaaaattacacataaaggtcatcatgtagaaacttttgaagaagttgaaaaggaagaagtaccaaagaaagcattagacaaactgagtcgataa

SEQ ID NO: 413402 - DNA, 189 bp, Staphylococcus aureus
atgaacttatggggtaatataggtgcattaatcagtccgctattagcaggtctattcgtagaacatttaggttggacaatgacattccaattgttaatcgttccagcagtaatcgctgtgattatgtggttctatgtgaaaccagatcaacctttaattgttagtgatgataaagcaatagaaaaataa

SEQ ID NO: 413403 - DNA, 1173 bp, Staphylococcus aureus
atgaaaatagcaactctgaacaaaggcaaagaaacaaaatattttaatggatatcctttaattgaagaagaggatatctattcacaagatcatttaaaagaaggagatatttttcaaattgtgactgataaatcacaatatgttgcaacggcttatgttggtcgccaacataaaggattaggttgggttctaacatacgataaagctcaagaaatcaacacagctttctttgtgaaattgtttaatactgcattagcagaacgtgaatattattttaatatagatggaacaaatgcttttagattatttaatgctgaaggtgatggtgttgggggattaacaatcgacaattatgatggtcatttgttgattcaatggtactcaaaaggtatttataaatttaaatatgccattcttgaagcggttagaaaagtatttgattataaatctatttacgaaaaagtaagatttaaagacagcgaatatagtggtggttttgttgaaggagatgcacctgagtttccaattgttatcgaagaaaacttcacattttataatgtagaccttgaagatggtttgatgacaggtatctttttagatcaaaaagaagtgcgcaagaaattaagggatcaatatgccaaagaacgccatgttttaaacttatttagttatacaggtgctttttctgtaatagcagcaagtgaggcatcttcaacaacaagtgtagatttggctaatcgttctcgtagtttaactgaagaaaattttggattaaatgctattgatcctaaatcccaatatatttatgtcatggacacttttgatttctataaatatgctgcacgacatggacatagttatgacacgatcgtgattgatccacctagctttgcgcgtaacaaaaaacgtacattttcagtgcaaaaagattatgacaaattaattaatggcgccttaaatatcttatcatctgaaggaacattattgttatgtacaaacgcaagtgtatatccattaaagcaatttaaaaatactattaaaaagacgcttgaagagagtggcgttgattatgaattaactgaagttatgggattaccaaaagattttaaaacgcatccacattataagccatctaaatatttaaaagctgtttttgtaaatattagacattaa

SEQ ID NO: 413404 - DNA, 663 bp, Staphylococcus aureus
atgaataattacggtattccacaaaatgccattataaccattgcaggtacagttggtgttggaaaatcaacactaacgcaagcacttgcagataaattaaactttaaaacgtcttttgaaaatgtcgaacataatccatatttagataaattttatagcgattttgaacgatggagtttccatttgcaaatttacttcttagctgaacgttttaaagaacaaaagcgtatgtttgaatatggtggtggctttgtccaagatcgatcaatttatgaagatgttgatatttttgcaaaaatgcatgaagaagaaggcacaatgagtaaagaagatttcaaaacatattcagacttatttaatgccatggtcatgacaccttattttcctaaacctgatgtaatgatttatttagaatgtaactatgatgaggtcattgatcgtattattgaacgtggtcgcgaaatggaaattaatacagaccctgaatactggaaaaagctatttaaacgctatgacgattggattaatagctttaatgcatgtccagttgtacgtatcaatattaatgaatatgatatccataaggaccccgaatctttaaatcctatgatagacaaaattgctcgaattattcaaacatatcgacaagtagatacacgataa

SEQ ID NO: 413405 - DNA, 801 bp, Staphylococcus aureus
atgaatttggattggtactatacatttgtcattttagcgaagacgttaaactatcgattagctagtgaagaaattaatctcactataccttctatacataagcaaattaaaaatttagaacagcatctcaatgtgaaactatttgaaacttataaaaatcaaattatcttgactgaagatggtcatacatttcttccaattgcgcaaagttttattgaacaatatgaaagtggcatcaaacatatccaacttaaaaaaacgatgtttcaatcgaaattaaatgttgtcgtgtcttcatatatcgcgacattcattatgcccaaatttttaaaatctttctttaacgagcatccttttatcgatgtttctcttcatgtcaaaaatgaaaatattgaaaaagatattaataatcatacgtatgacatcgggattagcagaaatcaacctaaactaagagaagttcattctgaaaaagtatgcgaaggtaaaattgtattgattgctcccaataaagagaataatcatcttctaactgaggcatctttatttgaaaaatacaaaataataagtgataaccatccagaatattggtcatcacttaaaaataatattttaaatatttatgaaaaagcacaatttctatctatcaatgatgtgcatacttcaattaaattaatcgaaatgaatcaaggtatatcattcctgcctctttatataacaacaaatagtgattacaatatttcggttattaacacgaaaattttacaagcacctatttcactgtctcttatacacatctga

SEQ ID NO: 413406 - DNA, 1194 bp, Staphylococcus aureus
atgttgtacttagaagttttgaaaaatagaaactttacatatttattgattggtaatttcttacgtcggagttgctttgtgctgttttcgctacaaataatttggtttactgttgaattgacaaaccaatcatctttaaaattatcaatgatggttatgagtcaaacactaccatttattatatttggtattttcggtggcgcatattctgataaacataataaaaagaaaatactttatctatctgatcttatactaagttggattattataattattcctttacttgcaataacatcaaatttaaattatctgacgcttctaaccatatctacagctatcaccattattaactgctatacggatcctgcatttagggcaattcttcctgaaattattgatgaggagcatttagcaacaagtaatgcgttaatcgatagtttgcaaagaggctcaaatattattttacctgctttaattggtgtcattgtaatactagttggtaatgttggcgtcttttttatttgcagtatattgctatttttaggatttatttttaatgcacttttaaaatatacaaataacaacatgattgatagacactcaaaagaagatttttctgaaacttgggaattcttgaaaaaatctaaagaaattccatttatcataatcatccaatttgcctgtatattgattaatactggactttggcgtgttgcattaccattgtttatttccaatatattaaaagagggcgttggtgtatatggactagctacatcatgtttaggtatagcgtctttattaatgtcattgattatgggtttactgtcagaaaaacgattaatctttaaatttagtattggtgttttagtttgggggattggcttatcgataattaatgtgtttccaagtgtggcgatactatatataggtgcaactttagtgggacttggacaatctatagagggactaacaagatcagttgccattcaaataaaaacgccaaatcatttgatggggaaagtatttagtatctcatctacatcgaattatgcagcggatacattgtctttaggactgataagtataattatacctttactaagcttaagtaatatatttatatcaggaggtgcaattatttcaatgcttagcttagctgggttaaagtttgttaagaagtctatgtaa

SEQ ID NO: 413407 - DNA, 1065 bp, Staphylococcus aureus; identical to SEQ ID NO: 412205

SEQ ID NO: 413408 - DNA, 594 bp, Staphylococcus aureus
atgggcgttagaaaagggacgaaagcattagatgtttgttgtggtactggtgattggacaatcgcattaagcaaagctgtaggaccaacaggtgaagttactggtattgactttagtgagaatatgttagaagtaggaaaagaaaaaactgcttcaatggaaaatgttaaacttgttcatggtgatgcaatggaattgccgtttgaagacaattcttttgattatgtaacaattgggtttggattaaggaatgtgccagactatttagtcgcgttaaaagaaatgaatagagtacttaaaccaggtggtatggtggtatgtcttgaaacgagccaaccaactttgccagtctttaaacaaatgtatgcattatactttaaatttgttatgcctatttttgggaaattatttgcaaaatcaaaagaagaatatgaatggttacagcaatctacgtttaattttccaggaaaagaagagttgaagcgcatgtttgaagaagcgggtttcataaatgtaagagtacgtagttttacagggggcgttgctgcaatgcaccttggctataaagaaaaagataataccaaaggtgattaa

SEQ ID NO: 413409 - DNA, 723 bp, Staphylococcus aureus
gtgccttctttaattgaacatggatataagcctaagcgtaatgtaccacctaaatcttcgatatctttttgttctggtaataaatctataattgggtatggtgttgctgggtctaattcagctgaatgtgcgccttcaaggcctaatacgtttcttgaaaattcaactgttgcaagttgcattcctaaacaaataccaaagaatggtacattgttttctctagcatacttaattgcactaattttaccttcacttgcacggaaaccaaatccacctggtactaaaataccgtcgacatctgcaaggtattcggctgcattttcatctgttacttcacttgaatcaatccatctaatgtcaatatctttggcaaaaggatatccagcatgtttcaatgattcaacaactgataaatatgcatcttgtaagctaacatatttacctactaaaccaattgtaattttaccatctaaattattaacgatatctaacaactgtttccattcatcaagctgtgtttcatatttcgcgtttaattgtaaacgtttaataacgatatcatccatattttgttggcttaattgtaatggaatttcgtataaagagtctgcatcacgacattcaataacactttctttattaatgtcacagaataatgcaattttatcttttaaatcttgtgtcatttcatattcagttcttacaacgattaagtctggttga

SEQ ID NO: 413410 - DNA, 1989 bp, Staphylococcus aureus
atgtttaatgaaaaagatcaattagctgttgatacgctacgtgcactaagtatcgacacaatcgaaaaagcgaattctggtcatccaggattacctatgggagctgccccaatggcttacactttgtggacacgtcatctgaattttaatccacaatctaaagattacttcaatagagaccgtttcgtattatctgcagggcatggttcagcattattgtatagcttgttacatgtttctggtagtttagaattagaagaattaaagcaatttagacaatggggttctaaaacaccaggtcatcctgaatacagacatacagatggtgtagaagttactaccggaccacttggacaaggttttgctatgtcagtaggattagctttagcagaagatcacctagcagggaaatttaataaagaaggatataatgttgtagatcattacacatatgtattagcttctgacggtgatttaatggaaggtatatcgcatgaagcagcttcatttgctggacataataaattaagtaaattagttgttttatacgattcaaatgatatttcattagatggcgaattaaacaaagctttttctgaaaacacaaaagctcgttttgaagcatatggttggaattacttactagttaaagatggtaatgatttagaagaaattgataaagcgattactacagctaaatctcaagaaggaccaacgattattgaagttaaaacaacaatcggatttggttcaccgaataaagcaggaactaatggtgttcatggggcacctttaggtgaagttgaaagaaaattaacattcgaaaattacggtttagatcctgaaaaacgttttaatgtttcagaagaggtatacgaaattttccaaaatactatgttaaaacgtgctaatgaagatgaatctcaatggaattcattattagaaaaatatgcagaaacatatcctgaattagcagaagaatttaaattagcgattagtggtaaattgcctaaaaattataaggatgaattaccacgttttgaactgggtcataatggtgcatctcgtgctgattctggtactgttattcaagcaatcagtaaaactgtcccttcattctttggtggatcagcagaccttgctggttcaaacaaatccaatgtaaatgatgcaacagattatagttctgaaacacctgaaggtaaaaatgtgtggtttggtgtacgtgaatttgctatgggtgctgctgtaaatggtatggctgcacatggaggtttacatccatatggtgcaacattcttcgtatttagtgattatttaaaaccagcgttacgtttatcatcaattatgggattaaatgcaacgttcatcttcacacatgattcaattgcagtaggtgaagatggtcctactcatgaaccaattgagcaattagctggattaagagccattccaaatatgaatgttatccgtcctgctgatggtaatgaaacaagagtagcatgggaagttgccttagaatctgaatctacacctacttcattagtattgacacgtcaaaacttaccggtattagatgtaccagaagatgtagttgaagaaggcgttcgaaaaggtgcctatacagtttatggctctgaagagacaccagaattcctattattagcttcaggttcagaagttagtcttgcagttgaagctgctaaagatcttgaaaaacaaggtaaatcagtacgtgttgtttcaatgcctaactggaatgcatttgaacaacaatctgaagaatataaagaatcagttattccatcaagcgtaacaaaacgtgttgcgattgaaatggcttcaccgcttggatggcataaatatgtaggtactgcaggtaaagttattgctattgacggctttggcgcaagtgcacctggcgatttagtagttgaaaaatatggatttacaaaagaaaatatcttaaaccaagttatgagcttataa

SEQ ID NO: 413411 - DNA, 510 bp, Staphylococcus aureus
atgattttaggattagcattaattccatcaaagtcatttcaagaagcggtggattcttaccgtaaaagatatgataaacagtattcacgaattaaaccacatgtgacaattaaagcgccatttgaaattgaaggtggtgatttagattctgtcattgaacaggttagagctcgtattaatggtataccagcagtagaagttcatgctacaaaagcttctagcttcaaaccaacgaacaatgtgatttactttaaagttgcgaagacggacgacttagaagaattgtttaatcgctttaatggagaagatttctatggagaagctgaacatgtttttgtgccacactttacaatagcacaaggactatctagccaagaattcgaagatatttttggtcaagtagcattagctggggtagaccataaagaaattatcgatgaattaactttgttacgttttgacgatgacgaagataaatggaaagttattgaaacgtttaaattagcttaa

SEQ ID NO: 413412 - DNA, 1521 bp, Staphylococcus aureus
ttgcaaaattttaaagaactagggatttcggataatacggttcagtcacttgaatcaatgggatttaaagagccgacacctatccaaaaagacagtatcccttatgcgttacaaggaattgatatccttgggcaagctcaaaccggtacaggtaaaacaggagcattcggtattcctttaattgagaaagtagtagggaaacaaggggttcaatcgttgattttagcacctacaagagaattggcaatgcaggtagctgaacaattaagagaatttagccgtggacaaggtgtccaagttgttactgtattcggtggtatgcctatcgaacgccaaattaaagccttgaaaaaaggcccacaaatcgtagtcggaacacctgggcgtgttatcgaccatttaaatcgtcgcacattaaaaacggatggaattcatactttgattttagatgaagctgatgaaatgatgaatatgggattcatcgatgatatgagatttattatggataaaattccagcagtacaacgtcaaacaatgttgttctcagctacaatgcctaaagcaatccaagctttagtacaacaatttatgaaatcaccaaaaatcattaagacaatgaataatgaaatgtctgatccacaaatcgaagaattctatacaattgttaaagaattagagaaatttgatacatttacaaatttcctagatgttcatcaacctgaattagcaatcgtattcggacgtacaaaacgtcgtgttgatgaattaacaagtgctttgatttctaaaggatataaagctgaaggcttacatggtgatattacacaagcgaaacgtttagaagtattaaagaaatttaaaaatgaccaaattaatattttagtcgctactgatgtagcagcaagaggactagatatttctggtgtgagtcatgtttataactttgatatacctcaagatactgaaagctatacacaccgtattggtcgtacgggtcgtgctggtaaagaaggtatcgctgtaacgtttgttaatccaatcgaaatggattatatcagacaaattgaagatgcaaacggtagaaaaatgagtgcacttcgtccacctcatcgtaaagaagtacttcaagcacgtgaagatgacatcaaagaaaaagttgaaaattggatgtctaaagagtcagaatcacgcttgaaacgcatttctacagagttgttaaatgaatataacgatgttgatttagttgctgcacttttacaagagttagtagaagcaaacgatgaagttgaagttcaattaacttttgaaaaaccattatctcgcaaaggccgtaacggtaaaccaagtggttctcgtaacagaaatagtaagcgtggtaatcctaaatttgacagtaagagtaaacgttcaaaaggatactcaagtaaaaagaaaagtacaaaaaaattcgaccgtaaagagaagagcagcggtggaagcagacctatgaaaggtcgcacatttgctgaccatcaaaaataa

SEQ ID NO: 413413 - DNA, 1971 bp, Staphylococcus aureus
gtggaatcagttttaggagaagagataaatttaaattcaactataaaaaatgatttaaaagaaattgcaaaaatatattattctttaaataaacactggatagaaaatgacgagtatattgaagaatttatggaaaaatatggtattaatatagccgttaatataaaagaattagcttataaagggaaacatctaggtttaggtaatcgaaacatcgtaaaaagagaaaacaattttttatctgaactggcatttaatatttctaaagattataaaaaggaagttgatattagtaatttcatcgatttagaagacatagaatactcatcacccgcaagttttgacctttactttagaattcacgaagataataaaggtcatagaacatattttccatctgggaatattataacaaatgaatctcatagaactttcgggagatttttaaagtattttgacgatttatcagaagaaatatgcatagaaaaacaacagtgtgcaaagaacaacttttcaaatataatcagctacggtatatcttttaaacctatgagttttaaggctttgaatgttatgaaaaccccacaattttttaaagaaaatgttttttttaactcttttgaaaatgatgataaacttaacaacatttatgttttttgtgatgaaaaagggaaaattcacttttatgataattataagaaaaagaaaatacacttatctacaaccaatatgatgaactatgagtctaattcacctgacctttgtcgtttccttctttcccattctgaaaataactatattaaaagttatccaataaataatagtgacttagaaaagtttcatttctttcctaggatagtacataacaatatagtccttagacttaaaaaatggaagttcaagtcacatatatcaacatatgccaaaataatagaactttataaccaaggtcatattgatcgatttgttaacttagtacaattagataattttatattgttagatcttgaaaatatttattcagaaaaaattttaaaaaaggaattgctaaaaaatgaagattatattgaattggaagaagccgaacacttgataaataacagttctatttataaggagtatgaatttgtagtaccaatcaatatacaaagtaagagtcatgaagaacgtataaacaatgtcacactatttaaagattcgaaaaaaagaattttgacgattaatgattcgttgatttatattaaaatctacttctctctaggatatcgcgaagaaatattacaagaattacatatgtatttgactaaagaaaacatatcagattacttttttattcagtacaatgatcctaagccacacatcagattacgtttgttttcttctccagaaaatttaatccatgatttaaaaataatagaatatttacatagttttgaatttgtcaaaaaaattgatattgcagattatgaaagagaaatagaaaggtatggtggagaggaaaaaattgaacttgcagaagaaatatttaaaaaggattcgaaaaacatcttacaattaataaataagaaaaataaagaacatttagctttcgtattagggttgaattttttgaagaccttttacgaaggattaaatgtagaagaattatcaaatttattacaaattaatataaataaatcagatcaaaaattttatagaaaatggattaagtgtaatgaaaatttggaaaatgaaaccgaacaaattaatgatgtttttgaaaaaagtatgatcaaaaaaaatattagagatttcaaacgcgatttcaaaggaatgctacaaactccatactttttaaatattgtatttagtttcatgcatatgtcttataatcgcttaggaattgataacaatacagaagaacaaattaataaaagcatttatctttatttaaaagaggaatattacaaatggaaaaatttgagaaattaa

SEQ ID NO: 413414 - DNA, 1044 bp, Staphylococcus aureus
atgaataaagataataaatggacgatgataactgcgctttttataactgtaatcagtgtattgttagcatttcatctgaaacaacattatgaccaaattacaaatgagaaccatgctaataaagacaaaattaatattaaaaataaaaatgtgcgcatttatcaaaaccttacatacaatagagttttccctaacagtaaattagatattattacacctgttgatatgtcttctaatgccaaactgccagttattttttggatgcacggtggtggttatattgcgggtgataagcagtataaaaacccattattagcgaaaattgctgaacaagggtacattgttgtgaatgtaaattatgcattggcgccacaatataaatatcccacaccattaattcaaatgaatcaagcaactcaattcattaaagaaaataaaatgaatttacctattgattttaatcaagtaattattggcggtgattctgcaggtgctcaattagctagccaatttgcggcaatacagacgaatgatcgcttaagagaagccatgaaatttgatcagtcattcaaaccatcgcaaattaaaggtgctatactatttggtggtttttataatatgcaaacagttagagaaactgagtttccaagaatacagttatttatgaaaagttatactggcgaagaagattgggaaaagagttttaaaaacatttcacaaatgtcgacagtaaaacaatcgacaaaaaattatccaccaacatttttatctgttggagatagcgatccattcgaaagtcaaaatatagaattcagtaagaaattacaagaattgaatgtaccagtagatactttgttttatgatggtacgcatcatttacatcatcagtatcaatttcaccttaataaaccagaatcgatagataatatcaaaaaagtgttacttttcttaagtcgtaatacatcttctagtggtattcaaactgaagagaaaccacaaatagaaaatccgagtaatgaattaccgttaaatcctttaaactaa

SEQ ID NO: 413415 - DNA, 153 bp, Staphylococcus aureus; identical to SEQ ID NO: 412239

SEQ ID NO: 413416 - DNA, 801 bp, Staphylococcus aureus
atggttaaggctattgcggtagatatggacgggacgtttttagattcaaaaaagacatatgataaacttagatttgaagcgatttttactgaacttagaaatagagatattacatttattgctgcgagtggcaatcaatatgcgaagttgaagtctattttcggggatagagatatgtattttatttctgaaaatggtgcagttatttataatggcaatgagttatataattataaaagctttaatcgtcaggtgtttcaacaggttgtcgattacttaaatatgaagcaaagtattgatcaactcgtcatctgtggtttgaaaagcgcgtatattttaaaacatacttctgaagcgtttaaagaagatacgagattttattatcatcagttaaaagaaattgacagtctacagcaattacctgaggatgattatgtcaaaatagcatttaatattaatcgtgagacgcatccgaatgttgacgaagaagtagcaacgcaattcagcaatgatattaaacttgtctcaagtgggcacgatagcattgatattattatgccaaacatgactaaagggcaggcattaaaacgattgttagataaatgggaaatgtctccttcagagctcatggccttcggagatgcgaataatgataaagatatgttagcgttcgctaagcatagttatgtgatggaaaatagtcatgatgaagaattgttcaatattgcctctgctgtcgctccaagtaatgataagcagggtgtattaacgattatcgaacaagaagtgttgaaaaagtag

SEQ ID NO: 413417 - DNA, 1332 bp, Staphylococcus aureus
atgactcatattcaattagattttagtaaaacgttagaatttttcggtgaacacgaattaaaacaacaacaagaaattgttaaatcaattcacaaaacaattcatgaaggtactggtgcaggtagtgacttcttaggctgggttgatttaccagttgattacgacaaagaagaattttcaagaattgttgaagcatcaaaacgcattaaagaaaattctgatgttttagtagtcatcggtattggtggttcttacttaggtgcacgtgcagcaatcgaaatgttaacgtcatcatttagaaacagcaatgaataccctgaaattgtatttgttggtaatcacttatcatcaacatatacgaaagagttagttgattatttagcagacaaagatttctctgtaaacgttatttctaaatctggtacaactacagaaccagcagttgcatttagattgttcaaacaattagttgaagaaagatacggtaaagaagaagcacaaaaacgtatatttgcaacaacggataaagaaaaaggtgctttaaaacagttggctacaaacgaaggttatgaaacgtttatcgtgcctgatgatgtaggtggaagatattctgttttaacagcagtaggattattaccaattgcaactgctggaattaacatcgaagctatgatgattggtgctgcaaaagcacgtgaagaattatcttcagataaattagaagaaaacattgcataccaatatgcgacaattcgaaacattttatatgcaaaaggttatacaacagaaatgttgattaactatgaaccatctatgcaatactttaatgaatggtggaaacaattatttggtgaatcagaaggtaaagacttcaaaggtatctatccttcaagtgccaactacacaactgatttacattctttaggtcaatatgtacaagaaggccgtcgtttcttattcgaaacagtggtaaaagtaaatcatcctaaatatgatattactattgaaaaagatagtgatgatctagacggattaaattatttggctggtaaaacaatcgacgaagttaacacaaaagcattcgaaggtacattattagcgcatactgatggtggtgttcctaacatggtagtgaacattccacaattagatgaagaaactttcggttatgtcgtatacttcttcgaacttgcttgtgcaatgagtggataccaattaggtgtaaatccatttaaccaacctggtgtagaagcatataaacaaaacatgttcgcattattaggtaaacctggttttgaagacttgaaaaaagaattagaagagcgtttataa

SEQ ID NO: 413418 - DNA, 1068 bp, Staphylococcus aureus
atgagtaacgcaaagaatgctgataataaacagtttttcagtaagattttaaattctattggtgctggtgttgttattgcacttgttccgaatgctttattaggtgaagtattaaaaatatttaaaagtggtaatgaaattttagaattaacgtatcagttagtgatactaattcaatcatttatggcatttattattggggttttagctgctcatcaatttaaatttaatggcgcaggtgctgctatagtaggtacatcagctatgattggttcaggtgctgttgtatatagcaataatagttttatgttaaaaggtataggtgacattataaatacgagtttggttgttattattgcatgtcttatatatatggtattacaaaacaaacttggatcttttgaattaattatattaccagttttagtacctatcgttagtgggggtatcggtctaatcacattaccttacattcgaaaaattactcaagcaattggaaatgtaattcattcttttacagacttaaatccgttgttaatgtctatacttattagtgtggcattttcattattaatggtaacaccaatatcgttagtagcgattgcaactgcgattagtttaaacggactaggaagtggagcagcaaacctaggtatagtggctgcctgtgttactttcttatttggctcattgcgtgtcaattctattggtgtaaatgcagttttactcataggagctgcaaaaatgatgatcccagtttacttgaaaaatttaattatttcgataccattgactataaatggaataattactggaatcattgcttacgttcttcaggttaaaggaacaccattgtctgctggatttggatatacaggattagttggcccaataaatgcatttaaccgaatgtcaggtgatccaacaatgaatattattttattagcacttggttattttgtcgtaccatttgtatcggcatttattgttcatgaattgtgtaaaaaattcattcctatatctgtctcttatacacatctgacgctgccgacgatactccttgtgtag

SEQ ID NO: 413419 - DNA, 792 bp, Staphylococcus aureus; identical to SEQ ID NO: 406585

SEQ ID NO: 413420 - DNA, 717 bp, Staphylococcus aureus
atgtgtaagaacatcacgaaaaatataattttaacgacaacattattactattaggtacagtattacctcaaaatcaaaaaccagtatttagtttttactctgaagctaaagcttatagcattggtcaagatgaaactaacatcaatgaattaattaaatattacacacagcctcatttttcattttcaaataaatggctatatcaatatgataatggaaacatttatgttgaacttaagagatattcatggtcagcacatatatctttatggggcgctgaaagttggggaaatattaatcagttaaaagatcgttacgtagatgtgtttggactaaaagacaaagatactgatcagttatggtggtcttatagagagacatttacaggtggcgttacaccagccgcaaaaccttctgataaaacttataatctttttgtgcaatacaaagataaactacaaacgattattggtgcgcataaaatataccaaggcaataaaccagtattaacattgaaagaaatcgatttccgtgcacgagaagcgttaataaaaaataaaatattatataacgaaaatcgtaataaaggtaagcttaagatcaccggtggcggtaataactacacaatagatttaagcaaaagattacattcagatctagcaaatgtttatgttaaaaatcctaataaaataactgttgacgtcctctttgattag

SEQ ID NO: 413421 - DNA, 1278 bp, Staphylococcus aureus; identical to SEQ ID NO: 413343

SEQ ID NO: 413422 - DNA, 1092 bp, Staphylococcus aureus
atgagtaataaattagaatcatacagaagtgagattgtctcactgaatcatcaaattttagatttattgtctaaacgtggcgagttagctcaaaaaattggtgaagaaaaattaaaacaaggtacacgtatctatgatccacaacgcgaaaaagaaatgcttaacgacttaattgatagcaacaaaggaccatttaacgataatacaattaagcaattatttaaagaaatttttaaagcctctacagatttacaaaaatctgaaaatgaaaaacacttatacgtatctcgtaagttgaaacctgaggatacgattgtaacatttgaaaatgggggtattattggagatggcaacaaatcatttgtatttggaccatgctctgttgaatcatttgaacaagtagaagcggtagctaaaaatttacatgccaaaggtgaaaagtttattcgtggcggtgcttttaaaccacgtacatcgccttatgacttccaaggcctaggtgttgaaggacttaaaatacttaaacagattaaagataaatacgatttaaatgtagttagtgaaattgtaaatcctaatgattttgaagtagccgatgaatatttagatgtattccaaattggtgcacgtaatatgcaaaactttgagttattaaaagaagctgggcgtacgaaaaagcctattctattaaaacgtggtttatctgctacaatcgaagagtttgtttatgcagctgaatacattgcttcacaaggtaatcaaaacattattttatgtgaacgcggaatccgaacttatgaaaaggcgacacgtaacactttagatatttcagcagtaccaattttaaaacaaggtacacacttaccagtcatggtagatgttacgcatagtacaggtcgtaaagatatcatgttaccaactgcgaaagcagcattagcagtaggtgctgatggtgttatggctgaggtgcatccagatccatctgttgcacttagtgatgcgggtcaacaaatggatttagatgaattccaagcattttatgatgaattaaagcctttagctgatttatataacgctaaaaagttaaaataa

SEQ ID NO: 413423 - DNA, 486 bp, Staphylococcus aureus
atgcaaggtgctgcaattatgggtatgaacttccatttagtttgtccaaaagaattaaatccaacagatgaattattaaatcgctgtaaaaatattgccgctgaaaatggtggcaacatattaatcacagatgatattgaccaaggtgtaaaaggttcggatgtaatttacactgatgtttgggtatcaatgggtgaacctgatgaagtatggaaagaacgacttgaattattgaaaccatatcaagtaaataaagaaatgatggataaaactggtaatccaaatgttatttttgagcattgcttaccatctttccataatgctgatacgaaaattggtcaacaaatttttgaaaaatatggaattcgagaaatggaagttacagatgaagtattcgaaagtaaagcttcagttgtattccaagaagctgagaacagaatgcatacaatcaaagcagtgatggttgctacattgggtgaattttaa

SEQ ID NO: 413424 - DNA, 393 bp, Staphylococcus aureus
atgaataatggttgggaaccatatggtagagatagttatgacccaacatatggtaatgaactgtttttaggtggtagacaaagtagttcaaatgctggtcaaaatttcttgccaacacatcaaatgcctttattggcgcgtggtaactttaacccagaatttataagcgtactttctcataaacaaaatgatacaaaaaaatctaaaattaaagtaacttaccaaagagaaatggatagatatactaatcaatggaatcgactacactggattggtaataactacaaaaatcaaaatacagtaacgtttacatctacttatgaagttgactggcaaaatcatactgttaaattaatcggtacggattctaaagaaactaatcctggagtatag

SEQ ID NO: 413425 - DNA, 1170 bp, Staphylococcus aureus
atgattaaaaatacaattaaaaaattgatagaacatagtatatatacgacttttaaattactatcaaaattgccaaacaagaatctaatttattttgaaagctttcatggtaaacaatacagcgacaaccccaaagcattatatgaatacttaactgaacatagcgatgcccaattaatatggggtgtgaaaaaaggatatgaacacatattccaacagcacaatgtaccatatgttacaaagttttcaatgaaatggtttttagcgatgccaagagcgaaagcgtggatgattaacacacgtacaccagattggttatataaatcaccgcgaacgacgtacttacaaacatggcatggcacgccattaaaaaagattggtttggatattagtaacgttaaaatgctaggaacaaatactcaaaattaccaagatggctttaaaaaagaaagccaacggtgggattatctagtgtcacctaatccatattcgacatcgatatttcaacatgcatttcatgttagtcgagataagattttggaaacaggttatccaagaaatgataaattatcacataaacgcaatgatactgaatatattaatggtattaagacaagattaaatattccattagataaaaaagtgattatgtacgcgccaacttggcgtgacgatgaagcgattcgagaaggttcatatcaatttaatgttaactttgatatagaagctttgcgtcaagcgctggatgatgattatgttattttattacgcatgcattatttagttgtgacacgtattgatgaacatgatgatttcgtgaaagacgtttcagattatgaagatatttcggatttatacttaatcagcgatgcgttagttaccgactactcatctgtcatgttcgacttcggtgtattaaagcgtccgcaaattttctatgcgtatgacttagataaatatggcgatgagcttagaggtttttacatggattataaaaaagagttgccaggtccaattgttgaaaatcaaacagcactcattgatgcattaaaacaaatcgatgaaactacaaatgagtatattgaagcacgaacggtattttatcaaaaattctgttcattagaagatggacacgcgtcacaacgaatttgccaaacgatttttaagtga

SEQ ID NO: 413426 - DNA, 918 bp, Staphylococcus aureus
atggaaaataaatatacacatggtgtcctcttttaccatgaacacagtggattaaaaaatattaatcaaggtattggggaagttacaacagcattaagttcaatttgtaagcatctttctattcaattgagtgaaaacgaaggtgacattattaaatattgccaagaaatcaaaactaaaaactatgcaaaagatgtagatatattatttattcttggcggtgatggcacggttaacgaacttataaatggtgttatgtcacatgaccttcaactccctattggcattttaccaggcggtacttttaatgattttacaaaaacgctaaatatagcacctaatcataaacaagctagtgaacaaatgatttctgcacaagttggtacatacgatgtaattaaaataaataatcaatatgcactcaactttgttggcttaggtctcattgttcaaaacgctgaaaacgtacaagatggttcaaaagatatatttggtaaattgagttatattggatcaactgtcaaaacactgctaaatccaacacaatttaattatcaattatcaatagatgataagacatattctggcgaaacgaccatgatactaacagcaaatggtccattcattggtggtagtcgtataccattgactgatttgtctcctcaagatggtgaactgaacactttcatttttaatgaacaaagtttcagtattttaaatgatatttttaaaaagcgtgatagcatgaattggaatgaaattactcaaggtattgagcatatacctggtaaaaagatttcacttacaacagatccagcaatgaaagttgatattgatggcgaaatttcattagaaacacctattgatattgaggttataccaaatgccattcagttacttactgtcaatgatttgtaa

SEQ ID NO: 413427 - DNA, 1122 bp, Staphylococcus aureus
atggtatatagtgcaagtatggttccagcaactaaaggcacattgactggtggtatcgatgttccaggaacgtatttttacaaccgacaattagcatatgtcataatgagttttataattgtattttttattgcatttttaatgaatgttaaattactgagtaatattaaagtgcaaaaaggtatgattataactatcgtctcactattattactgacgttagtaataggtaaagatattaatggttctaaaagttggataaacttaggatttatgaacttacaggcatctgagttattaaaaattgcaatcatattatatatcccatttatgatcagtaaaaaaatgcctagagtattaagtaaaccaaaattaattttaagtcctattgtattagcattaggttgtacgtttttagttttcctacaaaaagacgtagggcaaacattactaatattaattattttagttgcgatcattttttattcaggaattggggtaaacaaagtcctaagatttggtataccagcagtgctaggattcttagtagtatttgtcattgcattaatggctggttggttaccaagttatttaactgccagatttagtacgctaacagatccattccaattcgaatcaggaactggataccatatttccaattcattgcttgcgataggtaacggtggcgtatttggaaaaggattaggaaatagtgcaatgaaattgggctatttaccagaaccacatacagattttatttttgcaattatttgcgaagaattaggtttaaacggaggattgctagttattactttagagttctttattgtatatcgtgccttccagtttgcaaataaaacatcatcatatttttataaacttgtgtgtgttgggattgccacatactttggaagtcaaacgtttgtaaacattggcggtatttcggcaacaattccattaactggtgtgccattgccatttatcagctttggtggatcatcaatgattagtttaagtattgctatgggattacttctgattgtaggtaaacaaatcaaagtagaccagcaacgaaagaaacaacaacaaaaagttgatataagaagacaatttaattaa

SEQ ID NO: 413428 - DNA, 543 bp, Staphylococcus aureus
atggcgactcaaaataagggagaagctttaaaaattaaaggtatggtcttgtatatgaatagaaataccaaaacaacaaaaggatattattatgtaaatgcaataaagaatgataaagacggaagaccccaagagaatgaaaaaaggtacccagttaaaatggtcgataataaaatcattccaacaaaagaaattaaagataaaaacataaaaaaagaaatcgaaaactttaagttctttgttcaatatggaaactttaaagatttgtcgaagtacaaagatggagatatttcatacaatccagaggtgccaagttattcagcaaaatatcaattaactaatgatgattataatgtaaagcaattacgtaaaagatatgacataccaacaaataaagcaccaaagttattgttgaaaggtacagggaatttaaaaggttcatcagttggatataaagacattgaatttactttcgtggagaaaaaaggtaaaaatatatactttagtgatagcttagattataaaaaaagtggagaagtataa

SEQ ID NO: 413429 - DNA, 747 bp, Staphylococcus aureus
gtgctaggtattagttttctgtttttaatcatcagtatcgttgctggttgtggtacagggaaagaagcggaaataaagaaaagttttgaaaaaacattgagtatgtatccgattaaaaatctagaggatttatacgataaagaaggctatcgtgatgacgaatttgataaaaatgataaaggaacatggactattagttctgaaatggcaattcagaaaaagggagaagccttaaatataaaaggtatggttttgaagttaaatagaaatacaaggagtgcaaaaggattttactatgttaatgcgataaagaaggatgaaaatggcagacctcaggataagcaaatagaatatcccgttaaaatgattgacaataaaatcattccaactaaagaaatcaaagatgaaaaaataaaaaaagaaattaaaaactttaagtttttcgcgcagtatggcaactttaaagatttatcgaagtacaaagatggaaatatttcatataatccagaagctccgatttattcagccaaatatcaactaaccaatgatgattataatgtaaagcaattacgtaaaagatatgatataccgacgaataaagctccaaagttattgttaaaaggttcaggaaatttagatggttcatcagttggatacaaaaaaaatgaatttactttcgtagagaaaaaaggagaaaacacttactttacagctaatctacattttaaaccgagtaatgatgaataa

SEQ ID NO: 413430 - DNA, 564 bp, Staphylococcus aureus
atgatagatttatcgagtaattacatatcttatctattgccaatgatcaattggtttatacccaaaaaaggagttaagttaagtgttaaagaggtagaaaaactagatactataaagcctcaaaaaaattcagctttaaattggtatataggattctctgtattattgactgtaatttttagaaagtatattagtttattagatttacaaattgaaaggtatataaacattagtataagtcttttgataattctttttatcattttatttagattgtatataaataaaaagttaacaattaagagttttcatcaaaatgagtataggactttagtgctaatcccgacatggaaaagctttatatttacgtcgtttgcttttgtctttataggattaatatcgatatttacaatcattgtcaccttttattatgaaaatcaaaacatcatagtatttctaactgaagttgctatgattctaatattctcttttttaaatgttttatcaatttctgactcgaaagtccatgtcataataaaagaaaatggcaaaagaaaaatgtaa

SEQ ID NO: 413431 - DNA, 948 bp, Staphylococcus aureus
atgtgtataagagacagaaataaatgtaaaactcataataaggaaaaatcatggcaaatattttattttattaaagaatttatacagtctttagatctattggaagaatttaattttaattattttagagggcagcgttctaattggaaagtattgccaggtttactaagagatagcactaataaagagtatataaatcattttgaacaagaatataaaagacttgcttataattaccctgaagagctctcttatttaccttatgataaaaataacagattagaaagggctaattatttatctatattgcagcattatggaatgcaaacaagtttgctcgatattacaaaaaatccatttatcgcattattatttatggttagcgaagaaaataaaaataaaattaataaacctagttttattttgtatgaaatagacgaaaatattcatcatgagtctcatctatttattagagttataaaagatgcaaataacaaacgaattgaagcgcaaagaggagcatttctatgttatgattatctatatagtttgaatataacagatataaaaagaattaatcgtataattttagatatagaagttagcaaagataaatatgtagaaaagttaaaaaaagacattgaaataatcaatcaattaaaaaaggaatatgaaaatagtgaagaaaaaaaagatagtgattttaataatatagtaaatgaagctatagaatttagaaaaacactattagaaaatcttgaaattcctaaagatgcgaatgaaaaaattgatgaatgctatgaagaactcagaaaagaaatgttaactaagctaaaagaatatcattattttgaaaatcaactttatccagatttagataaacaaattgcgtatatattgtctaaatacaatgaccaatcaagtaaaaaatacatttctgatttgtaa

SEQ ID NO: 413432 - DNA, 402 bp, Staphylococcus aureus
atgctatatttaaataagtacaaagaaagggtgacatcagtgcgtattcaaaatcgctgggttgtgtttatattatttttaatctgttcttttggtgtattaattggtttatatcaatatcgtcatacgaaaactgtggatttgtctaatcttgaaataaacgatattaaattaaatgagaagtttgataaaaaaggctatgaagtaaataaaaaaattaagtttgatcgttttaaattttataacagtaaagctcaccctgatcttaccgttaaagtgagagaaaaggataacatcgttaaggggataatattagtaagagatgaaaagatacatactaattttgatgggggaattggttcgccctgtctcttatacacatctccgagcccacgagactag

SEQ ID NO: 413433 - DNA, 231 bp, Staphylococcus aureus
gtgccgagttattcggctaaatatcaattacaaaacgacgattataatgtaaggcaactacgtaaaatatatgacatttcaacaaaagaagcgcctaagttacttttaaaaagtggtggggatttaaaaggttcctcagttggtcaaaaagatattgaatttacatttgttgaaagaaaaggtgagaatatttattttaacgatagtgttgaattcataccaagtaagtaa

SEQ ID NO: 413434 - DNA, 777 bp, Staphylococcus aureus
atgaagtgctttcagaaattatacatgtttatattaattttaatcgtattaatcacaggatgcgaaagtaataatgatggcaaaggttcaaaagaaacacaaatcaaaaagagctttgcgaaaacattagatatgtatcctactgaaaatctagaagacttttatgacaaagagggatatcgagatggagaatttaaaaaaggcgacaaaggtacttgggttattagatctgaaatgacaacagaactaaaagatgaaaatatggagtccaaaggtatggttgtacgtttaaatagaaataccagaacaactacaggtgagtattttgttaggataattaaagaagacagtgagggcaaggtatatagtgatgaacgaaaatacccagtcaaaattgaaaataataaaattattccattaaaaccaattgatgatgaaaaagttgaaaaagaaattgaagaatttaaattctttgtacaatatgggaattttgaagaattggaaaactataaagacggtgaagtgacatataacccagaagtaccaatacactctgcacaatatcaattgaaaaacagtgatcataatgtagaacaactacgtaagcgatataatatcccaacaagaaaggtacctaaattgttattgaaaggctcaggcaatttaaaaggttcatcagtcggatataaaaatattgaatttacctttgttgaaaacaaagaagaaaatatttacttcacagatattattaatttcaatccaagtgaggatatttaa

SEQ ID NO: 413435 - DNA, 696 bp, Staphylococcus aureus
atgcaatctaaaatattgataattgaagatgatcacgcaatcacacatttacttgatgttgcattaactttagattattacaatgtaactacagccgacaatgccacacaagcacactttaaaattcaaattgataaaccagatgtcattttattagatttaggtttaccagataaagatggattatgtttgatttcagaaatcaggcaacatactgacattcctatcattgtaataagtgcaagacaagaagaacaaacaattattcaagctttagataacggtgcgaatgactatatgactaaaccttttaatgttgatgagcttcgggcacgaatacgagtcatcgagagaatcgctaagtcacatcaagaaactaacattgtatttactaacggtttgctaagcatcgactttggctccaaatctgtcgttattaataatcaggaggtacatttgactccaaatgaatttagcttgttagaactattgtcaaatcataaaggaaaagtactcacttatgagatgatattaaaacgaatatatggctatgttaataagactgaaatgcctagtttaagagtgcatatgacatcattaagacaaaaactttcacaatgtcatgaggacgcaaaagatattattaaaacacatccacgcattggttatcaaatgttgcagtggaaagagaaataa

SEQ ID NO: 413436 - DNA, 381 bp, Staphylococcus aureus
atgcctagtctcgtgggctcggagatgtgtataagagacagatataaaccctcaagcaagcaatctttatcctcttttttattcactcatttaaattattaccttatcgatttattcagacaacaaaatcaattaaaagatgtcattttatgtgagaataattcaccaacattaactgaacaaccaacatactttaatgaacatgaccttcgtttacaagatatcttcaagcttttaaatcatagagaaagactatggctcaaactataccttgaaggatacaagcaatttgaaattgctgaaatcatgtcattatcgctttcaacgattaaattaattaagatgtctgttaagcgtaaatgccaacataattttaattag

SEQ ID NO: 413437 - DNA, 609 bp, Staphylococcus aureus
atggatttcgttaataatgatacaagacaaattgctaaaaacttattaggtgtcaaagtgatttatcaggataccactcaaacgtatacaggctacatcgtggaaacggaagcttacttaggtttgaatgatcgtgcggctcatggctatggcggtaaaataacacctaaagtcacgtcattatataaacgtggtggtacaatttatgcacatgtcatgcatacgcatttactcattaattttgtaacaaaatctgaaggtatacctgaaggcgtacttatacgcgcaattgaaccagaagaaggtttatccgctatgttccgtaacagaggtaagaaaggctacgaggtaacgaatggcccaggaaaatggactaaggcatttaacattccacgggctatcgatggcgctacgttaaatgactgtagattgtctattgatactaagaatcgtaaatatcctaaagatattattgctagtccacgaatcggtattccaaataaaggtgattggacacataaatctttacgttacacagtgaaaggtaatccatttgtgtctcgcatgcgtaaatcagattgtatgtttcccgaagatacttggaaataa

SEQ ID NO: 413438 - DNA, 762 bp, Staphylococcus aureus
ttggcatatttgattttaaaaaaagagtatactgataaaaacatgactaagcagatgtattatagatggttaggagtaatatcggcaaatttgtcaatttcaaatgaggctaacaatttgttattaaaggctgttcaaaattcagaaaatataatagataaagcacgtaatacatatatttatacgttgcatttaacgaaaagattaaataagcctgaagaatcaataataataattaaaaaaatgttagaagaattagaaatgaataaggatattgaagatatagaaaactacttgcatgaaaaagcgtggttaaaaaacggtttatctttagctcaaacgataaactcaaaaaacattcatagagatgcagtagaaataataaaaaatgaaatggattcttataaatcaatagctgagtctaacaactttaaatttgtttatttaaagtataatctattggcgaacatagcatttttactagagattttaaatgagtataaaaaagctgaaaatttttgggaaatggcttttggtaaattgtttctagatgagaataataatctagatggtgtcaaatctttgagttacagacttggtgtgttgaatataaaaatggataattttaataaggctaaatattatttgaaaaaggctgaaaaattagcttataaacataaaaatgattttcatgtactgaatataaactatgctcttagttatatagactacctagaaggactgtctcttatacacatctga

SEQ ID NO: 413439 - DNA, 591 bp, Staphylococcus aureus
atgcttggtttcttgtataaatatattgttgcttactttattaacacatatgcaatcatgccgttacaattagacttacatggctttgtcaatttgtggttatatatgtacgcatacagcttatatttattctttgactttgcaggttatagtttatttgcgatagcatttagttatttattcggtattaaaacaccaccaaacttcgataaacctttcaaagcgaaaaatattaaagatttctggaatagatggcatatgacattatcattctggttcagagattgtatttacatgagatctttattctacatgtctcgtaaaaaattattgaagagtcaatttgcaatgtctaacgtggcattcttaatcaacttcttcataatgggaatttggcatggtatcgaagtgtattacattgtttatggtttataccatgcaacattgtttataggttatggctattatgaacgttggcgtaagaaacatccgccacgttggcaaaatggtttcacaacagcacttagcattgtgattacattccactttgtaacatttggctttttaatcttctcaggtaaacttatataa

SEQ ID NO: 413440 - DNA, 432 bp, Staphylococcus aureus
atgacagatggtcaattatggaaaaaagttaaagattcattacatgattctgatattattttaagtaacgagtacgaaacaatcaacgttacttatttattaagcaatggatattctagcagcgtttctgctcctggaaatgatgatggaggccatctaacacaatctatagactttaaaggattaaaacaaattgatttaactaaggaaaatgtctacgatgactttaacaaaaagctagatgctaaaaatacatggaattctctaaccgagaagttaaaaggtcttggtttactacaaaatggccaaaaagtatctatttattcttcagatagctcttctccagtctcgggtaaagtgggagaaggagtaactagtggtggcgaaaatactctaactaaacgcttcatcaacaaaatcacaattgattaa

SEQ ID NO: 413441 - DNA, 438 bp, Staphylococcus aureus
gtgtataagagacaggatccagatggctcaattgatgtgctgactacaattaagtctttagtaaatgaacttgatatgagaattctaatatcaagtcataagttagaagatattgaattaatttgtgatagagctgtatttttaagagacggacattttgttcaagatgtaaacatggaggaaggtgttgcatctgacacaacgatagttactgttgatcataaagactttgatagaactgaaaaatatcttgcagagcatttccaattacaaaatgtcgacaaagcagacggacatttaatgatcaatgcacaaaaaaattatcaagttatactaaaagcattatctgaattagatatttatccgaaatatattgaaacacgtaaaagttcattgcgtgatacgtacttcaatataaatcaaagaggtgataaataa

SEQ ID NO: 413442 - DNA, 474 bp, Staphylococcus aureus
atgagattgatatttagtatgattaaaaacattatagcagtaatagcaattgtgataattgtttatatcgccttgaaatacgcaccttttttaaaagaacaagattggaatcctgtaaatcacgataatgatcaaatgaatcaagttacgcaacccactaatgatgcccaacatgtttatgtaagtggtgagaaatattcattaaaagaaaatgatttaataaagaatgtaccattaagccaaattaaaaatgtatttaaaatgatagataaacaagagtttatggctgtgtctggaatgaatcgcatggcttataatgatcaatatattataggtcaaagaggagatgaatttattctttataaatttggagatgagtcaatgcgtgtttacaatactgaatttgaaatgcaacaagacttaaatgaattagggcaaaatttacaactaaaacctgaaaatgcttatcaatag

SEQ ID NO: 413443 - DNA, 291 bp, Staphylococcus aureus
ttgaaacattgtgataattgtggtggtgccattcgaccggacatcgtattatacggtgaaatgttagatcaacctaccatcataagggcattaaataaaattgaacatgctgacacccttgttgtactaggttcatcactcgttgtacaacctgccgcaggattaatatcaaattttaaaggcgacaatttaattattatcaataaagatcgaacaccttatgatagcgacgctactttggtcatacatgacgacatggtttccgttgtaaaatcattaataacagagtaa

SEQ ID NO: 413444 - DNA, 366 bp, Staphylococcus aureus
atgaagaagaaaaaaaacgcgattaaagttatcattatattatttatttcattaattgttgcagtagcatttttctttggtctgaaaacatatcaaggccataagaatattcaactaattgacagttacttggaagagaaaaatctaaaagataaaattaaatcagaaaaaacagagtatagtgctaaaaaaggtctcttctataaggaagttacatttaaagatgaacctggtgtaacttatgttgtgcaaccaatcagtactaataaaggattatttgttgaaggctttgatacagagactaagaaaagtttgaaaactgcaaagcataaatattttaatcaaaattataaaccatcaaaatag

SEQ ID NO: 413445 - DNA, 540 bp, Staphylococcus aureus
atgccgattattagttttttattattaaaagggcgatgtcgaaactgtcgaaagcgtatttccctaacacatttcttaggggaaacctttgctttaatacctatcgtctttattaagtatgatttcacatacgtaaatgctacgctatttataactacatatgtttttctgctgatttttactatgaccgatatcacttctttaatgttagattgtcgcttaattataatttattgtatcgtttctctctcgttaagtatgatttatccagtagcttttatcattattagtatgaccacgcatatattctactttttatttcgggcatatattggttatggtgacgttttactaatatctgcactttctttgtttttccctctccaattcactatttatgtcattttatttacatttgtcattgttggtttagttgctttaattaccatgatatttaagccgattaaactattaccccttgttccatttatatctgtctcttatacacatctgacgctgccgacgatactccttgtgtag

SEQ ID NO: 413446 - DNA, 321 bp, Staphylococcus aureus; identical to SEQ ID NO: 406867

SEQ ID NO: 413447 - DNA, 432 bp, Staphylococcus aureus
atgacaactgaaatgaacgacgtaacaaatcatcaaccgaatcgcaaatccaatgatgagaacattatggcgatgcttatctatttattaagtttattcacatctattattggtccactgataatatggttattgaaaaaagatgaatcgaaactagttgatcgtgctggaaaaaattatcttaactatacgatttcttatattatttggtctatcgttttagtcgttatcactttaataggcgttttcctaattgctacagatattgatttcattattattataggtttcatcattacgtttatcggtattttatccatattcgctttctcaatattatcttttgtattcacaattattgcgtgtgtcaaatattataatggtcaagaatatgtctgtctcttatacacatctccgagcccacgagactag

SEQ ID NO: 413448 - DNA, 420 bp, Staphylococcus aureus
ttgtctcaagttatttatattataggcggtgcactattaatttatgggttagataatctttatttatattttcatgacgtaccggcaaatgaacaacaattagagcaagcaatacgaaatacaccattctatatttctattttcactgttaccatcatccccgctattgtggaagaaattgtttttcgcggtatgataataagggttatcttcagaaaacacttgtttttagggttaattgtgtctagtttagtttttgcatcattacacgaatctgacacttggattggttatttaccttacttatattctggtttgatttttggcctaatttatataaaaacaaaacgattagaagttgtaatattcatgcacttcttaaataacttgttagctctgctctttataatatggagataa

SEQ ID NO: 413449 - DNA, 204 bp, Staphylococcus aureus
atgaaatataaacattttgccattattactttaattacaggcatcgtcatgctcacggcaatgtactttgtaccatttgaatatcataaaataccaatatttgcaggaatggcgattatttttacagtctattttagtaataaaaaatctattgatgaaacaaatatctttagtaagaaaaatcgcaataaaaataaacaataa

SEQ ID NO: 413450 - DNA, 183 bp, Staphylococcus aureus
atgccgacacaatgtttggctattgaagattctgtacatggtgcaacagccgcgattgcagctggattagatgttattgttaatacgaataaaatgacaagcgcacaggacttttctaatgtagattatgtagcaaaagatattgattacgatcaaattgtagcgcgtttctttacgaaatag

SEQ ID NO: 413451 - DNA, 1155 bp, Staphylococcus aureus
ttgaatcggagtcactatctgaatccgagtcgctatccgagtctgagtcgctgtctgaatctgaatcgctgtctgagtctgaatcgctatctgattctgagtcgctgtctgagtctgagtcgctatctgaatctgaatcgctgtctgagtctgagtcgctatctgaatctgaatcgctgtctgagtctgaatcgctatctgattctgagtcgctgtctgagtctgagtcgctgtctgagtctgaatcgctgtctgaatctgaatcgctgtctgagtctgaatcgctatctgaatctgagtcgctatctgagtctgagtcgctatctgattctgaatcgctgtctgagtctgagtcgctatctgagtctgagtcgctgtctgagtctgaatcgctgtctgaatctgagtcgctatctgagtccgagtcactatctgaatctgactcactatctgaatctgagtcgctatctgattctgagtcgctgtctgagtctgagtcgctatctgaatctgagtcgctgtctgagtctgaatcgctatctgaatctgagtcgctatctgagtctgagtcactatctgaatctgactcactatctgaatctgagtcgctatctgattctgaatcgctgtctgagtctgagtcgctatctgaatctgagtcgctgtctgagtctgaatcgctgtctgagtctgaatcgctatctgagtccgagtcactgtctgaatctgactcactatctgaatctgagtcgctatctgattctgaatcgctatctgaatctgactcactgtctgattctgagtcgctgtctgaatccgaatcgctatctgaacctgagtcgctgtctgagtctgaatcgctgtctgaatccgaatcgctatctgaacctgagtcgctgtctgaatccgaatccggatccgggtctgggcttggttctggatctggcgttggttccggatccgggtctggacttggttccggttctgggtctggacttggttctgggtcaaccggtggccctggagttgggtctttcggatttactgctgaatcaccatcagcacttccaccaccataacgtacaacattctcattattccaaccgaaaatactgtagtctttacctgtcgctgggtcaacattttcttgaatga

SEQ ID NO: 413452 - DNA, 279 bp, Staphylococcus aureus
gtgctcattgaactacttacggacattgatttactgtctgatgcagataatgacccacttgtactgatagagtcacttactatctctgaagtactcatcgagtctgatgtacttgttgagacactttgtgatgctgctatgcttagtgatccagaaacagaaccacttatgctcgtcgaatcgctcaatgattctgatgtactcatcgattttgaatcacttgtacttaatgatattgatgtactttgtgaatctgatttgcttgttgacgcactttga

SEQ ID NO: 413453 - DNA, 525 bp, Staphylococcus aureus
atgctatttgaaatactgatagagtccgaggtgctagctgactcgctcaatgatgttgatgtactaattgcattcgatgtactgtcacttaatgatgctgatgtactagacgaccctgatatactcgttgataagctttgtgacttagacaagcttcctgatgtactcatacttaatgagtcactgagtgatgttgatgtacgcaatgaatcagatgtacttgttgatagactttcggatttttcagtactgctagagtttgaaatagaatcgcttaatgatgttgatttactaactgaacctgacatgcttgatgatacactttgtgaatccactaaacttgtgcttgttgagcttgatacactattactttcagatgtgcttaatgacttagatgcactcacagaatcagataggcttacacttgtcgatttcgaggtactagctgatgtagataccacaatcgatcctgatgtactcgttgatgcactttgtgagtcagctttacttgttgacacactttga

SEQ ID NO: 413454 - DNA, 813 bp, Staphylococcus aureus
atgaaactcgtattttatggagctggtaatatggcacaagctatatttacaggaattattaactcaagcaacttagatgccaatgatatatatttaacaaataaatctaatgaacaagctttaaaagcattcgctgaaaaactaggtgttaactatagttatgatgatgcgacattattaaaagatgcagattatgtttttttaggtaccaaaccgcatgactttgatgctctagcaacacgcatcaaaccacatatcacaaaagacaattgcttcatttcaattatggcaggtattccgattgattatattaaacaacaattagaatgccaaaatccagttgctagaattatgccaaacacaaatgcgcaagtcggacactctgttactggcattagtttttcaaacaactttgaccctaaatctaaagatgaaattaacgatttagttaaagcatttggttctgtaattgaagtatcagaagatcatttacatcaagtaacagctatcaccggaagcggcccagcatttttatatcatgtattcgagcaatacgttaaagctggtacgaaacttggtctagaaaaagaacaagttgaagaatctatacgcaaccttattataggtacaagtaagatgattgaacgttcagatttgagcatggctcaattaagaaaaaatattacctctaaaggtggtacgacacaagctggccttgatacattgtcacaatatgatttagtatctattttcgaagattgtctaaatgctgccgtagaacgaagcattgaattatcaaatattgaagattaa

SEQ ID NO: 413455 - DNA, 921 bp, Staphylococcus aureus
atggaagttacattttttggaacgagtgcaggtttgcctacaaaagagagaaatacacaagcaatcgccttaaatttagaaccatattccaattccatatggcttttcgacgttggtgaaggtacacagcaccaaattttacatcatgcaattaaattaggaaaagtgacacatatatttattactcatatgcatggcgatcatatttttggtttgccaggattactttctagtcgttcttttcagggcggtgaacagaagccgcttacattggttggaccaaaaggaattaaagcatatgtggaaatgtctatgaatttatcagagtcacatttaaactatccaattacatatattgaaatcgatgatcatctgacatatcatcatgatggttttactgtagaggcgcatttacttaatcatggtattccatcatatggatatagagtaatggcacctgaaactacaggtacaatcaatgttgaagcgttaaaaaacattggtcttgaaccaggtcctaaatatcaagaagtaaaatctcatgatacatttgaacataatggtcaagtttatcaatcaaaagattttagaggtgagtccaaacagggtccagttgtagcaatttttggtgatacaaaaccatgttctaatgaacgtgtgatttctagagatgctgatgtgatggtacatgaagcgacctatatagatggtgaaaagcatttagccaacaattatcatcatagccatattgaagacgtatttgcattgataaaagaagccaatgttaaacgtacgttgattacacatttgagcaatcgctataatacagaagatataaatgaaatttatcaaacattgatacaaaataaagatacacctaattttaattttgtaaaagattttgatagttttaaaatctaa

SEQ ID NO: 413456 - DNA, 2940 bp, Staphylococcus aureus
ttgcctataacattaattgtaggtgcattagttggtattggcatagctttctatcaagcttataaacgttcagaaacttttagaaatattgtaaatcaggcaatctctggtgtagcaaacgcatttaaagcagctaaactagcgttacaaggtttctttgatttattcaaaggtgatagtaaaggcgcggttaccctagagaagatatttccacccgaaactgtagcaggaatacaaaatgtagttaatacgattagaacaactttctttaaagtagttgatgcaatcgttggtttcgccaaagagataggcgctcaattagcctctttctggaaagagaacggctcagaaataacacaagctttgcaaaatatagctggtttcattaaagcaacctttgaatttatttttaactttattattaaaccaatcatgtttgcgatttggcaagtgatgcaatttatttggccggcggttaaagctttgattgtcagcacttgggaaaatatcaaaggtgtaatacaaggggctattaatattattttgggtattatcaaagtgttctctagtcttttcacaggaaactggcgaggcgtttgggacggcattgtaatgatactgaaaggtactgtgcagttaatttggaatttaatacaactgtggtttataggtaaaattctaggtgtagtgagatactttggtggattacttaaaggtttaataactattatatgggttgctataataggcgttttcaagaaatcattatcggcaatttggaatgcaacaaaaagtatttttggtttcttattcaatagtgttaaatctattttcactaatatgaaaaactggttatctagtacgtggaataatatcaaaagcaataccgtcggcaaggctcattcgttatttacgggtgtaaggtctaaattcacaagtttatggaatgcgacgaaagatatatttactaaattaagaaattggatgtcaaacatctggaactctattaaagataacactgtaggtatagctggtcgcttatgggatagagtgcgtaacatctttggaagcatgcgtgacggtttaaaatctatcattggtaaaattaaagatcatatcggtggtatggtagacgctgttaaaagaggtcttaataaattaattgaaggtttaaactgggtcggtggtaagttgggtatggacaaaataccgaagttacacactggtactgaacatacgcatactactacaagattagttaagaacggtaagattgcgcgggatacgttcgctacggttggggataaaggacgtggaaatggtccgaatggtttcagaaatgaaatgattgaattccctaatggcaaacgggtacttacgcctaatacagatacgacagcgtacttacctaaaggttcaaaagtatataacggcgcacaaacttattcaatgttaaatggaacgcttccaagatttagcataggtactatgtggaaagatattaaatccggtgcatcatcggcatttaactggacaaaagatcaaataggtaaaggtacaaagtggcttggcgataaagttggtgatgtcatggactttatcgataatccaggcaaacttttaaattatgtacttcaagcgtttggagttgatttcagttctctaactaaaggtatgggtattgctggcgatataacaaaagctgcatggtctaagattaagaaaagtgcaatcaagtggcttgaggatgctttcgcagagtcgggtgatggcggtgtattagatatgaataaattacgttacttatacggtcacactactgcttatacacgagaaaccggacgcccattccatgaaggtctggattttgattacatttacgaacctgttccatcaaccattaatggtagagcacaagttatgccttttcataatggtggttatggaaaatgggtgaaaattgtaaagggcgccttagaagttatttatgcacatttatctaaatataaagttaaaactggtcaacaagttagggtcggccagactgttggtatatcggggaatacggggtttagtacaggacctcacttacattatgagatgcgttggaatggaagacatagagacccgttaccgtggttaagaaagaataatgggggcggcaaaagtacacccggtggtaatggtgcagctaatgctagacgagctattaaggctgctcaaaatattttaggaggaaggtataaggcgagttggattactaacgagatgatgcgtgttgcgagtcgtgaatccaattatacagctaatgcagtcaataattgggatagcaacgcaagagctggtataccttcaagaggtatgttccaaatgatagatccttcatttagagcgtacgcaaagtcgggttacaataatcctctcaacccaactcatcaagctatatcggctatgagatatattgtgggtaaatgggtaccaagaacaggctcatggagagctgcgttcaaacgcgctggtgattacgcatatgctactggtggcaaagtctataacggattgtaccacttaggggaagaaggatatccagagtggataatacctactgatccaagtagagcgaacgaagcacacaaattattagctttagctgctaacgatattgataaccgctctaaaaataagcgaccaaacaacttaccaaatccaagtataagtaatagtgatacaaactatattcatacattggagaataaactggatgcggttattaattgtttggttagtttggttgagtctaatcaagttattgcagataaggattacgaaccagttattaataagtatgtgtttgaagatgaggtaaataattctatcgataaacgagagcgtcacgaatctacaagagttagatttagaagaggaggcacgataatctaa

SEQ ID NO: 413457 - DNA, 537 bp, Staphylococcus aureus; identical to SEQ ID NO: 411797

SEQ ID NO: 413458 - DNA, 204 bp, Staphylococcus aureus
atgagtcaaaaaataaataacttttatgatgtacaacagttattgaaaagttacggatttctaatatattttaaaaatccagaagatatgtacgaaatgattcaacaggagatttcatcattgtatcaatatgaactgttatctaaggaagaatatttgaaatgtacgttgataattaatcagagaaggaatgaacagaaatga

SEQ ID NO: 413459 - DNA, 171 bp, Staphylococcus aureus
gtgtcagtcattattaacattttaatttttttagcaattttcggatatgccttgtatacactagtgaaatttttcaaacgttcgaaacaaggaaaatgtggtacatgtgacattaatcgtgattgttatagtacagaacaacaggtagtaaaacattttccagggaaataa

SEQ ID NO: 413460 - DNA, 459 bp, Staphylococcus aureus
atggtgccgcatgaagtgctaggaaaaacatataatcaattgagtaaacaaccgaatcaaattaatgattggggaacatttgatcatactaaatttgatgtcgatgatcatgttactagttatatgacatttgccaatcgagcaagcatgcagtttgaatgttcgtggtctgcaaacatcaaagaagataaggtacacgttagtttatcaggcgaagatggcggtatcaatttatttccatttgaaatatatgagccccgctttggagctatttttgaaagtaaagttaatgttgagcataacgaagacattgctggtgagagacaggcgcgtaactttgtcaatgcgtgtttagggatagaagagattgtggtgaaaccggaagaagcacgcaatgtaaatgcccttatagaagcgatttatcgtagtgatcttgataataagagtatacaactttaa

SEQ ID NO: 413461 - DNA, 324 bp, Staphylococcus aureus
atggcatttgtttcttctgcacttgaacttctcataccagctaataaaacaggaaatgatgcatttttaatcgcttcaatgacatcattaatatcttgttcactcggtactcctaaatttggtttttggcaaagtgatatagctttagattcaactggtgaagaaataacgtcttgcggaatactaataaaacttgcgccattttttcctgaagtagcaattcgaattgcatttgtcataacttctgataatgattcaggatcttgtacttcttcactatattttgatgaatattttaatagcgcagcattatcaatactttga

SEQ ID NO: 413462 - DNA, 471 bp, Staphylococcus aureus
atgacaaatcatatcgttttatatcaaccagaaatcccagctaatactggtaacattgcacgtacgtgtgcaggtacaaacacacatttacatttaattaaacctcttggatttagaactgatgataaaatgttaaaaagagccggtttagattattgggaatttgtgaatattacgtatcatgatagtattgaagcattttttgaagccacaaatggcgagtattacttattaacaaaatttggtaaaaagacttatagtgattttgatttttcaaatcatgacaaagatttttacttcatttttggaaaagagacgacaggattaccagactgggtgaaagagaaatatcaagacacagcattaagaattcctatgagtgaacatattcgttcattaaatttatcaaatactgctgcgttgttaatttatgaagcgttacgtcaacaagattttccaggattgaattaa

SEQ ID NO: 413463 - DNA, 462 bp, Staphylococcus aureus
gtgctcgcagttgttggagccgtcgttgttgatcctgttggtgcattctcgtttgttgctgtagttgtactattgttatttgttgtgctttctgctggcgttgcattatctgtttctgttacaggtttatcagttgtgccgttattagttgattctacttttggtttactagttacatcgttatccattgtcggactgtttgttgatgcatctgcactagaattgttattagcttgcggtttatcctttgcatcatcagttgctgatgttactgttgtttcacctgttgccgcatcactattatttggtgttgtcggagaagcgtctgctttgccattatctgtcgtctcagatacgttaggttgtccagtgttttctggtgttgcattagcatttgaatttgctgttgcatcattattatctgtaccattattagtatcattagcatctggatcattctga

SEQ ID NO: 413464 - DNA, 492 bp, Staphylococcus aureus
atggattggattttaccaattgctggaattatcgctgcgattgcattcttaattttatgtatcggtatcgtagctgtattaaattctgttaagaaaaacttagattatgttgcaaaaacacttgacggtgtagaaggtcaagttcaaggtattactcgtgaaacaacagatttacttcataaagtaaaccgtttaactgaggatatccaaggtaaagtagatcgtttaaactcagttgtagatgctgttaaaggtatcggtgactcagtacaaacgttaaacagctctgtagatcgtgtaacaaattcaattacacataatatttctcaaaatgaagataaaatctcacaagttgttcaatggtcaaatgttgcaatggaaattgcagacaaatggcaaaatagacactaccgtcgtggaagtgcaaattacaaagctaataatgtagcaactgatgcaaatcatagctatacttctcgagtagataaataa

SEQ ID NO: 413465 - DNA, 1314 bp, Staphylococcus aureus
atgacacactatcattttgtcggaattaaaggttctggcatgagttcattagcacaaatcatgcatgatttaggacatgaagttcaaggatcggatattgagaactacgtatttacagaagttgctcttagaaataaggggataaaaatattaccatttgatgctaataacataaaagaagatatggtagttatacaaggtaatgcattcgcgagtagccatgaagaaatagtacgtgcacatcaattgaaattagatgttgtaagttataatgattttttaggacagattattgatcaatatacttcagtagctgtaactggtgcacatggtaaaacttctacaacaggtttattatcacatgttatgaatggtgataaaaagacttcatttttaattggtgatggcacaggtatgggattgcctgaaagtgattatttcgcttttgaggcatgtgaatatagacgtcactttttaagttataaacctgattacgcaattatgacaaatattgatttcgatcatcctgattattttaaagatattaatgatgtttttgatgcattccaagaaatggcacataatgttaaaaaaggtattattgcttggggtgatgatgaacatctacgtaaaattgaagcagatgttccaatttattattatggatttaaagattcggatgacatttatgctcaaaatattcaaattacggataaaggtactgcttttgatgtgtatgtggatggtgagttttatgatcacttcctgtctccacaatatggtgaccatacagttttaaatgcattagctgtaattgcgattagttatttagagaagcttgatgttacaaatattaaagaagcattagaaacgtttggtggtgttaaacgtcgtttcaatgaaactacaattgcaaatcaagttattgtagatgattatgcacaccatccaagagaaattagtgctacaattgaaacagcacgaaagaaatatccacataaagaagttgttgcagtatttcaaccacacactttctctagaacacaagcatttttaaatgaatttgcagaaagtttaagtaaagcagatcgtgtattcttatgtgaaatttttggatcaattagagaaaatactggcgcattaacgatacaagatttaattgataaaattgaaggtgcatcgttaattaatgaagattctattaatgtattagaacaatttgataatgccgttgttttatttatgggtgcaggtgatattcaaaaattacaaaatgcatatttagataaattaggcatgaaaaatgcgttttaa

SEQ ID NO: 413466 - DNA, 3825 bp, Staphylococcus aureus
atgagctggtttgataaattattcggcgaagataatgattcaaatgatgacttgattcatagaaagaaaaaaagacgtcaagaatcacaaaatatagataacgatcatgactcattactgcctcaaaataatgatatttatagtcgtccgaggggaaaattccgttttcctatgagcgtagcttatgaaaatgaaaatgttgaacaatctgcagatattatttcagatgaaaaagaacaataccatcgagactatcgcaaacaaagccacgattctcgttcacaaaaacgacatcgccgtagaagaaatcaaacaactgaagaacaaaattatagtgaacaacgtgggaattctaaaatatcacagcaaagtataaaatataaagatcactcacattaccatacgaataagccaggtacatatgtttctgcaattaatggtattgagaaggaaacgcacaagtcaaaaacacataatatgtattctaataatacaaatcatcgtgctaaagattcaactccagattatcacaaagaaagtttcaagacttcagaggtaccgtcagctatttttggcacaatgaaacctaaaaagttagaaaatggtcgtatccctgtaagtaaaccttcagaaaaagttgagtcagataaacaaaaatatgataaatatgtagctaagacgcaaacgtctcaaaataaacaattagaacaagaaaaacaaaatgatagtgttgtcaaacaaggaactgcatctaaatcatctgatgaaaatgtatcatcaacaacaaaatcaatgcctaattattcaaaagttgataatactatcaaaattgaaaatatttatgcttcacaaattgttgaagaaattagacgtgaacgagaacgtaaagtgcttcaaaagcgtcgatttaaaaaagcgttgcaacaaaagcgtgaagaacataaaaacgaagagcaagatgcaatacaacgtgcaattgatgcaatgtatgctaaacaagcggaacgctatgttggtgatagttcattaaatgatgatagtgacttaacagataatagtacagatgctagtcagcttcatacaaatggcatagagaatgaaactgtatcaaatgatgaaaataaacaagcgtcaatacaaaatgaagacactaatgactctcatgtagatgaaagtccatacaattatgaggaagttagtttgaatcaagtatcgacaacaaaacaattgtcagatgatgaagttacggtttcgaatgtaacgtctcaacatcaatcagcactacaacataacgttgaagtaaatgataaagatgaactaaaaaatcaatccagattaattgctgattcagaagaagatggagcaacgaataaagaagaatattcaggaagtcaaatcgatgatgcagaattttatgaattaaatgatacagaagtagatgaggatactacttcaaatatcgaagataataccaataaaaacgcgtctgaaatgcatgtagacgctcctaaaacgcaagagcacgcagtaactgaatctcaagtaaataatatcgataaaacggttgataatgaaattgaattagcaccgcgtcataaaaaagatgaccaaacaaacttaagtgtcaactcattgaaaacgaatattgtgaatgatggtcatgttgtggaagattcaagcatgaatgaaatagaaaagcataacgcagaaattacagaaaatgtgcaaaacgaaacagctgaaagtgaacaaaatgtcgaagagaaaactattgaaaacgtaaatccaaagaaacagactgaaaaggtttcaactttaagtaaaagaccatttaatgttgtcatgacgccatctgataaaaagcgtatgatggatcgtaaaaagcattcaaaagtcaatgtgcctgaattaaagcctgtacaaagtaagcaagctgtgagtgaaagcaagactgcgagtcaagccacaccatcatcaagcacttattcacaagagtcaaatacaaatgcatataaaataaataatatgacatcaaataatgttgagaacaatcaacttattggtcatgcagaaacagaaaatgattatcaaaatgcacaacaatattcagagcagaaaccttctgctgattcaactcaaacggaaatatttgaagaaagccaagatgataatcaattggaaaatgagcaagttgatcaatcaacttcgtcttcagtttcagaagtaagcgacataactgaagaaagcgaagaaacaacacatccaaacaatactagtggacaacaagataatgatgatcaacaaaaagatttacagccttcattttcaaatcaaaatgaagatacagctaatgaaaatagacctcggacgaaccaaccagatgttgcaacaaatcaagctgtacaaacaactaagccgatgattcgtaaaggcccaaatattaaattgccaagtgtttcattactagaagaaccacaagttattgagccggacgtggactggattacagataaaaagaaagaacttaatgacgcattattttactttaatgtacctgcagaagtacaagatgtaactgaaggcccaagtgttacaagatttgaattatcagttgaaaaaggtgttaaagtttcaagaattacggcattacaagatgacattaaaatggcattggcagcgaaagatattcgtatagaagcgcctattccaggaactagtcgtgttggtattgaagttccgaaccaaaatccaacgacggtcaacttacgttctattattgaatctccaagttttaaaaatgctgaatctaaattaacagttgcgatggggtatagaattaataatgaaccattacttatggatattgctaaaacgccacacgcactaattgcaggtgcaactggatcagggaaatcagtttgtatcaatagtattttgatgtctttactatataaaaatcaccctgaggaattaagattattacttatcgatccaaaaatggttgaattagctccttataatggtttgccacatttagttgcaccggtaattacagatgtcaaagcagctacacagagtttaaaatgggccgtagaagaaatggaacgacgttataagttatttgcacattaccatgtacgcaatataacagcatttaacaaaaaagcaccatatgatgaaagaatgccaaaaattgtcattgtaattgatgagttggctgatttaatgatgatggctccgcaagaagttgagcagtctattgctagaattgctcaaaaagcaagagcatgtggtattcatatgttagtagctacgcaaagaccatctgtcaatgtaattacaggtttaattaaagccaacataccaacaagaattgcatttatggtatcatcaagtgtagattcgagaacgatattagacagtggtggagcagaacgcttgttaggatatggcgatatgttatatcttggtagcggtatgaataaaccgattagagttcaaggtacatttgtttctgatgacgaaattgatgatgttgttgattttatcaaacaacaaagagaaccggactatctatttgaagaaaaagaattgttgaaaaaaacacaaacacaatcacaagatgaattatttgatgatgtttgtgcatttatggttaatgaaggacatatttcaacatcattaatccaaagacatttccaaattggctataatagagcagcaagaattatcgatcaattagagcaactcggttatgtttcgagtgctaatggttcaaaaccaagggatgtttatgttacggaagcagatttaaataaagaataa

SEQ ID NO: 413467 - DNA, 597 bp, Staphylococcus aureus
atgaatttattttacaatcctaaatatgtaggagatgtcgcatttttacaaattgaaccagttgaaggtgaattaaactacaataaaaaaggtaatgttgttgaaattactaatgaaggtaatgttgtaggttataatatttttgaaatctcaaaagatataacaattgaagaaaaaggtcatattaaattaactgatgaacttgtaaatgtattccaaaagcgtatttcagaagctggttttgattataaattaaatgctgatctatcaccgaaatttgtagttggctacgttgaaactaaagacaaacatcctgatgcagataaattaagtgtactaaatgtaaacgttggaaatgacacattacaaattgtatgtggcgcgcctaacgttgaagctggacagaaagttgttgttgctaaagtaggtgcagtgatgcctagcggtatggtaattaaagatgctgaattacgtggtgttgcctcaagcggtatgatttgttcaatgaaagaattgaatttacctaatgcacctgaagaaaaaggtattatggtattaaatgacagctatgaaattggacaagcattttttgaataa

SEQ ID NO: 413468 - DNA, 858 bp, Staphylococcus aureus; identical to SEQ ID NO: 406591

SEQ ID NO: 413469 - DNA, 312 bp, Staphylococcus aureus
atgaaacaacttgaatcagaacaacaatttgaatctttaaaacaaggtgctacagtatttgaattcactgcaggctggtgtccagattgtagagtgatagaaccagatttaccggaattagaagcgagatatcctatgtttaacttcgtatcagtagaccgtgataaatttatggatatttgtattgaaaatggtattatgggtattccaagttttctagtatataaaaatggagaactgcttggaagttatattggaaaagaacgaaaatcaattgaacagatagatgcatttttagctcaatacgtgtaa

SEQ ID NO: 413470 - DNA, 189 bp, Staphylococcus aureus
atgtatctggcgactgttgctaaaacggctgcagataatgctagtgaaggtagaatagcagttgaaaatccttcccatccagctactgggaaccatctcaatttaactgcaaatacatattgtaaaagtactgcaagtacaaaagatggtacagatacagcaataactgaaataactgtagttgtatag

SEQ ID NO: 413471 - DNA, 1398 bp, Staphylococcus aureus
atgagtattgacatgtatttagacagatctcgaaaccaagcttcaagtgtggggaatttgagtcaaacaatgaattcaaattatgatgcgttggaaaaagcaattactcaatttatcaatgatgatgcgcttaaagggaaagcgtatacgtcagctaagcaattttttagtacggtgttaattccattatcaacaagtatgaaaacattgagtgatttaacgaagcaagcttgcgataattttgtgtcacgttatacgagtgaggttgatagcatatctttaaaagaatcagagcttgaagaagatatcagatcattaagtcaacaaattacgcgatatgaaaatttgaataacaatttgaaaaagcatgcttccgataatcagcaagccatttcatcgaaccaacaaataatacaaacattaggtcaacaaaaacatgaattagaagagaagctacgcaaattgcgtgagtttaatcaaaaatcaccagaaatatttaaagaagttgaagaatttcaaaaaattgtacaacaaggacttactcaagcgcaaaatttttggaacttttcaacaaatcaatttaatattccttcagctaaagaacttgattgggccaaagcaagtcatgaaaaatatttgaaagttgctatggggaaaattgaacataaagcagagaaagaaactttaaataaagcagactttgctgttataaaggcatatgccaaagagcatccagaagacgatatcccgaaaagtataatgaaatatataaatgacaataaagacagtattaaaagagatataggattagatatcacatcaacacttttagagcaaggcggtataaatgcaagtaaattcggtgtatttataaatacagtaggtggagtgaaaggcccagccggtccaaattcatttgtggaagtcaaacgtacatcaggtaatgtgtttatagaaaatggtagtaaatttgcaaaaggcggaaaatacctaggtaaaggtgttgctggtgtaggatttggtataggtatgtatgatgatatggcaaacgatgataaaacatttggggaggcgttgtcgcataatggtatgacgcttgcagctggatcaggagcaggagctgttgtaacagttggtgcatcgatattattaggtagtaatccagttgggtgggctgttataggtggctttgtggctggaacattagtatcaaaagcagcggattgggcatatcaaagcaattggaatggtataaaagataaaacagactgggtaggacataaaatagacgatagtattgatgttgttaaaaaatctacagaaaaagccgtagatagtgttggtgaagctacaaaaagtatctctaatcatttaaaccctatgaaatggagctggtaa

SEQ ID NO: 413472 - DNA, 360 bp, Staphylococcus aureus
atgagtggtggtattgcttacgttatcccgtctgatgtagaagcttttgttgaaaataatcaactagatacgctttcgtttacaaagattaaacaccaagaagaaaaagcattcattaagcaaatgctggaagaacatgtgtcacacacgaatagtacgagagcgattcatgtgttaaaacattttgatcgcattgaagatgtcgtcgttaaagttattccaaaagattatcaattaatgatgcaaaaaattcatttgcacaaatcattacatgacaatgaagatgaagcgatgttagctgcattttacgatgacagtaaaacaatcgacgctaaacataaaccagccgttgtgtattaa

SEQ ID NO: 413473 - DNA, 624 bp, Staphylococcus aureus; identical to SEQ ID NO: 405943

SEQ ID NO: 413474 - DNA, 330 bp, Staphylococcus aureus; identical to SEQ ID NO: 405942

SEQ ID NO: 413475 - DNA, 987 bp, Staphylococcus aureus; identical to SEQ ID NO: 405941

SEQ ID NO: 413476 - DNA, 204 bp, Staphylococcus aureus; identical to SEQ ID NO: 413458

SEQ ID NO: 413477 - DNA, 1464 bp, Staphylococcus aureus
atgaacatagacaaacaattttggaaaacaatatattattggattaggtacttgaattttgatattgtcagtagggaaaaagatgaccaagaaatttggttagcccataaaagaaaaaaacaagtagtcatttttaaacaacatatcaagtctacccaagaaatacgttttgacaaagcgaaagtgcttgaacacaaagatgaaatagcaaattttatttctttcgaaccacaaagttttgaattttattattttacagaatcggaattttcagaagaacaattaaatgaagtttcgccaattagaattaaattcaatgttataagacacacaaaagatttgataaagcatatgccgaatatatttttggctagacttatttcagaagataatgataaaaagacatatatgttctataaacgcaaagtattaaccgataactttttagataaatatatgcagaaattttcaccggcaacatacacaataatatttgtaaatgtcttaatatggttatgtatgattttatatttaaataatttttcggatgtaaaattattagatgttggcgggttagtgcattttaatgtcgtacatggtgaatggtatcgaattgttacatcgatgtttttacattttagttttgaacatatacttatgaatatgctttcattatttatttttggtaaaatagtcgaagcaattattggttcatggcggatgttaactgtatactttattgcagggttgtttggaaactttgtatcactatcatttaatacgactacaatttcagttggggctagtggtgctatatttggtctgattggatcaatttttgcgatgatgtatgtttcaaaaacatttaacaaaaaaatgttaggacagttattaattgcattagtgatattagttggtgtttctctgtttatgtcaaatataaatattgtggcgcatattggaggattcattggtggtttattaataactttaattggctattactataaagtgaatcgtaatattttttggattttactaattggtatgcttgttatatttattgcacttcaaattagaatttttacaattaaagaagataatatttataataaattgatcaaagatgatatgactagtggtaattatgataatgctcaaaatattgtgaagcagacaataaataaaaattatgccgatgatcaaacatattatttaagtggtatgattatggctactatcaattctaagtctgaaggtatgacagaatgggagcgaggacttagaatgtttcctaaatcaggtttattaaattttgagttagcgatagcaaatcgttcattaaatgatgatgaaaaagcattaaaatatgtgcgtaaagcattaaatgcagaccctaaaaatacagattatattaacttagaaaaagagttgactaaatcaaatgagtcaaaaaataaataa

SEQ ID NO: 413478 - DNA, 594 bp, Staphylococcus aureus
atgacatgtattgttattaacgatataatagaattgaataaagtgggtgataatgtgactaaaaatgagattagaaaatacattttacataaaatgaagaattttaataaagctgaaaagcgaaaagcagacacatggttaagaaatcaattttttgcaactgaagaatacaaagaagcaaacgcaattgcgctagttctttcttttaatcatgaagtagatactttttctattattgaacaagccttaatggatcataaacgtatttttgtaccgaaaatggattatttaaatcatcaaatgacttttaaagaaatatttaatctcaaagatattgatgtcgataataaggggatttactatccaacttcaaaaggtgaaacaacgaataacctagatttaattgttgttcctggtgttggatttcaagacgatggatatagaattgggtatggtggtggctattacgacaggtttttagctaattatcagacaaagacaataagcttattatacgattttcaaataacatcatttgaaccggaatcattcgatcaaccagtcgataaattgattatatatcaatcagcatag

SEQ ID NO: 413479 - DNA, 150 bp, Staphylococcus aureus; identical to SEQ ID NO: 405938

SEQ ID NO: 413480 - DNA, 2076 bp, Staphylococcus aureus
ttgttaaaaagactaaaagaaaaatcaaatgatgaaatcgttcaaaatacaattaacaagagaattaactttatatttggtgtgattgtatttatttttgcagtactagtactacgtttaggttatttacaaatcgcacaaggctcacattataaacaaattataaaaaatgatgaaaacattacagtgaatgagtctgtgccaagaggtcgtattttagacagaaatggcaaagttttagttgataatgcttctaaaatggctattacatatactaggggtcgaaaaacaacacaatcggaaatgttggatacggctgaaaagttatcaaagctaatcaagatggatactaagaaaattacagaacgtgataagaaagatttctggattcagttgcatcctaaaaaagcaaaagcaatgatgacaaaagaacaagctatgttagcagatggaagtattaaacaagatcaatatgataaacaactgttatcgaaaatcggaaaatcacaattagatgaattgtcttctaaagatttacaagttttagctatttttcgagagatgaatgcaggaacagttttagatccacaaatgataaaaaatgaagatgtcagtgaaaaagagtatgcagcagtttctcagcaactttccaaattaccaggtgttaacacgtctatggattgggatagaaaatatccatatggcgatactttaagaggtatattcggagatgtatcgacacctgctgaaggtattccaaaagaattgacagaacattacttatccaaaggatattcacgcaatgatcgtgttggaaaatcttacctagaatatcaatatgaagatgtattgcgtggtaagaagaaagaaatgaaatacacaacggacaaatctggtaaagttacatcttcagaagtgttaaatcctggcgctcgcggtcaagatttgaaattaacgatcgatatagatcttcaaaaagaagtagaagcattattagataaacaaattaagaagcttcgcagtcaaggtgccaaagatatggataatgcaatgatggttgtacaaaatcctaaaaatggagacattcttgcgcttgccggaaagcagattaataagagtggtaaaatgactgattatgacattggtacgtttacttctcaatttgcggttggatcttctgtaaaaggtggaacattattagctggttatcagaataaagctatcaaagttggagaaacaatggtcgatgaaccattacatttccaaggtggtttgacaaaacgatcatacttcaataaaaacgggcatgtaactattaatgataagcaagctttgatgcattcatcaaacgtatatatgtttaaaacagcattaaaattagcgggagacccttattattctggtatggctttaccttcagacataagttcacctgcccaaaagctaagaagaggattaaatcaagtaggcttaggtgtgaaaacagggatagatttaccaaatgaaacaagaggtcaaatcgaaccattaacaaataatccaggtaattatctagatttatcaattggtcaatatgatacctatacaccattacaattatcacaatatgtttcaactatagcgaatgatggttatagaatacagccacacattggattaacgattcatgaatcaactaataaagatgaggttggtccactcaagaagaaaattaatggcactgtcttgaacaaggttaataatactgaaaaggaaatcaaacaaattcaagaaggattcaaaatggcatttaatgataaagatggtactggatatgttagttttaaagatacagtagtacctactgctggtaaaacgggtaccgctgaagtgttccaaaacggagagccaagagttaactctacttatataggatacgcgccaattgatgatccaaaattagcgttttcaattgtatatacaaatcagcctgtaccaccaccatggttaacaggtggagacttaggtagagatgtaattaactactactttaagcagttaggtaaagatgataaaaataaagacaaagacaaataa

SEQ ID NO: 413481 - DNA, 600 bp, Staphylococcus aureus; identical to SEQ ID NO: 405936

SEQ ID NO: 413482 - DNA, 411 bp, Staphylococcus aureus
atgaatacaaatgatgctattaaaattttaaaagagaacggtttaaaatatacagataaacgtaaagatatgttagatatttttgtcgaagaagataagtatataaacgcaaagtatatacagcaagttatggatgaaaattatcctggaatttcattcgacacaatatatagaaacctgcacttatttaaagatttagggattattgaaaatacagaacttgatggtgaaatgaagtttagaatcgcttgtacaaaccatcatcatcatcattttatctgtgaaaagtgtggagatacaaaggtaatagattattgtccaatagatcagataaagttatcactacctggtgttaatattcacaaacacaaacttgaagtttatggtgtatgtgagtcttgccaagattaa

SEQ ID NO: 413483 - DNA, 873 bp, Staphylococcus aureus
gtgtcacaattgatagatgcattattgaattttgattttatgaggtactctttaattagtggtatcttgataggttttattgcgcctctaatcggtgcttttatcgttgttagacgactatcacttatagctgatgctctaagtcatgtaactttaggtggtatatccttcggtatgtttttacttactattatgccaacactagtatttattaatccaatgtggtttggaatcttattcgcaatagtaggtgcgcttctaattgaaaaattaagaacgtcatacactgcttaccaagaaattgctattccaattataatgagtgctggtatcgccttgagtgcaatcttcatttcattagctgatgggttcaatcaagaaattgttggattgctatttggctcaataagcgcagtgaatataagtgatttaacaacgattattgtcattgccatcatagttgttctgtttattacattgttttataaagaattatttatattgtcatttgatgaggaatatagtaaagtcattggcattcctaaatggattcaatttttatttattgttattgtagcgatggttatttctgcctcaatgcgtgttgtagggatactgttagtaagtgcgttaatcacgttaccaattgcaataagtatgcgaataacaaaaagttttaagcaattgatattactaagtgtatttttaggtgaattatcagtaatattaggcttagtcctagctttctatatggacatttctccgggtggtgtaattgtagttctacttgttattttacttatgattacaatggcttatcagaaaatgcgaatgaagtttaaaaagggagctaatatcaatgaatacaaatga

SEQ ID NO: 413484 - DNA, 786 bp, Staphylococcus aureus
atgcgaggtgagaatacgatgacaccagtctttgaattgaaaaatgtcaattactactatgatcataaaaaagtgttagaaaatataaacattaaaataaataaaggtgaatttttagcgattgttggaccaaatggtgctggtaaatcaacattattgaagttgattctagggttattacctttacaaagtggtgagatttttgttgaaggtattgattttaaaaataagaaaacatcaattaaattaagctatgtatcacaaaaagcaaatgcctttaattcaggtttcccagcaagtgttaaagaagttgttttaagcggattaacaaagacaaaacgtcttttccaaacatttaatagcaaagataatgaaaaagtgattaaagtactagaaagactgaatataagtgatttaattcataaaaatatagcagaattatcaggtggtcaacaacaacgtgtaatgattgcccgagcattgatttcagaacctgcagtattagtacttgatgaaccaacgaatggtattgatgcaaaacatgtaagtgaattttataatactttagatcaattaaaacaagaaggtatcaccattatcttagttactcatgatatcggtgttgtagcagatactgctactgaagtagcatgtttaaataagcatttgcatttccatggtacaactgatgagtttaaatcacttgatgaagttgaaatttcaaaaatttatggacatcctgtacgttttgtcgatcatcagcataatcgagaatgttgtaattaa

SEQ ID NO: 413485 - DNA, 891 bp, Staphylococcus aureus
atgttattaggatcacatgtttcaatgagtggtaaaaagatgttagaaggttctgctatagaagcgtatgaatatggtgaaacaacatttatgatttatactggtgcacctcaaaacacgcgccgtaaaagtattgaagatttaaatataactaaaggtcatgaagtgatggaaaaatatggcttatctaatattgttgttcatgcaccatacatcattaatattgcaaatacaaccaaaccagaaacgtttaatcttggtgtagatttcttgcaacaagaaattgaaagaacgcaagctataggcgctaaagatattgtattacatccaggtgcgcatgttggagctggtgttgatgccggaattaataagattattgaaggattaaatgaagttttaacgaatgacaataatgtacgtattgcgcttgaaacgatggcaggtaaaggtacagagattggtcgctcgtttgaagagttagcacgtattattgatggagttcataataacgaacgtttatcagtatgttttgatacatgtcatacgcatgatgctggatataatgtgaaagaggactttgatggcgtattaaatgaatttgataaaattattggagtcgacagaatcaaagttgttcatgtcaatgattctaaaaatgaccgtggcgctcaaaaagaccgacatgaaaatattggcttcggttacattggttttgatgcattaaattacattgtgcatcatgatagttttaaagatattccgaaaatcttagaaacaccttatgttggtgaagataagaaaaataaaaaaccgccatataaacttgaaattgaaatgttaaaacaacagcaatttgacccagaattaaaaaataaggttatgcaacaataa

SEQ ID NO: 413486 - DNA, 1347 bp, Staphylococcus aureus
atggcaaaacatccattcgaacaatttaatctagaatctagtttaattgacgctgtgaaagaccttaattttgaaaaaccaactgaaattcagaatcgaattattccaagaatactaaagagaacaaatttaattggtcaatctcaaacgggtacagggaaatctcatgcatttttattaccattaatgcagttaattgatagtgaaataaaagaaccacaagcaatcgtagttgcaccaacaagagaacttgcacaacaactatacgatgcagcgaaccatttaagccaatttaaagctggtgtttcagttaaagtttttattggtggtacagatatagagaaagatagacaacgttgtaatgcacaaccacaattgattataggcacccctactagaattaatgacttagctaaaacgggacatttacatgtgcacttagcatcatatttagttattgatgaagcggatcttatgattgacttaggattaattgaagatgtagattacattgcttcaagattggaagataatgcaaatattgcggtgtttagtgctacaattccacaacagttacaaccatttttaaataaatatttaagtcatccagaatatgtagctgtcgacagtaaaaaacaaaataaaaagaacatcgaattctttttaatacctactaaaggtgcagctaaagttgaaaaaactttaaatttaattgatatactaaatccatacttatgtattattttctgtaatagtagagataatgcaaatgatttagcacgttcactaaatgaagctggtattaaagttggtatgattcatggtggtttaacgccacgtgaacgtaaacaacaaatgaaacgtatacgtaatttagaattccaatacgttattgccagcgatttagcatctcgtggtattgatattgaaggtgttagtcatgtcatcaattttgatgtgccaaatgatattgacttctttacgcatagagttggacgaactggtcgtgggaattataaaggtgtagcaattacgctttatagtcctgatgaagaacacaatatttcattaatagaagatcgcggttttgtattcaatactgttgatattaaagatggtgagttaaaagaagttaaagcgcacaatcagcgtcaagcaagaatgcgcaaagatgaccatttaactaatcaagtgaagaacaaagttcgaagtaaaattaaaaacaaagttaaaccaggttataagaagaaatttaaacaagaagttgaaaaaatgaaacgtcaagagcgtaaacaatttagtaagcagcaaaatagacaaaaacgtaagcaaaacaaaaaaggttag

SEQ ID NO: 413487 - DNA, 1101 bp, Staphylococcus aureus
atgaaaatagctgatttaatgacattgttagatcatcatgtgccatttagtactgctgaatcttgggataatgtaggattgttaataggtgatgaagatgttgaagttactggtgttttaacagcattagactgtacgttggaagtagtaaatgaagcaatcgaaaaaggttataatactattattagtcatcatcctctaatctttaaaggcgtaacatcattaaaagctaatggttatggtttgatcattagaaaactaattcaacatgacattaatttaatagcgatgcatacaaatttagatgtaaatccgtatggtgtcaatatgatgttggcgaaggcgatgggtttgaagaacatttcaataataaataatcaacaagatgtatactataaagttcaaacatatatacctaaggataatgttggaccatttaaagataagcttagtgaaaatggattagcacaagaaggtaattatgaatattgtttctttgaaagtgaaggaagagggcaattcaaaccagttggtgaagctaatccaacaataggacaaattgataaaattgaatatgtagatgaagttaaaattgaatttatgatagatgcatatcaaaagtcaagggctgagcaattaattaaacaataccatccatatgaaacaccggtatttgattttattgagataaaacaaacatccctttatggacttggcgttatggcagaagtggataatcaaatgacattggaagatttcgcagctgatattaaatctaaattaaatatcccaagtgtccgttttgttggtgagtctaatcagaaaattaaacgtattgcaattattggtggttcaggtattggatatgaatatcaagctgtccaacaaggcgcagatgtctttgttacaggtgatattaaacatcatgatgccttagatgctaaaattcatggtgtgaatttaattgatattaatcattacagcgaatatgtgatgaaagaaggtttaaaaacgttactaatgaattggttcaatacagaaaaaataaatatagatgttgaagcatctacaattaatacagatccatttcaatatatttaa

SEQ ID NO: 413488 - DNA, 678 bp, Staphylococcus aureus
atgatttcgttaaataaccgattaacgacggtaagtcgatttttaaaacaaggtacaatcgcggatattggctcagatcatgcttatttgccaatctatgcaattcaaaaccatttatgcgaatgcggtattgctggagaagttattcaaggcccttttcaagctgctgtaaaaaatgtagctgcaaaccaattagtagatagaattgatgtacgtttaggggatggcttaagtgttattcaacctgaggacgtaatcgataatatcacaatttgtggtatgggcggaccacttattgctaaaattttaaaagatgggcaagataagttaagtcaacatccaaggttgattttacaaagtaatatccaaactgaaaatttaagacaaacattacaacaattgaattatgaaataattgatgaaataataatggaagaaaaaggccatatttatgaaattgttgtagcagaacattctacacaattaatagagctatcatctgatgaattgaaattcggaccaaaattgctgaacaacaaaaatgaatattttataaaaaaatggcaaagagagttagaagcactttatcatattaaatcgaaactcaatactgaacaacatcatcaacgtttagctcaaattaatgacgaaattgctgtaattgaaagggtgttatag

SEQ ID NO: 413489 - DNA, 1107 bp, Staphylococcus aureus
atgtctgataacacagttaaaattaaaaaacaaacaattgatccgacattaacattagaagatgttaagaagcaattaattgaaaagggtaaaaaagagggtcatttaagtcatgaagaaattgctgaaaaacttcagaattttgatatcgactctgatcaaatggatgatttctttgatcaattaaatgataatgatatttcactagttaatgaaaaagatagttcagatactgacgagaaactgaatccaagtgatcttagtgcccctccaggtgttaaaataaatgacccagttcgtatgtaccttaaagaaattgggcgtgttaacttattaagtgcacaagaagaaatcgaattagccaaacgtattgaacaaggtgatgaagtagcaaaatcaagactagcagaagcgaacttacgtttagttgtaagtattgctaaaagatacgtaggtcgtggtatgttattccttgatttaatccaagaaggtaatatgggtcttattaaagctgttgaaaaatttgactttaacaaaggatttaagttttcaacatatgcaacatggtggattagacaagcaatcactcgtgcaattgctgaccaagcacgtacgattcgtatccctgtgcatatggtagaaacaattaataaattaattcgtgttcaacgtcaattattacaggacttaggtcgagatccagcaccagaagaaattggtgaagaaatggatttaccagcagaaaaagttcgtgaaattttaaaaattgcgcaagaacctgtttcattagaaacgccaattggtgaagaagatgatagtcatttaggagactttattgaggatcaggaagcacaaagtccttcagatcatgctgcttatgaattattaaaagagcaattagaagatgtgcttgatacattaactgatagagaagaaaatgtattacgattaagatttggtcttgatgacggcagaacaagaacacttgaagaagttggtaaagttttcggtgttacacgtgaacgtattcgacaaattgaagcaaaagcacttagaaaattaagacatccaagtcgtagtaaacgtttgaaagactttatggattaa

SEQ ID NO: 413490 - DNA, 441 bp, Staphylococcus aureus
atggcacaatttgacaatttgagccgtcaagaaaaagcggagcgagcatttttaaaacatttaatgagagataaagatacatttttaaattattatgaaagtgttgataaggataacttcacaaatcagcattttaaatatgtattcgaagtcttacatgatttttatgcggaaaatgatcaatataatatcagtgatgctgtgcagtatgttaattcaaatgagttgagagaaacactaattagcttagaacaatataatttgaatgacgaaccatatgaaaatgaaattgatgattatgtcaatgttattaatgaaaaaggacaagaaacaattgagtcattgaatcataaattaagggaagctacaaggattggcgatgtagaattacaaaaatactatttacagcaaattgttgctaagaataaagaacgcatgtag

SEQ ID NO: 413491 - DNA, 213 bp, Staphylococcus aureus
atgaaaaataattttagagtaattctagctattaaaaaactttcaatagctgatgtatttttaggtactggaatagctaaaacaacgttatacggtttgtatcatgaaaaaactaagaaccctgatacgtctactattatgaaaatttgtaagtatcttgaaattacacctaatgaatttttcggaattgataataatggaaaggagacataa

SEQ ID NO: 413492 - DNA, 633 bp, Staphylococcus aureus
atgattcaaagtagactatctgtattgatggctgaaagaggtttaaaaatctcagatctatatgaagaaactggtatttcaaaaactactttaatggcaattgctgaaaattctggtaaaggagttcagtttgatactgttgataagttgtgtaattttttaggtgtcacaccatgcgaattttttgattattcgccatatatagttgaaaccaaaaaaagtgattttagtgaaggtaacttacaaggaattgaaattggaataagaaagcaaaattatgaaaaatactttaacttagatatatatgttgagagtggaaattcatatgatatacctttcagaagaggagaatttgattattatatcactttagtattacaatattcagaccattacaatgataaagagttttataatttcctttctaatatgaacatttcatttagaacagattttatcaataaattaattaaagaagttaagttacaattaacagatttagtttcaaacaaacaaccttctaaggttataggcggtaataaaacaattcaatttcaatcaaatgattacatcgccttgaagttatttgcggatagtgaatatgaaactttaaaaaaattccgtattaagtag

SEQ ID NO: 413493 - DNA, 216 bp, Staphylococcus aureus
atgttttggcttgtgccgttcacagtaattgtatatggaatctggatgttagaatgtccatggtgtaatgtacttgatgatttatctaatggcttagctgcggcagatgcttcgttagtattaaagtttgctcctgttgatgctataacgcctaatgctaatgttgttgtaatcaatgacttaaatttcataaattatctctccttttttatgtaa

SEQ ID NO: 413494 - DNA, 666 bp, Staphylococcus aureus
gtgcaaaattatgagaataaagcgtctgatgattattatgatgtaaacgatattaaaggaacaaaaagtaaagaccctaaacgaagaattccatatatggaaattgttggccaagtacatggaacgtatattattgctcaaaatgaatttggcatgtacatgattgaccagcatgcagctcaagaaagaataaaatatgaatattttcgagataaaataggtgaagttaccaatgaagtacaagatttattaatcccgttaacatttcatttttcaaaggatgaacaattagtcattgatcaatataaaaatgagcttcaacaagtaggtatcatgttagaacattttggtggtcatgattatattgtaagtagctatccagtttggttccctaaagatgaagtagaagaaatcattaaagatatgattgagctaattttggaagagaaaaaagtagatatcaaaaaattacgtgaagatgtagcaatcatgatgtcatgtaaaaaatctattaaagcgaatcattatttacaaaaacatgaaatgtctgatttaattgatcaattaagagaagcggaagatccatttacatgtccacatggtcgtccaattatcattaatttttcaaaatacgaattagaaaaattatttaagcgtgtgatgtag

SEQ ID NO: 413495 - DNA, 534 bp, Staphylococcus aureus; identical to SEQ ID NO: 405660

SEQ ID NO: 413496 - DNA, 819 bp, Staphylococcus aureus; identical to SEQ ID NO: 405659

SEQ ID NO: 413497 - DNA, 1497 bp, Staphylococcus aureus
atggaaaaatatattttatctatagaccaaggaacaacaagctcaagagcgattttattcaatcaaaaaggggaaattgcaggggtagcacaacgtgagtttaagcaatattttccacaatcaggttgggttgaacatgatgcaaatgaaatttggacatctgtgttagctgtaatgacggaagtaattaatgaaaatgatgttagagctgatcaaattgcaggtatcggtattacaaaccaacgtgaaacaacggttgtttgggacaaacatactggccgcccaatttatcacgcaattgtttggcaatcacgtcaaacacaatcaatttgttcagagttaaaacaacaaggatatgaacaaacatttagagataagacaggattacttttagatccgtattttgcaggtacaaaagttaaatggattctagacaatgttgaaggtgcacgagaaaaagcagaaaatggcgatctattatttggaacgattgatacttggttagtatggaaattatcaggaaaagctgcgcatattactgattattcaaatgcgagtcgtacattaatgtttaatatccatgatttagaatgggacgatgagttattagaactacttacagtacctaaaaatatgttgccagaagttaaagcttcgagtgaagtatatggtaagacaattgattaccacttctatggtcaagaagtaccaatcgctggagtagctggtgatcaacaagcagcattatttggacaagcttgcttcgaacgtggtgacgtgaaaaacacatatggaactggtggcttcatgttaatgaatacaggtgacaaagcggttaaatctgaaagtggtttattaacaacaattgcttatggtattgatggaaaagtaaattatgcgcttgaaggttccatctttgtttcgggttcagcaatccaatggttacgtgatggattaagaatgattaattcagcaccacaatcagaaagttatgcgacacgagttgactctactgagggtgtttatgttgttccagcttttgtaggtttaggaacaccatattgggattctgaagcacgtggtgcgattttcggtttaacacgtggaactgaaaaagagcactttatccgtgcaactttagaatcattatgttaccaaactcgtgacgttatggaagcaatgtcaaaagactctggtattgatgtccaaagtttacgtgtcgatggtggtgcagttaaaaataactttattatgcagttccaagcagacattgttaatacttctgttgaaagacctgaaattcaagaaactacagctttaggtgctgcatttttagcaggtttagcagttggattctgggagagtaaagatgatatcgctaaaaactggaaattagaagaaaaattcgatccgaaaatggatgaaggcgaaagagaaaaattatatagaggttggaaaaaagctgttgaagcaacacaagtttttaaaacagaataa

SEQ ID NO: 413498 - DNA, 1674 bp, Staphylococcus aureus
atggcattgtctacttttaagagagaacatattaaaaagaatttaagaaatgatgaatatgatttagtaattattggtggcggtattacaggtgcaggtattgcactagacgcgagtgaaagaggaatgaaagttgcattagttgaaatgcaagactttgcacaaggaacaagctcaagatctacaaaattagtccatggtggtttgcgttacttaaaacaattccaaattggagtagttgccgaaactggtaaagaacgtgcgattgtttatgaaaatgggcctcatgttacgactccagagtggatgcttttaccaatgcataaaggtggaacatttggtaaattctcaacatcaattggtttaggaatgtatgatcgtttagcaggtgttaagaagtctgaacgtaaaaaaatgttatctaaaaaagaaactttagctaaagaaccattagttaaaaaagaaggtctaaaaggcggcggttactatgttgaatatcgtactgacgatgcgcgtttaactattgaagttatgaagcgtgctgctgaaaaaggcgcagaaattatcaactatactaaatctgaacacttcacttatgataaaaatcaacaagtaaatggtgttaaagttatagataaattaactaatgaaaattatacaattaaggctaaaaaagtggttaatgcagcaggcccatgggttgatgatgttagaagtggtgattatgcacgcaataataaaaaattacgtttaactaaaggtgtacatgttgttattgatcaatcaaaattcccattaggtcaagcagtatactttgatactgaaaaagatggaagaatgatttttgcaattccacgtgaaggaaaagcgtatgtaggtactacagatacattctatgacaatatcaaatcttcaccattaactacacaagaagacagagactatttaatcgatgcgattaattacatgttccctagtgttaatgttacagatgaagatattgaatcaacatgggcaggaattagaccattaatttacgaagaaggcaaagacccttctgaaatctctcgtaaggatgaaatttgggaaggtaaatcaggtttattaactattgcaggtggtaaattaacaggctatcgtcacatggctcaagacattgttgatttagtatctaaacgcttgaaaaaagactacggtttaacatttagtccatgtaatacaaaaggtctggcaatttcaggtggcgatgtaggtggtagcaagaactttgatgcgtttgtagagcaaaaagtagatgtagctaaaggattcggcattgatgaagatgttgcaagacgtttagcatctaaatatggttcaaatgttgatgaattgttcaacattgcgcaaacatctcaataccatgatagcaagttaccattagaaatttatgtagaacttgtttatagtattcaacaagaaatggtatacaaacctaacgatttcttagttcgtcgttctggtaaaatgtatttcaatattaaagatgtattagattataaagatgctgtcatcgatattatggcagatatgcttgattactctccagctcaaattgaagcatatactgaagaagttgagcaagcaattaaagaagcgcaacatggaaataatcaaccagcagttaaagaataa

SEQ ID NO: 413499 - DNA, 918 bp, Staphylococcus aureus
atgatgactgaaaaacaatttaaattaactgtacaagataatacgaatattgaagttaaagtgaattttacagatgtagattcaaaaggaattattcatatatttcatggtatggctgaacatatggaacgttacgataaattagcacatgcactttcaaagcatggcttcgatgtgatacgtcataatcatcgaggacatggtattaatattgatgaatcaacaagagggcattacgatgatatgaaacgagttatcggtgatgcctttgaagtagcgcaaacagtgagaggcaatgttgataaaccatacattataatcggacattcaatgggatccgttatagctagattgtttgtagaaacatatccgcaatatgttgatggtctaattttaagtggtactggtatgtatccattatggaaaggattaccaaccgttaaagtgttacaactgattacaaaaatttatggtgctgagaaacgagttgaatgggttaaccagttagtatcaaatagttttaataaaaaaatacgtccattacgtacacaaagtgattggatttctagtaatgcaattgaagtagataactttattaaagatccatatagtggatttaatgtgtcaaatcaattattatatcaaacagcctattatatgctacatacatcacaattaaaaaatatgaaaatgttaaatcatgccatgcctatattattagtttcaggatatgacgatcctttaggtgattatggtaaagggattttaaaattggcgaatatatatagaaaagctggcattaaaaatgttaaagtgaatctttatcatcataaacgtcatgaagtgttatttgaaaaagatcatgacaaaatttgggaagacttgtttaaatggttgaatcaattttataaaaaataa

SEQ ID NO: 413500 - DNA, 936 bp, Staphylococcus aureus
atgaataaaaataagccttttattgtagtaattgtggggccaactgcttcaggtaaaacagagcttagcatagaactcgcgaagcgtatcaatggtgaaatcataagcggtgattctatgcaagtttacaaacatatgaatattggaactgcaaaagtaacacctgaagaaatggatggtattccacatcatttaattgatatcttgaatcctgatgatacattttcagcatatgaattcaagcgattagcagaagatttaattactgatataacgaatagaggtaaagttccaatcatagcaggtggaacaggcttatatattcaatcattaatatataattatgaattagaagatgaaacagttacacctgcacaattatccatagttaaacaaaagttatctgcattagaacatttagataatcagcaactacacgattatttagctcaatttgatgcggtttctgcagaaaatattcaccctaacaaccgccaaagagtattgcgcgctattgaatattatttaaaaacaaaaaaacttttgagtaatcgcaagaaagtgcaacaatttactgaaaattatgatacattattattggggattgaaatgtcgcgtaaaacattatattcaagaataaataaacgtgttgatattatgttggatcacggattatttagagaagtgcaacaacttgttgaacaaggctatgaatcttgccaaagtatgcaagctattggatataaagaattaatacctgtgattaacggacaaatgatttatgaagatgctgtcaatgatttaaagcaacattcacgccaatatgcaaaacgacaaatgacatggttcaagaataaaatgagtgttcattggttagataaagataatatgtcacttcaaatgatgttagatgagattacaacccagattaagtaa

SEQ ID NO: 413501 - DNA, 234 bp, Staphylococcus aureus; identical to SEQ ID NO: 405654

SEQ ID NO: 413502 - DNA, 477 bp, Staphylococcus aureus
atggagacaatttatgattttgtagtagaaacaaataaaggtgttacttacaaattagatgcatataagggtgacgttatgctaattgttaatacagctagcgaatgtggctttacttcacaatttgaaggtttgcaatcattatacgagaaatacaaagatcaagggtttgtaattctaggtttcccttgtaatcaatttggtggtcaagaacctggatcaggcgaagaagcagctcaaaactgtaaattaaactatggtgttaccttccctatgcatcaaaaaatagacgtaaaaggggaacatcaattacctttatttagatatttgactgcggcacaacacggattctttaatgagaaaatcaaatggaatttcactaagtttttagtggatcgcgaaggtaacgttgttaaacgaattgcacctcaaaaaaaacctgttcaaatcgaaagagaaatagaaaaattattataa

SEQ ID NO: 413503 - DNA, 1239 bp, Staphylococcus aureus
atggctcagcaacaaattcatgatactaaaaataaactagaaaaagctgtcttagtcggtgtacatgctcaagatgataagcaatttaattttgagtctacaatggaggaattatcatctttatcagagacttgccaacttgaagtgttgggtcaaattactcaaaacagagatcgtgtagatcgcaaatattatgttggtaaaggtaaaattgaagaaattcaagcatttattgagttcaaagatattgatgtagtcatcacaaatgatgaattaacgactgcacaatccaaatcactaaatgaagctttaggtgtaaaaattattgatagaactcagttgattcttgaaatatttgcattaagagcaagaagtaaagaaggtaaattgcaagtagagctagcacaacttgattatttattacctagattgcaaggccatggtaaaagcctttctcgtttaggtggcggtattggaactagaggccctggtgaaacgaagttagagatggatcgcagacatattcgaactcgtatgaatgaaattaaacatcaattgcggacggtagaagaacatcgcgaaagatatcgaaataaaagaaatcaaaatcaggtgtttcaagtagctttagttggttatacaaatgctggtaaatcatcatggtttaatgttttagcaaatgaagagacgtatgaaaaagatcaattatttgcaacgttagatcctaaaacacgacaaattcaaataaatgatggatttaatttaattatttcagatactgttggttttatacagaaactacctacgacgttaattgcagcttttaaatcaactttagaagaggctaaaggtgcagatttattagtacatgtcgtagatagtagccatcctgaataccgtacgcagtatgacacagttaatgatttaatcaaacaattagatatgagtcatatttctcaaatagttatttttaataaaaaggacttatgtgatcatgcatcaaattgtccagcaagtgatttgcctaatgtttttgtttcttctaaaaatgatggtgataaattacttgttaagacgttatttattgatgaaatcaaaaggcaattaacttattatgatgagacaattgcgacgaataatgcagatcgattatattttctaaaacaacatacattagtgactgaacttaaatatgatgaaattgaaaatgtttatcgtataaaaggatttaaaaaataa

SEQ ID NO: 413504 - DNA, 1239 bp, Staphylococcus aureus
atgaaagatataagtaagatagtagctgacgtcgaatcaacgttagcaccatattttaaagaaattgaagaaacagcatatattaatcaagaaaaagtattaaatgcatttcatcatgtcaaagcaaccgaaagtgatctacaaggatcaacaggatacggatatgatgattttggacgtgatcatttagaagaaatatatgcgcaggcatttaaagcagaagatgcaattgttcgtccgcaaattatttcaggtacgcatgcgattactattgcattacaaagtttattaaaacatggtgatgaattaatttatataacgggtagtccatatgacactttacttgaagtcattggcgtaaacggaaatggtattgaaagtttaatggagcacggcgtatcgtataaagatattgcacttaaagaaggtaagatcgatattgaaagtgtgttagatggggtttctgagcgtaccaaagtaatagcgattcaacgttcgaaaggctatgatcaaagaccttcaattcctctagatgaaattgaacaggtgattactaggttgaaagaagtgcatcctaatattttaatatttgtggataactgttatggggaatttgttgaaagacgtgaacctatagaatgtggtgccgatttaatagcaggatcattaattaaaaaccctggcggtggtttagctaagattggtggatacattgctggtagaaaagatttaattgaacgatgtggttatagattgacagcacctggtattggtaaagaagcgggtgcatcattaaatgcattgcttgaaatgtatcaaggtttctttttagcaccacacgttgtcagtcagagtcttaaaggtgcattgtttactagtttatttttagaaaaaatgaatatgaacacaacgccgaagtactacgaaaaacgaactgatttaattcaaacagttaaatttaaaacgaaagaacaaatgatttcattttgtcaaagtattcaacacgcatccccaattaatgcacattttagtccagaacctagttatatgcctggttacgaagatgatgttattatggcagctggtacgtttattcaaggttcatcgattgaattatctgcagatggacctattcgtcctccttatgaagcatatgttcaaggaggattaacatatgaacacgttaaaattgctgtgacaagagctgttaatcagttgaaagaacaaggacttatataa

SEQ ID NO: 413505 - DNA, 369 bp, Staphylococcus aureus; identical to SEQ ID NO: 405650

SEQ ID NO: 413506 - DNA, 1341 bp, Staphylococcus aureus
atgccaaaacgtactttcactaaagacgacattcgtaaatttgcagaagaggaaaatgtaagatatttaagattacaattcactgatattttaggaacaattaaaaatgttgaagtgcctgtaagccaattagaaaaagtacttgataacgaaatgatgtttgacggttcttctatcgaaggtttcgtacgtatcgaagaatcagatatgtacttacatccagatttagatacttgggtaatcttcccatggactgctggacaaggtaaagttgcacgtttaatttgtgatgtatataaaacagatggaacaccatttgaaggggatcctcgtgcaaacttaaaacgtgtattaaaagaaatggaagatttaggcttcacagactttaacctagggcctgaaccagaattcttcttgtttaagttggatgaaaaaggggaaccaactttagaacttaatgatgatggtggatatttcgatttagcacctacagatttaggtgaaaactgtcgtcgtgatattgttttagaattagaggatatgggcttcgatattgaagctagtcaccatgaagttgcccctggtcaacatgaaattgactttaaatatgcagatgctgttacagcatgtgataatatccaaacatttaaattggttgttaaaacaatcgcacgtaaacataatttacacgcaacatttatgcctaaaccattattcggtgtgaatggtagcggtatgcactttaacgtttcattattcaaaggtaaagaaaatgcattctttgatccaaatactgaaatgggcttaacggaaactgcatatcaatttacagcaggtgtgcttaaaaatgcacgcggatttactgctgtatgtaacccgttagtaaactcatataaacgtttagtacctggttatgaagcaccatgttatattgcatggagtggtaaaaaccgttcaccattaatccgtgtaccatcttcaagaggattatctactcgtatcgaagtacgttcagtagatccagctgcaaacccatacatggcgttagctgcaatcttagaagctggactagatggtattaaaaataaattaaaagttccagaaccagttaaccaaaatatttacgaaatgaaccgtgaagaacgtgaagcagtaggcattcaagacttaccttcaacactttatactgcattaaaagcaatgcgtgaaaatgaagttattaaaaaagctttaggaaatcatatctataatcaatttattaattcaaaatcaattgaatgggattactacagaactcaagtatctgaatgggaaagagatcagtacatgaagcaatattaa

SEQ ID NO: 413507 - DNA, 429 bp, Staphylococcus aureus
atgagcgaaaaacttcaagtaaaacaagaatttaacggcgttacaaggcaatacttgaatttcagaacagatagtatcgatgatctggataagttcaaaaaagaattcaaacctgttatgcacttaaaaggtgatgcattcaatcaacagttacaatctttgattaacaaatatccacaaatacaaaaaaatatgaaatcagagttcattgcttattatgataaagaaaaaaatagagaaacagtaaaaaactatgcttggaaccttcaaaaatctataaatgacattatgcaatcatatcctagcacaaaatttgtacagttttataaagatgatgtttccccgtcaatggtagatagaaatggccgtttaaaatcggatactaatgtaatttccatcgagggaggaaagtatgatgagaacaaatga

SEQ ID NO: 413508 - DNA, 237 bp, Staphylococcus aureus
atgatgttttacaataaatataaaaacgtgtcaacatatatcatcatatttttagtttcaagtgcagtctttgcaatattcttgttaagtgcgaacattagtgctcactcggaacaagtgtacgaaatgactgaccatcaaattaagaacaatacgataaataaagcatacgaacataaagaccctacaaacaatagcgaacaaagagatgggaaagtgttcgctttaataaattga

SEQ ID NO: 413509 - DNA, 240 bp, Staphylococcus aureus; identical to SEQ ID NO: 406971

SEQ ID NO: 413510 - DNA, 135 bp, Staphylococcus aureus
atgtctaatgaaaatcaaaataaaaaagcagcagaaaaagctaaagaagttgaagaaaaattaaaagataaaaaagaaaaaaaaacagaagatattaatcaaacaaaacaagatatccaagatacactaaattaa

SEQ ID NO: 413511 - DNA, 1296 bp, Staphylococcus aureus
atgtcttttcttaggaaacacgccgaaattatttttagctatttaatcggtatcgtttcactcttcactggtctcattattttaattaacttgcctttaattaaacaattaaatggtggtaaaaaagttgatacacatgttcataatgtgtgggaatttctgaatgcatttttcagtgaaattattaaagtaatgagtcgatttataggtaatttccctatagttagtgcaattgtgataattatattcggtattttagttatgttgattggtcatacattacttagaactattaagtatgactatgatatttctatctttttcttagttatcggtatcatgtactttattattactcttatattaatgactcaagtttatggattctttgcagtgattttcattattccatttacaattcatataggatatatcgtctataaagatgaattgaatcaggaaaatgtaaaaaatcatttcatgtggataattgtgagttatggtataagttacttaattacacaaattgcattgtatggcagaattgatgctaatgaaatagagtcaattgatatcttaagtgtcaatgctttctttataattatgtggttacttggtcaaatggctatttggaatttcttgttcttgcgccgagctttacctttaacaaagcaagaattaggtgaagaggagccagaattatcaagaacaagtaaagggaacgtcacgaatcaaactaaaattcacttgaaacaactccaagataagactacagaatatgcacgtaagacaagaagaagtgtcgatttagataaaattagagctaaaagagataaattcaaaaagaaagttaatgatattatcgatattcaagaagacgatattcctgattggatgagaaaaccgaaatgggttaaaccaatgtatgtcgaactattttgtggtgtcgtcatctttttattcacatttttagaatttaataatcgtaatgcattatttgtatctggtgattggaaattatcacagacacaatatgttattgaatgggttacattattaattctgttattcattattatcgcatatatcgctacaacgttaactttccacttgaaaggtaagttttattatttgcaactatttatggggagcattttattctttaaattgttaacggaatttataaatataatgattcatggactattactttcagtgttcattacgccaacattactattaatgttattggcaatcatcatttcttattcgttacaattacgagagcgaccataa

SEQ ID NO: 413512 - DNA, 267 bp, Staphylococcus aureus; identical to SEQ ID NO: 405306

SEQ ID NO: 413513 - DNA, 1719 bp, Staphylococcus aureus
atgtctaaattaattaaaggtattgctgcatctgatggtgtcgcaattgctaaagcttatttattagttgagccagacttaacattcgacaaaaatgaaaaagtcactgatgttgaaggagaagttgcaaagttcaatagcgctatcgaagcttctaaagttgagttaactaaaattagaaataatgcagaggttcaactaggtgctgataaagctgctatctttgatgcacatttattagttttagatgaccctgaattaattcaaccaatccaagataagattaaaaatgaaaacgctaatgctgctacagcattaacggatgtaacaacacaatttgttacaatttttgaatctatggataacgaatacatgaaagaacgtgcggctgatattcgcgacgtttctaaacgtgtgttatcacatattttaggtgtagaattaccgaatccgagtatgattgatgaaagcgttgttattgtagggaatgacttaacgccatctgatactgctcaattaaataaagaattcgtacaaggttttgctacaaacattggcggaagaacaagtcactctgcaattatgagtcgttctttagaaattccagcaattgttggtacaaaatcaattactcaagaagttaaacaaggcgacatgattatcgtagatggattaaatggtgatgtaatcgttaatccaactgaagatgagttaatcgcttatcaagataaacgtgagcgttattttgctgacaagaaagaattacaaaaactacgtgatgctgatactgttacagttgatggtgttcacgcagagcttgctgcaaatattggtacacctaatgatttgccaggtgttattgaaaatggtgcacaaggtatcggcttatatagaactgagtttttatatatgggtcgtgaccaaatgcctacagaagaagagcaatttgaagcttataaagaagtattagaagcaatggacggtaaacgtgttgttgtacgtactttagatataggtggagataaagaattatcatacttaaacttgcctgaagaaatgaatccattcttaggttaccgtgcgattcgtttatgccttgcgcaacaagatatttttagaccacagctacgtgcattattacgtgcatcagtttatggtaagttaaatatcatgttcccaatggttgcaacaattaacgaatttagagaagctaaagctatattattggaagaaaaagaaaaccttaaaaatgaaggtcatgacatttcagatgatatagaattaggaatcatggtagagatacctgcaacagcagcattagctgatgtctttgctaaagaagtagatttcttcagtatcggtacaaatgatttaattcaatacacattagctgctgaccgtatgtcagagcgtgtatcatatctataccaaccatataacccttcaatcttacgtttagttaaacaagttattgaagcgtcacataaagaaggtaaatggacaggtatgtgtggtgaaatggctggagatgaaacagctattccattattgcttggtttaggtttagatgagttctctatgagtgcaacgtctattctgaaagcaagaagacaaattaatggtttaagtaaaaatgaaatgactgaacttgctaaccgtgcagtcgactgtgcaacgcaagaagaagttattgaattagttaacaactacgtaaaataa

SEQ ID NO: 413514 - DNA, 234 bp, Staphylococcus aureus
atgtcagaaataatcgtttatacgcagaatgattgcccaccttgtacatttgtaaaaaattatcttaatgagcatcaaattgattttgaagagagaaatatcaacaatcaacaatatcgaaacgaaatgatagattttgatgctttttcaactccgtttattttgttgaatggtaatccaatgtaccatgttgatcttgatgaaatcaacaaagtattaaatatccaagattaa

SEQ ID NO: 413515 - DNA, 1362 bp, Staphylococcus aureus
atggatacagttgaaatcagtcggtttttgacagctatgactttagcagttcatatcatttttgcaacgattggtgttggtatgcctttaatgttcgcaattgcagaatttttaggtattcgcaaaaatgatcttcaatatatagctatggccaaaagatgggctaaagcttatacaattactgtagcagtgggagttgttacaggtacaattataggacttcaattatcattgatttggcctacatttatggaaatgggtggacacgttattgcacttccattatttatggaaacatttgcgttcttctttgaagctattttcttaagtatatatttatatacttgggatcgttttaaaaataaatggacacatttcttaattagtataccagtaattattggtggctctttctcagccttcttcattacttcagtgaattcatttatgaatacgcctgcaggttttgagttgaagaatggaaagatggtcaatgttcaacctatagaagcgatgtttaacccatcgtttatagttcgatcatttcacgtaattactacagccggtatgacgatggcatttgttattgcatcaatagcagcttttaaattattgcgtaatcgtcaacctaaagatactgtctaccataagaaagctttgaaaatgtctatgatagttggattcttttcaacattactttctatgttggcaggggatttatctgcaaaatttttgcataaattccaacctgaaaaattagcagcttatgaatggcatttcgatacatcttcccatgccaaattattattatttggtgtgttagatgaaaagactcagcaagttaaaggtgcgattgaattacctggactattgagtttcttagcagataatagtgtcaaaactaaagtacaagggttaaatgattttccaaaaagtttacatccgcctatgatcgtccattatttctttgatttaatggtaacaatgggaattttatgttttgtcatttcaggtgtttatgtcttaactttaatgtttaaaaagcttagaaagttttctactcataaatggatgctttatggaatattattaacaggcccagcttcaatgctagctatagaatttggatggttcttaacagagatgggtagacagccttggattgttcgtagttatatgcgcgtggcagaagcagcaacacaagcaggcggaataaccttcgttacaattttatttggcatattgtacatcattttaatgtatacatgtgcatacgtattaattcgtatgtttaaaaataaaccggcgtatgaagatgtaaatcgtttagccaagaagcaaggaggagaaatagaaaaatga

SEQ ID NO: 413516 - DNA, 1020 bp, Staphylococcus aureus
atgatttatgcatttataggtataacagtgttatggttgtttttattttgctatatcattattgcttctatagattttggggcaggtttcttcgcattgcattcaaagttaactggtgatgaaaagaaaattaatcacttaatttcacgttatttgaacccagtttgggaagttacgaatgtattctttgttttcttcttcgtaggattcgtaggtttctttccagagtcaatcaaatatttaggcacggtattgttaataccaggttcaatagcactgattatgatatcgttgagaaacagtttttatgcatttgaaaattatggtcaagatacaaaattagcatggatgatcatgtatggggtaagtggattattaattccagcttcattatctactgctttaactattacagaaggtggctatattaatgttcgaaacaatgttatcgatctagattgggtgcagttattattaagcccatttgcttggtctgtagtattcttggcaattatttcagttttatatatttcatcaggatttttgacatattatgctaaaaaagcaaatgacgaaccagcatataatttaacaagacaatggcacatatttttagggccgccgatgattatcatttgtttattcgtatttctatcattacgcattcaaaattctgaacatttttattcagctgtttttgactattggtggatgtttggtataagtttcttattctttgcattagcttcattgttaacattctttaagaaaaaacatggtttggcttttgtatttgttattttacaaatgatgttcgcgttctttggctatggaattagtaaattgccataccttttatatccgtttgtaaaaattacagatgcatatgttaatccagaaatgggctggacattagtgattgtctttattttaggtttacttttattacttccatcgttaatattattattaagattatttgttttcgacaaagaatatgttgaaggaaagaaatcataa

SEQ ID NO: 413517 - DNA, 663 bp, Staphylococcus aureus; identical to SEQ ID NO: 405301

SEQ ID NO: 413518 - DNA, 870 bp, Staphylococcus aureus
atgaatttggattggtactatacatttgtcattttagcgaagacgttaaactatcgattagctagtgaagaaattaatctcactataccttctatacataagcaaattaaaaatttagaacagcatctcaatgtgaaactatttgaaacttataaaaatcaaattatcttgactgaagatggtcatacatttcttccaattgcgcaaagttttattgaacaatatgaaagtggcatcaaacatatccaacttaaaaaaacgatgtttcaatcgaaattaaatgttgtcgtgtcttcatatatcgcgacattcattatgcccaaatttttaaaatctttctttaacgagcatccttttatcgatgtttctcttcatgtcaaaaatgaaaatattgaaaaagatattaataatcatacgtatgacatcgggattagcagaaatcaacctaaactaagagaagttcattctgaaaaagtatgcgaaggtaaaattgtattgattgctcccaataaagagaataatcatcttctaactgaggcatctttatttgaaaaatacaaaataataagtgataaccatccagaatattggtcatcacttaaaaataatattttaaatatttatgaaaaagcacaatttctatctatcaatgatgtgcatacttcaattaaattaatcgaaatgaatcaaggtatatcattcctgcctctttatataacaacaaatagtgattacaatatttcggttattaacacgaaaattttacaagcacctatttcatttacatatatatacagcaaaaaagaaagcccagaaatattggtgtttattaaatcatttaaaaagtatattgccaatgaacaattataa

SEQ ID NO: 413519 - DNA, 408 bp, Staphylococcus aureus
atgattcgaattcaagataatacaataagggatggtatgcaacaaagtaatgttcgaaaaagtctaattataaaaaaagaagtattgaaacaaattaacaagttaaatataaattctgttgaagtaggcatgtgtacaactatcgaggatgaatttaatattcatcaattcagagacattttaagtcctgaaaaagaattagtagtattgactaggcttaatgaaaaagaaataaaaaaaatagtcaaattaaaaattcataatttagtggtaaaaatactattgccaatatctgacttgcatataaaagaaaagcttaatttttcaaataaatattatattcagaaaatcaaagactgcttggatatattaaagaaagataaaaaaaggagtagatatttgttttga

SEQ ID NO: 413520 - DNA, 699 bp, Staphylococcus aureus
atggaaattatttcaaaatatcaagttagaacagttacctttgcggacactgtaggatgttcgacaccattagaatacggagatatttttaattactttgtaaaaaaatattctaacataattttttctgctcattgtcataacgatctagggttggctactgcaaatacattagctgcaattttaaatggtgcaaagcaaatagaaactacatttttgggaattggtgagagagcgggtaatgctcctattgaggaaataattactattttgacaaaaaaacaaatagaaagtacggaattcactttacccgacgtatataaaactagtattaatatttctaaaattctcgattttcaaatatcagaaaacaaacctataattggtgaaaatatatttaaacatgaatcaggaattcatcaagatggtactaaaaaaaatataaatatgtatcaatatttagttcctagtgatttaggattgaaaaattcacaagttgttcagtttccaataagtaatatttctagtaagaaaatcttgcacaataaatttaaatcaatagttaacactgaagaaattgatgaaaatatttctttctataaacttgtgaacaagttttcacctgaagtagcatctgaagatacagtggatttacttcagataataaaaaggaggagtaaagatggaaattttaaatga

SEQ ID NO: 413521 - DNA, 642 bp, Staphylococcus aureus; identical to SEQ ID NO: 405408

SEQ ID NO: 413522 - DNA, 1119 bp, Staphylococcus aureus
atgaataagttaatacttgggatttatttataccgaattttttcacgagcatacttttatttaccgtttttattaatttactttttgattcaaggttattccataatacaattagaaatattaatggcgtcttatggcattgcagcatttttattctctctatacaaagagaagtgttttaaaatttgtaacttaaaagattctaataaattagttgttagtgaaatattcaaaatcatcggtttattgttgttattatatcaaaatcaatatttaattttagtagtggcacaaatattattagggttaagttactcaatgatggcgggtgttgataccgcaataattaaaagaaatataacaaatgagaaatacgtacaaaataagtcaaatagctatatgttcctatcattattaatttcagggattataggtagttatctttatggaataaatattaaatggcctataataatgactggtatattttcaattctaacaattataattattcgatgcacattagttgaaaatagggaattaaatttaataggagaaacaaagggaaagataaagaaatttctaccagaagagaagttttggatattgcattattcttttttaagagcgttaatattaggattttttataggatttattccaattaatatatataatgatttaaaactgaataatttacaatttatttcagtattaacttgttacacagttatgggttttgtatcttcacgttatttaactaaatacttgaattatatgtttgtgtcagaaatttgtttagtaatatttttaataatatatacatatcaaagtttcatagcagttactatttctatgatatttttaggtatttcttcagggttaactcgtccacaaactataaataaactttctagcagtagtaacttaagagtgatgcttaattatgcagaaacgttatattttatttttaatatcgcatttttacttatgggtggttacttatatacaataggaactattcaatacttaatattatttatttcgttattaatttttatatatttaataataatattttattttacaaggagagagcaacatgaaaataaaaactga

SEQ ID NO: 413523 - DNA, 516 bp, Staphylococcus aureus
atgaaaataaaaactgaatttaaagggaacaatataccatatgaatacgcagcaggtgcagatgtgagtgattctattaacgggaatccaattaagtcatttccatttgaagtaattgaattaccggaagggactaaatatcttgcttggtctttaattgactatgatgcaatcccagtatgtggctttgcttggattcattggagtgtagctaatgtaagtgttagtggcaattcaatttctataaaagcagatttatcaagaacaaagggcgagtatgtacaaggtaaaaatagcttcactagtggtttgttagctgatgatttttcagaaatagaaaatcactatgtaggacctacaccacctgatcaagatcatcaatatgaattaacagtttatgcgttagatcattttttaaatttgaagaatgggttctacttgaatgaatttttaaaagaagtaaatcaacataaaattgatcaaacaagtattaaccttataggaagaaaaatttaa

SEQ ID NO: 413524 - DNA, 435 bp, Staphylococcus aureus
atgaaattaaaatcatttataactgtaactttggcactgggcatgatcgcaacgactggcgctactgtgacaagtaatgaggtatctgcagcagaaaaggacaaactaccggcaactcaaaaagctaaagaaatacaaaatgttccatatacaattgcagtagatggcattatggctttcaatcaatcttacttaaatttaccaaaagatagccaattatcatatttagatttaggaaataaagttaaagctttattatatgatgaacgtggtgtaacacctgagaagattcgaaatgcaaaatctgccgtttacacgattacttggaaagatggcagcaaaaaagaagtggatttaaagaaagatagttatacagcaaacttgtttgattcaaattcaattaaacaaattgatattaatgtaaaaactaaataa

SEQ ID NO: 413525 - DNA, 186 bp, Staphylococcus aureus; identical to SEQ ID NO: 405404

SEQ ID NO: 413526 - DNA, 942 bp, Staphylococcus aureus
atgaacgtgggtattaaaggttttggtgcatatgcaccagaaaagattattgacaatgcctattttgagcaatttttagatacatctgatgaatggatttctaagatgactggaattaaagaaagacattgggcagatgacgatcaagatacttcagatttagcatatgaagcaagtgtaaaagcaatcgctgacgctggtattcagcccgaagatatagatatgataattgttgccacagcaactggagatatgccatttccaactgtcgcaaatatgttgcaagaacgtttagggacgggcaaagttgcctctatggatcaacttgcagcatgttctggatttatgtattcaatgattacagctaaacaatatgttcaatctggagattatcataatattttagttgtcggtgcagataaattatctaaaataacagatttaactgaccgttctactgcagttctatttggagatggtgcaggtgcggttatcatcggtgaagtttcagaaggcagaggtattataagttatgaaatgggttctgatggcactggtggtaaacatttatatttagataaagatactggtaaactgaaaatgaatggtcgagaagtatttaaatttgctgttagaattatgggtgatgcatcaacacgtgtagttgaaaaagcgaatttaacatcagatgatatagatttatttattcctcatcaagctaatattagaattatggaatcagctagagaacgcttaggtatttcaaaagacaaaatgagtgtttctgtaaataaatatggaaatacttcagctgcgtcaatacctttaagtatcgatcaagaattaaaaaatggtaaactcaaagatgatgatacaattgttcttgtcggattcggtggcggcctaacttggggcgcaatgacaataaaatggggaaaatag

SEQ ID NO: 413527 - DNA, 1245 bp, Staphylococcus aureus
atgagtcaaaataaaagagtagttattacaggtatgggagccctttctccaatcggtaatgatgtcaaaacaacatgggagaatgctctaaaaggcgtaaatggtatcgataaaattacacgtatcgatactgaaccttatagcgttcacttagcaggagaacttaaaaactttaatattgaagatcatatcgacaaaaaagaagcgcgtcgtatggatagatttactcaatatgcaattgtagcagctagagaggctgttaaagatgcgcaattagatatcaatgaaaatactgcagatcgaatcggtgtatggattggttctggtatcggtggtatggaaacatttgaaattgcacataaacaattaatggataaaggcccaagacgtgtgagtccatttttcgtaccaatgttaattcctgatatggcaactgggcaagtatcaattgacttaggtgcaaaaggaccaaatggtgcaacagttacagcatgtgcaacaggtacaaattcaatcggagaagcatttaaaattgtgcaacgcggtgatgcagatgcaatgattactggtggtacagaagcaccaattactcatatggcaattgcaggtttcagtgcaagtcgagcgctttctacaaatgatgacattgaaacagcatgtcgtccattccaagaaggtagagacggttttgttatgggtgaaggtgctggtattttagtaatcgaatctttagaatcagcacaagctcgaggtgccaatatttatgctgagatagttggctatggtactacaggtgatgcttatcatattacagcgccagctccagaaggtgaaggcggttctagagcaatgcaagcagctatggatgatgctggtattgaacctaaagatgtacaatacttaaatgcccatggtacaagtactcctgttggtgacttaaatgaagttaaagctattaaaaatacatttggtgaagcagctaaacacttaaaagttagctcaacaaaatcaatgactggtcacttacttggtgcaacaggtggaattgaagcaatcttctcagcgctttcaattaaagactctaaagtcgcaccgacaattcatgcggtaacaccagatccagaatgtgatttggatattgttccaaatgaagcgcaagaccttgatattacttatgcaatgagtaatagcttaggattcggtggacataacgcagtattagtattcaagaaatttgaagcataa

SEQ ID NO: 413528 - DNA, 372 bp, Staphylococcus aureus
atgttgaaaaaatggcttggaatggcactaataaccccaatgttaacgtttattatatgggtttttaatagccatactatcattacatatttaaatatattgttttatgtttcattaattatttttattagcatatttttgattttacttgtacaagaaggcatttttgatgcgacaagttatggttttagaagattaaagtatcaaatgtcatcttcgaaaaagaagaagtctatctctgatgatccatttttcaacccacaagaggtaaaaaaagagcattactttgtttctacatggataatccccttattattaataaatattctatattttattatgacgattgtgctgtcgctcatcttagtataa

SEQ ID NO: 413529 - DNA, 189 bp, Staphylococcus aureus
atgtatctggcgactgttgctaaaacggctgcagataatgctagtgaaggtagaatagcagttgaaaatccttcccatccagctactgggaaccatctcaatttaactgcaaatacatattgtaaaagtacagcaagtacaaaagatggtacagatacagcaataactgaaataactgtagttgtatag

SEQ ID NO: 413530 - DNA, 939 bp, Staphylococcus aureus; identical to SEQ ID NO: 405346

SEQ ID NO: 413531 - DNA, 1656 bp, Staphylococcus aureus
atgacgagaaaatttagaacacttattttaattttgattgctacaattgcattaagtggttgtgctaatgatgatggtatttattcagataaaggtcaagtattcagaaaaattttgtcatcagacttaacatcccttgatacatcattaataacggatgaaatatcttctgaagtgactgcgcaaacattcgaaggtttatacacattaggaaaaggtgacaaaccggtgttaggtgttgcgaaagcttttcctgaaaagagtaaaggtggtaaaactttaaaggttaaattaagaagcgatgctaaatggagcaatggtgacaaagtgactgcgcaagattttgtttatgcttggagaaaaacagttgaccctaaaacaggttctgaatttgcatacattatgggggacattaaaaatgcgagtgatattagtactggtaagaaacctgtagagcaattaggtatcaaagcattagatgatgaaacattacaaattgatttagaaaagccggttccatatattaatcaattattagcacttaatacctttgcacctcaaaatgaaaaagttgccaaaaaatatggtaaaaattacggtacggcagctgatagagcggtatacaatggtccatttaaagttgatgattggaaacaagaagataaaaccttactatctaaaaatcagtattattgggataaaaagaatgtaaaattagataaagtgaattataaagttattaaagacttacaagccggtgcatcattgtatgatactgaatcagtagatgacgcagttattactgcagatcaagtaaataaatataaagataacaaaggattaaactttgtgttaacgactgggacattttttgtaaaaatgaatgaaaaacaatatcctgattttaaaaacaaaaatttaagactggctatcgcacaagcaatagataaaaaaggatacgttgattcagtgaaaaacaatggctcaattccttccgatacactaacagccaaaggaattgcgaaagcgcctaatggcaaagattatgcgagtaccatgaattcgcctttaaaatataatcctaaagaagcaagagcacactgggacaaagctaaaaaagagttaggtaaaaatgaagtgacattttcaatgaacacagaagatacaccagatgcaaaaatatctgctgaatatatcaaatcgcaagttgagaaaaatttaccaggagttactttgaaaattaagcaattaccgtttaaacaaagagtatcattagaactgagtaacaattttgaagcatcacttagtggttggtctgcagattaccctgatcctatggcttatttagaaacaatgaccacaggtagcgcacaaaataatacagactggggtaataaagaatatgatcaattacttaaagtagcaagaaccaaattggcacttcaaccgaacgaacgatatgaaaacttgaaaaaagcagaagaaatgttcctaggagatgcaccggtagcaccaatttatcaaaaaggtgttgcacatttaacaaatcctcaagtaaaaggattaatttaccataaatttggtccaaataactcacttaaacatgtatatattgataaatcgatagataaagaaacaggtaagaagaaaaaataa

SEQ ID NO: 413532 - DNA, 942 bp, Staphylococcus aureus
atgaaaaatgatgaagtgctattatccattaaaaatttaaagcaatattttaacgcaggaaagaaaaacgaagtgagagcgattgaaaatatttcgtttgatatatacaaaggggaaacattaggtttagtaggagaatcggggtgtggtaaatctacaactggtaaatcaattattaaacttaatgatattacaagtggagaaattttgtatgagggtattgatatacaaaagattcgtaaacgtaaagatttgcttaaatttaataaaaagatacagatgatttttcaagacccatatgcgtctttaaatcctaggttaaaagtaatggatatagtagctgaaggtattgatatccatcatttagcaactgataaacgtgaccgtaaaaaacgtgtctatgatttacttgaaactgttggattaagtaaagaacatgccaatcgctatcctcatgaattttcaggtggacaacgccaacgtattggaattgcccgtgcattagccgttgaaccagaatttattatcgcggacgaaccaatatcggcattggatgtttcaatccaagctcaagtagttaatttattattaaaattacaacgtgaaagagggattacgttcctatttatagctcatgatctatcaatggtgaagtatatttcagatcgtattgcagtgatgcattttgggaaaatagttgaaattggaccggcagaagaaatttatcaaaatccattacacgattatactaagtctttattatcagccattccacaacctgatcctgaatcagaacgcagtcgcaaacgatttagttatattcatgatgaagcaaataatcatttaagacaattacatgaaataagaccacagcattttgtctttagtactgaagaagaagcggcacaactacgagaaaataaattggtgacacaaaattaa

SEQ ID NO: 413533 - DNA, 1020 bp, Staphylococcus aureus
atggttacgattaaagatgttgcactaaaagccggtgtttctccttcgacagtttcaagagttataaaaggaaataaacgtattagcgaagcgacaatttcaaaagtgaagaaagttatggaagaattgaattattttcctaataccgctgctagaactttaattacaaaccaaacatataaaattggtttagtgttaaaagggtctgaggagcctattcgactgaatccattctacatcaatgtattgctaggaatttctgaaacgtgtaaccagcatggctatggtacacaaacgacagtctcaaataatatgaatgatttaatggatgaagtttataaaatgattaaacaacgaatggttgatgcgtttatactgctttattcaaaagaaaatgatccaattaaacaaatgttaattgatgaaagcatgccatttattgtgattggtaagcctacatcggatatagatcatcaatttacacacatagataatgataatatattagcttctgaaaatttgacacgacatgttattgaacaaggtgtagatgaattaatatttattacagaaaaaggaaattttgaagtttcaaaagatagaattcaaggatttgaaacggttgcatcacaatttaatctggattatcaaattattgagactagtaatgaaagaaaagttatttttaattacatgcaaaatctacatacgcgcttgaaggacccaaatattaaacaggcaatcatttcgttagatgctatgttacatttagcgattttaagtgtcctatatgaacttaatattgaaattccgaaagatgtaatgacagcaacgttcaatgattcttatttaaccgaaattgcgtcaccacctcaaaccagtattgacatcaagcctcgaatgttaggtcaacaagccgggtctgctattttagagatattaaaaaataaagcacaggatgttattgaactcgtcattatagatacagaattaaaaataagaaaatcaacacagcgatag

SEQ ID NO: 413534 - DNA, 1650 bp, Staphylococcus aureus
atgaataagcaatggtggaaagaagcagtagcatatcaagtatatccaagaagttttaatgatagtaatcacgatggtattggggatttacctggaatgattgataaattggactacttaaaagatttaggtatcgatgtcatttggctcagtccaatgtttaaatcacctaatgatgacaatggttatgatattagtgactaccaagagattatggatgaatttggaacgatggaagactttgatcgtttattaaaaggtgttcatgatagaggcatgaagcttattttagatttagttgtaaatcatacatctgatgaacatccttggtttatagaatctaaatctagtaaagacaatcccaaacgtgattggtatatttggcaagatccaaagccagatggctctgaacctaacaactgggaaagtatctttaatggatctacatgggaatatgatgctaatactgagcaatattatttccatttattcagtaaaaaacaacctgatttgaattggggtaatccagaagttagagatgctgtatttgaaatgatgaactggtggtttgataaaggcattgatggatttagagtagatgcaattacgcatattaagaagacgtttgaagcgggtgacttacctgtacctgagggtaaaacatatgccccagcatttgatgtagatatgaatcagccaggtatacaaacttggttacaagagatgaaagatcgctcattaagtaagtatgacattatgactgtcggtgaagcgaatggtgtaagccctgatgatgctgatgactgggtcggggaagaaaatggtaaatttaatatgatattccaatttgaacatttgggactgtggaatagtggtgattctcactttgatgtaaattcgtataaatctgtattaaatagatggcaaaaacaacttgaaaataaaggttggaatgcgttgtttattgaaaatcacgaccaaccacgacgtgtatcgacgtggggtgacgatgacaagtattggtatgaatcagcaacaagtcatgcagctgtttatttcttgcaacaaggtacgccattcatttatcaaggtcaagaaattggtatgacgaattatccatttgaaagtattgaaacgtttaacgatgttgctgttaaaaatgactatcaaatagtgaaagctcaaggtggagatgtagacgctttacttgcgaaatataaagatgagaaccgagataattctcgcacaccaatgcaatgggatgatacgttaaatggaggatttacaaatggtgaaccgtggttcccagtgaatccgaattataaaactatcaatgttgcacaacaattagaagatgagcattcagtattacaattttataaagatttaattcaattaagaaagtctaatgatgtatacgtatatggtcaatttgatttagtagatgctgaaaattcacaagtttttgcgtacacgagaacattaaatgaaaagcaagttcttattgtaggtaatcttactaaccacgaagcagaattaactgtaccatttgatttaagccatggagaagtaaagctatttaattatgatgccaaagttaatttaaaacagttacgtccatatgaagcatgtgttatcgaactaaattaa

SEQ ID NO: 413535 - DNA, 867 bp, Staphylococcus aureus
ttggacgttatcaagcaaatacaacaggcaattgtttatattgaagatcgtttattagagcctttcaatttgcaagaattaagtgattacgttggtctttcgccataccatcttgatcaatcatttaaaatgattgtcggcttatctccagaagcttatgcacgcgcgcgtaaaatgacactcgctgcaaatgatgtgattaatggtgctacacgacttgtagatatcgctaaaaaatatcactatgcaaattcaaatgattttgcaaatgattttagtgattttcacggcgtatcacctattcaagcttctactaaaaaagatgaattacaaattcaagagcgattatatatcaaattatcaactactgagagaacaccctatccatacagattagaagagacagatgatatttcattggttggatatgcacgatttatagacactaagtatttgtcacatccttttaatgttccggattttttagaagacttgctcattgatggtaaaattaaagagttacgacgatataatgacgttagtccatttgaactatttgttattagttgtcctcttgaaaatggtttagaaatatttgtaggtgtaccaagtgaacgttatcctgcacacttagaaagccgatttttacctggcaaacattgtgcgaaattcaatttacaaggtgaaattgattatgcaactaatgaagcttggtactatattgaatcaagtttgcagttaacattgccatatgaacgaaatgatttatatgttgaagtgtaccctctcgatatttcatttaatgacccattcactaaaattcagctttggattcctgttaaacagagtccttatgacgaagattaa

SEQ ID NO: 413536 - DNA, 1485 bp, Staphylococcus aureus
ttgagtactaaaaacaaacacatcccttgtttaatcacaatctttggtgcaactggtgacttaagccatcgtaagttgtttccatcaatattccatctctaccaacaagacaatttagatgaacatattgccatcatcggtattggacgtcgtgacattactaatgatgatttccgtaatcaagtaaaatcatcaattcaaaagcacgtaaaagatacaaacaaaattgacgcgtttatggaacatgtcttctatcatagacatgatgttagtaatgaagaaagctatcaagaattactagattttagtaatgaattagatagccaatttgaattaaaaggtaatcgactattctatttagcaatggcaccacaattctttggcgttatttctgattatctaaaatcttctggtcttactgatacaaaaggatttaaacgccttgttatcgaaaaaccattcggtagtgatttaaaatcagccgaagcattaaacaatcaaattcgtaaatcatttaaagaagaagaaatttatcgtattgaccactatttaggaaaagacatggttcaaaatatcgaggtattacgttttgcgaatgcgatgtttgaaccattatggaataacaaatatatttcaaacatccaagttacatcatctgaaatactaggtgttgaagatcgtggtggttattatgaatcaagtggcgcgctaaaagatatggtgcaaaaccacatgttacaaatggttgcattattagctatggaagcacctattagtttaaatagtgaagatatccgtgctgagaaagtaaaagtacttaaatcactgcgtcatttccaatctgaagatgttaaaaagaactttgttcgtggtcaatatggcgaaggctatatcgatggtaaacaagttaaagcataccgtgatgaagatcgcgttgcagatgactctaacacacctacctttgtttcaggtaaattaacaattgataactttagatgggctggtgtaccattctatattcgtactggtaaacgtatgaaatctaaaacaattcaagttgtcgttgaatttaaagaagtaccaatgaacttatactatgaaactgataaactattagattcaaacctattagtaatcaatatccaacctaatgaaggtgtatctttacatctaaatgctaagaaaaatacacaaggtatcgaaactgaacctgttcaattgtcttattcaatgagcgctcaagataaaatgaatactgtagatgcatatgaaaatctattattcgattgtcttaaaggtgatgccactaacttcacgcactgggaagaattaaaatcaacatggaaatttgttgatgcaattcaagatgaatggaatatggttgatccagaattccctaactatgaatcaggtactaatggtccattagaaagtgatttactacttgctcgtgatggtaaccattggtgggacgatattcaataa

SEQ ID NO: 413537 - DNA, 921 bp, Staphylococcus aureus; identical to SEQ ID NO: 413455

SEQ ID NO: 413538 - DNA, 813 bp, Staphylococcus aureus; identical to SEQ ID NO: 413454

SEQ ID NO: 413539 - DNA, 165 bp, Staphylococcus aureus; identical to SEQ ID NO: 406260

SEQ ID NO: 413540 - DNA, 2136 bp, Staphylococcus aureus
atgaaatctttaatattagctgaaaaaccatcagtcgcaagagatattgctgatgctttacaaataaatcagaagcgtaatggttactttgaaaataaccaatatattgtcacgtgggcgttaggtcatctagtgacaaatgcgacacctgaacaatacgataaaaatttaaaggaatggcgattagaagaccttccaattatacctaaatatatgaaaactgttgttattggtaaaacaagcaaacaatttaaaacagtaaaagcgttaattttagataataaagtgaaagatattattattgcaacagatgctggacgagaaggtgaactagttgcaagattgattttggataaagttggtaacaaaaagccaatccgtcgattatggattagctcagttactaaaaaagctattcaacaaggttttaaaaatttaaaagacggtcgtcaatataacgatttgtattatgcagcgttagcgagaagtgaggcagattggattgttgggattaatgcaacgcgtgcactaacaacaaagtatgatgcacagctatccctgggacgtgttcagacaccaacgattcaattagtaaatacacgacaacaagagattaatcagttcaaaccacaacaatactttacattatcattaacggtaaaagggtttgattttcagctagaatcaaatcagcgatataccaataaagaaactttagaacagatggttaataatttgaaaaatgtcgatggtaagattaaatctgttgctactaaacataagaagtcgtatccgcaatcactgtacaatttaacagatttacaacaagatatgtatagacgttataaaattggacctaaagaaacattgaatacacttcaaagcttatatgagagacataaagtcgtaacctatccaagaacagattcaaactatttaacaactgatatggtagatactatgaaagaacgtattcaggcgacgatggcaacaacatataaagaccaagcacgcccattaatgtctaaaacattttcatcaaaaatgtcgatatttaataatcaaaaagtatctgatcaccatgcaattattcctacagaagtgagacctgtcatgtcagacttaagtaatagagaattaaagttatacgatatgattgtcgagcgttttttagaagctttaatgcctccgcacgagtatgacgcgataactgtaactttagaggttgcagggcacacatttgttttgaaagagaatgtaacaactgttttaggttttaaatctattagacaaggtgaatctattacagagatgcaacagcctttttcagaaggcgatgaagtgaagatttcaaaaacaaatattagagaacatgaaacaacacctccagaatattttaatgaaggttcgttattaaaagcgatggagaaccctcagaactttattcaattgaaggataaaaaatatgcgcaaactttaaaacaaacaggtggtatcggcacagttgcaacaagggccgacattatcgataaattatttaatatgaatgccattgaatcaagagacggtaaaattaaagtaacgtcaaaaggtaaacaaatattagaattagcaccagaagaattaacgtcgccacttttaactgcacaatgggaagaaaaattacttttaattgaacgtggtaaatatcaggcgaaaacattcattaatgaaatgaaagattttacgaaagatgttgtaaatgggattaaaaatagtgatcgtaaatataaacacgataatttaacaaccacagaatgcccaacgtgtggtaaattcatgattaaagttaaaactaaaaatggtcagatgcttgtgtgccaagatccatcttgtaagacgaaaaagaatgtacagcgcaaaacaaatgcaagatgtccaaactgtaaaaagaaattaacgttgtttggtaaagggaaagaagcggtatatcgttgtgtttgtggacattctgaaacgcaagcacatatggatcagcgtatgaagtctaaatcctctggtaaagtatctcgtaaagaaatgaaaaagtatatgaataaaaatgaaggtttagacaataatccgtttaaagatgcattaaagaacttgaatttatag

SEQ ID NO: 413541 - DNA, 1335 bp, Staphylococcus aureus
gtgaaaaactatttccagttcgataaatatggaacaaactttaaaagagaaatcttaggcggtatcacaactttcttatctatggcctatattttagcagttaacccgcaagttttaagtttagcaggtgttaaaggcgtatcagaagatatgaaaatggaccaaggtgccatttttgtagcgactgcattagcagcatttgtaggctcgctattcatggggctaatagctaaatatccaattgcgttagcaccaggtatgggattaaatgcattctttgcatttactgttgtgttaaccatgggtattccttggcaagttggtttaacaggcgttttattctcaggtatattctttgcgatattaaccgtcacagggtttagggaagttattattaatgcaattccttatcaaatgaagatggctgtttcagcaggtataggattattcattacatttgtaggtttacaaagttcgggtattatagttaaaaatgaatctacattagtaacattgggacatttaactgatccaccagtacttttggcgatattcggtatcgttattacagttattttatatgcaattaaattgccgggttctatctttatcggtatgatcatcacagcaatcgttggtatgttcactggattgattcaaatgccatctggtattgtaggtaagattccaagtattgaaccaacgttcggtgctgcatttgaagcgtttaaagacccaagtcaattattaacgatacagttcttaattgttattttaacgttcttatttattgatttctttgatacagctggtacattagtagctgttgctactcaagcaggtattatgaaagataataaattaccaagagctggtagagcattgttctcagattctttagctacgattgtaggatcagtttttggaacaactacaacaacttcttatatcgaatcaacttcaggtgttgctgtaggtgctagaacaggatttgctagtatcgtaacaggttgttgtttcctattagcgctgttctttagtccgttaatcgctgttgtaacaagtgcagttacgacaccagctttagtggtggtaggtgtattaatggctgcaaactttgctgagataaactggaaaagttttgaagttgcagtgccagcattcattacaatcattatgatgcctttatcatactcaattgcaactggtattgcgtgtggatttattttctatccaattacaatgcttatctctaaaaaacataaagaagtacatccgataatgtatgtattaatggtactattcattctgtacttcatatttgttcatggttaa

SEQ ID NO: 413542 - DNA, 1398 bp, Staphylococcus aureus; identical to SEQ ID NO: 413471

SEQ ID NO: 413543 - DNA, 633 bp, Staphylococcus aureus
ttgctttacgaatctaatattattaacaaaaatcccagatatagaattattaaatataaaaacgactatctgatgattgatttagtaagcacctggttagttttgttctttccgtttattaattggttaataccaaaaaaatatgtccaaatcagcagagaagagtttgataatttaaatattgttaaaccagttaaaaataaagctttatggccagttataggtagcatacttttatttggcactatgtttagagataaaatatatatacctgattctcatttagaaaaaaattgcgttattatcatttgttcggttttattattaagtattctagtgttttatatatatttaaatcagaaagtaaagttatctatctataataatcggagtagcaatggaaaaattatgatttttccatcattcaagaatctttgctttgtgctattttcttattttttctgtggtggattatcaatcatgttcttagatgttttgattagtttatctatccaaaatattatagtatttattgcttgggttattatgacaatgctatttttctttttaaatatgtcttcaataatagacaaaaagattcatgttatatatttaaggccatataaacattaa

SEQ ID NO: 413544 - DNA, 618 bp, Staphylococcus aureus
ttgctttgtgaaaccgaaattatcaataaaaatccgaaatacagagttattaagtatgatgatgagtatttaatggtcgatgtaataagcacttggcttgtatacttttttccatttattaattggttcattccaaaaaggtgcgccaaaattagtagagaagagtatgaaaaactgaacactgttaagccagttaaaaataaaaatttttggcctgttgtaggaggaacaatcctactaggtgctacttccagaaagtacatacacttacttaatattcaattagaaaaaagatcggttatatttatatgcttcgttgtatttctatgtattttaatcttttttgtgcttctgaatcgaaaattaaaattgaaagttttcgataataaaaaagaagaacaaaaaataattttagtaccaacattaaaaaatgctgttcttatattatatggctatttgttgattggaggcatgtcaatattagctttaagcatgttgctgacattagaaaaccagaatttaataacttttatagcttggggtatggggttaatgttgtttttcttgatgaatataacactcattgtcaataaaacagtcaaagttataaaaaggtga

SEQ ID NO: 413545 - DNA, 630 bp, Staphylococcus aureus; identical to SEQ ID NO: 406150

SEQ ID NO: 413546 - DNA, 621 bp, Staphylococcus aureus
atgctatgcgaatctaaaatcatcaataaaaacccaaaatatagaattattaaatataatgatgagtacttaatgatcgatataataagcacttggattagtttattttttccttttattaattggttcatccccaaaagatacgtcaaaattagtagagaagagtttgaaaatttaaatattgtgaaacctgctaaaaagaatgttttttggccagttgcaggtatctctactttattcgcagttacattaagaaagtatacacatttacttgacactcaacttgatagaaaattagttattgctatatgttgtatcacatttatagggattttaacattttatgtacgcctaattaaaaaatcatctttaaatatttataatactaaaaataaaaggtcaaaaattatcttaataccaacactaaaaaatttttgtttaacattgtttagatatgctttttttattttatggacagtgattttctcatatgctctattatcaatgagttatcaaaacataatagtatattttgcttggattacagcaataatgggtttttttctagtgaatatagctttaattatagataaaaacattcatgtcatacttaaaaattaa

SEQ ID NO: 413547 - DNA, 633 bp, Staphylococcus aureus; identical to SEQ ID NO: 406148

SEQ ID NO: 413548 - DNA, 630 bp, Staphylococcus aureus; identical to SEQ ID NO: 412232

SEQ ID NO: 413549 - DNA, 771 bp, Staphylococcus aureus
atgatgaaacgattaaacaaattagtgttaggcattatttttctgtttttagtcattagtatcactgctggttgtggcataggtaaagaagcggaagttaagaaaagctttgaaaaaacattgagtatgtaccctattaaaaatctagaggatttatacgataaggaaggctatcgtgatgatcagtttgataaaaatgataaaggtacatggattataaattctgaaatggttattcaacctaataatgaagatatggtagctaaaggcatggttctatatatgaatagaaataccaaaacaacaaatggttactactatgtcgatgtgactaaggacgaggatgaaggaaaaccgcacgacaatgaaaaaagatatccggttaaaatggtcgataataaaatcattccaacaaaagaaattaaagatgaaaaaataaaaaaagaaatcgaaaactttaagttctttgttcaatatggcgactttaaaaatttgaaaaattataaagacggagatatttcatataatccagaggtgccgagttattcggctaaatatcaattaactaatgatgattataatgtaaaacaattacgcaaaagatatgatataccgacgagtaaagctccaaagttattgttaaaaggttcagggaatttaaaaggctcatcagttggatataaagatattgaatttacgtttgtagagaaaaaagaagaaaatatatactttagtgatagcttagattataaaaaaagcggagatgtataa

SEQ ID NO: 413550 - DNA, 237 bp, Staphylococcus aureus; identical to SEQ ID NO: 413508

SEQ ID NO: 413551 - DNA, 240 bp, Staphylococcus aureus; identical to SEQ ID NO: 406971

SEQ ID NO: 413552 - DNA, 1989 bp, Staphylococcus aureus
atgtttaatgaaaaagatcaattagctgttgatacgctacgtgcactaagtatcgacacaatcgaaaaagcgaattctggtcatccaggattacctatgggagctgccccaatggcttacactttgtggacacgtcatctgaattttaatccacaatctaaagattacttcaatagagaccgtttcgtattatctgcagggcatggttcagcattattgtatagcttgttacatgtttctggtagtttagaattagaagaattaaagcaatttagacaatggggttctaaaacaccaggtcatcctgaatacagacatacagatggtgtagaagttactaccggaccacttggacaaggttttgctatgtcagtaggattagctttagcagaagatcacctagcagggaaatttaataaagaaggatataatgttgtagatcattacacatatgtattagcttctgacggtgatttaatggaaggtatatcgcatgaagcagcttcatttgctggacataataaattaagtaaattagttgttttatacgattcaaatgatatttcattagatggcgaattaaacaaagctttttctgaaaacacaaaagctcgttttgaagcatatggttggaattacttactagttaaagatggtaatgatttagaagaaattgataaagcgattactacagctaaatctcaagaaggaccaacgattattgaagttaaaacaacaatcggatttggttcaccgaataaagcaggaactaatggtgttcatggggcacctttaggtgaagatgaaagaaaattaacatttgaaaattacggtttagatcctgaaaaacgttttaatgtttcagaagaggtatacgaaattttccaaaatactatgttaaaacgtgctaatgaagatgaatctcaatggaattcattattagaaaaatatgcagaaacatatcctgaattagcagaagaatttaaattagcgattagtggtaaattgcctaaaaattataaggatgaattaccacgttttgaactgggtcataatggtgcatctcgtgctgattctggtactgttattcaagcaatcagtaaaactgtcccttcattctttggtggatcagcagaccttgctggttcaaacaaatccaatgtaaatgatgcaacagattatagttctgaaacacctgaaggtaaaaatgtgtggtttggtgtacgtgaatttgctatgggtgctgctgtaaatggtatggctgcacatggaggtttacatccatatggtgcaacattcttcgtatttagtgattatttaaaaccagcgttacgtttatcatcaattatgggattaaatgcaacgttcatcttcacacatgattcaattgcagtaggtgaagatggtcctactcatgaaccaattgaacaattagctggattaagagctattccaaatatgaatgttatccgtcctgctgatggtaatgaaacaagagtagcatgggaagttgccttagaatctgaatctacacctacttcattagtattgacacgtcaaaacttaccggttttagatgtaccagaagatgtagttgaagaaggcgttcgaaaaggtgcctatacagtttatggctctgaagagacaccagaattcctattattagcttcaggttcagaagttagtcttgcagttgaagctgctaaagatcttgaaaaacaaggtaaatcagtgcgtgttgtttcaatgcctaactggaatgcatttgaacaacaatctgaagaatataaagaatcagttattccatcaagcgtaacaaaacgtgttgcgattgaaatggcttcaccgcttggatggcataaatatgtaggtactgcaggtaaagttattgctattgacggctttggcgcaagtgcacctggcgatttagtagttgaaaaatatggatttactaaagaaaatatcttaaaccaagttatgagcttataa

SEQ ID NO: 413553 - DNA, 288 bp, Staphylococcus aureus; identical to SEQ ID NO: 406969

SEQ ID NO: 413554 - DNA, 468 bp, Staphylococcus aureus; identical to SEQ ID NO: 406968

SEQ ID NO: 413555 - DNA, 1122 bp, Staphylococcus aureus
atgaaaattatacatacagcagactggcacttagggaaaatattaaatggcaaacagcttttagaagatcaagcgtatattttagatatgttcgtagaaaaaatgaaagaagaagaacctgatatcattgtgatagctggagatttatatgacacaacatatccaagtaaagatgcaatcatgttattagaacaagcgattggaaagttaaatttagaactgcgtataccaataattatgattagtggaaatcacgatggtaaagagaggttaaactatggggcgagttggtttgaacataatcagttatttataagaacagattttacatcgattaattcaccaatagagataaatggggttaatttttatacactcccttatgctactgtgagcgaaatgaaacactactttgaagatgacaccattgaaacacatcaacagggaattacgcgctgtattgaaacaatagcaccggaaattgatgaagatgccgtcaatattttaattagtcatctgactgttcaaggtggaaagacatctgattctgaaagaccattaactattggaacggttgaatcagttcagaaaggtgtttttgatatatttgattatgtcatgctaggtcacttgcatcatccatttagtatagaagacgacaaaattaaatatagtggctccttattgcagtattcattttcggaagcgggtcaagctaaagggtatagacgtgtaacaattaatgatggcattattaacgatgtatttattcctcttaagccacttagacaattggaaattatctcaggcgaatataatgatgttattaatgaaaaagttcatgtgaaaaataaagataattatttacattttaaacttaaaaatatgtctcatattactgatccaatgatgagtttaaaacaaatttatcctaatactttagcgctgacgaatgaaacttttaattacaatgaagaaaataatgctatagaaataagtggaaaagatgacatgtcaattatcgaaatgttttataaacatataactgataaagaattatcggatatccaatctcaaaagataaaaaatattttagaaaacgaattgagaaaggaggattaa
